United States Patent Application Publication US 2005/0228172 A9 - sequence listing, part 45

SEQ ID NO: 174758 - DNA, 387 bp, Homo sapiens
cctggactgccagagctttctttgctaatgcttctcagcattgacccagacatttcacccatttggctcttgatatctcagaagaggccgccagacaaaatattcttgaagttatgccttgttctgttgaatggtttttacctgacccaagtctgtttagtttgatattttgagatttttaaaatggccaacatttttattctggcatttttatattcctggacccttcataggacactgtggactcatagtttccctctacttcaagcacacaaaaaaagtctttttctcctacagcttccytgccaaccacaaactacatcgatctttctcccttttgagctccaattgcatttatatgtatcatgtgttttgacacaatattac

SEQ ID NO: 174759 - DNA, 535 bp, Homo sapiens
tctttggaaggcttaccattgctctctagctaaacacatctttctggcctatggccccagggtcctctcccacctctccacctccatcataccctccccttccctgccccattccagtatcctcttataatatatactctcatgaaatatatttcactatttctgaaatatactaataatgtgtcttaaatactaataaaagatggagagtatcttcccttggaatatatttcccctgtttaatcaaattttgggtcatgttatttggaggtaactaatctttgaccttagaaagaaattaaaattaaattaattaaatgttcatagtttagtaattctatctttaatggcttaaaactctagcatccactgaataactgaaacrttactttctgtaattaaaaaaaaacccttcagtatcaatacctattaagtgcaaagccctgggtcattgctatgcaggacattaagaaaataaaacaagggccctgaccttaagaaatttaagatctagttaacacagagtagcacatgt

SEQ ID NO: 174760 - DNA, 453 bp, Homo sapiens
gttaaagtttttagattcttgcatagttctccataataacaataacatatgaagaggattctattattaaaagatacatgtgtaataaatgaacttcatctccctgaaaattttaaacaatacagcatgaagtaaaaagctcaaatgccctttacctatcttcaattctactctctttcccagaggtaatcactaagcggtactagccgctcagtgggtatcaatccaaaatgatttcaatgtatttataaaatagggtgcacgttacagttgtaaaagtgttttcttatatgttatmtcacttgtttcttatgaaaggtaggtatatccagatgtacgagatgagacttatggaggctcacttgcccagagtttctcagctggtcacttgctcagcagaagttgaattcttgatccaggtctctgaagcatgtgcgaggtattgctgtaagc

SEQ ID NO: 174761 - DNA, 544 bp, Homo sapiens
gtgtgtcttgaaaaataaatttgacaaagaagtttccttcttttaaaagtccctgagtatttcttatttcataggttctcaaagtttgttccctagacaagtagcattgacatcaccttggaacttgttagaaatgcaaatacttgggctccaggcctattgaataagaaactctgggggtagagcgcagcaatcatgttttgacaagttcttcagatgattttgatgctcaaggttgagacccactgtgtcatgattaatcttatgtcaacttgactgcataaggaatacctagatagctaaagcattacttctgggtgagtctgtgagggcatttcctgaggagattggtgtgtaagtcagtggaytgagcaggaaagatcctctctcaaaatgtgggcaggcaccatccagttggctgggggccagatagagcaaaaagaggaaaggatttctctttcacctggagccaggacactttttttttctgacatcagaactccagactcttgggcctttggagtccataatgtatgccaatggc

SEQ ID NO: 174762 - DNA, 658 bp, Homo sapiens
ataaatatgaacctcagagtaaataaaagaaaatgaaaatgtatagtaagataaaattatttgctttgagttggactttagaaaatcaaagtagggtttctracaaggtttaaagacttatgcaggttttgagatctttttatgatgacttgattttatttcctcatctgatttcacttagcattaagctaagaaatatatgcaagagcaaatccaagacagctgccaattgaaaagaaattaaaacatgaagaggtagagaaactaacataatatatacctttttgatctaagagcaccattttgcaggactcttggatttttggataaaaagttaatataagtaatgcaagtgttactgatttcctttcatccaattcatagaaaagaaaatgacatttctaggtgtgtttccccttccaagagaagataataactttctggttagcataaattccccctttccttttcctcaaaaagagacatactgaaaaaatagacatttctttctttctagcttaaaaacattatttattctgggcttctaaaaactataactataaaattaaagatttaggtataggctctcttttattggtttcctttaaacaacataatctatatgttttaaaactcatatctttatattgtaatatca

SEQ ID NO: 174763 - DNA, 658 bp, Homo sapiens
ataaatatgaacctcagagtaaataaaagaaaatgaaaatgtatagtaagataaaattatttgctttgagttggactttagaaaatcaaagtagggtttctgacaaggtttaaagacttatgcaggttttgagatctttttatgatgacttgattttatttcctcatctgatttcacttagcattaagctaagaaatatatgcaagagcaaatccaagacagctgccaattgaaaagaaattaaaacatgaagaggtagagaaactaacataatatatacctttttgatctaagagcaccattttgcaggactcttggatttttggataaaaagttaatataagtaatgcaagtgttactgatttcctttcatccaattcatagaaaagaaaatgacatttctaggtgtgtttccccttccaagagaagataataactttctggttagcataaattccccctttccttttcctcaaaaagagacatactgaaaaaatagacatttctttctttctagcttaaaaacattatttattytgggcttctaaaaactataactataaaattaaagatttaggtataggctctcttttattggtttcctttaaacaacataatctatatgttttaaaactcatatctttatattgtaatatca

SEQ ID NO: 174764 - DNA, 576 bp, Homo sapiens
gtggaagagtttatgaagaaccagccctttcactttgttgtcgaaaaccatgataaaagtaccagctcttagcagtagatttgagtctagatattactgtttctaagacatgtgcttatcttcacaattctctgtctttcaggacattagagctggaaaacatttgccgttgcagctatgaattattgactattcagcccagttgtaagctctaatgtcctttccttgcttacttcttctcttccacctgattcagcatttttacttttgagtagcattagactacagtaattattgtttgtggagttgtttccttgttaattttatttattaagacttctttcctatctatttcctcttatgacaaaggaatttcactgtggggagattttatgtggcctgaatttctgggtcttggctataccatcaatcatgtattcccacttccaccatcccyggccaactctaccctcttccttgactagagatcaaagcttgaaaactaaactgagcccaaagcaggaaaccccttgattactttttatgttgcggtaacaaatcaccacaaacttagtg

SEQ ID NO: 174765 - DNA, 592 bp, Homo sapiens
cacttttctgctaaacaggcccacagagctcgtattaataatgcattcctcagtcttgccaaagatacttcttattggccttcataagactgagatgccccatgtgataagttctcaagaggctgaaaggatgttataataattcttttgcttctgtactctttatagtaatgcaagcctacgtggtaatgtggagctgcctacagacacgttgctgtcgccaacacacagttcttacttcccctgtgcttccctcgtgtttccattagccatgtaatatagttttcacgagctaaatgattagcgtccagctgctcctgtgttaatgcttgtgttcagttcattaaaaaaaaaaaaaactctccataagtsttcttagttcatttaaaaactgtttaaagctcagagaatactgtttcttaatttttttaaaaaagtaatcattcagctcagggaatttttttctatggcagaactaaaaatctttatagatatcaatggttatttggaaaagttaaattggagtcaattcactgatgttgttaagcacaacagctactggagctatatttaaaaatgcgtttcgaagtgg

SEQ ID NO: 174766 - DNA, 592 bp, Homo sapiens
cacttttctgctaaacaggcccacagagctcgtattaataatgcattcctcagtcttgccaaagatacttcttattggccttcataagactgagatgccccatgtgataagttctcaagaggctgaaaggatgttataataattcttttgcttctgtactctttatagtaatgcaagcctacgtggtaatgtggagctgcctacagacacgttgctgtcgccaacacacagttcttacttcccctgtgcttccctcgtgtttccattagccatgtaatatagttttcacgagctaaatgattagcgtccagctgctcctgtgttaatgcttgtgttcagttcattaaaaaaaaaaaaaactctccataagtgttcttagttcatttaaaaactgtttaaagctcagagaatactgtttcttaatttttttaaaaaagtaatcattcagctcagggaatttttttctatggcagaactaaaartctttatagatatcaatggttatttggaaaagttaaattggagtcaattcactgatgttgttaagcacaacagctactggagctatatttaaaaatgcgtttcgaagtgg

SEQ ID NO: 174767 - DNA, 580 bp, Homo sapiens
  misc_feature (1)...(580): n = A,T,C or G
gcaacctcaagctcctgtgctcaagcagtcctcccacctttgcctcctgagtagctgggactgcaggtacctgatgttgtgctggctaatgtttttattttttgtagagatggggtcttgctttgttgcccaggctggtctcatactcctggcttcaagcagtcctcccacctcagcctctcaaagtgctgggattataggcatgagccattgtgcctggcctatgacttaattcttttggcagctcaraagatatatggtccaccatccagttgtatagtcccaacacatcaggtcctgaatgtattgcataactagcaatatgttatgctagtaacatattggtttgtacgtgttacgtaaagaatgatatttagtagatgtctggttttggggtatatctaaacttttactggaaccagataaaattatatcaaaggaacacagagaagaaagagaagattgtggctcattacatcttcattgctaacctcatgaatatctggcatcacacaaaagggcaattgaacttctcacatttnnnnnnnnnnnnnnnnnnnnnnnnnnnnnnnnnnnnnnn

SEQ ID NO: 174768 - DNA, 580 bp, Homo sapiens
  misc_feature (1)...(580): n = A,T,C or G
gcaacctcaagctcctgtgctcaagcagtcctcccacctttgcctcctgagtagctgggactgcaggtacctgatgttgtgctggctaatgtttttattttttgtagagatggggtcttgctttgttgcccaggctggtctcatactcctggcttcaagcagtcctcccacctcagcctctcaaagtgctgggattataggcatgagccattgtgcctggcctatgacttaattcttttggcagctcaaaagatayatggtccaccatccagttgtatagtcccaacacatcaggtcctgaatgtattgcataactagcaatatgttatgctagtaacatattggtttgtacgtgttacgtaaagaatgatatttagtagatgtctggttttggggtatatctaaacttttactggaaccagataaaattatatcaaaggaacacagagaagaaagagaagattgtggctcattacatcttcattgctaacctcatgaatatctggcatcacacaaaagggcaattgaacttctcacatttnnnnnnnnnnnnnnnnnnnnnnnnnnnnnnnnnnnnnnn

SEQ ID NO: 174769 - DNA, 378 bp, Homo sapiens
gaaaaccacaacttactagaacagaaactcacaagaagaaattctgtgcagaaccagtgcccagataggaaatgttgaaatgtaattgacaattgctggagactcagygtgaacacgtctgagagttaaaaactccagggagaatgagtcataggaggcccccatgtttttatgagttctacctgcaggagctctacaaaactctcatggtgaatatctaggaaaatcttttcatgcttctggcaggggttggggaaaagtaagcattctgaagtatgccagatcactctcttcttaataaggaataccctcaagagaaacaattttattatagcctaaattgctggggttttaccagagcctacttcagaaaaagga

SEQ ID NO: 174770 - DNA, 593 bp, Homo sapiens
gtattgatcctgagtgtgtctgtgagggtgttcccaaaggagattaacatttgtgtcgctgggctgggaaaggcagacccacccttgatctgggtgggcaccacstaatcagctgccaatacagccaggatataaagcaggcagaaaatcataaaaaggctagactggcatagcctcccagcatacatctttctcctgtgatggaggcttcctgtcctcaaacatcaactccaagttcttcagctttgggactcagactggtttccttgctcctcagcctgcagatggcctgttgcaggaccgtgtgattgtgtgagttaatactccttaataaactcccatatatatatatatatatacacacacacacacatatatacatatacatatatatacatatatatacacacatatatatacatatacatatacatacatacatatatatatatatatatatatatcctattagttctgtttctctagagaaccctgactaatatacccaggtactaagcctagtacccattagttatttttcctgatcctctccttcctctaacctccaccctccagttggccctagtatgtgt

SEQ ID NO: 174771 - DNA, 593 bp, Homo sapiens
gtattgatcctgagtgtgtctgtgagggtgttcccaaaggagattaacatttgtgtcgctgggctgggaaaggcagacccacccttgatctgggtgggcaccacctaatcagctgccaatacagccaggatataaagcaggcagaaaatcataaaaaggctagactggcatagcctcccagcatacatctttctcctgtgatggaggcttcctgtcctcaaacatcaactccaagttcttcagctttgggactcagactggtttccttgctcctcagcctgcagatggcctgttgcaggaccgtgtgattgtgtgagttaatactccttaataaactcccatatatatatatatatatacacacacacacacatatatacatatacatatatatacatatatatacacacatatatatacatatacatatacatacatayatatatatatatatatatatatatcctattagttctgtttctctagagaaccctgactaatatacccaggtactaagcctagtacccattagttatttttcctgatcctctccttcctctaacctccaccctccagttggccctagtatgtgt

SEQ ID NO: 174772 - DNA, 363 bp, Homo sapiens
gagctctgctaagggtcagattgtctcttcaagtgggtccctgaccgccgtgtatcctgactgggagacacctcccagtaggggccgacagacagctcatacaggagagctstggctggcatctggcagatgcccctctgggacaaaacttccagaggaaagaacagtcagcaatctttgctgttctgcagcctccactggtgatacccaggcaaacagcatcgggagtggacctccagcaaactccagcagacctgcggcagaggggcctgattgttagaaggaaagctaacaaaaagaaaggaatagcacgtccactcaaagaccctatccgacggtcaccaacatcaaagaccaaaggta

SEQ ID NO: 174773 - DNA, 363 bp, Homo sapiens
gagctctgctaagggtcagattgtctcttcaagtgggtccctgaccgccgtgtatcctgactgggagacacctcccagtaggggccgacagacagctcatacaggagagctctggctggcatctggcagatgcccctctgggacaaaacttccagaggaaagaacagtcagcaatctttgctgttctgcagcctccactggtgatacccaggcaaacagcatcgggagtggacctccagcaaactccagcagacctgcggcagaggggcctgattgttagaaggaaagctaacaaaaagaaaggaatagcacrtccactcaaagaccctatccgacggtcaccaacatcaaagaccaaaggta

SEQ ID NO: 174774 - DNA, 379 bp, Homo sapiens
tgggccagaagtttctccagttgagggaatcatggtagaggttaatcagtcatctttatgacctggaagagtgtgaggctggtgtcctcctcctattctgtttctgctcccaccatcctgccctctgatgggctctccatcctacatcttcctgttttattggcatcacttgatgcatagccttatagtaagccataagtacttgtaagcctagtcatgtctgactggggttatycaaccattttgatgtacttttctaagtgggataaactgaaggtattctttgtacaggcctttactaagctctgcatttttgagtatttgcacttcagggatttttcttaattgtaaagaacctacagagacttttataacctca

SEQ ID NO: 174775 - DNA, 572 bp, Homo sapiens
gcctaacaaaggctattcatgaagctaggatatgggaattctcagaaattatatccttcctattcatatgatgagaagtgtggacaaaaggcatcactcctccaaccctggagatcccttccctccctcatggtatggtcctctgctccattttgaggcatatcatcttataggagaaaggtaaggtcccagtactaacaggggaaaatgcttaggactctaacaggttttgagaattcatcagtaagggtcactaaatccgatttttctgtcctgtttgtggtctaagaggaaagacaagggtgcaggtcttcragaatgtgttggtaagggccactaaatctgaccttcattggtcctctttgtggtctaggaggaaaactagcatttctgctgctgcattggtgagctcaactattctgatcagcagggtccagggactgttatgggttcttgggcaagagggggatctgctactgcatcagtgagcacaactattctgatcagcagggtccagggaccattgcaggttcttgctcggggggggaaaacaaacaaatcaaaaccacggg

SEQ ID NO: 174776 - DNA, 595 bp, Homo sapiens
atctgctactgcatcagtgagcacaactattctgatcagcagggtccagggaccattgcaggttcttgctcggggggggaaaacaaacaaatcaaaaccacgggcattttttttttcagctgggaaacactcctcaggcatcaacaggttcacccttgaaatgcatcctaagccattggggccaatttgacccacaaactttgaaaaagaagtggctcatttttttctgcaccatggtctggccccaatattctctctctgatggggaaaaatggccacctgagggaagtataaattacaatactatcctgcagcttgaccttttctgtaagagggaaggcaaatggagtgaaataccttatgtccaacccttcttttcattgaaagataatccacaactatgcaaagtttgcaatctacatcccacaggaggacctctcagcttacctccatatcctagccttcctacagctccccttcctrttaatgataagcctcctttaatctcccccacccagaaggaaataagtaaagaaatctccaagggaccacaaaaatccctgggctattggttatgtcctcttcaagctgtaag

SEQ ID NO: 174777 - DNA, 531 bp, Homo sapiens
gttattgtaaggcttaaatctaaaaaagaaaaaagcttaaatagaaaagataatgctatgcagcgcttagtacagtgtgtgaccacragaaagagctttgtagctcttagttgccgtcatcttgtcattgatgctggtgacatttgtatgttgaagaagctgtcctgagaatggtagtctggctgtgactttagagtgattactgtggcctcacaaaagaggcttcccccagggcactcctgctgggccttcagtcaagcttcagctcagctgtctgccgacgcttataatctgacactctgagactttttccaggaggccttgagactttttcttcctgggtcaggatgcacagaagcttcatcaggagatgagcctcttaatattcaaggagctgatgaaataaactttttcttggagtaaaaactcagcaagaaccccagaactctctacctacccacaaatagcagtttctagaagtacagctctacacaaaaggctccgtttggtccatactaactttgctagacc

SEQ ID NO: 174778 - DNA, 362 bp, Homo sapiens
tcagattgttccacaaaggtctttacattctcactttgctttaaagaaataaacttgtaaatcccaggagacggtgcatgtaagtttttcctgcaacaaagacaatgtgaactctgactaytgaaccaatttaaagtcaatcacactacaaagccttggcatcaaaagcttagaagtggatccagtttatacgttgtaagtgacaatcaaaatttaagttatgtatacatcattttatttttattttcttttattttttaagtttttttttcttttattattatactttaagttttagggtacatgtgcacattatgcaggttagttacatgtgccatgctggtgcgctgcacccactaact

SEQ ID NO: 174779 - DNA, 623 bp, Homo sapiens
ggtgctcagtttttgtcagtggggtcttgttttgtttcttaatctttatgtgtacctcagtttccagaactgtgttctcagtctctactctccactctatgcatcctattgtctgccttgaactggatctagcttctcatttctatgagaccagacctgaccctgcccttctctgttctcctggagctcaaatttctctcctgaagtcctattacctgtagatttccaagcagtcaacctgtagtctgtctaatgccacctttacatctgctggtcagagtcaagggtagaataaagtaattgttttcatatttcttktaagaaactgcttgtctgttttactgtcaacagcttggaacatctacattagctctgaaaacagggcacgttgaaacctgtacctacctaagcaaaagcatatgtatatataaatatatttataaatatatatttatatttatataatataaaataaaagcatataaaataaaataaaagcatatatataaacatgtatgtttaaacagtgaatctgatcacagctgatgcaaaggtaggactcactgaactatctgtggtctgatattctacttgaatgtatttgcaattaagtagcagtcttc

SEQ ID NO: 174780 - DNA, 645 bp, Homo sapiens
tatttattttgagacggagtctcgctctgtcgccgaggctggaatgcagtggcgaatttgtatgtatttctaaaaagcctttcttctggggggaaaaaagttttgtgtttcagtctgaaatactgctaattggaaacccagtcctgtcatggaaatgctgctatgtcctgttttttgcayacattcaatgctaatgtgtctctcctggcctcagcttcaaggaatgtcttaagctatgaaatgatgagcttcctctctttttgttggaagcaattccacatttccttgaatcagtttttggctcaggttactactgcacagttatgactatttttagtgttttttttttcttttatactttaacatgttccccagaattattctaaaatagctgaatgatcatataattattttctcttcttgtgaaattcatcttccattgcttttggtgttatctctgttctctaaaacattgaataaaggacattcattcattcattcattcaactattgtctaccactggaattggcgaacagaggctttctgcctgtatctgtaccatttgcaggctaagaatgctttttacatttttaaatgattgggaaaaaattgaaagaagagtaatattttgcgacacatgaaaa

SEQ ID NO: 174781 - DNA, 619 bp, Homo sapiens
caccttaccccagaatgacctcatcttaactaatgacatgtgcaacaatgctatttcccaaaaggtcgcattctgaggttttgggagttaggatttcaacacatgttttaggggcacacaattcaaccatactagctcttcaggaaatttgactcaaaagatttcaggcccgaaagagttttcatgtctcctggctaatacggcgaaaccccatctctactaaaaatacaagaaattagctgggcgtagtggcaggcactgtagtcccagctactcgggaggctgaggcaggagaatggcattaacccgggaagtggagcttgcagtgagccgagatcgcgccactgcactccagcctgggcaacagggcgagactccatctcaaaaaaaaaaaaaaagagttttcctgtcaatgaaaatcacaggcacaccctgttttttgtgcttctccttattgtagttttcagatactgcaaattttctttttaacaaattgaacatctgtggcaaccctgyatagaacaagtctataggtgccatttttctttagtttatttcataaatattttttatttcaatagctttagaggtacaggtggtctttggttacatggatgaa

SEQ ID NO: 174782 - DNA, 517 bp, Homo sapiens
tgttatatctcctccccccccacttctgtcctatttctcctcttctgacctaatactcatgtgcacccttcccgtttaaataggttagaggtgatgcccacactctgaagcagcaagtcagcagggagaataactgggatcaaaactccacttcactgcagaayttaaatgcagaaaagcaaagctgcttttgcctaatacatcttttatcttttcttcatctgccaaagcatgcttggcattaagtaagagcttaattcttaaaattggatgcagaattttgcacgttactgcatttttctccctagctttcatcagaaccttgaagagagaaatttctccccaaagataaagaactgctaatgtgatgggctgtttttactctgtgacatcgagtgactcttgggattgccctcatgaagtgaattcagggcacctccaacacctaatctttggatatttgacaacttcagctaaataaagaccaaagtttgccctctgcctatgttccattgga

SEQ ID NO: 174783 - DNA, 508 bp, Homo sapiens
ccccccccacttctgtcctatttctcctcttctgacctaatactcatgtgcacccttcccgtttaaataggttagaggtgatgcccacactctgaagcagcaagtcagcagggagaataactgggatcaaaactccacttcactgcagaatttaaatgcagaaaagcaaagctgcttttgcctaatacatcttttatcttttcttcatctgccaaagcatgcttggcattaagtaagagcttaattcttaaaattggatgcagaattttgcaygttactgcatttttctccctagctttcatcagaaccttgaagagagaaatttctccccaaagataaagaactgctaatgtgatgggctgtttttactctgtgacatcgagtgactcttgggattgccctcatgaagtgaattcagggcacctccaacacctaatctttggatatttgacaacttcagctaaataaagaccaaagtttgccctctgcctatgttccattggaaaaa

SEQ ID NO: 174784 - DNA, 621 bp, Homo sapiens
actatataaaagtaatttgatgtgtcagataaaccaaatgatgatagcaataacaatatgaactattatcatttattcatacatattttgtgggccaggctaaatgtatgaaatttctatctctatatcatctcattcaatgttcacaaaaaggcttgcaaaatattgttagctgacttttaaaagtaagaaaaccaaaactaagatactttagcctttatgttttcttcctcatattctacatcttaagtttagatgctgaaaagtagacattctcatatactgttggtaggagtgtaaatgcgactgtagataattttgcaatgaatcaaaattgaatgtaagtataacatatattataacctttttcaaaaaatggactatatatagccatatttatgcatgtgtatttttatatgygtgtgtatataaaaacagcaattacatttattttttctttgggcaaacattatggaaggatatgcatggttgtctctaaggaatgaccctggaaatggagtagaaaaagagggcttttgttggtaactttatagtcatctgaacttttaatatattactttttgccaaaattatatattacatttacagtataaaaaacta

SEQ ID NO: 174785 - DNA, 539 bp, Homo sapiens
aattaattaatttctaccatagtcatttataaaattttcaaaagaaattatattcaaattggctttgagataaatgcacacttatataaattgtcacaggtacatctggttgggactggtgtcatgggcagtaaaataatttaccaagacagtcatgggcgaagaaaggcagatttattagaaaagacaggagatacgttgcaagagtgcaatgggcagcacagcagagaaagggctgtctgccaagaggcagggactgaagggaagtactaggtaggttgtactggagggtctatatgcagataaagtatgcagataaggtcttgctgctggggctgtgtgcagaatgaggtatttgggaataggatgtcataccagtgggttgtgtgtgattagccrtttctcagaacaattgttctcctccatctgggacctcttcctggttgctgcttacttatcttctcaggactccacatttagtactcctaaaagtctcagaaatataaaaactaacccaaatgcttttcaagttcatgtgg

SEQ ID NO: 174786 - DNA, 539 bp, Homo sapiens
aattaattaatttctaccatagtcatttataaaattttcaaaagaaattatattcaaattggctttgagataaatgcacacttatataaattgtcacaggtacatctggttgggactggtgtcatgggcagtaaaataatttaccaagacagtcatgggcgaagaaaggcagatttattagaaaagacaggagatacgttgcaagagtgcaatgggcagcacagcagagaaagggctgtctgccaagaggcagggactgaagggaagtactaggtaggttgtactggagggtctatatgcagataaagtatgcagataaggtcttgctgctggggctgtgtgcagaatgaggtatttgggaataggatgtcataccagtgggttgtgtgtgattagccgtttctcagaacaattgttctcctccatctgggacctcttcctggttgctgcttacttatcttctcaggactccacatttagtaytcctaaaagtctcagaaatataaaaactaacccaaatgcttttcaagttcatgtgg

SEQ ID NO: 174787 - DNA, 412 bp, Homo sapiens
ttttttttctcaacactttgaagatattgtttaaatgttttcttgaactcagtgtttttaatgaggagtatgtaatcagtctttcttttttattttttgagacagattatcaccccgtttcccaggctgaactgcagtggtgcgatctcggctcactgcaacctcagcctcctgggttcaagagattttcatgcctcagcctcccaaatagctgggattacagccctgtaccaccacrtctggctaatgtttgtgttttcagtagagacagggttttgccctgttggccaggctggtctcaaacccctggcctcaagtgatctgcccacctcagcctctcaaagttctgggattacaggtgtgagccaccgcacccagcctggttatcaatcattcttgctcctttgtaagt

SEQ ID NO: 174788 - DNA, 417 bp, Homo sapiens
ttttttttctcaacactttgaagatattgtttaaatgttttcttgaactcagtgtttttaatgaggagtatgtaatcagtctttcttttttattttttgagacagattatcaccccgtttcccaggctgaactgcagtggtgcgatctcggctcactgcaacctcagcctcctgggttcaagagattttcatgcctcagcctcccaaatagctgggattacagccctgtaccaccacgtctggctaatgtttgtgttttcagtagagacagggttttgccctgttggccaggctggtctcaaacccctggcctcaagtgatctgcccacctcagcctctcaaagttctgggattacaggtgtgagccacygcacccagcctggttatcaatcattcttgctcctttgtaagttgtct

SEQ ID NO: 174789 - DNA, 498 bp, Homo sapiens
tgaagaaaggtgctataaacatctgtgtgcaagtttttgtatagatatacaaactctattagttaaatatcaaggaacataattactagattttatggtaagagtatgtttatatttgtatgacactgacaaactgtttccaaagtagttatactattttgcattctcacaagcaatggatgcaagttcctgttgctycacattcttgccagcatttgatgccagtgttctggatttcatccattcaaatgggtttgtaaaggtaacttattgttggtttaatttccatttatttgatgacatatgaagtagaacaccttttcatatggtaatttgccatctgcgcatctttagtgaggtgtctgttaatgtctgtggcccactttttaattgggttgttagctttcttattgttgaattttaagagttctttgtatattttggataacagtccttataagatatgtcttacgtctttctctcagtgtgtgattctct

SEQ ID NO: 174790 - DNA, 433 bp, Homo sapiens
ttctgacctacttcatttaccttttctttaaagaatttcttttaacatttcttgcaaggttgctctaccggcatcaaattccttcaatttttttgttcgtttgagaaagtctttatttctccttcacttttgcrgaataatttcgcagggtacagcattctagattggtaggtcttttcccctcaacactaaacactttactctttctttgtttgcatgatttctgaggagaagctggatataattcttatcttctgtaggtaagccagttttctttttgtttttctggcttcatcaaaatttttcttcatcttttattgtctgaagtttgaatacaacatcctagatgtagtttttgtttgtctgcttgacatttatcctccttggtttctctgagcttcctaaatctgtagtttcatgtctgataataatt

SEQ ID NO: 174791 - DNA, 418 bp, Homo sapiens
tccctgccatatctgagtctggtttagatgttttaactgtttcttcaaagtatgtttttgtcttttagtatgccttcaaattttttcttgattgcagggcatgatgtattgggtaaaagaaattgctcttagtaggcctttagtaatgtggtgatatggtggggaggtgaagcattgtgtaggcttctgagtaggtctcrgtcttttgatgagcctgtgtctctagactgaatttcatatatgtttctcaagtccctcccactgtctgcccattaggtaggacaggatggctggtgtgggctggagtttggtgattctcttctgccacatcacttaggctctgaaaaaacctccacagattaggctttggttgaatagtttctgctgaaggcagatcttgttaggaagaacagaattc

SEQ ID NO: 174792 - DNA, 395 bp, Homo sapiens
tagatgttttaactgtttcttcaaagtatgtttttgtcttttagtatgccttcaaattttttcttgattgcagggcatgatgtattgggtaaaagaaattgctcttagtaggcctttagtaatgtggtgatatggtggggaggtgaagcattgtgtaggcttctgagtaggtctcggtcttttgatgagcctgtgtctctagactgaatttcatatatgtttctcaagtccctcccactgtctgcccattaggtaggacaggatggctggtgtgggctggagtttggtgattctcttctgccacatcacttaggctctgamaaaacctccacagattaggctttggttgaatagtttctgctgaaggcagatcttgttaggaagaacagaattct

SEQ ID NO: 174793 - DNA, 637 bp, Homo sapiens
tatatgagggcaggctggtgctaaaatgtcttcgccaatgaaatattatgtggatttttgtcttctgttgaacttcttgtacctcgtcagttcagctcatgtgctacctcctctcccaaggagtcttctcagtacagattttcctgcctccatctccgtcttcaatggtcagaactaaactaactccctggagggaaatcccctctcactttatagtgtcctattgcattgtgtcataggtgataagacaggtcagggatgatagactgtattcctagcacttggcacagagtctgagaagcagtaaataggtgattgctcaataattgttttcaaaataaaaggagtaacatccttaaagacaaggtagataaatgtgagcttaatgacaatacagtcaaatgagtttgtaattgattgaaatgtctttctcaataatggctgattaatggattgactccagcctgctgggaggtctgtgctgatggccaataatctcataaggcagcccaggyggcaaatacacacaccactgcctctactgcttctgtccactccatattcttctttcttcttctaatttacctttgtctctcaatattacagtcatgctctaatttccaaggctcagtacccg

SEQ ID NO: 174794 - DNA, 590 bp, Homo sapiens
gaaggtagtgagagctccagaatattacattattacattatgccagtagcatccaaggggccatgaggaatttctagtcactagaaatgaaagaggtacaaggaagaggacaagggggaaggaagcctttatgagaccttaccctgtcatgcagatttgcaacatcctggttggtgtgtgtgtgtgtgtgtgtgtgtgtgtgtgtgtacgttttcccagagcagatttatgcttttggcatctaaacatttacaacactctgtatatgtaacatacaatattctctctcaaactcatttcagtacaaagtgagttagaaacaaatttaaggagaaagtgtagtattgttattaaatgtagttattaggttggtgttaaagtaattgcagtttttgccattacctttgataactgtattattatgtataccaacatctcagyctatgaacatctcaggtatctgtgagaactgtagtatcctctttgataatcatcaatcactaaatgagacaaaatataaaaactgtaagtcaagatgatgggctacgtgattagtttttctagaaaaataatgcctaagaaatatttat

SEQ ID NO: 174795 - DNA, 574 bp, Homo sapiens
ttagttaggcgctactttacttgaatctctgagtgtcagatttttactgtgtatatgtacaattcttttctaaaagagcagagaaagctataaaatataatttaaagaattgtattaaatgataggctattgcacatccaatgcataatgcaaaaaaacagacacactggttatgggttgaaatatcatgaagaaatgtgaagagtctaaccactccatgctaacagagttaccaagtttctacaagtagaattttataaatataagcaagagrcgtaagagagaaagagagaatttgtgcctggcctatatatcatcaatgacccaaggccagtagaatagcctgcctgtatggcatagacagtagctaaaggaaaagtttcttaaaggaagaaggaagaacgataaacaggaaacacaatctcattctcccttgggttttgctctcccatggtttgctcttatttacagagcccctgagactacttcaagtgctaagagctttacgcggcttaactcatttttcctcaccacatccctatgaagaagtcacactattatcatcctcatgtta

SEQ ID NO: 174796 - DNA, 300 bp, Homo sapiens
tcacttgttatttactttaatgacatgtcatatttggacaaacacaaagctaagcctgsaattccaatatcttgggaaatgaaagataaaagcagtcagaaaaaagtagaactatgaagacagttttataaactagctactaattcttttctttttagatttaccattaatctcttccactattatgccatctgtaaacttgattggcttgttgtctattttaaaaccacgttttaaggcaaaaacagtgttggcttgttgttctcagtgacttcattttctgaataaacaagactgaac

SEQ ID NO: 174797 - DNA, 616 bp, Homo sapiens
aattgacattatgtgatttgctctatgtcacatatctggctatgacacatgtaaaatgttaggtttctaacatcattcaattctcagtatttttctatcactgttaacctgacaaatgcatccactttggacattttaagtgtttgtgaaaaattaatgcatcctcaatgcttgagaatgttcatctttatggaaaccaaatagtattttaaaagcaggatttkgggaaataatttgtatttgattttttttttttggtcactttttcaatggatgaccttactcaaactgcttaatttctttgagcctcagctactttgtttgcaaaatgaaaggactactatctaatccacaggactattttgagactaaatgagataaacgcaagttgagactagctctcagcctgtatataatgactattcaatcagtgctagtttccttccctgtactgcttatgaaaaaatcagtcagttatactataggcctgttgtgatgtattcaattgtgttcctcccacctcaaaattcatgtgttgaagttctgatccccaatacctcaaagcaaatttctgctgtttaagccaggggtccccagtccccaggccacgaactgg

SEQ ID NO: 174798 - DNA, 483 bp, Homo sapiens
ctggtctgttacttatttaaagctctcctttgatgttaggtaagaggatgttgggaaggggaaacccaggacrgagatctgagggaacttacccagggcaggggaaattccctgttccattctgctccggggcagatgcacaatccaggcatgagtctccagaagtcctttccttccttaaaagcacctctattattgcactgtttgtactctcctcctttctaatactgatgctggtaaagctgtttaagcaaaaggtcagtaacataaaacttaaatcttaaatatatattccataagttaatgggatcctgagttccaacgtagaggatggaaacattttgtcaagcattgaaggtagtatataaatgaacatttctttatttggaagtgtagtctctggggccaaatgccttctgctcaaggatggtagaatattgcaaaatgttctcaagtacagccaaggtccaaatatgctttaag

SEQ ID NO: 174799 - DNA, 483 bp, Homo sapiens
ctggtctgttacttatttaaagctctcctttgatgttaggtaagaggatgttgggaaggggaaacccaggacagagatctgagggaacttacccagggcaggggaaattccctgttccattctgctccggggcagatgcacaatccaggcatgagtctccagaagycctttccttccttaaaagcacctctattattgcactgtttgtactctcctcctttctaatactgatgctggtaaagctgtttaagcaaaaggtcagtaacataaaacttaaatcttaaatatatattccataagttaatgggatcctgagttccaacgtagaggatggaaacattttgtcaagcattgaaggtagtatataaatgaacatttctttatttggaagtgtagtctctggggccaaatgccttctgctcaaggatggtagaatattgcaaaatgttctcaagtacagccaaggtccaaatatgctttaag

SEQ ID NO: 174800 - DNA, 483 bp, Homo sapiens
ctggtctgttacttatttaaagctctcctttgatgttaggtaagaggatgttgggaaggggaaacccaggacagagatctgagggaacttacccagggcaggggaaattccctgttccattctgctccggggcagatgcacaatccaggcatgagtctccagaagtcctttccttccttaaaagcacctctattattgcactgtttgtactctcctcctttctaatactgatgctggtaaagctgtttaagcaaaaggtcagtaacataaaacttaaatcttaaatatatattycataagttaatgggatcctgagttccaacgtagaggatggaaacattttgtcaagcattgaaggtagtatataaatgaacatttctttatttggaagtgtagtctctggggccaaatgccttctgctcaaggatggtagaatattgcaaaatgttctcaagtacagccaaggtccaaatatgctttaag

SEQ ID NO: 174801 - DNA, 587 bp, Homo sapiens
tattttgcaagttggcatgtcagctagtgggcctacagctgagctcatgttctccaaggcctacttgtctaaatgagtcagggaaaccaatcacccccctgttgttttgcatgacctaaaagccaacactcccacagggcagtggtggatgtaatttctggcacccatacaaaaatgttgtgaaacatttgcagtctctttagaatcttgtaaggtaaacagcataccacggtctgctggggcagcacgttgaagtccaactgagaagaataactgactgtggtagaggtttactagtatgatgaggaaagtccaaggcgagtaccaacctatgcattctatagactattcctgtgtattccagggaggaatagtgttctcctctgaaactattgccagttagtgtttaaaggaagttttgttgagtgcacagataaacgtctagtgtattcatcaccaaggctttaatgaaaacattccctttacctgaaaggtcatttatccaacaaatgcattattttttacagctttattgaggtataattgatattcaatraacaataaatatgtaagctgttcaatttgat

SEQ ID NO: 174802 - DNA, 421 bp, Homo sapiens
gttgttgaacaaattaataactggatagatacagagtgcctactatgtgttgtaagctttgtgaggtgctggacatggagggaacaacgaaatggatatgagccttgccctccttggggggatgcwtgttgaacaaacagaaagacaaatgaatgcatacaccaatgtgcaatttaatgtggggagatggaaaaaatgaaaatgttaaaagtgctatggagcaaataaatggggactgaggtgttttccaaatttctattaaaaagtcagggaggacctctttaaggaaatgacatcaaagctgacaccagggggataaaagtagtaagtctaggaagccagactattttgttgcctggcacacctaatagccaatcttgaccatcctaatccaaaatattttctcccttcttgccacaat

SEQ ID NO: 174803 - DNA, 594 bp, Homo sapiens
gggaaattctctgtattataagatacagaggcagggaaattccaagctcaaatgaaatcccaatagctcaaaatatcatagagaactcaggctctttctacctttcttttgtcacctaagaatgttgggttttgttcttacgtttttccctagtggttgcaagatgactgtcaaatctcttggcatagtactttttacactttattttttaaaaggctcaaaggtggcaacttttctcaaaattatctttaccaaaaagagtaaccatgctcttcttgccccattttccccatttctcacccccgtctcaacaagattcctggtaggttctggtgaccggggctgagccacacacctatgctctaaatgcaaaggaggttgggaaartgtgtgcctggcatttccagtctccgtgtgagatggtagagtctgtctgcttggaggaagtgtgggtgcaaagcagggaagaagtaagtagagtgattgctgggtaggcctccaacacggtctttcaaaacaagaaaagaagaaaaggggagttattcatggatctcatgttcaggacctggcacagtgctttgctttctgcattgc

SEQ ID NO: 174804 - DNA, 633 bp, Homo sapiens
tttctttgcaactctatatacacaattacttgcccaatatctgctttctccattagactatgggtccatggtgaaaggaatagtgtctatcttgcttttcacactgtcctgatgcctagtgccagtggaatgcccattataaagaaataaatatctgtggtgcttctagttcctacagtggcaccttggttttacaaaagggcatctggactctatgtgtaaatacaaagtgtccatttgcaatcattttcaaaataaagtaagtctcagaagctaaagaaaggggaagcaaaattcttcctatataaagtatttactgtgttcaagacatatacgaagtcttatcttctgataatgctgtatcatctaaaattagtattatctacatgtttstctatcttcctgtacagaccacatataaaaatattttactatttaaatttatggatacttctaaatagaaacatatattatttagtggaaaccctgaaatttaactcattgctagtatgtttgttattaattaaatctttgacaaaataaaaagggctaggaagaataaaaatgtccccatattaatggcagcattatttatactagcccaaaactaggatgattaaatcaattgtggtg

SEQ ID NO: 174805 - DNA, 633 bp, Homo sapiens
tttctttgcaactctatatacacaattacttgcccaatatctgctttctccattagactatgggtccatggtgaaaggaatagtgtctatcttgcttttcacactgtcctgatgcctagtgccagtggaatgcccattataaagaaataaatatctgtggtgcttctagttcctacagtggcaccttggttttacaaaagggcatctggactctatgtgtaaatacaaagtgtccatttgcaatcattttcaaaataaagtaagtctcagaagctaaagaaaggggaagcaaaattcttcctatataaagtatttactgtgttcaagacatatacgaagtcttatcttctgataatgctgtatcatctaaaattagtattatctacatgtttgtctatcttcctgtacagaccacatataaaaatattttactatttaaatttatggatacttctaaatagaaacatatattatttagtggaaaccctgaaatttaactcattgctagtatgtttgttattaattaaatctttgacaaaataaaaagggctaggaagaataaaaatgtccccatattaayggcagcattatttatactagcccaaaactaggatgattaaatcaattgtggtg

SEQ ID NO: 174806 - DNA, 509 bp, Homo sapiens
gggcatccaataaatgctaacacagtaaaaatcttagttgtaatagcgatgggctattaattagaatgatgaaatcaagtcaagcatttccaagttaatttttttttttttttttttttttttgagacggagtctcgttctgtcacccakgctggagtgcagtggcacgatcttggctcactgcaacctttgcctcccgggttcacgcttttttcctgcctcagcctttcaaatagatgggactacaggtgcctgccaccacgcctggctaatttttttttttttttgaatttttaagaaaagacggggtttctccatattagccaggatggtcttgatctcctgacctcgtgatccacctgcctcggcctccaaaagagctgggattacaggcgtgagccaccgtgcctggccaagttcttaaatttttaccacaagatcacatgcacaagatggtaaaaaatcacttggcttttatgaacttctattcatgcgctatctcagcaaaa

SEQ ID NO: 174807 - DNA, 536 bp, Homo sapiens
gattattctaggggaatacctaagatactggcctttgtaacctagatttgagccccaactccaatttttcctagctctgtgacctcagactagttgcctaacctatttttgtttccattttttgttattcctataatgaggataataatcacatctacctcaaagtatcataacggttattataaagattgaattagataaaagatgtaaaacactaaaaatagtgtccggcacatagtgctcattaagtgtcattatcatctgaggttctcatggggacgtttgtatgagcacaaggcaaatctagattgtaagctcctgagggcaggaactacwtatttttctatggtattcgctgaagcttttagctcaaattctggctctccctgcaaaggagcgatggtggtaatttggggattcaggggattggtaattagctgtaagctggagacaggttggggcaccatttatctagaatcacaaaatagactgtgtattgattgtgcatctcagggcctaactgtgggccctttatt

SEQ ID NO: 174808 - DNA, 536 bp, Homo sapiens
gattattctaggggaatacctaagatactggcctttgtaacctagatttgagccccaactccaatttttcctagctctgtgacctcagactagttgcctaacctatttttgtttccattttttgttattcctataatgaggataataatcacatctacctcaaagtatcataacggttattataaagattgaattagataaaagatgtaaaacactaaaaatagtgtccggcacatagtgctcattaagtgtcattatcatctgaggttctcatggggacgtttgtatgagcacaaggcaaatctagattgtaagctcctgagggcaggaactacttatttttctatggtattcgctgaagcttttagctcaaattctggctctccctgyaaaggagcgatggtggtaatttggggattcaggggattggtaattagctgtaagctggagacaggttggggcaccatttatctagaatcacaaaatagactgtgtattgattgtgcatctcagggcctaactgtgggccctttatt

SEQ ID NO: 174809 - DNA, 536 bp, Homo sapiens
gattattctaggggaatacctaagatactggcctttgtaacctagatttgagccccaactccaatttttcctagctctgtgacctcagactagttgcctaacctatttttgtttccattttttgttattcctataatgaggataataatcacatctacctcaaagtatcataacggttattataaagattgaattagataaaagatgtaaaacactaaaaatagtgtccggcacatagtgctcattaagtgtcattatcatctgaggttctcatggggacgtttgtatgagcacaaggcaaatctagattgtaagctcctgagggcaggaactacttatttttctatggtattcgctgaagcttttagctcaaattctggctctccctgcaaaggagygatggtggtaatttggggattcaggggattggtaattagctgtaagctggagacaggttggggcaccatttatctagaatcacaaaatagactgtgtattgattgtgcatctcagggcctaactgtgggccctttatt

SEQ ID NO: 174810 - DNA, 326 bp, Homo sapiens
cttatgtcttcagagtttcaatccataattatctattgagcatcttctatgagccacgcactatgcccaacactggcayagtgttgtcaacaagaaatcagacagatgtagttcctcccctcttaggacttacagtctggtggaggaagacagagttaaataagcattaactttaaagtaggggaagtgcattaagctatgggtcacctagcaggctgagtgaacaggacggactgggaacggtttctggaggagcagctatttcatattgaaaactgcagggtaagtagtgaatcaaccctgggtttgtgggtgggattgggaat

SEQ ID NO: 174811 - DNA, 326 bp, Homo sapiens
cttatgtcttcagagtttcaatccataattatctattgagcatcttctatgagccacgcactatgcccaacactggcacagtgttgtcaacaagaaatcagacagatgtagttcctcccctcttaggacttacagtctggtggaggaagacagagttaaataagcattaactttaaagtaggggaagtgcattaagctatgggtcacctagcaggctgagtgaacaggacggactgggaacggtttctggaggagmagctatttcatattgaaaactgcagggtaagtagtgaatcaaccctgggtttgtgggtgggattgggaat

SEQ ID NO: 174812 - DNA, 548 bp, Homo sapiens
gtgctgaataacttgttaatgatgaagacactggcatagacaggaaaaaaaaaatatcaagtttagaaataaacttttttctggcatatacttatttattcttacatgtatttagtaactatgaatgaatttcatatgtgtcaggcactgttctgtgttccgtaaaagtgtgatgaataagttagacatggtccttcatatcagacagcttacaaaatagaataattagaaaatggacaaaatattatagtatcaaaagaaagtatagattctgatcttagagatgtatgaagattgtatgggtccttctctggtttgggatgggtcattcttgaaatcagaatgatagamataatctctgtgttgggatcctttggattttttgccccttcagctctgctcttcacactttttaaccatcctctttgccttgggaagctgaccaatacgaaactcatcaaaaggcatgtgctctggcttctgcttggttttagccaacgggaagccccaacaacattgatgtctgagccctctacctacagctactg

SEQ ID NO: 174813 - DNA, 590 bp, Homo sapiens
tctattcttgcttccatagccttgatttacctaattaaaaatgtttaatctcttagtttcccttgctgctagcataggacatagttctggacaacgagatgaaagtggattttaccccaaaagttttctgggaaaaactccttaaaaattgattaacttaactgtcttgtttcatcagctcttgatccacaacctttcccttcatgcctagaatgtagatgcaatgtctgaattgtagcagcccttttgtgagtacaaggagaaaagctccatgcaaaaaatagtaaagccagaagggagaagtcatggttgctggcagtaacacggtgctactatgtcatgattatctgtgtccatattccttattatctgaacaaacaaacaaaacaaaacacctcatttcataaagtcagtaagccactgttactgggtttctattacatgaagccaatgaagttgtacctctgtcacatttctcatatcctccattttatttctaatattggcattctttttaaaaaaaaatcttcacrggccacgattgcccttatgatagttccaaactcctcagcagcatgtataatgccctt

SEQ ID NO: 174814 - DNA, 542 bp, Homo sapiens
tacatttcagtaaatttttgtgtatactgtgagataggttccaatttcatttctttgcatgttgtagctacctaatttttccagcatcatttgttgaaaagacccccgaacatttagttgtcttggtacctctgttaacaatcaatgaaccattaatgtgagaatgtatttctgggcttactagttgattacattaatcagtactttgtttgcatatctccctccatattgagcctatctctgtgaaagcaaagttggtggattttcttgctgtccctgtgctgataaaactgcaattcttaccaactgccatgaggagagaggtggagttttttccatacrtgaaggcctcatacttttactgttgttgcacaaagctggggtatcttttcaagaacaaatgcttagttagtgggtacagtgtatgttatttgggtgatggataccgtgaaagtcctaacatgaccactactcaatccattcatgtattaaaattgcaaatgtaccccataattttgaacaaatcaaaagaaaaaagccct

SEQ ID NO: 174815 - DNA, 622 bp, Homo sapiens
ggggatttaatgagttaatacaagtaaagtatctagattagtgcctttcccattcaaattgctcaataaatgttagctctcatcattatctctgcttagaaaagtgtatagttgatgatggccatatagcaaatattattcaatgaatgatggattgcctctatgtactgtcagcacctggtgcatttttagcgcttttaagttgasttgcttaaaggtatcggacattcaaaaactgtcttagagtagataaagttcaagttactttttcttctagcattttatatagaacaaatcaaatacacatcccttatttgtatgtacaatagtgaaacagtaactttcctaaatggtgaccctggtcataaacataagaaatgactagtcttttgaattgaatttcagcaatgttaatactattctaccattattaaatatactgtttgtattagtccattctcagctgctaataaagagatacttgagactgtgtaatgtataaaagaaagaggtttaatggactcacagtcccacatggctgaagaggcctcacaatcatggcagaaggagaatgaaaagcaaagtcacatcttacatggtggcaggcaagagagcttgtgca

SEQ ID NO: 174816 - DNA, 609 bp, Homo sapiens
gtataatagcacaactttgttgccagaaaggaggatccctcaatgctaagagtatgcctgtaactcaagaaatataatcaaggcacatcataaacctaaacaaagtactgagagagcattccttaaagattctcattgtttgaattttaatggcctgtagagccatagaatactttatttggagtmgacatagaaacaaattgttgtatttactttctaacaacagtagaagttgatagaccctcgagaatctttacccctctgtagcccactaagttccaggaaatatcccacaccatcatccattatctcttaaataatctgtgcacttaagaacctcaccttagatgaaaaaggcaaataaaaagaaaaaacaaattaagaatgttctgcttactattcaacacccacaaatcagatattttttaaaagtcaacttataatttgagtgcctctgagacatgtcagcctgtattttacattttctcaatattctacatgttctttagcttacattaaggttaaatctgtaaagttaaactgtagaactttattattacgttaaatatacccaaaggatattaaacatcacttaaggaataaatgtaa

SEQ ID NO: 174817 - DNA, 609 bp, Homo sapiens
gtataatagcacaactttgttgccagaaaggaggatccctcaatgctaagagtatgcctgtaactcaagaaatataatcaaggcacatcataaacctaaacaaagtactgagagagcattccttaaagattctcattgtttgaattttaatggcctgtagagccatagaatactttatttggagtagacatagaaacaaattgttgtatttactttctaacaacagtagaagttgatagaccctcgagaatctttacccctctgtagcccactaagttccaggaaatatcccacaccatcatccattatctcttaaataatctgtgcacttaagaacctcaccttagatgaaaaaggcaaataaaaagaaaaaacaaattaagaatgttctgcttactattcaacacccrcaaatcagatattttttaaaagtcaacttataatttgagtgcctctgagacatgtcagcctgtattttacattttctcaatattctacatgttctttagcttacattaaggttaaatctgtaaagttaaactgtagaactttattattacgttaaatatacccaaaggatattaaacatcacttaaggaataaatgtaa

SEQ ID NO: 174818 - DNA, 609 bp, Homo sapiens
gtataatagcacaactttgttgccagaaaggaggatccctcaatgctaagagtatgcctgtaactcaagaaatataatcaaggcacatcataaacctaaacaaagtactgagagagcattccttaaagattctcattgtttgaattttaatggcctgtagagccatagaatactttatttggagtagacatagaaacaaattgttgtatttactttctaacaacagtagaagttgatagaccctcgagaatctttacccctctgtagcccactaagttccaggaaatatcccacaccatcatccattatctcttaaataatctgtgcacttaagaacctcaccttagatgaaaaaggcaaataaaaagaaaaaacaaattaagaatgttctgcttactattcaacacccacaaatcagrtattttttaaaagtcaacttataatttgagtgcctctgagacatgtcagcctgtattttacattttctcaatattctacatgttctttagcttacattaaggttaaatctgtaaagttaaactgtagaactttattattacgttaaatatacccaaaggatattaaacatcacttaaggaataaatgtaa

SEQ ID NO: 174819 - DNA, 559 bp, Homo sapiens
ttgttttacaaaaggctctgtgactcagttgtccccatgtaacccaattctgcaccacagtcttctgggaaaagttttatactcccaccaagaagtaggcagcccctcttaccctcctggacattactgtayctgaatatgatacctgaacgagtttgccaatatgacgtagtcaagtctgcagtagaagttgtcatacagaatggcagaatgtagacgttcaaagaatccggctgctcagtctcataattaagtagctgaatgcaccggatggagccatcttacctttgatttccttctgtgagatgatgcattagtttacttttaaatttgaatttggttttcagttgcttgtagcacaaagcacactggataatagtgaatgagtgtatatgctccatcaactccatttaagacaagaaatcttgcagaacatattgttggtaacagttgtaaatattctggaagattactggaaaatgttatacatatttatcttaatagacatagcttatacctaaacagtgttatgatgtgcatagcttcactgcacttaaag

SEQ ID NO: 174820 - DNA, 559 bp, Homo sapiens
ttgttttacaaaaggctctgtgactcagttgtccccatgtaacccaattctgcaccacagtcttctgggaaaagttttatactcccaccaagaagtaggcagcccctcttaccctcctggacattactgtacctgaatatgatacctgaacgagtttgccaatatgacgtagtcaagtctgcagtagaagttgtcatacagaatggcagaatgtagacgttcaaagaatccggctgctcagtctcataattaagtagctgaatgcacyggatggagccatcttacctttgatttccttctgtgagatgatgcattagtttacttttaaatttgaatttggttttcagttgcttgtagcacaaagcacactggataatagtgaatgagtgtatatgctccatcaactccatttaagacaagaaatcttgcagaacatattgttggtaacagttgtaaatattctggaagattactggaaaatgttatacatatttatcttaatagacatagcttatacctaaacagtgttatgatgtgcatagcttcactgcacttaaag

SEQ ID NO: 174821 - DNA, 565 bp, Homo sapiens
tttttccctgaaatctacctatgtcttgtcatttttccccgcttaaactaatttgaagtcagttactgtcacttgtaatcagaatatcactaagtaatataattgtctttgttagttgatgacttaaaaactccttgtgttttgatgctatgtgtcatttgaacgctagtgcagtattcactgtgtttaatagacatctaacatgctaggaaaaatactgctaaaatttaaagccacaaagtgaaatatacgactttctgtctcttaagatttttaaggtaatgatatagagtgttgtccagtaaaactttctatggtaataaaaatgatctatatttgcattatccaatactgtagccactagtgctgtgtggttatggatcactgggaatgtggcacgagtttctgaggagctgaagttttaaaatttaatttaattttaattattttgatttaggttcaaatagtcacatatgggacagcaatcctrtaaagcaatcctctttgatttatataatctaacagttttctaagaaagaaagtctagaattgatgccaaaagctg

SEQ ID NO: 174822 - DNA, 565 bp, Homo sapiens
tttttccctgaaatctacctatgtcttgtcatttttccccgcttaaactaatttgaagtcagttactgtcacttgtaatcagaatatcactaagtaatataattgtctttgttagttgatgacttaaaaactccttgtgttttgatgctatgtgtcatttgaacgctagtgcagtattcactgtgtttaatagacatctaacatgctaggaaaaatactgctaaaatttaaagccacaaagtgaaatatacgactttctgtctcttaagatttttaaggtaatgatatagagtgttgtccagtaaaactttctatggtaataaaaatgatctatatttgcattatccaatactgtagccactagtgctgtgtggttatggatcactgggaatgtggcacgagtttctgaggagctgaagttttaaaatttaatttaattttaattattttgatttaggttcaaatagtcacatatgggacagcaatcctgtaaagcaatcctctttgatttatataatctaacagttttytaagaaagaaagtctagaattgatgccaaaagctg

SEQ ID NO: 174823 - DNA, 416 bp, Homo sapiens
ttggcaaagaaagaaagtgtatccttttggtatggcattctttatagcaattcatcccaaacacatctcttcagcagaagccacccactgttgtgtatgcgggcacaccagctatrattaaacaacttaattttacctcttgctgcataggttattaaagcttctcatcacactttaaaacaattgagctgagtaaaatttcttccttaagatactggcaatttctctttggtggcatgatggatagaaaaacagggacagagatggaaagaaaagagagataatttaagttctaagagaaaagtcaagagaagaaaaataaacatgcattcctttaagaattaggtaagaacataaaaaatttgaaaatcaaagctatactgtattatctcttttcaacagtagtaacaactatg

SEQ ID NO: 174824 - DNA, 571 bp, Homo sapiens
agatctgttttctagtgagcagcatacttcccagtttcccaaaaacaaagaagtytgggctccagcatgatttgccagtctgcaaagacccgactattaagggtccttgtcttaaaaacttctcacataaagtactgcctagaatatcagaggtgtgagagagaggtagagggaagagaagaggagttgggggcccacagattacttgactgcgatggtggtcatttaaaattttctgtccagagctattttacattgtttcagaaccaagagaaacatggcctacatttcacaatttacacctcaggttttttatatatttgacagttacattacatttccaacagttacaatttccttctggggagctggggaagcattcccaaactagtcttctggggagtacagaggagtttaaaatatatagaaggaaatttgtacaggcttcccagaaataaggggggcagggagggggagagacagaaagagggagaacaataaaaaaagtaaaagaggacataaaataaaaattaaaacccagactttagaaattgtacaaggaaaattaggg

SEQ ID NO: 174825 - DNA, 390 bp, Homo sapiens
gcccacagattacttgactgcgatggtggtcatttaaaattttctgtccagagctattttacattgtttcagaaccaagagaaacatggcctacatttcacaatttacacctcaggttttttatatatttgacagttacattacatttycaacagttacaatttccttctggggagctggggaagcattcccaaactagtcttctggggagtacagaggagtttaaaatatatagaaggaaatttgtacaggcttcccagaaataaggggggcagggagggggagagacagaaagagggagaacaataaaaaaagtaaaagaggacataaaataaaaattaaaacccagactttagaaattgtacaaggaaaattagggtcagaggtaag

SEQ ID NO: 174826 - DNA, 620 bp, Homo sapiens
gtgtaaacatcaccagctaaggtatttaagtcttaggaaagtgtactcactaatgacttatttacttttatcttagacatacttttaacaatgttacctatttcattttcctgtgaatattattaacaaataaattataaatagaaagaaagctcttaaggcacgcttcctgaaagaagtgctgtctaatactgaggcaaagtatagaaaaataacatagcattgtatgcaagtattcaaaaagcatactcctcttgaatcagcaaaggtacctcaagatacctctgtttyccacatggttcgataacagtaaaaaggataacccctaggcatcttatacagaacatgaaattctgttcaaactgcaacttaagatggtggagaaagccacaatccattgtagaaaggctttcattttatggctaaaatgtttttttatcgttattgttgttaaggtttttctcacagatgatataactacaactagctaagcaagtcacctatgacaatgtgaacttgccactgtcataaaggaaacaaagttattgtgtatgctttgattgtaaactactgggagtcaatttcatttgaccaatattgagtccctactctaggcaaaa

SEQ ID NO: 174827 - DNA, 450 bp, Homo sapiens
atcccagcactttgggaggccgaggcgggcagatggcctgaggtcaggagttcaagacaagcctggaaaacatggtgaaaccctgtctctactaaaaatatgaaaattatctgggtatggtggcaggtgcctgtaattccaactactcrggaggctgaaacaggagaattgcttgaaccccagaggcagaggttgcagtgagccgagatcaccattgcactccagcctgagtgatgagaaactcgatctcaaaaaaaaaaaaaagaaaggaaagaaataagggtgaccaccttgtcctgtgttagcctattgcaatgacactaagtaaaggaaactggcctgtacaccgtttaaacaatgcctacttgccactaaatttgtgttggaatttttttgctagaagaaaaaaaaaggaaactgtcctgaattttctaccctggttctcagtat

SEQ ID NO: 174828 - DNA, 536 bp, Homo sapiens
agatctgagagaattctctggattatcaggcagagactcttgttctcttcccttactttctcccatacatacagagtaactctgtgtgtgtttgttctgagatagctaaagctggggktggagtgacacaagcacccctgtgtcaccaccactatgactgcattgggtcagacgtgaagccaccacagtgctgggtctcactcaaggcctgttgtaaggccctggctactgcctatgtttgctcaagcccaagggctctacaatcagcagataacaaagctagttaggcctgtgtccttctgtcagagcagtgatgtcccccagtctccgtgtggttccagaagtgctgtgcaggaatcaaggactagagtcaaaaaccttagaaatgtacctggtgtcctgttggattgcagctgagctggcactcactccacacaacaaatccttcctgcttttctcttccttgtccaaagacagaggagcctgacctcatagtcaccaccaccccaagccacatggagtaccgctagactccc

SEQ ID NO: 174829 - DNA, 590 bp, Homo sapiens
tttttttattttgttcgtgtccacccatgaacctttgtgcatagctccaaaatgtataaagcaaagatgataggacaagtagacaaaaaataacccaaggattgagaggtgcactttccaatatagtagccactagccacacagtatagccagtagtcactaggttatttaatacttcaaatatggctaatccacgttgaaatgtgctataaagtgtaaaacatacattggatttcaaagacttggtatgaaaaaataaagtaaaatagctcgaatattttaaatattgattatattttgaaaagatcatactttagatatgagttaaataaaatctattaaaattatgagaacttatgaacacaaagaaggaaacaacgacactggggtcttcttgagggtggaggttgggaggagggagaggagcagaaaagataaatattgggtastgagcttaattcctgggtgatgaaatgatctgtatgacaaacctctgtgacatgagtttatatatgtaacacaccttcacatgtaccctcaaacctacaataaaagttaaaaaagattgcaacctaaaataaatggataaa

SEQ ID NO: 174830 - DNA, 589 bp, Homo sapiens
tatgaattggaattgaagagtgaatgttgagcaaaatttatacctggtttagccttgccacagggctgggtagggcaaacagcccaggccccttcacttatgacacatttacagttgccctctgcaccttctcctrtcttcccactgagtaccttccaagcaacagatactgtggtgattgctgagatctgacaaagaaaaagactaccactcaatatctgaaacaaaaagctgaatctaatggtgcctgaagcacagtctcctccagtaaagcaaggagctgattgtctatagaagtttgtggagcatgaagttgagggattggcagaatttcagaggtgggagtgggttcgttgttgccagctagggaaacttggttgtttagatgagattgttgtggattggctggctttcaaaagcatggggctgtttctggctagatttcacaagtgtgttcgcttaggtaagttgccatcaatccaccagaccagattattttattttattactttttgtttttttttgagacagggtctcactgtgttgcccaggctaaagtacagtgtgcaattacagctcactgcatcca

SEQ ID NO: 174831 - DNA, 495 bp, Homo sapiens
catgcctaatacgtctatgtatttatatgttgtgtacacaatgtttcaccactgaaaacatataaaagagctctaattaattggctcaaagaaaaataaaattgcttaaatcaaatactttatcagggaaaaagaaaagactagtcaaatgcttttttaagtttatgtaacttaagtaaaatctttaataaataagctagctttaaaattattggtaaagtagtattagaaatgtcttaagaattgccagcatacatttttgtttgcatttattaatcaagcaatttcatacttatccctagcaaatactataaggtgtgtgtcaaaattggcacaggggttacagaactataaacccagmccaaaacagaattatcttcacttgtgtaatgtttaataaataagagcattgatatgggtttaatgaagatagctgcatcttgaatttagcaagattaccacaacttctaatactgtggctttagggagtctagt

SEQ ID NO: 174832 - DNA, 600 bp, Homo sapiens
ttcattggctcacagttctgtgggctgtagaggaagcatgatgctgacatctgcttggcttccagggaggcctcaggaaacttacaatcatgttagtagatgaagggggagcagacatgtcacatggccagagcaggagcaagagagaaagagtgaggtgccacatggttttaaacagccagatcttgcaagaagtcacccactatcacaaggacagcaccaaggggatgggactaaaccttcgtgagtaatccactcccatgagccagtcacctcccaccaggccacgcctccaatactggggattgcaattcaacatgagatttgggtggggaggtagatccaaactatatcactacccccccagttggaaggaaagatgagccatgggagctccaggtagaacgggaggagaagaatatggcctgtgctttggaaagacacagtgggctragctgaagatgcagaatggcagagggcaggcaacaccacttctgaagggaccacgacccacaggacatactggcccattctgagcaagagcaatcctggagccagacctgcccttatccttgagcagccacatagaggacaaggccc

SEQ ID NO: 174833 - DNA, 546 bp, Homo sapiens
tcctgcttgctgcctcctcccttgtcctggtcccctccatggcagctggaggaaagcctggtctaaagtgaggaaaggatagagaaatgagcatgacagagttgatttttggatgaacaayggtttcacccagtttcccttcttgagcccctgatgtctgcgtttgagtagagcagaggcttggagtgaggaggcccctccctccagccagcctgagactacttccatactctcagtcagtgcacattttccccaggaaaccaatgacagaagtccatgctgtggcaataaagagaaggtcagccacctcttctgtggaggattctgatgccagctcagggacacagaggctggtcagaatgcctccctacacctcacagtgaagcattgttcttggagaagtatgaagccaaagaacccaaaacgagtggatagagtgaagacaagaataaaacacgtcaggcagggcatggtggctcatgtctgtaatcccagcactttgggaggccaagataggcagatcacctgaggtcaggagtttgagat

SEQ ID NO: 174834 - DNA, 546 bp, Homo sapiens
tcctgcttgctgcctcctcccttgtcctggtcccctccatggcagctggaggaaagcctggtctaaagtgaggaaaggatagagaaatgagcatgacagagttgatttttggatgaacaatggtttcacccagtttcccttcttgagcccctgatgtctgcgtttgagtagagcagaggcttggagtgaggaggcccctccctccagccagcctgagactacttccatactctcagtcagtgcacattttccccaggaaaccaatgacagaagtccatgctgtggcaatraagagaaggtcagccacctcttctgtggaggattctgatgccagctcagggacacagaggctggtcagaatgcctccctacacctcacagtgaagcattgttcttggagaagtatgaagccaaagaacccaaaacgagtggatagagtgaagacaagaataaaacacgtcaggcagggcatggtggctcatgtctgtaatcccagcactttgggaggccaagataggcagatcacctgaggtcaggagtttgagat

SEQ ID NO: 174835 - DNA, 551 bp, Homo sapiens
catagacaggaagagctggaaggaggagatgtctcaggaggctgatggggctggagagctgcaaggggagaggtgagaaaggctctcctggggaacagtctgaggaccctgtgcctgcttggccttccattcatctttawggcttggtcatgtgatctgcattgctctgtagttccagggaaggacttccttccttccttccttccttccttccttccttccttctttctttctttctttctttctttctttctttctttctttctttctttctttctttctttcttcctttctttctctttctttttctttccaatgcagccacttgggacttcacatatgagatgaggtggtgaaagcatggagatggtctaaaactgagcaggaacattaaatgaacaggtggaaggaaccaccatactctcagaagaaatggtcaaccagcagagatcctgaaccctgatcccaaaaccaatctagagatacaggaggcaccagagggaggttggtgggaggccaaggaattttagcagagacaaaaggaaattaga

SEQ ID NO: 174836 - DNA, 532 bp, Homo sapiens
acgagatctttccatgtcagtatgtaaggatgcttttttacagctcacaggattttaagaatatcataattcctttaactggttggggaaggtatttgggggatgaagtgggaggcaacttaatttaattttgttttctttaaagacctgtgatagagggaggaaagaaagacctatgcttcccagccatacctgagaatgtcccagcctggagcgtctgacccttgggtgggatcaggagctatcctgtctgtaggcctgatgcccagcaagtccccaaagtagagaacgattatctttgggtcttctgcttttgtaccattcttgcttttcaaaacattayatagtctcaaagtctcatgtagataaagtggttcctaaagggtagtcctggaccagcagtatcaaaatcacctggaaacatgttggaaatgcagattccaggcccacatcccagacctgttgaatcagaaacttggggagtgggacccagaaatctgtattttaacagccctccaggtggttgtgctgc

SEQ ID NO: 174837 - DNA, 594 bp, Homo sapiens
acccttctgcatggctttctttacttctaacgcccaagcatcagggtcaaaagtgtgggggtgcaggtggcaccagacaagaagagactccaggctgaagcaccatgccgtagatatacttgctgaatacccctggcccccaccctccagggcagagtgtaggggtgaggcagagcccactagtggctccctttccagccctaaaattacccctgataattacgggtgggggtgtggggacaggacaccagatgggactggagcaggataaagcccaagagagagaacagagacggacctaggaatgcaggggcgctttgaccctggcccagattaaccaagcaggggagaggctaaaagtggagccaccaggactgtgccagctacccaggactctggggtcccaccaacaagttctccacttcccttggcagggcaaaagctgggcggggacctttctcccagttaaaacagctgcctcygattacaccacttactgggggcaggggaaggcgggggtagcgggaagagcacaggggtggggcttctggtatggggctgagcaagtgccagtggcctctggcctgggagcca

SEQ ID NO: 174838 - DNA, 591 bp, Homo sapiens
tacttctaacgcccaagcatcagggtcaaaagtgtgggggtgcaggtggcaccagacaagaagagactccaggctgaagcaccatgccgtagatatacttgctgaatacccctggcccccaccctccagggcagagtgtaggggtgaggcagagcccactagtggctccctttccagccctaaaattacccctgataattacgggtgggggtgtggggacaggacaccagatgggactggagcaggataaagcccaagagagagaacagagacggacctaggaatgcaggggcgctttgaccctggcccagattaaccaagcaggggagaggctaaaagtggagccaccaggactgtgccagctacccaggactctggggtcccaccaacaagttctccacttcccttggcagggcaaaagctgggcggggacctttctcccagttaaaacagctgcctccgattacaccacttactgggggcaggggaaggcgggggtagcgggaagagcacaggggtggggcttctggtatggggctgagcaagtgccagtggcctctggcctgggagscaaaggacagaggaagatct

SEQ ID NO: 174839 - DNA, 580 bp, Homo sapiens
aagcaatgaagcatgccttcaggatctagaaaacagacttaaaagggcgattctaagagttatgggccttaatgaggaggtagagaaagagaatatggggtagaaagtttattcaaagggataataacagaggacttccyaaacctagagaaagatatcagtatggaagtacaggaaggtaatagaacaccaagcagatttaacccaaagatagtaatcaaactcccaaaggccaagggtagagaaaggaccctaaaagcagcaagaggaaagaaatgaataacatacaatggagctccaacacatctggcaccagattttcagtggaaaccttacaggccaggagagagtggcataatatatttaaagtgctaaagaaaaaatcttttagcctataatagtataatagtatatgtggtgaaaatgtccttcaagcgtaaaggagaaagaaagacattcctggacaaacaaaagcttgtaccattgtacaagaagtgctaaagggagtactttagtaagaagaaaaaggacattaatgagcaatacatagtacctgaaggtacaaacctcaccggtagta

SEQ ID NO: 174840 - DNA, 591 bp, Homo sapiens
tatcaatagtatattttttttccttttggtctcatcacyaataaaagtaacttagtacttaatggtattctggtaactgtttttatactctagtaagaaaaataaaaaaggaaaattaaatgacctgaatataatttgtatgctctattaatttaatgattattcaataaagtagtcaaagaggagatcattggtgactatcttaaacaacgagaggataaatttgtatcaaatggattaaaccatgccagactcagtggctcacacctgtaatcccagcactgtgggaggcagaggcaggcagatcacttgaggtcaggagttcaagacctgcctgggcagcatgatgaaaccctgtctctactaaaaatacaaaaattagctgagtgtggtggcacccacctgtggtatcatctatttgggaggtataggcaggaggattgcttgagcccaggaggtcaaggctgcagtcagccaagatcacgttactgcactccagcctgagcaacagaaagagatgccatctaaaaaaaaataataatgaattaagcccattcattagcattttcatgcattggttttcttcatttc

SEQ ID NO: 174841 - DNA, 591 bp, Homo sapiens
tatcaatagtatattttttttccttttggtctcatcactaataaaagtaacttagtacttaatggtattctggtaactgtttttatactctagtaagaaaaataaaaaaggaaaattaaatgacctgaatataatttgtatgctctattaatttaatgattattcaataaagtagtcaaagaggagatcattggtgactatcttaaacaacgagaggataaatttgtatcaaatggattaaaccatgmcagactcagtggctcacacctgtaatcccagcactgtgggaggcagaggcaggcagatcacttgaggtcaggagttcaagacctgcctgggcagcatgatgaaaccctgtctctactaaaaatacaaaaattagctgagtgtggtggcacccacctgtggtatcatctatttgggaggtataggcaggaggattgcttgagcccaggaggtcaaggctgcagtcagccaagatcacgttactgcactccagcctgagcaacagaaagagatgccatctaaaaaaaaataataatgaattaagcccattcattagcattttcatgcattggttttcttcatttc

SEQ ID NO: 174842 - DNA, 595 bp, Homo sapiens
gaatcctccctaactcattttatgaggycaacatcattctgatactaaagcctggcagagacacaacaaaaaaagagaattttagaccaacatccctgatgaacatcaatgtgaaaatcctcaataaaatactggcaaactgaatccagcagcacatcaaaaagcttatccaccaagatcatgttttttccccttttaaagaaagaataactttgtttttaagtagagtgactggttactccacaaagaaaaagtaaaaaagtgtaagatgaaaaccgactgattataaaaacgctgtagaagtgaagttgtacagcaaaataaactttagatcttgacaaaactttgagagatcaaggattttctggaggaggtgctcccagacctcagcaaatcatcctattcatttgagccagaaagttgtctcatgctggtaccaagaatgataggagatttgtcaaagtcaggggcatttcccctcagaatccctttgtggttaccaaaatgtgaaccccaaaaatctgagacaggtctcagttaatttagaaagtttattttgccaaggttgaggatgcataaacagtgatgcgacctc

SEQ ID NO: 174843 - DNA, 513 bp, Homo sapiens
ctactttttgtatatggtaagaaatagaggcccagtgtcactcttctcctatggctagctaatttcctcagcacgttttattgaataaagtatctytttgcattgcttatttatgtcaactttgccaaagatcagttggttgtacataggtggctttacttctgagttttctattctgttccttttgtctatgtgtttatttttgtaccagtacagtactgttttagttactataacattatagtattatttgcagtaagagaatgtgattctttcagctttattctttttgcttacaattgctttggatatttgggctcttcatatcaactttagaattgttttatccaatcctgtgaataatgacagtggtcattggtaactcttagggatcctgtttaatctgcagattgaattgggccatgtggtcgtttaagtgacattgagttttccaatccatgagcataaaatgtttttttcattcgtctgcgccatctataatttttttcacca

SEQ ID NO: 174844 - DNA, 418 bp, Homo sapiens
gcagctttcccagttaaactcttggagataacattactatcacagaacctaagattggtctttcagacaccttttcaggtttttgcatttctgacaaacgatggctccaccaggacctgccacccggtactgtggcccccacscaagaactgactcagcacaagtggacaacttcgattccctatgatttcacctctgacccaaccaatcagcatgccccctaccctatccccctgcccaccaaattatctttgaaaaacccctaacctccaagcctttgaggaaattgatttgagtaataactcagtctcccacctcacatcaattaaactctttctttacttaatgccatggtctcagtgagctgattttatgtacagtagacaggaagaacccatcaggcagttacaactgcatt

SEQ ID NO: 174845 - DNA, 418 bp, Homo sapiens
gcagctttcccagttaaactcttggagataacattactatcacagaacctaagattggtctttcagacaccttttcaggtttttgcatttctgacaaacgatggctccaccaggacctgccacccggtactgtggcccccacccaagaactgactcagcacaagtggacaacttcgattccctatgatttcacctctgacccaaccaatcagcatgccccctaccctatccccctgcccaccaaattatctttgaaaaacccctaacctccaagcctttgaggaaattgatttgagtaataactcagtctcccacctcacatcaattaaactctttctttacttaatgccatggtctcagtgagytgattttatgtacagtagacaggaagaacccatcaggcagttacaactgcatt

SEQ ID NO: 174846 - DNA, 544 bp, Homo sapiens
ggtggttcaatgaagtcattaaaggcccaggctctttccattttttcattatattgttatgagatgttagctttcattctcagatttgtaacttcatggtcacaaggtagctgcttcacctccataaatcaagtccttgcctaattttgtttaaaacagaaagtgagggagggaagtaaaagagggaaaggaragtctttcctagaagcccccagcagacttcccttatgatatattcaccaaaactgggtcatatgaccgtccctgaacaaccactggagaagggaagcaccttggaccaatcatgattaccttcctagagcttagtacgttgccatttacctcaaatcaaattctattagcaaaggaggaagaagaaagtgtttggctatagggtgtactaaccacctgtatctgccacgtttattgccaaaaagagtcatcaaaagtgcttagtgctctgaaggtaatgcaaataatgacccctattttcctgcctcctgctcaaaaactttcagggcctcttgaaagggctcgtatttgc

SEQ ID NO: 174847 - DNA, 539 bp, Homo sapiens
ccaaaactgggtcatatgaccgtccctgaacaaccactggagaagggaagcaccttggaccaatcatgattaccttcctagagcttagtacgttgccatttacctcaaatcaaattctattagcaaaggaggaagaagaaagtgtttggctatagggtgtactaaccacctgtatctgccacgtttattgccaaaaagagtcatcaaaagtgcttagtgctctgaaggtaatgcaaataatgacccctattttcctgcctcctgctcaaaaactttcagggcctcttgaaagggctcgtatttgcatctgaaggcatagtagaamcaataagatgtagaaaagaaagacatgtctgtaggttaaagaaaaggaataaagcaaaaatacccaactaaaacaacatgaatagttcccctctcttcatgtactcatgtacccataggtatatgggcacacaagtacacaacacatatatacttaatttctagaagaagcacataactgcattgtagatgtctctattgttaaaaataaagat

SEQ ID NO: 174848 - DNA, 530 bp, Homo sapiens
acatggtctcttagggcaagtcggcatgtactctgatatacccagactcgtttgaagagtgctactttacattatcttacattgggtaatcaagctttttaattgtttatccacaatgggttaatagctactacactgtcatagcctgcagtgttgatgtattcacttctgcccaggaaggcgagagtattttgtgtgatcctcatttttgtgactttaaatcagatgagacttcaaatttacacattttcttccattgctctgtgctttattacatggttaagtgctttaagatttattaaatccaggtgttttatttctcagtaatcaccagaactcacctgatttgattatgccaatctgttatttttaagaattgtttttttwaaaatattctttcccagttaatattgtatatgtggctttcttgatttaaaaatatattaagaaatgttgtaattttatgaaagatcatgtgaaaaagtttactgaagcatttgttttccttatgctattaacaaagcttaata

SEQ ID NO: 174849 - DNA, 574 bp, Homo sapiens
  misc_feature (1)...(574): n = A,T,C or G
aagaaaatctatataggtaacaaggcctatgaagacctatttctstaacctttaatcatttttctgcaagaccagcaggtggtgctcctcactttgctcatgttagctttgaaattttgagtactgagtacacttcacttttttatcctctcatacttctatagttaactttccaagaacataagtatttatttaatttgaccagattatatctatagcttantgaggtaagaccagtgatttgttagtaaggttttccctttaaaaatgctacatttccagttttgttctaattactgctttcatgtttccttttaggatggagaagaactagaaagacttaccaaacccaagagtgatgagtcagatgaagatactttctaactggtacccacatagattgccgccctcnctgaaccttattttcacattttcagtgtttgtaatatttatcttttcactttgataaaccagaaatgtttctaaatcctaatattctttgcatatatctagctactccctaaatggttccatccaaggcttagagtacccanaggctaagaaattctaaaga

SEQ ID NO: 174850 - DNA, 406 bp, Homo sapiens
cattcagacccaaccctataaccagatrttcaaatgttaggtgacctgagatgccaaaaaataataataataataataatcaactccagaatggatcccccactgacttattctgatgcctaaatttccagtattgttatttccctttcattgggttagatccatgtgtctcaaaccagggcttgcacagcccagtaggtacgtggcagtatgcctgggatactacaggagaatcatggtacgttgtttgagaacagtggcttcactccaaaatttgagagaagttatatcaaaacaaatgcaaatgttttataagatgcaaattgacctaagtttaaaagctaaaatgcgagaaatttcagatttacctttcactacaatctcagaaccctaagcataggaattc

SEQ ID NO: 174851 - DNA, 405 bp, Homo sapiens
gaaagtggaagaaaatatgagtgccattcagacccaaccctataaccagatgttcaaatgttaggtgacctgagatgccaaaaaataataataataataataatcaactccagaatggatcccccactgacttattctgatgcctaaatttccagtatygttatttccctttcattgggttagatccatgtgtctcaaaccagggcttgcacagcccagtaggtacgtggcagtatgcctgggatactacaggagaatcatggtacgttgtttgagaacagtggcttcactccaaaatttgagagaagttatatcaaaacaaatgcaaatgttttataagatgcaaattgacctaagtttaaaagctaaaatgcgagaaatttcagatttacctttcactacaat

SEQ ID NO: 174852 - DNA, 405 bp, Homo sapiens
gaaagtggaagaaaatatgagtgccattcagacccaaccctataaccagatgttcaaatgttaggtgacctgagatgccaaaaaataataataataataataatcaactccagaatggatcccccactgacttattctgatgcctaaatttccagtattgttatttccctttcattgggttagatccatgtgtctcaaaccagggcttgcacagcccagtagstacgtggcagtatgcctgggatactacaggagaatcatggtacgttgtttgagaacagtggcttcactccaaaatttgagagaagttatatcaaaacaaatgcaaatgttttataagatgcaaattgacctaagtttaaaagctaaaatgcgagaaatttcagatttacctttcactacaat

SEQ ID NO: 174853 - DNA, 406 bp, Homo sapiens
cattcagacccaaccctataaccagatgttcaaatgttaggtgacctgagatgccaaaaaataataataataataataatcaactccagaatggatcccccactgacttattctgatgcctaaatttccagtattgttatttccctttcattgggttagatccatgtgtctcaaaccagggcttgcacagcccagtaggtacgtggcagtatgcctgggatactacaggagaatcatggtacgttgtttgagaacagtggcttcactccaaaatttgagagaagttatatcaaaacaaatgcaaatgttttataagatgcaaattgacctaagtttaaaagctaaaatgcgagaaatttcagatttaccttkcactacaatctcagaaccctaagcataggaattc

SEQ ID NO: 174854 - DNA, 582 bp, Homo sapiens
tgaattctgggtgtatacaagtcatacttgttgagcaacagtgggaaagtgcttcagtgggacatcagaatattgtatgtgtggggtagggttactaaaaggccatctttttcttcattatccatytactcaccctgcaaaccttcaagaactttctcatgctcccttttcagagaaaatgctcagagatctatgaaaagggtagcaaaccacgtgagacctcatctcctctccagtcacaggtgacttaaccataggtggataccacactcaaggcagtgtgtttggaatgcatttgtgtacatgaaaaacccaggcattctttaatttaggagtatgaaagttggagttacaaactaacgttagtcagtgtctgatggacttgtgaatggtataaagctggagatcatggtggccacatgcatgctaaagcagtgaaagtcagtagtttttgaaaagataaaaccagatgtgcagagagaagcaatcaggagaacgtgcagttctggggagataaaaacataactttagtttctgagttctggcccctcatgaagcctgactgttttgtgaacacttctg

SEQ ID NO: 174855 - DNA, 582 bp, Homo sapiens
tgaattctgggtgtatacaagtcatacttgttgagcaacagtgggaaagtgcttcagtgggacatcagaatattgtatgtgtggggtagggttactaaaaggccatctttttcttcattatccatttactcaccctgcaaaccttcaagaactttctcatgctcccttttcagagaaaatgctcagagatctatgaaaagggtagcaaaccacgtgagacctcatctcctctccagtcacaggtgacttaaccataggtggataccacactcaaggcagtgtgtttggaatgcatttgtgtacatgaaaaacccaggcattctttaatttaggagtatgaaagttggagttacaaactaacgttagtcagtgtctgatggacttgtgaatggtataaagctggagatcatggtggccacatgcatgctaaagcagtgaaagtcagtagkttttgaaaagataaaaccagatgtgcagagagaagcaatcaggagaacgtgcagttctggggagataaaaacataactttagtttctgagttctggcccctcatgaagcctgactgttttgtgaacacttctg

SEQ ID NO: 174856 - DNA, 582 bp, Homo sapiens
tgaattctgggtgtatacaagtcatacttgttgagcaacagtgggaaagtgcttcagtgggacatcagaatattgtatgtgtggggtagggttactaaaaggccatctttttcttcattatccatttactcaccctgcaaaccttcaagaactttctcatgctcccttttcagagaaaatgctcagagatctatgaaaagggtagcaaaccacgtgagacctcatctcctctccagtcacaggtgacttaaccataggtggataccacactcaaggcagtgtgtttggaatgcatttgtgtacatgaaaaacccaggcattctttaatttaggagtatgaaagttggagttacaaactaacgttagtcagtgtctgatggacttgtgaatggtataaagctggagatcatggtggccacatgcatgctaaagcagtgaaagtcagtagtttttgaaaagataaaaccagatgtgcagagagaagcaatcaggagaacrtgcagttctggggagataaaaacataactttagtttctgagttctggcccctcatgaagcctgactgttttgtgaacacttctg

SEQ ID NO: 174857 - DNA, 621 bp, Homo sapiens
cattataagcactcggtaaacattagctgctattaccatggctaactatgagtttcttgtagggaaaaaagaatgaacaaatagaatacaggtatgaatgtgtaatacattaatgctatactttgcacaagacataagcagaaaaagcttttaaacctccaaattatcttaaaacctctgtactaaatacattatgtcttttttatctgcacttagaactctccttactttattcagtattaaatttgggaggggaacaacacacacgggcctgttgaggggtcggggatgaggagaaggagcttagaagataagtcagtaggtgggtgcagcaaaccaccataacacacatatacctatgtaacaaatcttcacattcttcacatgtatcctggaacttaaaagtaataataaatcaataaatttgcagtaagaatgatgagtttgtttcctaacccacagaagagtaaaaaaactaaactttgaaaggattttctaaagacgggttcagtgacatamgaaggagaggtgagttaacagcttcacagcaaagagagaacaaaatccagaaactttcaaacccacggaacttttgggttgcataatgtgataggtaattca

SEQ ID NO: 174858 - DNA, 583 bp, Homo sapiens
tctaacatgccatctccagcatgcagggtgtccatgccaagaggtgccctcaaccgccctccctgctccttactcccatcccacactcctcggcacccaaagtccagagggggccaagatggcagggggctggtatgtcagcaccaccctacgtgcgggcacacctggccaggttgtgacagtgccsagggttgtccacaactttgctccatcccaagcaggcaccgggagttgggagaggggagcagggcactttcaagcttgcaggggcatggggcctcctgggccctgagagccccaggaatgcagggacctggagccatggctgggcagctaaagctgcacccaggagtatggggctcctgccctgccaacttggtagggggcagggctcccacctgatcctgcccccgccagctccgcaaaacatgcagccattgctatgccctccctgctgcagcaggtgtctccacagcagctgctccagatgggccaccaccaccatcagtacctactgtagacagtaagcttctgtgttaagatttttatgtaataagagtctcacattcctattattattttt

SEQ ID NO: 174859 - DNA, 583 bp, Homo sapiens
tctaacatgccatctccagcatgcagggtgtccatgccaagaggtgccctcaaccgccctccctgctccttactcccatcccacactcctcggcacccaaagtccagagggggccaagatggcagggggctggtatgtcagcaccaccctacgtgcgggcacacctggccaggttgtgacagtgcccagggttgtccacaactttgctccatcccaagcaggcaccgggagttgggagagggsagcagggcactttcaagcttgcaggggcatggggcctcctgggccctgagagccccaggaatgcagggacctggagccatggctgggcagctaaagctgcacccaggagtatggggctcctgccctgccaacttggtagggggcagggctcccacctgatcctgcccccgccagctccgcaaaacatgcagccattgctatgccctccctgctgcagcaggtgtctccacagcagctgctccagatgggccaccaccaccatcagtacctactgtagacagtaagcttctgtgttaagatttttatgtaataagagtctcacattcctattattattttt

SEQ ID NO: 174860 - DNA, 654 bp, Homo sapiens
ttgcagttgtacattaattcattcattattaagcatttacggagctcctattatataatgcaatttactagaaataataagaggatttttagatggcagtatgacataagattttcattttgaaacaggcacttctatactaatgtagaagatggattgaacagtttaggaattgcagataagaaataatggaaaagtcagtgggcatatactatatagatgaatgatagagttatttatgagagagaattgacaccacttggtaatcaactgaatgtgggagagagcaagagagaagaagcccccagtaactgaggagatgacagggacactgactgaaatggaaactataagaaaaacrgatttagaaggtaggagttcatgagtagctccgttttaaacatgatgaatttgttgtgggatatccatatggacacgcctagcaaacagaaagatctacaccaaagatattgatctttgtcttaatcatacatatgtggaatttgtagcaatgtgtgtgcacaagattactcagtgtgtaaaaagcatgaatacaaacaacaataacaaagaaatgatcatgtcaaacagcttccactttggaaatggttttcctaaagctcatttctccctgttaattttgagtttcataaa

SEQ ID NO: 174861 - DNA, 609 bp, Homo sapiens
gtgaatgaattaattgattaaaatgcaaagctgtccagcaagaaggacagaattattacaaacagattagaaaccaaaggagaagggataactttggagagtatggtgacttcagtytttttagagatgcatagatgagcatccaagtagagaacacagaggaagtaactgaaaattggcattggaatttcattcaagagtcagactcaaatatgtagttttgggacttacaaattagctataattgctgaagccataatattggatgggattatgaagaggaaaatgtagggaggtctgtccaagctatatcattggggagtgcttctgtgtaggtacagggctgaaagcccaataatgaggcctgcttgtaaaagtcagggaaaaagcaagcatattttatgtccttttcttgactaaccactctactatatatgatattattgaatttctttttttccttggttttgccattttgtactggtccttattttccatactaaatgttatagattttttatttcctaaaacatatcagtatttgatagacttagacatggactaaaacaagtaaaatatggcatatgaaggattaatataaagaccaga

SEQ ID NO: 174862 - DNA, 609 bp, Homo sapiens
gtgaatgaattaattgattaaaatgcaaagctgtccagcaagaaggacagaattattacaaacagattagaaaccaaaggagaagggataactttggagagtatggtgacttcagtctttttagagatgcatagatgagcatccaagtagagaacacagaggaagtaactgaaaattggcattggaatttcattcaagagtcagactcaaatatgtagttttgggacttacaaattagctataattgctgaagccataatattggatgggattatgaagaggaaaatgtagggaggtctgtccaagctatatcattggggagtgcttctgtgtaggtacagggctgaaagcccaataatgaggcctgcttgtaaaagtcagggaaaaagcaagcatattttatgtccttttcttgactaaccactctactatatatgatattattgaatttctttttttccttggttttgccattttgtactggtccttattttccatactaaatgttatagattttttatttcctaaaacatatcagtatttgatagacttagayatggactaaaacaagtaaaatatggcatatgaaggattaatataaagaccaga

SEQ ID NO: 174863 - DNA, 610 bp, Homo sapiens
ctagaactggggaacaaggggtcttccctgattttkcaggggactctgagagacaaattgaaaaccatcagaaaagcagaggctgaagaatgactagaacatgagatttgaatccagagactggcatttgattcctagctatgtgaccttaagccaggcacttcacctccatgagcctcagtttccatatgtataaaatgaggctcataatatttaattcacaggattgttttgaggatcaatggagaggcacgtaatagcatccagtgtgatggctacatagggtgatggagctcagttcctgaaagtctattgttagtgcaccacaggaaagaccaattccacacagcaagttcaagagaccagaggcagaatggaggtcaaggttgcagagccagggtccaagtgggtaaaacagatttagggtatgaaaatgtaaggaccaagcaacacctgtctcaagctactccacaccactgtgggaccccaagaatgttatatcaaccagcagttacattaaccagcaggtctgcttataagaggagggggccttgagggacctgagctagagtgagtgtgggcagattgccacactgggcttgccctttgc

SEQ ID NO: 174864 - DNA, 579 bp, Homo sapiens
tccctgatttttcaggggactctgagagacaaattgaaaaccatcagaaaagcagaggctgaagaatgactagaacatgagatttgaatccagagactggcatttgattcctagctatgtgaccttaagccaggcacttcacctccatgagcctcagtttccatatgtataaaatgaggctcataatatttaattcacaggattgttttgaggatcaatggagaggcacgtaatagcatccagtgtgatggctacatagggtgatggagctcagttcctgaaagtctattgttagtgcaccacaggaaagaccaattccacacagcaagttcaagagaccagaggcagaatggaggtcaaggttgcagagccagggtccaagtgggtaaaacagatttagggtatgaaaatgtaaggaccaagcaacacctgtctcaagctactccacaccactgtgggaccccaagaatgttatatcaaccagcagttacattaaccagcaggtctgcttataagaggagggggscttgagggacctgagctagagtgagtgtgggcagattgccacactgggcttgc

SEQ ID NO: 174865 - DNA, 599 bp, Homo sapiens
agatctagctgcctgcctggctatggttagaacaagtcaaaatagcctcagggttggaggrtggtgcgcttctgttgccaggaatggcatatccctacttggtggtagctaccattttatccttattggctcattgagaaaggatgggagaaaatgaatatggcgagcttgaaaatcagcagccagctttgtcccagaggtggatgcaatccagtggtatcagagctcatcacggctttcttcagattgttcatctatttgccaagcccctggccatcattcagagggaaggtacttagcaaaatatgagataagtgtcagcaatgacaagctagtgctcatagtcagcaggcctgctgatagcttggaaacacacaaagcaggccaataaatactgccctccaggggaacacatgtaaaataggccatttatgtcaatccacagaacttgacagtccccgagacctcatggtgacagcctcctcggagacctccatctccctcatctggaccaaggccagtggccccattgaccactaccgaattacctttaccccatcctctgggattgcctcagaagtcaccgtacccaaggacag

SEQ ID NO: 174866 - DNA, 610 bp, Homo sapiens
agatctagctgcctgcctggctatggttagaacaagtcaaaatagcctcagggttggagggtggtgcgcttctgttgccaggaatggcatatccctacttggtggtagctaccattttatccttattggctcattgagaaaggatgggagaaaatgaatatggcgagcttgaaaatcagcagccagctttgtcccagaggtggatgcaatccagtggtatcagagctcatcacggctttcttcagattgttcatctatttgccaagcccctggccatcattcagagggaaggtacttagcaaaatatkagataagtgtcagcaatgacaagctagtgctcatagtcagcaggcctgctgatagcttggaaacacacaaagcaggccaataaatactgccctccaggggaacacatgtaaaataggccatttatgtcaatccacagaacttgacagtccccgagacctcatggtgacagcctcctcggagacctccatctccctcatctggaccaaggccagtggccccattgaccactaccgaattacctttaccccatcctctgggattgcctcagaagtcaccgtacccaaggacaggacctcataca

SEQ ID NO: 174867 - DNA, 592 bp, Homo sapiens
ttagaacaagtcaaaatagcctcagggttggagggtggtgcgcttctgttgccaggaatggcatatccctacttggtggtagctaccattttatccttattggctcattgagaaaggatgggagaaaatgaatatggcgagcttgaaaatcagcagccagctttgtcccagaggtggatgcaatccagtggtatcagagctcatcacggctttcttcagattgttcatctatttgccaagcccctggccatcattcagagggaaggtacttagcaaaatatgagataagtgtcagcaatgacaagctagtgctcatagtcagcaggcctgctgatagcttggaaacacacaaagcaggccaataaatactgccctccaggggaacacatgtaaaataggccatttatgtcaatccacagaacttgacagtccccgagacctcatggtgacagcctcctcrgagacctccatctccctcatctggaccaaggccagtggccccattgaccactaccgaattacctttaccccatcctctgggattgcctcagaagtcaccgtacccaaggacaggacctcatacacactaaca

SEQ ID NO: 174868 - DNA, 454 bp, Homo sapiens
actcagaaagttgaccagctgtgaaatgtaggagctgaccacctgataattgcaccctttttgccctttcatcttccttcttcctgttgactggagcatgggcatgatggctggagctccagaagccaccttggactatgcagtgaatgtgaggatgaaagctacacaatcagagragtagagagaagacagaaggagcctgggttatgttgacactatgtgtccacaatactagtgctgaactggatgtctctggacttcctatacatgacagagaaataaatttctatattgttaagccattgatacctccagtctctgtgattataactgaaccccgccctagttgattcactaacctcatcaaaaaatatttcacatgctccactatcccctcttcggtcttcactatcaaggagtacttgatgctttgagggtgacctgggcaccatca

SEQ ID NO: 174869 - DNA, 572 bp, Homo sapiens
aagcttaaaaacaaaacaagggaaaccccaggaggagaaaatcagagccagytcccgagtgatggagatggaatagaacaatatcaaatttgaccactaaacaaaaagaagactgttgatttcaaggttttgaagtgtaaggtgccttcctctgtgtttacttgaataaacacagctgtaaaggtaagacatatatggaggatgtgatgtagcagaaataatataggctttggagtcaggcttccgtttgatccccagctctgacatctttggtaatggaaccatgagcaagtcttttaaccctgcttggccttgatggccacctctgtaaaaggggcaaatcataccaacattttcaggttgttgcatggattaggcaatccatgggcatctgtacaaaaataggtgcccagcgcctgtagtctcagctacttgggaggctgaggcaggagaatggtgtgaacccgggaggcggagcttgcagcgagccgagatcacaccactgcactccagcctgggccacagagtgagactctgtctccaaaggaaaaaaaaaaaaaaaggtgcccaag

SEQ ID NO: 174870 - DNA, 574 bp, Homo sapiens
tgatggttgcggttaacattcatcagaggtttttggcatttatcgtaatgaacatgcccccggctatttaggagaggayagtcatgtgtgtttgtgtgtaaacatctttatatacacacacaacacatttcaaactaagacattgctatgagataattgtttatgagccagagctaatattttgctatatctggagtttctcatggtgctacattcggtgtgaatctgtcgatgtcttgtttccccttcacccagatgaattaggactcagtgacacaaccacatatgaagtacaaagaaaggaaaaaggaagcttggaaaaagataatacaaagaagagaagaaggagacaagagggagagggaatgagaaagagtaacttgacgaaattgaatctaggatttattatctatctatcttatcgttccctctctctctttccctccatatactttctatgagtgtccttagaaatggaggagacaagagggcctcttttggagggcactgccattctcccctattctttggcctctatttatggtacccagggtgccttatatgtaatttacag

SEQ ID NO: 174871 - DNA, 574 bp, Homo sapiens
tgatggttgcggttaacattcatcagaggtttttggcatttatcgtaatgaacatgcccccggctatttaggagaggatagtcatgtgtgtttgtgtgtaaacatctttatatacacacacaacacatttcaaactaagacattgctatgagataattgtttatgagccagagctaatattttgctatatctggagtttctcatggtgctacattcggtgtgaatctgtcgatgtcttgtttccccttcacccagatgaattaggactcagtgacacaaccacatatgaagtacaaagaaaggaaaaaggaagcttggaaaaagataatacaaagaagagaagaaggagacaagagggagagggaatgagaaagagtaacttgacgaaattgaatctaggatttattatctwtctatcttatcgttccctctctctctttccctccatatactttctatgagtgtccttagaaatggaggagacaagagggcctcttttggagggcactgccattctcccctattctttggcctctatttatggtacccagggtgccttatatgtaatttacag

SEQ ID NO: 174872 - DNA, 537 bp, Homo sapiens
gattcactgacgggtggttttacaagcctggagcagttccagttgtttcacttttgttttgccaaaaagtctataagtgctatttaaaacgcagctttgctgacaggattccataaatcgatctttgtgtacctttctcacccaagttctcagtttataacacccttggttagaatacagcttcctctctttcctcgttatatgcacataaatacaactgattcattctccttcttacataatcttaccgatgtttgctttatccctgagcttgattcaaagaatgtctttggggagttcggggagcagagctgagataaatggggcaaaggaacctatgtattgtagatgatagccatgcttctaacacagtacctaaaatctactcagtgtaccccttcagratacagctcatcccttactgatgtctcaaccattgttccatgaatacctccctccaggaatcacaacctattaattactagtaggatcccccttaatgctggctgtaggaaacattataaaatttgaaatgct

SEQ ID NO: 174873 - DNA, 521 bp, Homo sapiens
tcatgttggctatttggagctgcagtttttttctaatgacttctgaaatgtgtgattattgarttaccagagtgaatttgatcatcacaggagacaatgtattcataaacataaatttcataatgaaatttcttagacaggttttagtctatgtgaattactatgtgacaaataaatttttattgacaaataaaaatactagcttcaggttgatggagaacccagagacagctcagggatgagtcaatcaaataaggtttattagtctgaagaatatagaaggaagtccacatagttaggatacttagcaggaagatcagctggattctccaaaaattataaacttctatacggcaagaaccttaccagaagagcacagttgtgaatgataatgcctgagtgagtgaaggttacaccagaacttctggaggctcaagtgcctgccttcaagccactgagagctggagcaattattcatgtaagctgccctggatatgtgctgggtaccaccttatggcagg

SEQ ID NO: 174874 - DNA, 461 bp, Homo sapiens
aatattgtccctgcgtatggttagagtaccttatggtactacttcagattttaaaggctatagtgttacacagttattttaaaaggtttatgggactgtaacctctgtagcctatatgcattaggaaaacatatacacctgtgaaatattagatacacataactgataggataacatatgcattagggaagcacacccatgaagtatcagataccatatttcagctatcttctcgctttgtgtgaaagtagggcgtggttcaaattcttatctgctcaaggagttattctcatatattcaacagaccccagttcctctttgtgtgctccttctsaaacccatagtttgagcgagtcactgtattttctggatcaaaattgggacacgatttaatacaagattcaacacctgttgtgggatgtgggaggagtgatttaaaatgtaaataacagaaaatttag

SEQ ID NO: 174875 - DNA, 443 bp, Homo sapiens
taagttgcacaaacacacacttaaaaaaattttatcatgcctcagtttaccttttaacattagagactactgaatcaaagactaaggtcttacgatggaaatccagatccgggctcwgaattagtttattacccaactgtagcctctccttagaggcaagattcccctgctactctagtttcggccctgacagtgagtacacgccctctggccactgccttctgctggtcacctcgagattacaccctctagagcctgaactgcccgaaacggtgcctgcaccctgacaagggcataaatggctagccatcccctctggcccagctagtcaagatgactaatcctgtccaaagctctcctgtctgtttttctcaggcatgggactctgctctacaggaggagactcacacaaaactccagctttgttgatttgcccctggctg

SEQ ID NO: 174876 - DNA, 443 bp, Homo sapiens
taagttgcacaaacacacacttaaaaaaattttatcatgcctcagtttaccttttaacattagagactactgaatcaaagactaaggtcttacgatggaaatccagatccgggctcagaattagtttattacccaactgtagcctctccttagaggcaagattcccctgctactctagtttcggccctgacagtgagtacacgccctctggccactgccttctgctggtcacctcgagattacaccctctagagcctgaactgcccgaaacggtgcctgcaccctgacaagggcataaatggctagccatcccctctggcccagctagtcaagatgactaatcctgtccaaagctctcctgtctgtttttctcaggcatgggactctgctctacaggaggagastcacacaaaactccagctttgttgatttgcccctggctg

SEQ ID NO: 174877 - DNA, 614 bp, Homo sapiens
aagcatcaaggctatgttaggagttggaagtttattcataaccatgaatacaatatgttgccgcacactcaaaccccaaccttcccattgcttatgcagttgcaggttagccaaatcctgtattccaagcttagcatgaatatcatccctggaattctaattttgttattgttgttgttattgaggcagtgtcttgcttcgttgcccaggctggagtgcaatggcaccatctcagctcactgcaacctctgcctcccaggttcaaacgattcwcatgactcagcctcccgagtagctggaattactggtgcgtgctaccatgcctggctaatttttgtatttttagtagagatagggttttgctgtgttggccaggctggtctcaaactcctggcctcaagtaatccacttgccttggcctcccaaagtgcaggggttacaggcgtgagccaccgcgcctggcccaattctttctaattttcaaaattggctgctctgatgatgtttgctgttgagattatactttatgttggttggccaaaaaattctaaactacagtttatttcctttattttctgcctaggataacctacctctctgggccataaaacttt

SEQ ID NO: 174878 - DNA, 519 bp, Homo sapiens
ttctcgcactcagtcctgcatcctctgtgcccccaggttctgccagccgccatcacttcctgctgtcttccatccctgcctctgctccaagctcttatttctcaatcagttaggaacctggcaggagtcagaaacttctagttatttgaggagagacaatttaatgcaaagaattgttagctgtggaattgaaaagatttaaaagagtacttgaagttagaacaaaggcagcagctgtaggcagcagccaccatctctggggctggagacaacaaaggaagaggttaggattgttaaaagatttggaagttttgaggagggacctggaagataactgggggtgmggctggagaggcagtcagctggtgttcacatttcccagctcatgagacccagagctctgaggaggggatgctgggcagcttgtacgatgtctctggccagggagtggttgatacatctcattctgcaaaatggaaagtggaaaaactgcaatgtggattcaccagctgctttgga

SEQ ID NO: 174879 - DNA, 519 bp, Homo sapiens
ttctcgcactcagtcctgcatcctctgtgcccccaggttctgccagccgccatcacttcctgctgtcttccatccctgcctctgctccaagctcttatttctcaatcagttaggaacctggcaggagtcagaaacttctagttatttgaggagagacaatttaatgcaaagaattgttagctgtggaattgaaaagatttaaaagagtacttgaagttagaacaaaggcagcagctgtaggcagcagccaccatctctggggctggagacaacaaaggaagaggttaggattgttaaaagatttggaagttttgaggagggacctggaagataactgggggtgaggctgsagaggcagtcagctggtgttcacatttcccagctcatgagacccagagctctgaggaggggatgctgggcagcttgtacgatgtctctggccagggagtggttgatacatctcattctgcaaaatggaaagtggaaaaactgcaatgtggattcaccagctgctttgga

SEQ ID NO: 174880 - DNA, 553 bp, Homo sapiens
tctcgggtatgaccttataacagtgtgagaacggactaaaacaggggcggttttctcccttttgtgctgttctggtgatagagttctcttgagatttggttgtttaaaagtgtgtggcacctccccttgctcttcctcttcctcccgctccagccatgtgaagacatgcctccttcccctttacctcccaccatgattgtaaatttctcraggcttccccagcccccatgcttcctgtacagcctgtagaaccatgaaccaattaaaccccttttatttatgaattacccagtctcaggtatttctttatagcagtctgagaacagactaacataaatggggaaaatgaagcagagacacgccatggagctctgtgtagcagctagaagcactggacagagggcacacacacacaactgttcatgtaaatcaaaacggtaatttccacaaaacttactggaacagttgcttatatggagggaggttaaaaggagaagagagtggagagaaagtggagtaactacataagtaattaacaagaacgacaatgata

SEQ ID NO: 174881 - DNA, 456 bp, Homo sapiens
gctgtcccgcaaaactgagaccaaaaaaaaaaaaaaagattgttttaagcactgaacttcaggggggtgatttgttatgtagcattattgcagcaatagctgactggtgtagtttctgctttcaagggacttggatgagtggggagcatggacaggcagttatagagtgacaaaaagctggaatggaaggrcatgcaatgtgctctggccacacaaggagagcacttgccctggcctgggacagactgagaaatgagaagagggggctagaagacttaagaagaagcagcccccatttgcagtgacataagaagtgcacacctttcctcctaactggaacccatgtgataagtgcaggtgtcgtgtgtgcaccacagactctcattctcacaggtgaaaccaggcgctcatctgagactgccaaggagagattcacacctcctggatacaagaaga

SEQ ID NO: 174882 - DNA, 549 bp, Homo sapiens
tgctgaaacattgaattgaatccagcaaaacttggcacctggtttgctaatagtgccacaaaatgtcataagaggagaaagtggccctgaatatggattaggaggacaggtcataaaagccctagtggggatctaggtaagagctgcatgctgggtgactgacacatgggatggccgtgtctctgtccctggtgctgaccaaccaccccccttgggtgctgtgccttcccctttggtgttggtgactcccgaccagacrttcccaggaatttccagcctggtgatagagtggcagtgaaggagagtgaggacaggcagataacttggtagaggttgctggagcagcctagccatacaaaactgtgaggcagagaaaactgacttttcatgtcattgcagttgtcaagaaagtttttagtttactctccaggaattaaggagaaatgtatttccctgggtcactcagatgcacagtacattggaattttaatcttgactccccgagcctggtgccaggccacatcaattcatccttcaaggcccagcctg

SEQ ID NO: 174883 - DNA, 602 bp, Homo sapiens
caccctggtccacgtcaccatcatctctcacctgggtaatcacggttrcctcctcactgggcttagagctactacctgctcctcctccagccctttctcgtcacagcagcttgaataatcctttcaaaacggaattggagatctgttctatgccaaaactgcccattagcgacacatctcacccaagccagcgtcctcgaagtgacccaggggtcacaactcatgttctcttagacctcatctcctctcctctccatcccccttccctgttcactctgccccagccccaccatgaaatgtagaccggccttttccagctcttgaatctgggcccatttaggaagcatgtctaccacaaaactaaaagccaccatcctcagtgaggttgctcctgttttcatgattctccccatggttgcaagatggctgccatgactccaagaataacattacactgcagcccccaatgtaagaggcaagaaggggcgctccccatatccacctctctctcctcatcagagaaggaaatccttcccagaagctttcctatgactttcatcatccaaacccagcacacatgaccacctttagtttcaagggag

SEQ ID NO: 174884 - DNA, 602 bp, Homo sapiens
caccctggtccacgtcaccatcatctctcacctgggtaatcacggttacctcctcactgggcttagagctactacctgctcctcctccagccctttctcgtcacagcagcttgaataatcctttcaaaacggaattggagatctgttctatgccaaaactgcccattagcgacacatctcacccaagccagcgtcctcgaagtgacccaggggtcacaacycatgttctcttagacctcatctcctctcctctccatcccccttccctgttcactctgccccagccccaccatgaaatgtagaccggccttttccagctcttgaatctgggcccatttaggaagcatgtctaccacaaaactaaaagccaccatcctcagtgaggttgctcctgttttcatgattctccccatggttgcaagatggctgccatgactccaagaataacattacactgcagcccccaatgtaagaggcaagaaggggcgctccccatatccacctctctctcctcatcagagaaggaaatccttcccagaagctttcctatgactttcatcatccaaacccagcacacatgaccacctttagtttcaagggag

SEQ ID NO: 174885 - DNA, 514 bp, Homo sapiens
tggccagtgcccccaattataatgtgaccctcccaggtactgcccaaccctacccaagtaccgaataacgagggatggagttcaggccaccttgcaggcaaagtcctctgccagctcgtggactgccccttgggtcacttcgaatacatcggcatagacttgcactttgcagtgcccccacccccaactcagcagcccacagtcaggctggcaaacagcaccgagacattgataatacagggggtatgtgtgtcaagggcacggggkgcctgtgggcagcttgcccaggctgtgcatggtggcgaggcctggaaggttttgcaagggcaaggcttgagctaaatcttgaaggaggtttagatgttggtcagaagaagaggcggggtggaggcaaggctcacagagctaaatcgtggcaggtggggacaagatgggaacgtgacttgccgggctgcctgccctgtgctcattctgcctcaccaagtgtcccctttctccttaggagaccagaact

SEQ ID NO: 174886 - DNA, 581 bp, Homo sapiens
acaaacatggaaaatagagaaatccctgaaaacacaaagccttaatgtccaggttcttattcttagtttgccgatttgttgatttgcctttattttgtgatgggctctgtctcagatgtgattctgaggcacggggtaggacagtgggcagcctggagggttctagacctgctggtctcttctgtgtgagcctctctgagggtgaggctgattagaatctgctgattgctgctgcggcagaragaggaggacagccagcctcgcacctccgcatttgcacaacctggagtcccaaagcttctccctgcaggtatgccttagggaggagcggaaggtggaggttccatgtcctaatcagggcccgagactgagggacgcctcttcttcttcacagacaagtgggagctggactctgacagaatatcaaagtgaaaattaatgcccgctgcttgtatattgcctagacgttacttttgagaggaaaacaacaggagcagagcgaagctgtacatatgttaaattcacatcagtaataaagattaagtagaagttaatagcatcccagtcatgcttgtggaggt

SEQ ID NO: 174887 - DNA, 596 bp, Homo sapiens
tttgtgagcccctaaaagtaactgaggcctgaggcactgtgtctggtgggcccagtggagtgctaggccctgcttgtctggcaacctgctctccccttttcctacccatctctgccgctatatggcaacagctgtcctggatggtataggaatgaacatgtggactgtgttcccrtcagaccttattgatggacacagcaataggaatttcctataattttcaggggtcacaaaggcttcttctgagttcttttccacccatgtacaaatcattctttgctcaaggaccttggaactatgccatgtaggtttcctgggcaaagcctcccctgacgttggacttggtaacatgagaaacaagttctaggcatatctgctgagaaataatattttatttttcctttatccattagggatggccccattttgagggagctgtccctttgcccaccaagtgctaatgacacagagaattgtgctgtctcccaggcctggggctgaggaggctgaaagcaacgaaccgcacccccatcctctccagcatttttctccacctctggtagaaaattgtaagggaagttctgtctttgtcatcc

SEQ ID NO: 174888 - DNA, 568 bp, Homo sapiens
taaatgacactaaagggaaacaacagagtaaatccagaattctacaaaataactggctgtcctaaactctaaaaataaaataaaaaggaaaaaatattctaagatataaaatcaacataaaaaatcaattgtatttttatatactagcaggggaaacaaatttaaaacataataccattcatactcactccaagaaaaattacatactcaggtataagtctaacaaaacatgtacctgatcagtatgatgaaaaaaaccaaaacaatgatgagagaaatcaaagatytaaataaatgaagagatatattgtgttcatggataagaatattcaacatagttaaatctccccaaattgatctataggtttaatacaattcatataaaaatccctccaagattttttggagatataggaaaattataaaatgtatatgaaaaggcaaaggacctaaaatagctaaaacaattctgaaaaaaaaaaaaaaaaaaagtgaagttgaaggaatcacactacctgatgttaagaccatggtaatcaagccaatgtgttactggcataaaaacaga

SEQ ID NO: 174889 - DNA, 577 bp, Homo sapiens
ggccggtgccatcttgtctgctccttactgtacagtggctgacagataagggaagatggagccaccattttgaacatgtctagtcccagctagttctttcctacctgcattcattcctgcaagctcccagttgcttgtctatgtctgaggcccaactttacaggctgctctttgttagaaaatgatttgggctgcttttcattaaaaggaaaaccttaccaagcacttccataccctcactatctgcctaagtaatttcttctttgtcaggcctctgagcccaagctaagccatcatatccccagtgacctgcacatatacatccagatggcctgaagcaactgaagatccacagaagtgaaaatagcttaactgatgacattccaccattgtgatttgtttctgccccacactaactgatcaatgttgtttataatctcccccacccttaagaattttctttgtaattctccycacccttgagaagttactttgtgagatccaccccctgtccccaaaacatcgctcttaactccaccgcctatcccaaaacctataagaactaatgataatccca

SEQ ID NO: 174890 - DNA, 313 bp, Homo sapiens
tgatttgaatttgataacataacggttcgtatcacatgtttgtgcaagaatgtccatgcagaagtctgactgctttttgtgggggtcaaccaagtcagagactggaacggctacagaggaaaggtatcttcttggttttcctatgaagtttcttttaaaaacataataatgaagagtttatttataaatgtcctcagagcagagataatataagtcatgcgtagagaccaaatcccccaraaatattagagaagtcttcagaatccattcttgttgtcatgcacaaatcctttctggacatctgttgtgacag

SEQ ID NO: 174891 - DNA, 514 bp, Homo sapiens
agatcatatgggaccatcaatatataatcactactatgaattgtagtctgtgtaatacaatgttaatattgagtgtcaacttgattggattgaaggatgcaaactattgttcctggttgtgtctgtgagggtgttgccaaaggaaattacatttgagtcattgaactgggacaggcagacccaccttcaatctgagtgggcacaagctaatcagctgccagtggggctagaataaaagcaggcagaagaacgtggaaggactagacttgctgagtcttccagtcttcatctttcttctgtgctggatgcttcctgacctcggacatcagcctccaagttcttcagcttttggactcttggacttacaccagtggtttgccaggggctctcaggcctttggccacagactgaaggctgcactgttggcttccctccttttgagcttttgggactcagactgatgyaccactggcttccttgcttctcagcttgcagacagtctatcgtgggactt

SEQ ID NO: 174892 - DNA, 542 bp, Homo sapiens
tcagtgtatgaaaaccatgctttaaaatttttctaactctttattttgaaattattttagatttaaagacaaattacaaaaaaatcatacaaactaggaaattaacattgatacgataatactaactaatctacacatcttattcaaaatttgcagtgttcctagtaatgtcttttttttctggtccagaatcaaatccagagccccatgtaaaaaatgtacccatcttaagtgtacatttttatgagctttgataaatttatatgccatataaccactactaaaataatacatacatttttacaatcccaaaagaatctcattcccatcactycacaaagtctattatgccgcttcctagtcaatccccccaaccctcttttggtccccagactaccccaaaactgacctgctttctaccactatagatgaaattttgcttttctagtatttcaaatagatggaaccatatagtgtgtacttctttgcatctggcctcttttgtttagcatcactgcttggcggttcatccatgttgttgc

SEQ ID NO: 174893 - DNA, 582 bp, Homo sapiens
tgcatttctttcatgcatgcctgatgttccttgaggtcagagattcataaatgcaatttttgtcttttgcattacctctaggtctaccacagggctgagcactgagtagcttctcaatatttgtttttcaaattgaatattgcatctggattgttcgtcatcttcagagcaatgaaattatagccattctttggttggtttaccaaattgagcagygatattctgctatcctgagttatcattcttctaacaggcatcattgatgtatttgtatttctggaaatagtatttgaagttcaagtatcctcctaggagggttaaaacagagattttgctgccaagaatgggagagaggtagtagagtattgatggttaagagcaagggttctggttcagcatggcctaagcttcaatttgactctacttacatagttactagctgtgggatctcaggcaagttactgacaactcagtgcctcagttttccctctgtaaaatatggacaatagtagtacccacatcatagggttatattgaggattgatgtattaatacaagtaaagcacttaggaaattctcctg

SEQ ID NO: 174894 - DNA, 582 bp, Homo sapiens
tgcatttctttcatgcatgcctgatgttccttgaggtcagagattcataaatgcaatttttgtcttttgcattacctctaggtctaccacagggctgagcactgagtagcttctcaatatttgtttttcaaattgaatattgcatctggattgttcgtcatcttcagagcaatgaaattatagccattctttggttggtttaccaaattgagcagcgatattctgctatcctgagttatcattcttctaacaggcatcattgatgtatttgtatttctggaaatagtatttgaagttcaagtatcctcctaggagggttaaaacagagattttgctgccaagaatgggagagaggtagtagagtattgatggttaagagcaagggttctggttcagcatggccwaagcttcaatttgactctacttacatagttactagctgtgggatctcaggcaagttactgacaactcagtgcctcagttttccctctgtaaaatatggacaatagtagtacccacatcatagggttatattgaggattgatgtattaatacaagtaaagcacttaggaaattctcctg

SEQ ID NO: 174895 - DNA, 582 bp, Homo sapiens
tgcatttctttcatgcatgcctgatgttccttgaggtcagagattcataaatgcaatttttgtcttttgcattacctctaggtctaccacagggctgagcactgagtagcttctcaatatttgtttttcaaattgaatattgcatctggattgttcgtcatcttcagagcaatgaaattatagccattctttggttggtttaccaaattgagcagcgatattctgctatcctgagttatcattcttctaacaggcatcattgatgtatttgtatttctggaaatagtatttgaagttcaagtatcctcctaggagggttaaaacagagattttgctgccaagaatgggagagaggtagtagagtattgatggttaagagcaagggttctggttcagcatggcctaagyttcaatttgactctacttacatagttactagctgtgggatctcaggcaagttactgacaactcagtgcctcagttttccctctgtaaaatatggacaatagtagtacccacatcatagggttatattgaggattgatgtattaatacaagtaaagcacttaggaaattctcctg

SEQ ID NO: 174896 - DNA, 444 bp, Homo sapiens
gcatccagcaactttcacctccaagaagaaagcacaatacctggtaggcctctactatttgyggagacagcatattctacacctaggaatactaatccagcccacatactggtaccccagtggctgccagtttggagaggcccatagcaggaaacgattgtgcagtaggtccaggctatggcgcaagctgccctccccctgggggcatgtgtgtggacagaaccctatgttaagtgtcggtggtaggaaaagacaccatgtaaagtgtctggcaaggccctggaggagaattataatgcagactcatagggttctgggacaagtccatgccacctgcagtaataaatcatatacactcacgaacattcctgatgcactactgggccctagtagagacagagtgcgggactcatgcaactctaaatgaccatgcagtagaatggc

SEQ ID NO: 174897 - DNA, 444 bp, Homo sapiens
gcatccagcaactttcacctccaagaagaaagcacaatacctggtaggcctctactatttgtggagacagcatattctacacctaggaatactaatccagcccacatactkgtaccccagtggctgccagtttggagaggcccatagcaggaaacgattgtgcagtaggtccaggctatggcgcaagctgccctccccctgggggcatgtgtgtggacagaaccctatgttaagtgtcggtggtaggaaaagacaccatgtaaagtgtctggcaaggccctggaggagaattataatgcagactcatagggttctgggacaagtccatgccacctgcagtaataaatcatatacactcacgaacattcctgatgcactactgggccctagtagagacagagtgcgggactcatgcaactctaaatgaccatgcagtagaatggc

SEQ ID NO: 174898 - DNA, 444 bp, Homo sapiens
gcatccagcaactttcacctccaagaagaaagcacaatacctggtaggcctctactatttgtggagacagcatattctacacctaggaatactaatccagcccacatactggtaccccagtggctgccagtttggagaggcccatagcaggaaacgattgtgcagtaggtccaggctatggcgcaagctgccctccccctgsgggcatgtgtgtggacagaaccctatgttaagtgtcggtggtaggaaaagacaccatgtaaagtgtctggcaaggccctggaggagaattataatgcagactcatagggttctgggacaagtccatgccacctgcagtaataaatcatatacactcacgaacattcctgatgcactactgggccctagtagagacagagtgcgggactcatgcaactctaaatgaccatgcagtagaatggc

SEQ ID NO: 174899 - DNA, 444 bp, Homo sapiens
gcatccagcaactttcacctccaagaagaaagcacaatacctggtaggcctctactatttgtggagacagcatattctacacctaggaatactaatccagcccacatactggtaccccagtggctgccagtttggagaggcccatagcaggaaacgattgtgcagtaggtccaggctatggcgcaagctgccctccccctgggggcatgtgtgtggacagaaccctatgttaagtgtcggtggtaggaaaagacaccatgtaragtgtctggcaaggccctggaggagaattataatgcagactcatagggttctgggacaagtccatgccacctgcagtaataaatcatatacactcacgaacattcctgatgcactactgggccctagtagagacagagtgcgggactcatgcaactctaaatgaccatgcagtagaatggc

SEQ ID NO: 174900 - DNA, 571 bp, Homo sapiens
tgaggactaagtaaacagtgaacaggactctccctcaaggcccaacaaactgaaagagcaaattcgcaaatgctcactggggtacactcaaaggtaccctaaccatactatttatactcagaaacatcctaactatataattgaagccctagcagtgtctcacttccccccaaagagcagttcaagcccaggagcatcagaacattattagaaaatgtgcctggtaagatggttattaaataaagtatgactcatttaggtggctttaatctctcctattatgtgccaaataggaactgaaagtggtttagcacataaatccatttaatctaatttgtaacataaaacatcggattccatttccatattatcagtgtggcagcaggcatttcggtacaagccttctggctgagcaatgggcyaatcaccagaggaggggccactccctcaagtagcataaattttacttgagataaaacacacattgttgtactggggaaaagtctgtgatccaggcaaaaaggcattgaccttggagtttggggacccaggctctgattctggaactagc

SEQ ID NO: 174901 - DNA, 611 bp, Homo sapiens
ttttacaatataaagataaactgagattattttcattacagtcacaacttttcagcatactacattagaaagaagaaataaggagaggagaaagagacagacagacagacacacacagacagaagctgaacaaattataaaatacaaatctctaagttgtattttgcaaaaaggtagaaagatttttgatgatcttaaaatcacagcttttaatcaaagattaagaattccaaatagtaagcatttagctgatggaaaagcttgaagcgtaggttactccacaaagaagctattctgacactgatgaaattgcatgtcaaccagaaatgcctacattccagtagtatctctttaaatatatgctcctgaacatatattagaaagtggatgcctaactttaatcatkttcaactgagaacagaatgaatttatcttcctttgtctgaaaatcatatgggtgttgaaaattgccaagcttcaatatccagtcaacattaagcaaaatgaaccaaggatagcaatagctagaaccattaccaaatgctacccataaattaaagaaatgttgtctccttagcatgtgatttacttggaaagcttttagtgctaat

SEQ ID NO: 174902 - DNA, 611 bp, Homo sapiens
ttttacaatataaagataaactgagattattttcattacagtcacaacttttcagcatactacattagaaagaagaaataaggagaggagaaagagacagacagacagacacacacagacagaagctgaacaaattataaaatacaaatctctaagttgtattttgcaaaaaggtagaaagatttttgatgatcttaaaatcacagcttttaatcaaagattaagaattccaaatagtaagcatttagctgatggaaaagcttgaagcgtaggttactccacaaagaagctattctgacactgatgaaattgcatgtcaaccagaaatgcctacattccagtagtatctctttaaatatatgctcctgaacatatattagaaagtggatgcctaactttaatcattttcaactgagaayagaatgaatttatcttcctttgtctgaaaatcatatgggtgttgaaaattgccaagcttcaatatccagtcaacattaagcaaaatgaaccaaggatagcaatagctagaaccattaccaaatgctacccataaattaaagaaatgttgtctccttagcatgtgatttacttggaaagcttttagtgctaat

SEQ ID NO: 174903 - DNA, 621 bp, Homo sapiens
ctttgcagtcttcttttcatgatgcacagagttggaattatccggtcccctgtgccccatcacagttaaccacaggcagtctacctggagtaggcacctgtttctctcaggccagacaaaggccttcaagggacacatgggcacaacattttctyaaaagcccagttcctagaggcttaacttccacctgtttactttcctaaaacagatgtgcttgagaatgtgctggggccatggaaccatgatgattctcctcgcctctctttcctgttcacagtgaacttgtctttacaagtcatgattctcactgctccagaatcttactaatgccttccttacacctctggtgtagaaacctggaggtagtgcaaatggacgattgaagtgctggggtcaagaaaaatctcctttaattaaggctccataaagccaaagtccacttcctaatttcccccagtctctttctctaaagagtaaagcatggcattagaaatagcatatttagatctctgttgcaatgttctgaattcagaagggttcccatcaaaataggtgccatcagtttatttgatttaaaaacatgaaatgatagtttctgatagaaagttagtctgatttgca

SEQ ID NO: 174904 - DNA, 621 bp, Homo sapiens
ctttgcagtcttcttttcatgatgcacagagttggaattatccggtcccctgtgccccatcacagttaaccacaggcagtctacctggagtaggcacctgtttctctcaggccagacaaaggccttcaagggacacatgggcacaacattttctcaaaagcccagttcctagaggcttaacytccacctgtttactttcctaaaacagatgtgcttgagaatgtgctggggccatggaaccatgatgattctcctcgcctctctttcctgttcacagtgaacttgtctttacaagtcatgattctcactgctccagaatcttactaatgccttccttacacctctggtgtagaaacctggaggtagtgcaaatggacgattgaagtgctggggtcaagaaaaatctcctttaattaaggctccataaagccaaagtccacttcctaatttcccccagtctctttctctaaagagtaaagcatggcattagaaatagcatatttagatctctgttgcaatgttctgaattcagaagggttcccatcaaaataggtgccatcagtttatttgatttaaaaacatgaaatgatagtttctgatagaaagttagtctgatttgca

SEQ ID NO: 174905 - DNA, 609 bp, Homo sapiens
atcaggggcaggttccccgataaaggatgtaaaatatcttagcttttaaggaagagtttcttcatgttttttataaatgaaaaatgatggagtttcacattgctatggcatttagactctactgggcacttttaaagcagtgatattaaggttttattttaaaatgtcagtatatacaatgaactgaaaatctttttatttaaaattatgatgcaaatttaaatattaacctaaaagatgagagaggacacaatttttaaaaattcttttatgaggcaaaagggtaaaatkcctctactgtgaactctatagaactctgacaataggtcactggcagtgtgttacattgctttaaatgtcagcattatagttctggtaagtgatttttctgagtctagttgaaaatctgtacttaaagtaccttggagacaatgatcagaagaaggaacaaatgagaaaggcaggtaaccatcttaattcaatgcttgcagagagggagtacatgaaactgcaggtgaccttgggcacagtgatcacaagctgtaaagtttaggttgaattctaaggaaaaaggaaagttctattagtaaaatgacttttaaaaaagtt

SEQ ID NO: 174906 - DNA, 609 bp, Homo sapiens
atcaggggcaggttccccgataaaggatgtaaaatatcttagcttttaaggaagagtttcttcatgttttttataaatgaaaaatgatggagtttcacattgctatggcatttagactctactgggcacttttaaagcagtgatattaaggttttattttaaaatgtcagtatatacaatgaactgaaaatctttttatttaaaattatgatgcaaatttaaatattaacctaaaagatgagagaggacacaatttttaaaaattcttttatgaggcaaaagggtaaaatgcctctactgtgaactctawagaactctgacaataggtcactggcagtgtgttacattgctttaaatgtcagcattatagttctggtaagtgatttttctgagtctagttgaaaatctgtacttaaagtaccttggagacaatgatcagaagaaggaacaaatgagaaaggcaggtaaccatcttaattcaatgcttgcagagagggagtacatgaaactgcaggtgaccttgggcacagtgatcacaagctgtaaagtttaggttgaattctaaggaaaaaggaaagttctattagtaaaatgacttttaaaaaagtt

SEQ ID NO: 174907 - DNA, 524 bp, Homo sapiens
tttataacagaatactattgaagtgcatcatgccaattattttggttattgaaaaactaaatagggttcctgcaatgcaaacactcatggagtagatgtgtctagtttttgcctgtcatccattggcatccagcacgtgtatgctgtagtaatacacttgcctgaacaattttatacatactgacatggataggcttgagctatgaaaaaaagaaaaacacagccagacttccacctctctcaccaatgacacattctcatttacagtttacatgaggacactgagagtctttgaggttaagtcacttaagttagacagtggccgtgtatgagtgaatgtctgtcattggactttgagtcctaggttaattttgcctctccatggtttcctcatgttaatcctgctgcttgttgattggttgtttttcgtgacagactcagtgactgtwtgaccctattatgagctccccctaaaactgttagctctaaagaaatagtcatcagagtaaacagacaacccacag

SEQ ID NO: 174908 - DNA, 416 bp, Homo sapiens
aacctgacaggagtttcattggattagtttctagacccatgccttaaggaacttgcaactccagtcacttagaacactcattctgagggaagccaaccactgtgtaagaagtccaaccaccctgagactgccatactgcgaggaagctcaagctagccacktggagaggctatgttgagatagatacctggcatctttagctgctgtggccatcatagtccaggtcccaagaatgggtggaaaaatcatcttggtcattccaacctaacagactcaacaaggagaaaagttgaagaaacaagtcaacagccaaaatcaaggccccaggcatatgcagctatttgagccacacaagctgagatcccaatcatcactgggcagacacaagtcattccctctgtgccctgcttgaattc

SEQ ID NO: 174909 - DNA, 416 bp, Homo sapiens
aacctgacaggagtttcattggattagtttctagacccatgccttaaggaacttgcaactccagtcacttagaacactcattctgagggaagccaaccactgtgtaagaagtccaaccaccctgagactgccatactgcgaggaagctcaagctagccacttggagaggctatgttgagatagatacctggcatctttagctgctgtggcyatcatagtccaggtcccaagaatgggtggaaaaatcatcttggtcattccaacctaacagactcaacaaggagaaaagttgaagaaacaagtcaacagccaaaatcaaggccccaggcatatgcagctatttgagccacacaagctgagatcccaatcatcactgggcagacacaagtcattccctctgtgccctgcttgaattc

SEQ ID NO: 174910 - DNA, 556 bp, Homo sapiens
cattctgagggaagccaaccactgtgtaagaagtccaaccaccctgagactgccatactgcgaggaagctcaagctagccacttggagaggctatgttgagatagatacctggcatctttagctgctgtggccatcatagtccaggtcccaagaatgggtggaaaaatcatcttggtcattccaacctaacagaytcaacaaggagaaaagttgaagaaacaagtcaacagccaaaatcaaggccccaggcatatgcagctatttgagccacacaagctgagatcccaatcatcactgggcagacacaagtcattccctctgtgccctgcttgaattccagactcagtgttgtgagcctaattaaatgcttgttgttttattctactagattttggattactttgttccacagcagatcctttgaaaattggatgggagcaatggatcctcttctcagagcaatgcacacagacacacatacacacatacacatacgtgtgtgcacacacacacaagtttataccaaatcttagtgttcaccactccccttaaatt

SEQ ID NO: 174911 - DNA, 435 bp, Homo sapiens
aattatccaaactcaaccacaaagaaaaatagtaaggaaaaaagaacagattatcccaaagatgtggggccatcaaatggtcttgcatacatatacttggagtaccagacaaaatatagaaaggggaggacaggacagaaagagtatctgaagaggtaagcttcaaaattaatgaaagaaaacaaaccatagatccaagaagttcagagaatctaagcagtataaataccaagccaagcacatcacagtcaaactgctaaaaccatacataaagggaaaatcttgaaggtaaccagagaaaaaaagaaacatttccagcagaggcacaaagawaggaattagcacaattttttttatcagaaatcatgtaagcaatagacaatggaataacatcatgaaagaattgaagggaaaaaatctgtcaagccagaattc

SEQ ID NO: 174912 - DNA, 625 bp, Homo sapiens
agcaagtttttgtacagagaatccattgactgaggaagaaggtaggtctgcagaaggaaggagctctccaataccctctaacaccacagtcaagtgtacacagaatttattgccctgatccttccctaaggggacctatggccatttatgctagggaaagatacaaatatttttaggaccactggaaacggtctgagttgacataggtacctggagtcctgaagaatcatcatggcctgtctcttagaatgggggtaatgagagtcaggtaatacgtggaatcctaccatgcttttgttcatagtgattccactggatccacaggcccacctcgtgatcatttctcaaatccctgaatatatagtyagaataaacatacttgataggtaggtacaacacccatgttaaatccttagtcaatgaagtgaacactatcataatggggactaagaaatgaaagctacctctctccacagatggaagctttgctatagcctcacttatggggtacccttgaaaaacagtggccagagaaaatcctcccaatgaggagcagcactttgcatagtgcacctggttatccactttgtattgaagaaaagtgcccaaggttggaatatatatg

SEQ ID NO: 174913 - DNA, 313 bp, Homo sapiens
tctccctcagcccaatcctgctttccattcctcccttgcataggtattgatcccaaagacactccttagtaaacactggcacactagactctagttcagagttggcttcccacacaccaacttcagtttcctcaactatgaagtattaatcaatctcacagggaaaccatcaaayggcatattctccatatgagcactttcaaaaccataaagacatacaattataatgctacaattactattgttattatttaaataattatgctcccaattctttattccttatatttttctagtatgatacagtttttga

SEQ ID NO: 174914 - DNA, 548 bp, Homo sapiens
aatctgcatgcattaagaagaaagttgatgtcttaatttacaagaagcttggagggcatattcaattcagaaaaattgaaagagggctcttggtttgagtgtatcatgattgccacccaaaggaccacttctataagctcatgtcctgcctcaaaggtgggtgtcattgctgttcacagtcctgctgctcatggtacccactgcttctacaaacatgtgggttgaccactggtcctgccgaggttttcaaggttgcagtgctgtggattcatgcacctaggtagtaagcatagaacctaacagtttttcaacccttgcctcccctccayccccttctagtagcccccagtgtctattgttgccatctttatgtccatgagtacccaatatttagctcccacttacaagtgagaacatggggtagttggttttctgttcctgcattaatttgcttaggataatggcctccagctgcatctatgttgctgcaaaggacatgatttcattcctttttatggctgctgagtataccatagtgtatatgcacc

SEQ ID NO: 174915 - DNA, 325 bp, Homo sapiens
cataaacccatttactcttgtgttagatagtgtgtcagttatcaatttgatgcttctcaacttkaagtgtgctcttcatcaccctgtgatttttatatctgggccctgtaaatattttttgccacctggcatgatgttcgtctttgtcaatggaggacactggagggagattgcaggaggaaggggcttctttttatgcttccctgtgcttgcctttcttcttgctcctgttgcacttagaccataagcaagatacttagccaagctcattctggagcttttacatcagcacccaatgggtgcattcctggcatgttttgtcagc

SEQ ID NO: 174916 - DNA, 364 bp, Homo sapiens
agtcttcgtgccttttttataccatgaagacctgctgttcttttattctgcttaagtgcataagcgttactgtgtatgktgaaaaccgtgttgcctcacagagcagccaaaagctagctgctaaaaccaggattcattctgtaacaggatgacattttgtctttttttttgagacggagtctcactctatctttttactcttccacgtgacttctgtatttcaggggagaggaagtgcgattcctaaggggatgatttgattcttctcaaataccagctcagcctctctttaaggccacacaccgatgctgagctgaagagtggcctgatctgaattttcccctaggttttaggagatgcagag

SEQ ID NO: 174917 - DNA, 364 bp, Homo sapiens
agtcttcgtgccttttttataccatgaagacctgctgttcttttattctgcttaagtgcataagcgttactgtgtatggtgaaaaccgtgttgcctcacagagcagccaaaagctagctgctaaaaccaggattcattctgtaacaggatgacattttgtctttttttttgagacggagtctcactctatctttttactcttccacgtgacttctgtatttcaggrgagaggaagtgcgattcctaaggggatgatttgattcttctcaaataccagctcagcctctctttaaggccacacaccgatgctgagctgaagagtggcctgatctgaattttcccctaggttttaggagatgcagag

SEQ ID NO: 174918 - DNA, 310 bp, Homo sapiens
ttcatataaatgggagtgcatggtatgaacttttttgttcttgacttctttcccttggcagaaaatttttgagrtttacccattctgttttagcagtagtttgctcctttttatgagtgaacagtatttcatgtatgaatatacaaggttatagacatgtttgttgtttccagtttggggctatgataaataaagctgccataatcattcatttacaaaaattgtatagacatgttttctgttatcttggataaattacctaagtgggaaaatgttgagtcatagggtaggtgcatgtctaacttttaaa

SEQ ID NO: 174919 - DNA, 310 bp, Homo sapiens
ttcatataaatgggagtgcatggtatgaacttttttgttcttgacttctttcccttggcagaaaatttttgagatttacccattctgttttagcagtagtttgctcctttttatgagtgaacagtatttcatgtatgaatatacaaggttatagacatgtttgttgtttccagtttggggctatgataaataaagctrccataatcattcatttacaaaaattgtatagacatgttttctgttatcttggataaattacctaagtgggaaaatgttgagtcatagggtaggtgcatgtctaacttttaaa

SEQ ID NO: 174920 - DNA, 662 bp, Homo sapiens
tttggtggcatatttcaaagagccaaagttttaaattctgatgaagtcttatttgtcgggtttttattttatgattcaactatgggttttctaagaaatatttgcctgacacaaatctgcaaagatatatttttctaagtttttgttcattagctatattttttaggttattacctttaggaatattgttcaattagaattgacttttttgtgtatgatgtgaggtaggggcagagtttgtttgtttgtttgttttcaatccagtattccagcatatttgttgaagagattttcctttccccattaggctgctttggtgctcttgttgaaaatcacttgactatataagtttggcctctttgtwgactcctcattctatctaattgatctatttgtccttttgccaatattatactgttttaggtatagtagctttatgataaatgccgaagccaggtagcataaatccttccatttttgtttttctttttgaagattgccttcattattcttgatcttttgtttttccggatagtttaaaatacgtttatgttagaaaatattttgatttacaaaggttgcaaagagagtaaaaagatttcccacgtagtccacacttggtttcttctattgctaatatattacattagtgtggtgcatct

SEQ ID NO: 174921 - DNA, 410 bp, Homo sapiens
agatgtgaaaacatttgcagaagatcatgcagttgcaggtaggggagcaagatcagaactcaaacactctggtttgaattcrtgattttcaccaccatgtgacctgactacatcagaggcttttgtgagaattaaaatttcaaactatatgtaaaatactaagaacaagtcctgcccttagtgagcagctatcaaagaataaaacaaagaaaactgaaattaaaggagacccaatccaagtttattaacctgtcggggaaaggaaaacacaccatgaagccatttattgactagttgcactgagggacaaaacgctgattaagcgctagaaaacagaggagggtgtgtgtgtgtatgtgtgtgtgtgtgtgtgtgagctcatggtgttatcttaaataaagattgaatac

SEQ ID NO: 174922 - DNA, 432 bp, Homo sapiens
tgtctattaaacaaatatgaacccacaaactcctcttgtaactcatcgttccattttttctacaytcagttcatttgatcacttcatcaaaggcagcagttaaatgaggctcagaagggcttaagggccagtcaacagggaagatgtgtaaaggctcagcaagtttctctcaaacccaatccattgttgttgacatagacataactgttgcccactcatggctctatgtgtgtgcaacacaaacccagaaaagtccatcttaggagtttaaataagcctgggaagattttgcagtgattctttgcaagattacagtgcagtgcaaggatctgagaaaatgaaacattaaaacgaccctgaaaaagagtagctatccattctagcagcaaaggtcatagtattgatatgcttccttaagttccctgaatttta

SEQ ID NO: 174923 - DNA, 432 bp, Homo sapiens
tgtctattaaacaaatatgaacccacaaactcctcttgtaactcatcgttccattttttctacactcagttcatttgatcacttcatcaaaggcagcagttaaatgaggctcagaagggcttaagggccagtcaacagggaagatgtgtaaaggctcagcaagtttctctcaaacccaatccattgttgttgacatagacataactgttgcccactcatggctctatgtgtgtgcaacacaaacccagaaaagtccatcttaggagtttaaataagcctgggaagattttgcagtgattctttgcaagattacagtgcagtgcaasgatctgagaaaatgaaacattaaaacgaccctgaaaaagagtagctatccattctagcagcaaaggtcatagtattgatatgcttccttaagttccctgaatttta

SEQ ID NO: 174924 - DNA, 610 bp, Homo sapiens
acaaagatagaagctataaaaattaataaaacagaaattctggagttaaagaatatgagggctgagccaaaaagtttcacagagagcttgaacagcagacttgatcaggcagaggaaagaatgagtgaatccagagacagaacatttgaaatgacacagttaaaggaacagaaactaaaaagaaaacaaaaagagtgaagaaagcttacaggacctacaaggcaacatcaaggaaatgcatatatgtattatggaaattacataaaggattagagagagaaagagacggaaagcttacttraataaataattacagaaaactcttcaagtatggagataaacatcaaaatccatgaagttcccaaaacccaaataaaatggatataaagagattttcaccaagacattttataatcaatttctcagaaatcaaatgcagtgagagaattttgaaaacagcaagagaaaagcagctcaccacataccagggaacacttataagactaccagtagatttctcaacagaaaccttgcaggcaagggatagtagtataatatacttaacacactgaaggaaaataatgcaaaccaagaacactataaatagtaa

SEQ ID NO: 174925 - DNA, 558 bp, Homo sapiens
tttttaaaattacagcagtaaatcctcacctattaataataaccttgaatgtgcatgaattattttcctcatttaacggttaggcttactgaatgaattaaaaaagctagatccaactgtatgcctacaagaaactcactttacctggaaagacaaacatagatttaaagagacaaaatggaaaaagctattccacacaaacataaatttaaaatgagcaggattagttatatttacatgagataaaatagacttcaagttaaaaactgtaaaaagaaacaaggagcatcattatataataataaatggattaatttagcaaaagtatatagtaattataaatatatatatatatacacaccaaacactggaacacccagatatataaagcaaataatattcaattaaaacaaagagatagattccaatacaataacagctaagaacttcaacaccccactctcagcattggccagatcatacaaacaagaaatcaacaaagaaatattatatttaamctgcaatatagaccaaatggacccaacaaacattaacaaa

SEQ ID NO: 174926 - DNA, 279 bp, Homo sapiens
aaacccttggttcaaattgcttcattcatggtttttaccaacttgattaataccaattactcacaaactctttcaaaaaaatagaacagagattttatcaattcattttatgasgctagtattaatctggcaccaaaaccaaagaaagctatccataagaaaagaaaatatcagaccagttctccttattattatagatacaaaactcctcaaggaagccaaattcagtaatacaaacagaaatatacagtataatgaagtaggatttaccccaggaaa

SEQ ID NO: 174927 - DNA, 446 bp, Homo sapiens
tattattgtgctgtatttaagatcttagggaaaaataattagttattcacctgtacatgtgatgaaagttatagagttgtgctttatgtagttggataagaaatgttttctttttcaaaaatatgtgtgttgaattttgataattgccatttacaaatctattctgaatctattgtgatgcttatatatttttatattttagtctcttactagagtgaattacaatgattgatttatgaatgttaaaccaccttgtattcccaggacaaattcaacctggttatgatgtgttacctttttatgtggytaacttcaataagctaaatttgagatattatttttgaatccatgtttagagatatttgtaatttatttgtaattttgttgcaataaccattctaagcatcttattaatactccatcatacaaggagtagagatgtgtac

SEQ ID NO: 174928 - DNA, 579 bp, Homo sapiens
tattttgaaaataagtcccagttgttactaatatataccaacatacacacacacacacatayatacacatacacacccatacacacacacatacaccctgtgaataattatgataagatgtcctttagaatttgaccttgcttactattttaattttcatctcttccaactcctacatttgatgttattttcattcatcaatgtatatttctctaaatatataaagttgttttatacttccattcattggaaatggtcttcacttctccctcagtcagtttcatataccaatgcatgcacaagcatgctctgttctctctcacacacacacatacaaatatacacacccccccacacaaatatttctgatattttggggcctttttgaatatacctgcctttgctatattctacttatatgccactattattgtgaggctgtcatttatacttccatacataatttactattccattcttagagctcctacaggtaaattcacttcaactgactctattgtatttaaacgtttattattctaaactatgaaatcaacaaaaggacagtttgagtctaat

SEQ ID NO: 174929 - DNA, 579 bp, Homo sapiens
tattttgaaaataagtcccagttgttactaatatataccaacatacacacacacacacatacrtacacatacacacccatacacacacacatacaccctgtgaataattatgataagatgtcctttagaatttgaccttgcttactattttaattttcatctcttccaactcctacatttgatgttattttcattcatcaatgtatatttctctaaatatataaagttgttttatacttccattcattggaaatggtcttcacttctccctcagtcagtttcatataccaatgcatgcacaagcatgctctgttctctctcacacacacacatacaaatatacacacccccccacacaaatatttctgatattttggggcctttttgaatatacctgcctttgctatattctacttatatgccactattattgtgaggctgtcatttatacttccatacataatttactattccattcttagagctcctacaggtaaattcacttcaactgactctattgtatttaaacgtttattattctaaactatgaaatcaacaaaaggacagtttgagtctaat

SEQ ID NO: 174930 - DNA, 579 bp, Homo sapiens
tattttgaaaataagtcccagttgttactaatatataccaacatacacacacacacacatacatacacatacacacccatacacacacacatacaccctgtgaataattatgataagatgtcctttagaatttgaccttgcttactattttaattttcatctcttccaactcctacatttgatgttattttcattcatcaatgtatatttctctaaatatataaagttgttttatacttccattcattggaaatggtcttcacttctccctcagtcagtttcatataccaatgcatgcacaagcatgctctgttctctctcacacacacacatacaaatatacacacmcccccacacaaatatttctgatattttggggcctttttgaatatacctgcctttgctatattctacttatatgccactattattgtgaggctgtcatttatacttccatacataatttactattccattcttagagctcctacaggtaaattcacttcaactgactctattgtatttaaacgtttattattctaaactatgaaatcaacaaaaggacagtttgagtctaat

SEQ ID NO: 174931 - DNA, 224 bp, Homo sapiens
caagtgctatgtaaatagttgttatattgtattgcttagagaataatgacaagggaaaaaagtctgtacatagtagaggcacaacttttccccccamatattttcaatctgcaattggttgaatctatggatgcagaacccatggatatggagcgctgactatatatacctaggagtgaaattgctgggtcgtgtgatacttcgtgtttaaacttttggggaac

SEQ ID NO: 174932 - DNA, 405 bp, Homo sapiens
acaaggcactaatcatctatcaccagagattaattttgccttcttggacttcctacaaatggaatcgtatgatatgtattcttctgtgtgttgcttccttccatgtaatgtttatgagattcatgcatatcagtgcatgtatcagtacttcattcttttttttacacttaaaaaaaatttttttttagaaatgaggtctcgctctgttgcccagactggagtgcagtggcacaatcatagctcgctgcagccttgaactcctgggctccagtgatcctcccacctcagcctcctgagtagctgggactgcaggcccatgccaccatgccccactaattttttaattttttgcagaaatggggtctcccctgtgttgcccasaatggtcttgaattgcctgggctc

SEQ ID NO: 174933 - DNA, 597 bp, Homo sapiens
gtaaaaaaaatgcaaatataatgatcctttgcattttgcacacacgtcacaatttcagcttcacaatctatggagctgctgtttggggartataaggacaaaaattgcaccaactgaacttagttttaaggaaacccgttgttaggagaggagttctacagccaaagatctacctatgaatcaccacgtatggaaaattacgtttccaaagaagaaccagacaagtagatgatcttctgatgtcacatttcccctaattcctaagttttctgtgagggagagaatgtgttcacgccaccaatgtgtcgagatcaatgagaggtgctcaatgaggaaagaacacttggtggaatgtgggttgccaattacaaatctctggataaaatagaaaatgcgaccgtgtctccacttgagacccctagttagccaacagatcaggggcagggtagaaagacaagtgtaattatttcagtctactagaagagcaagaaaaaacgccttggggtctacatttatgcttattaactactaaaactaaaatgaattagtgtttgtcaggcaaagaaaactgaaaaatcaggaattacactccataac

SEQ ID NO: 174934 - DNA, 597 bp, Homo sapiens
gtaaaaaaaatgcaaatataatgatcctttgcattttgcacacacgtcacaatttcagcttcacaatctatggagctgctgtttggggaatataaggacaaaaattgcaccaactgaacttagttttaaggaaacccgttgttaggagaggagttctacagccaaagatctacctatgaatcaccacgtatggaaaattacgtttccaaagaagaaccagacaagtagatgatcttctgatgtcacatttcccctaattcctaagttttctgtgagggagagaatgtgttcacgccaccaatgtgtcgagatcaaygagaggtgctcaatgaggaaagaacacttggtggaatgtgggttgccaattacaaatctctggataaaatagaaaatgcgaccgtgtctccacttgagacccctagttagccaacagatcaggggcagggtagaaagacaagtgtaattatttcagtctactagaagagcaagaaaaaacgccttggggtctacatttatgcttattaactactaaaactaaaatgaattagtgtttgtcaggcaaagaaaactgaaaaatcaggaattacactccataac

SEQ ID NO: 174935 - DNA, 393 bp, Homo sapiens
gtatcttgctgctctcagataaactactgttatctagatccttgcttccagatttgaatttttttctttagtatgttaatatcattattttgaatttgctcttcataagtttggcagcccatactgtgtataggtctgtttaatagtttatatagattaattcatgaggccttttgtttttgtttttgtttgtgggaatakagtgattgaataaaggatgacctgaaattgtcagggcttataatgtttttgtgatgtgaattatttcttcatggctgttttcaactattttagccataattggagagagatttgcatggtggagatctaaatgaagatggagctaattgggggtggagggaaagagagagagagccatttaaagcatgtgtg

SEQ ID NO: 174936 - DNA, 393 bp, Homo sapiens
gtatcttgctgctctcagataaactactgttatctagatccttgcttccagatttgaatttttttctttagtatgttaatatcattattttgaatttgctcttcataagtttggcagcccatactgtgtataggtctgtttaatagtttatatagattaattcatgaggccttttgtttttgtttttgtttgtgggaatatagtgattgaataaaggatgacctgaaattgtcagggcttakaatgtttttgtgatgtgaattatttcttcatggctgttttcaactattttagccataattggagagagatttgcatggtggagatctaaatgaagatggagctaattgggggtggagggaaagagagagagagccatttaaagcatgtgtg

SEQ ID NO: 174937 - DNA, 393 bp, Homo sapiens
gtatcttgctgctctcagataaactactgttatctagatccttgcttccagatttgaatttttttctttagtatgttaatatcattattttgaatttgctcttcataagtttggcagcccatactgtgtataggtctgtttaatagtttatatagattaattcatgaggccttttgtttttgtttttgtttgtgggaatatagtgattgaataaaggatgacctgaaattgtcagggcttataatgtttttgtgatgtgaattatttcttcatggctgttttcaactattttagccataaktggagagagatttgcatggtggagatctaaatgaagatggagctaattgggggtggagggaaagagagagagagccatttaaagcatgtgtg

SEQ ID NO: 174938 - DNA, 457 bp, Homo sapiens
caatggcaagtgtgggatccaggccggtagtgcaagctgagcacagcctgccaggctgagtgggcagaacaagctcagtgggcacaagcaatattcaagcagaaggtaccctcaacaacagaggtttctggctagagaagtgacaccccaaggatcctgtgacaacagtatattyatttgtttcttaaatagaaatgaggcattacagtaaagacaaataacagtgtggtaactgtttgggaaagaataccagcaagacacagaggccttcctcctggtctcataccagcacacaaagacagtatgtttccattatatatgtatgtttataatatacacaaaagcaagctgaaaggctatgacccagagatggcttgctaaagtggagcattgaggactgttcagaaaagacccataagcacatccaagtaccaggtgatttaagtaaataataaaa

SEQ ID NO: 174939 - DNA, 457 bp, Homo sapiens
caatggcaagtgtgggatccaggccggtagtgcaagctgagcacagcctgccaggctgagtgggcagaacaagctcagtgggcacaagcaatattcaagcagaaggtaccctcaacaacagaggtttctggctagagaagtgacaccccaaggatcctgtgacaacagtatattcatttgtttcttaaatagaaatgaggcattacagtaaagacaaatracagtgtggtaactgtttgggaaagaataccagcaagacacagaggccttcctcctggtctcataccagcacacaaagacagtatgtttccattatatatgtatgtttataatatacacaaaagcaagctgaaaggctatgacccagagatggcttgctaaagtggagcattgaggactgttcagaaaagacccataagcacatccaagtaccaggtgatttaagtaaataataaaa

SEQ ID NO: 174940 - DNA, 523 bp, Homo sapiens
atgatctaggtgcatctatagttattttatgtgaccaaataattttgctactttgatttcatctaaaaggtataaacgttttttggctttaagtatatkatgccaaattaccctggaggactgcatactcaaaaatattgggcattgtcactttttaaaaagatcttggacacctcatatttatgtcaaattgctctaatgggtaaaaatacttgtatttagaaagctttgtgatgtactatttacaaaagatcacctctagctatcttctcagtatttgcatagaatgatgtacgaaaaaatgttcacattttgatgatgatgatttctaggtggtagagatttcaagttattttttaacttttctatttatacttactgtctttctaaattatttataaagaacatgtttttaaatttttattttaggtttggatacatatgaatgtttgttacataggtaaacttgtgtcatgggaatttattgtacagattatttcatcacccaggtattaagcctggt

SEQ ID NO: 174941 - DNA, 588 bp, Homo sapiens
acactgcagttaaagtaacacccacatgcaagatgagaaagaaccaacgaaagaaccactctagtaactcaagtggccagagtagcctatgtcctccaaacaactgcaccagttctccaacaagagttcttaaccaggctgagctggctgaaatcacagaaatagaattcagaatatggatagaaatgaagatcatcaagattcaagacaacagcaaaacccaatccaaggaaactaaaaatcacaataaaacaatacaggagctgacagatgaaatagccagcataaaaaagaacctaataggtctaatagagctgaaaaacacaatataagaatttcacaatgcaatcacaattgttaacagcaaaataaacaaagttgatgaaagaatctcagaacytgaagactggcactttgaaatgatagtcagataaaaataaagaaaagaaaataaaaaggaatgaacaaaacatccgaaaagtacaggattatataaaaaggacaaatctatgaatcactggcaaagggaggggaagaaagcaaagcaaacaacttggaaaacgtatttcaggatatcatccatgaaaa

SEQ ID NO: 174942 - DNA, 615 bp, Homo sapiens
attaaggctaaatgaggttatgagggtggggtcctgatccaataggatcagtgtctttataatgagagactccagaactcactcacttgttctccaccatgagacacagtgagaaggcagtcatctgcaagccaggtaaagggccctcaccagaaactgagccctggcaaaatcttgatcttggactttctagyctctagaactatgaaaaaataaaattctgttgtttcagttcccaaccccaacccctaactaggagctgggatctctctctgtctctccaccctcaccaccacccttccctctctttctctctctctctctcacacacacacacacacacacatacacacacaccacttgcatgaactcgaaatttgaaatctttggagttatttaaaatatgagcaaacagaagagaacatttcaacagtattatcgaaagaacaaatgcacataatgaagactttaaatcattgaagagattgtaatgcattcagcatattctatttacccaagtggctagaagttaaatattttgttacctcttgtcaaactgaaaatggcagtgtcccaaaatactctttcccgaaaggttttctgtagctgaatttt

SEQ ID NO: 174943 - DNA, 615 bp, Homo sapiens
attaaggctaaatgaggttatgagggtggggtcctgatccaataggatcagtgtctttataatgagagactccagaactcactcacttgttctccaccatgagacacagtgagaaggcagtcatctgcaagccaggtaaagggccctcaccagaaactgagccctggcaaaatcttgatcttggactttctagcctctagaactatgaaaaaataaaattctgttgtttcagttcccaaccccaacccctaactaggagctgggatctctctctgtctctccaccctcaccaccacccttccctctctttctctctctctctctcacacacacacacacacacacatacacacacaccacttgcatgaactcraaatttgaaatctttggagttatttaaaatatgagcaaacagaagagaacatttcaacagtattatcgaaagaacaaatgcacataatgaagactttaaatcattgaagagattgtaatgcattcagcatattctatttacccaagtggctagaagttaaatattttgttacctcttgtcaaactgaaaatggcagtgtcccaaaatactctttcccgaaaggttttctgtagctgaatttt

SEQ ID NO: 174944 - DNA, 616 bp, Homo sapiens
ttgtactaagcactgctaaaaactatggcaccaataaagacaaataagccaagtttctacccaccaggaacctatgatctaaagggggaagcaactacttgaataaataaacctaccaaagacagagttgaataaaaataaaatataagacatatatcttatgaggaaaggtataaagtacataactctaaagccagaagtttcttagaagaggtagacattttttagcagggatatgacttggctttaacagagattccaggaggaaagaatattccaggaaaaggaagcattttgaccaaaactgtggagaaggcagacattatatttgggaaatatctggctacagcatgagaaatggagagacccagggacaagtacagcgtaagataaagacattccagatcccttsactacatccttctctccagctcatcatgccagtttctacggtttcacttccttccatgccagcccagacatcatgataccacttcaatgtctgccttcaaagaacctcatacccagtctattccatctgcccttcaaagctctgattttagtccacctagatgtccactctttttatacctgggaaggcaaaactcagtccccg

SEQ ID NO: 174945 - DNA, 540 bp, Homo sapiens
cttctgcatttataatacctttctactttgaatactacatcattttaagaaaactctgtattcttaacattccattatattggtcacacggcaaaccaccccatttggtctgaggcaaaaaaaaaggagaaagtttgaacctctagcaccacaatggggtgggaaatttgggagcactccctctactgtctccaaggaaattctgctccaacacctcaaactccattctcttgaaggctgggaaaaggtaatcactaaaagcgggagagaaaaaaaaaaacttcataattttttagcatacccagaataggttgtctagcacttctatttggcagcttttattttgctcttgaaatctggagcctcagtaaaaagctgaaacaggaagaattatatttttacaaaccatttcatgtttaaatgcttattaagtctgggtgtagatgcatacaaagtaaagaagttcyagtgtgaaactctgggataaattcagtatctaagggtaaaatgacaagaaaagctagtcaaaggggcagaaca

SEQ ID NO: 174946 - DNA, 582 bp, Homo sapiens
ctaaaaatgtttaactcatagaagcagagagtagaatggcagttgccaggggctgctggtgttgggggatagggagatgttgatcaaaagatgtaaatttcagttagataggaggaacaagttcaagagatccattgtacaacatggtggctatagttaataaagatatgttatatactagaaaattgctaagagagtagattttaagttttctccccayaaataaatgctaactgtgttgggggagggagccagtctctttttcttgttctctcaagccattttcagcccaggttgggagggctacattgttttccccagaaagcttcattatgtgagtaataaacctttccacaccctcttgatgtgtgtgcggtgccatcagtctcaatataaaacaacaaattttgagtgggagctctattctgtttctgagggataacctgaaacaccccaaatgccattgtattcaccaacgcaggaacttatgataattgtaatagatggagctttgcttatatgtctccgcagatagattcattagttatttcctcagtttctggatatataattgaaataaat

SEQ ID NO: 174947 - DNA, 582 bp, Homo sapiens
ctaaaaatgtttaactcatagaagcagagagtagaatggcagttgccaggggctgctggtgttgggggatagggagatgttgatcaaaagatgtaaatttcagttagataggaggaacaagttcaagagatccattgtacaacatggtggctatagttaataaagatatgttatatactagaaaattgctaagagagtagattttaagttttctccccataaataaatgctaactgtgttgggggagggagccagtctctttttcttgttctctcaagccattttcagcccaggttgggagggctacattgttttccccagaaagcttcattatgtgagtaataaacctttccacaccctcttgatgtgtgtgcggtgccatcagtctcaatataaaacaacaaattttgagtgggagctctattctgtttctgagggataacctgaaacaccccaaatgccattgtattcaccaacgcaggaacttatgataattgtaatagatggagctttgcttayatgtctccgcagatagattcattagttatttcctcagtttctggatatataattgaaataaat

SEQ ID NO: 174948 - DNA, 607 bp, Homo sapiens
actcttctgctctctaacccaatttagtctgcagagatcataatcatcttggcatcccacagaatatctggtccatttcattgatgacatcatgctggttgaaccagacaaacaaaaagtgactcgtattgttgtaagacacgtgactgccataagatagcaaagaaacccatgaaaattccatcttgttactatgaagtttctgagggcccagtggtctagggcatgtgcgaaaaatatttcaaaagtaacagaccaattgttgcaccttgcactaattgttgctacaaaagagtcattgggatctaaagttttcatttgatattagaaataacacataatatattggaatgtgctactccaatccatatattaagtaacacataagatggctctatttcagtggggcttagggaaaaggaaggctctgcagtagggctgggctgcctctgtaagctgctctgccacttgggccatatgaacccacagatttaatggtacttgtggtaaataaagatgctgtatagagaytctggcaagcttgaacaaaagaattgtagtacagacaccgagatatttagagcaaagacatatcttcttctattca

SEQ ID NO: 174949 - DNA, 592 bp, Homo sapiens
aatatgccaggaaaggcagattttgctttgttttctcctcttttatttcttttactagtttaaaaaagactagtatagctaagatgtgtagtagctacatgatagtatttacaatgaccataaattccataaaattctgatgctctttatggggcccatagagaggaatagctgccttaaagtaaacggcaatataagtaaacaagattttggttattcaaaaaatgatttatagtgatatatcttaccagatgtttgagttaaatggcaattcttaatacttaaagttaaaaagaatccatccatgtctagtatgtcttatttttctaaatattgstaatgtgatttcccttggctgatcatttcttataggaaaaaaatctaatttatgcctaaacaagtggaaaaaaattttcatgacaaagtgcaactgcctatatcctatggttgtcatttatttcaacattcctgtctgaagctgtattagaaatggctattctgtggagttcaaggaacctcctgcagtttgctattaaaatcattcattcaaaaaaatccattcagatcctactacgtgccaggacagtgctag

SEQ ID NO: 174950 - DNA, 566 bp, Homo sapiens
tgttgagctcctagcagagaggagatgctagaatgaggaggtcctctctgcaggcaggtggttttgttgtctctgcagctctcagcagagaggaggccctagagtgggtggctcatctcagcaggcaggtcatcctattgtctccctgttgtctctctgtcctctcttccagcctggctgagtccaggggtttggggggtggttatgggccttacaggggaggaagtgcatgctggttggttcaggggtggctaaggatggacccaaggaaaagcactgcaagttccccctctggtccacaggactgtcagcccagccctcaggctttaggccctctccagcctgaaggtkgggcttcaccagggacctgctctcttctgcccagaagcctgtctcctgccaccattcatggcacccactctgttaatgccaaaggatgcctgcaggccacagccacgctgtcttcagacttccctttgcctccttcccatgcttattggtgcccaaagttgggagggggctgaggcggcaggggactgtcatgtcatcactgtcccaagcctggg

SEQ ID NO: 174951 - DNA, 566 bp, Homo sapiens
tgttgagctcctagcagagaggagatgctagaatgaggaggtcctctctgcaggcaggtggttttgttgtctctgcagctctcagcagagaggaggccctagagtgggtggctcatctcagcaggcaggtcatcctattgtctccctgttgtctctctgtcctctcttccagcctggctgagtccaggggtttggggggtggttatgggccttacaggggaggaagtgcatgctggttggttcaggggtggctaaggatggacccaaggaaaagcactgcaagttccccctctggtccacaggactgtcagcccagccctcaggctttaggccctctccagcctgaaggttgggcttcaccagggacctgctctcttctgcccagaagcctgtctcctgccaccattcatggcacccastctgttaatgccaaaggatgcctgcaggccacagccacgctgtcttcagacttccctttgcctccttcccatgcttattggtgcccaaagttgggagggggctgaggcggcaggggactgtcatgtcatcactgtcccaagcctggg

SEQ ID NO: 174952 - DNA, 566 bp, Homo sapiens
tgttgagctcctagcagagaggagatgctagaatgaggaggtcctctctgcaggcaggtggttttgttgtctctgcagctctcagcagagaggaggccctagagtgggtggctcatctcagcaggcaggtcatcctattgtctccctgttgtctctctgtcctctcttccagcctggctgagtccaggggtttggggggtggttatgggccttacaggggaggaagtgcatgctggttggttcaggggtggctaaggatggacccaaggaaaagcactgcaagttccccctctggtccacaggactgtcagcccagccctcaggctttaggccctctccagcctgaaggttgggcttcaccagggacctgctctcttctgcccagaagcctgtctcctgccaccattcatggcacccactctgttaatgccaaaggatgcctgcargccacagccacgctgtcttcagacttccctttgcctccttcccatgcttattggtgcccaaagttgggagggggctgaggcggcaggggactgtcatgtcatcactgtcccaagcctggg

SEQ ID NO: 174953 - DNA, 566 bp, Homo sapiens
tgttgagctcctagcagagaggagatgctagaatgaggaggtcctctctgcaggcaggtggttttgttgtctctgcagctctcagcagagaggaggccctagagtgggtggctcatctcagcaggcaggtcatcctattgtctccctgttgtctctctgtcctctcttccagcctggctgagtccaggggtttggggggtggttatgggccttacaggggaggaagtgcatgctggttggttcaggggtggctaaggatggacccaaggaaaagcactgcaagttccccctctggtccacaggactgtcagcccagccctcaggctttaggccctctccagcctgaaggttgggcttcaccagggacctgctctcttctgcccagaagcctgtctcctgccaccattcatggcacccactctgttaatgccaaaggatgcctgcaggccacagccacgctgtcttcagmcttccctttgcctccttcccatgcttattggtgcccaaagttgggagggggctgaggcggcaggggactgtcatgtcatcactgtcccaagcctggg

SEQ ID NO: 174954 - DNA, 498 bp, Homo sapiens
ccctactgccttgtgctccatctggcttccacacagtagtcagcgtgatcttttaagaaactcacataaatgaaccacatcacttccctgtttaaagtcttcaatggcttcctgttacactcagagtaaacccaaacttcttgccatagcccaaaggccctgtgtgatttgactcctgcagatttccgctgccgcctctcctgttgcctcctttctggctcactacactgtcgtcacatgtgatttctgaccattcctgcagcccatcaggctctttcctgctacagggactttgtacatgctgttccttctctttggaccaamcttcctccttcacttcacatggctaactctcatccttccaacctggcagaaatgttgctgtgtcttagatcaaaatatagactggatggcttcaacaacagagatttagtttctcagttcgtaaggacagaagcccaagatcaagctgccaccacggtcaggttctggtgaggg

SEQ ID NO: 174955 - DNA, 498 bp, Homo sapiens
ccctactgccttgtgctccatctggcttccacacagtagtcagcgtgatcttttaagaaactcacataaatgaaccacatcacttccctgtttaaagtcttcaatggcttcctgttacactcagagtaaacccaaacttcttgccatagcccaaaggccctgtgtgatttgactcctgcagatttccgctgccgcctctcctgttgcctcctttctggctcactacactgtcgtcacatgtgatttctgaccattcctgcagcccatcaggctctttcctgctacagggactttgtacatgctgttccttctctttggaccaaccttcctccttcacttcacatggctaactctcatccttccaacctggcagaaatgttgctgtgtcttagatcaaaatatagactggatggcttcaacaacagagatttagtttctcagttcgtaaggacagaagccyaagatcaagctgccaccacggtcaggttctggtgaggg

SEQ ID NO: 174956 - DNA, 498 bp, Homo sapiens
ccctactgccttgtgctccatctggcttccacacagtagtcagcgtgatcttttaagaaactcacataaatgaaccacatcacttccctgtttaaagtcttcaatggcttcctgttacactcagagtaaacccaaacttcttgccatagcccaaaggccctgtgtgatttgactcctgcagatttccgctgccgcctctcctgttgcctcctttctggctcactacactgtcrtcacatgtgatttctgaccattcctgcagcccatcaggctctttcctgctacagggactttgtacatgctgttccttctctttggaccaaccttcctccttcacttcacatggctaactctcatccttccaacctggcagaaatgttgctgtgtcttagatcaaaatatagactggatggcttcaacaacagagatttagtttctcagttcgtaaggacagaagcccaagatcaagctgccaccacggtcaggttctggtgaggg

SEQ ID NO: 174957 - DNA, 598 bp, Homo sapiens
agtgtgactgcaggacaaaaaagtacgatctaatggtaataaactaagggaaaattagcaaggcccacttattcagattagtcttggtgactctgtgtattcactctgtttctccaggtacagggaggacacctctcaaatgaagctcttatgagctactttgttggaaggtcagataattcttctgtggtctacttcatgggagaatgctgggagaaggtcagagatacctttctactactgctattttcttaaatgccaaggtgccatacttgggatagcatgttctgagtcccataagtcaaataaaaaaagcaaattcatacttaggtaataarggactttattcaaaaagactattgcaatagggagactattgcagagaaacaaaagtaaacaagacgagacaaaactgggtatccgggattaggctgagccaagggtatgattagagagtttattagggaatgttttttccatgaggtcagttgattctatggaaaagccattgagagggttggtttccaaagctcagaagagagccaaaatttagggatctgagggaagaaatcttaatataggttcattgagttagcag

SEQ ID NO: 174958 - DNA, 588 bp, Homo sapiens
cagtctttcttctttcttttttttttcccccagagaatgaacagttcactaacagaaaagagagagagttcagtaatctctacatgacccaacatggttttggagattcaaaatacaatattctgtatttcaaattctaacctcttctggacttacattagctttttcagggatgatctcattcaaaatgtattttgctgcatgatttgagctgaacgtttcaaaattcttcagtacattccaaaattggtatttaytcagcaggataaaaaggaaatgcttgcctaagatcaattcttaccaaaccttttgaattttggttgcaaaaaccaaaatcaatcattgcagtaaaaccttcaggatagatttccttttctcattgcatctccagtcattacttaatggctgaatgtgcagctgggaccagctaagccagggagagcttgtgatcctttaattctcacaaaagcattttgtatggatcaggttcattttgcttgtctacactctctatggttgtaatgctctataatttttattttccttctctccatattctacttaacacaccactcactctcaagggaa

SEQ ID NO: 174959 - DNA, 534 bp, Homo sapiens
atcaacgaggtagaacgacatggtggttcaagtgaaggtagttgtcactccacatttcctctccactctattctgcctcactccactcctggtatgacagtcccagtaaagtgttgaacttttacctacccaaacagcaacaagacaatgagggttagtcctttacttactatcttcctggtgatggagggcccagtgtgaagctaaacctatatttcaacctgaatacaatgaggaggtgaaaattggtgttttctttctctgagaaagcatcagcagggctgagggagaggtgaagtttcacatctgctgcaatgaggcagtgtgactgagtactcttgctagggtgtgtgtgcgacacagtggaaaactaaatatatacacccayctggccctttcactataccctagggaacatccagctgaaaaaacaagattaaataggatccagagtcttataagaactaaaatgtcaagaatataattgagaatgcattcatcataacaagaaacaggaaaatcacaacatgaatg

SEQ ID NO: 174960 - DNA, 547 bp, Homo sapiens
ttggtgtctggttcatagatggctgacttctctctatgtcttcacctggtggaagggacaagagagctgtctggagtctcttttataagggcactaattcgattcataaaggctctgtccttgtgtgctaatcacccccaaaatgtactctacctccaaatatgatcacattggggattagatttcaacatatgcatttggagtggagggccataagcattyagtctataacatatcgggatcttttcatcctcctacctctctagtctttattctttcatatttttgcttcctatattaatgagacaaataattttaaatacatagagtaaaatcaagttacattatgggaaatcaggtgtgaaaaaaatgtatacatatatatttttatacatacacatgtaaacatacacaaatgtatatacatatatgtaaatatattttatacacacatatgcacatatgtatgtatatatatgcatacacacacacacacacacacacacacacacacacacatgaaatttccatgaaaattgcttttgag

SEQ ID NO: 174961 - DNA, 601 bp, Homo sapiens
aaatcaggtgtgaaaaaaatgtatacatatatatttttatacatacacatgtaaacatacacaaatgtatatacatatatgtaaatatattttatacacacatatgcacrtatgtatgtatatatatgcatacacacacacacacacacacacacacacacacacacatgaaatttccatgaaaattgcttttgagacagggggcagtttgagaggaaaagtatgagcctatgcactaaatccttctttttgaaaaagttccccaccttaattttgaaatttgtttatttctggattagattatcaaaaaattgcatactcaagataatttttttaaatgcagagtttcatacactatatttttaaaaactaccagtagtcttgctctatgaaaataatgaaaaattctgtatcttatttaggaaagtattcactcaatatccctacattttcaaagaatcctgggaaagctttgtgagggccatagaagaaacatgaacacaagttgatgagtgtctgtttcagtaaatatcagcctttgactagtggggaagatacagtgagcagtccattgcttcaaagcatttaaaattcagtttga

SEQ ID NO: 174962 - DNA, 601 bp, Homo sapiens
aaatcaggtgtgaaaaaaatgtatacatatatatttttatacatacacatgtaaacatacacaaatgtatatacatatatgtaaatatattttatacacacatatgcacatatgtatgtatatatatgcatacacacacacacacacacacacacacacacacacacaygaaatttccatgaaaattgcttttgagacagggggcagtttgagaggaaaagtatgagcctatgcactaaatccttctttttgaaaaagttccccaccttaattttgaaatttgtttatttctggattagattatcaaaaaattgcatactcaagataatttttttaaatgcagagtttcatacactatatttttaaaaactaccagtagtcttgctctatgaaaataatgaaaaattctgtatcttatttaggaaagtattcactcaatatccctacattttcaaagaatcctgggaaagctttgtgagggccatagaagaaacatgaacacaagttgatgagtgtctgtttcagtaaatatcagcctttgactagtggggaagatacagtgagcagtccattgcttcaaagcatttaaaattcagtttga

SEQ ID NO: 174963 - DNA, 601 bp, Homo sapiens
aaatcaggtgtgaaaaaaatgtatacatatatatttttatacatacacatgtaaacatacacaaatgtatatacatatatgtaaatatattttatacacacatatgcacatatgtatgtatatatatgcatacacacacacacacacacacacacacacacacacacatgaaatttccatgaaaattgcttttgagacagggggcagtttgagaggaaaagtatgagcctatgcactaaatccttctttttgaaaaagttccccaccttaattttgaaatttgtttatttctggattagattatcaaaaaattgcatactcaagataatttttttaaatgcagagtttcatacactatatttttaaaaactaccastagtcttgctctatgaaaataatgaaaaattctgtatcttatttaggaaagtattcactcaatatccctacattttcaaagaatcctgggaaagctttgtgagggccatagaagaaacatgaacacaagttgatgagtgtctgtttcagtaaatatcagcctttgactagtggggaagatacagtgagcagtccattgcttcaaagcatttaaaattcagtttga

SEQ ID NO: 174964 - DNA, 495 bp, Homo sapiens
taagggacaggtagagcttcactgttccttaccttctttttcttttttcttttcctcagatgtggacataatgcttgacgttaagcataagaatgagaaaatgcaagagaatcttagagtccttaatgaaccaatagaagaagcagcctcttcttctgtgagcaaaatagattctagtggtaccagccatwgtaagttttattttttgctattttagcccattgattcacaatttgttagaggagatttccgcaagagacattaggcaatgtctggagatattcttggttgtcacaactgagtgctaatgtcgtctagaaggtggaggctaggcatggtgctaaacaccctgcaattcacaggacagcccccacaacaaaagatgatccagtccaattgtcagtattggattggatccaattgtcagtccagttggatccaattgtcagtattgtccagtccagatgtcagtattattgccaaggttgagaaacc

SEQ ID NO: 174965 - DNA, 568 bp, Homo sapiens
actaatagtcacatattatacttagcatttacatattattaatatattaccttttatattaatacatcttaaatatattaataacttttatatgtattcattttagtgaggtgaatgctacatctttgatgctgagaaaacatcaaaatggtatgaattttgaatttrtattcatcagttctgcttgtaaattatgattctcacattcatggggcgggtggggttataacaatacttcacctccctgagacttttttacttacctgtaaaatggggaaataaacaccatcctcactgactgttatctgtagatgaagtctctagtacattgccatgggcatagttgctgatcaataaatggtaacttttttttattatactttcagtcagttaataaatattaatgttcagttccagcatagcattaatattgcatctactatattctacttatttcagattttactatgtaatacttcctaatcacctgattatgtgtttaatatatgacccatcatttaacccacacaagtcagaaatactagtgcatttatagaaattcatagct

SEQ ID NO: 174966 - DNA, 568 bp, Homo sapiens
actaatagtcacatattatacttagcatttacatattattaatatattaccttttatattaatacatcttaaatatattaataacttttatatgtattcattttagtgaggtgaatgctacatctttgatgctgagaaaacatcaaaatggtatgaattttgaatttatattcatcagttctgcttgtaaattatgattctcacattcatggrgcgggtggggttataacaatacttcacctccctgagacttttttacttacctgtaaaatggggaaataaacaccatcctcactgactgttatctgtagatgaagtctctagtacattgccatgggcatagttgctgatcaataaatggtaacttttttttattatactttcagtcagttaataaatattaatgttcagttccagcatagcattaatattgcatctactatattctacttatttcagattttactatgtaatacttcctaatcacctgattatgtgtttaatatatgacccatcatttaacccacacaagtcagaaatactagtgcatttatagaaattcatagct

SEQ ID NO: 174967 - DNA, 568 bp, Homo sapiens
actaatagtcacatattatacttagcatttacatattattaatatattaccttttatattaatacatcttaaatatattaataacttttatatgtattcattttagtgaggtgaatgctacatctttgatgctgagaaaacatcaaaatggtatgaattttgaatttatattcatcagttctgcttgtaaattatgattctcacattcatggggygggtggggttataacaatacttcacctccctgagacttttttacttacctgtaaaatggggaaataaacaccatcctcactgactgttatctgtagatgaagtctctagtacattgccatgggcatagttgctgatcaataaatggtaacttttttttattatactttcagtcagttaataaatattaatgttcagttccagcatagcattaatattgcatctactatattctacttatttcagattttactatgtaatacttcctaatcacctgattatgtgtttaatatatgacccatcatttaacccacacaagtcagaaatactagtgcatttatagaaattcatagct

SEQ ID NO: 174968 - DNA, 648 bp, Homo sapiens
agacttatgtacacacgcacacratattggttctgattctctggagaactctaatacactgtataaggacttttgtcattgtcaagctcttggaacctcatgacccgtgatagtgatataatatctgggcagtgtgtggtaccttttagaacttacagtttgcttgttatgcctataagaagataagatggctacagttcttcagagcaaatgatgcatatgggcctgaagggtttggaaatgaactatccaccttttcttctcctaagtgtattagtttcccattgctgatgtaacatgttaccataaatttagtcgcttaaaacaatgcaggtattttgccttgcagttctggaggtcagatgcctgaaatgggtatctctgggctaaaacacaggtgtcagcagggttatgttctttttctgaggctttaggggatagtctgtttccttgtgttttccagctcccaaagacctcccattttctttgtcttgtggtcctttcctcctcttcaaagccagcaacataatatctttaaatctctttgacattaacctcctgcctctctcttccacaatttaaagacccttgtgataatattgggctcacctgtataattcaggataatcttatcttaaagtcctctga

SEQ ID NO: 174969 - DNA, 648 bp, Homo sapiens
agacttatgtacacacgcacacgatattggttctgattctctggagaactctaatacactgtataaggacttttgtcattgtcaagctcttggaacctcatgacccgtgatagtgatataatatctgggcagtgtgtggtaccttttagaacttacagtttgcttgytatgcctataagaagataagatggctacagttcttcagagcaaatgatgcatatgggcctgaagggtttggaaatgaactatccaccttttcttctcctaagtgtattagtttcccattgctgatgtaacatgttaccataaatttagtcgcttaaaacaatgcaggtattttgccttgcagttctggaggtcagatgcctgaaatgggtatctctgggctaaaacacaggtgtcagcagggttatgttctttttctgaggctttaggggatagtctgtttccttgtgttttccagctcccaaagacctcccattttctttgtcttgtggtcctttcctcctcttcaaagccagcaacataatatctttaaatctctttgacattaacctcctgcctctctcttccacaatttaaagacccttgtgataatattgggctcacctgtataattcaggataatcttatcttaaagtcctctga

SEQ ID NO: 174970 - DNA, 609 bp, Homo sapiens
ctcacgatcatgagaacagcmtgaaggtaaccacccccatgattaaattacctcccacagggtctctcccacaacacatggggattatgggaactacaattcaaaatgagatttgggtggggcacagacaaaccatgtcagatggaatagtcaggcatctgcatatactgtggatttatccctcttgtttctctaactgattatgagacttacctggatttctacaagtctttcacttctgagaacttatgggtctaaccaggaactagattccatactggtgtgaaaaaagtctacaaatgcatgtctttaaaagtatatgcttaattatacatttgtttatttcaacaaatatttttgagggcttgctatgcatccaatacatttctaggagctgttgatatgacacatctcagaaacttagacatggtcagaaagccgctggagttgccatttgccaaggatgcaataaagactatgactctccaaaagttggtatcaaaaacatttctcctacttctcactgtaaagaatggatttctgtgatctatgtaaaatatagaaagcattttccttaaatatacaaacaggtggttcgcactagggaaa

SEQ ID NO: 174971 - DNA, 605 bp, Homo sapiens
tgagaacagcatgaaggtaaccacccccatgattaaattacctcccacagggtctctcccacaacacatggggattatgggaactacaattcaaaatgagatttgggtggggcacagacaaaccatgtcagatggaatagtcaggcatctgcatatactgtggatttatccctcttgtttctctaactgattatgagacttacctggatttctacaagtctttcacttctgagaacttatgggtctaaccaggaactagattccatactggtgtgaaaaaagtctacaaatgcatgtctttaaaagtatatgcttaattatacatttgtttatttcaacaaatatttttgagggcttgctatgcatccaatacatttctaggagctgttgatatgacacatctcagaaacttagacayggtcagaaagccgctggagttgccatttgccaaggatgcaataaagactatgactctccaaaagttggtatcaaaaacatttctcctacttctcactgtaaagaatggatttctgtgatctatgtaaaatatagaaagcattttccttaaatatacaaacaggtggttcgcactagggaaaatatca

SEQ ID NO: 174972 - DNA, 605 bp, Homo sapiens
tgagaacagcatgaaggtaaccacccccatgattaaattacctcccacagggtctctcccacaacacatggggattatgggaactacaattcaaaatgagatttgggtggggcacagacaaaccatgtcagatggaatagtcaggcatctgcatatactgtggatttatccctcttgtttctctaactgattatgagacttacctggatttctacaagtctttcacttctgagaacttatgggtctaaccaggaactagattccatactggtgtgaaaaaagtctacaaatgcatgtctttaaaagtatatgcttaattatacatttgtttatttcaacaaatatttttgagggcttgctatgcatccaatacatttctaggagctgttgatatgacacatctcagaaacttagacatggtcagaaagccgctggagttgccatttgccaaggatgcaataaagactatgactctccaaaagttggtatcaaaaacatttctcctacttctcactgtaaagaatggatttctgtgatctatgtaaaayatagaaagcattttccttaaatatacaaacaggtggttcgcactagggaaaatatca

SEQ ID NO: 174973 - DNA, 557 bp, Homo sapiens
aaggaactgcagtttgcagattttttgttagcatggcataacgtagctgacctttcatgtaaatatccctgttcataaatacatataaaccaaataattgtcatctggaatccccttcacattcatagcctggtgaaggttgatgacaaagtaaaaagtgcaaagtaactttgggaaaattattgtaattaaattaaggggccctatagtactcttttgctttgtctcaaaggattctaccaatgccagggactagagttattttcctctgtccatggcatattatttgaccataaaaactactgtgatgttttgccttatttttgaatgatctatgtaaatttctgcatgtaaaactgtttaatacattctgattcatttataatatttcatattatgcccccttcacctttcacttattcagaatccctcagtgaygaggcatctaggtagtctctatcatctcaccctaacaaatactgttgtaatgaatattctggaccctatggcatgtgcaaaagtatctctaggataaatattactgaatgggacttctg

SEQ ID NO: 174974 - DNA, 454 bp, Homo sapiens
tattttgaatgagtagctgattgaattaaccctttaagatttttttttttccataactttggtatctcatgaaggatgaacataaggatcatttcttaataaagcttcaacagcatgcaaaaggccacagcatactttggcgctacttaatcttggtgttctgtggcccacgaatatatatggctttcatcttatctcctgacattttctcttaaacttctttcatattctggtcaagtatactacgtcctttcacatagttttatatcccaacatgtatttcccctttatctggaaaagtcttctccttttctaggtatcaacttccttttctaggtatcaacttcmtcttccaagacccagctcaaagtttcttttcaatgtgcagcctgtctcaactttctcaggcattgttgccctttccactggactttgtagtctcttcattacattg

SEQ ID NO: 174975 - DNA, 618 bp, Homo sapiens
acaaattttattctctcaagtcattatctactatcatgtatataatatatatacacatatatacacatatatgtgtgtatatatatgtatacgtatgcatatatacatatgtacatacatatatacatatatatgatatgtgtgtgtgtgtgtgtgtgtgtgtatatatatatatatatwtttttttttttttcctggagatggagtcttgctttgtcacccaggctggagttcagtggcacaatctcagctcactgcaacctccacctcccgggttcaaatgattctcttgcctcagcctcctgagtagctgggattacagatacgcgccaccaagcacagctaatttttttttgtatttttaatatttcaccatgttggccaggctggtcttgaactcctgactttgtgatccccctgcctcggcctcctaaagtactgggattacaggcatgagccatcgcgcccggcccattataatattttatacaagtttaaatttatgttaatatgaacattgacacaacacattatagtggcagtcataagtacatttgggaagttgcatgtacaaaacatacattgcttgtcttagtaatgagtgttaagtattactgt

SEQ ID NO: 174976 - DNA, 643 bp, Homo sapiens
gtttttcctttaagctgttttgtcattttatattgacttgttttctgttgaattactttatttgggtgctattcccaacaaaatgaaactttgtacgtttaaaaycttttagagtattttaaaatccatcacctgtcacttagtgagcagtatacactgtcacattctttataaagccaatttcactcctcttgtaaaactgtggtataaaataggctaatcatagcctactgagcttttgtactttggtgttattgattttagtgaaaagagacatatttatttaaagttggaagttaaaaaaaggcaaggtttttaattgcttaaagcatttttagcagagttcaagttttggcactagaagtgaaataaatacaaagattaattttaatctaattatcatctatttttttcgattgtttatgaaaaaagtattctgccactgtggcagaaaaggattgaatctattcccaacatgatattcccaaattttttgcttttatgatatatttctggcaatggaattgtgatgtgttatgctaatatgcatttttgatgtttagagatcatttgttataactgccatttaattggtcttgcactgtgccagccagcatataatccacataataaacattcaaga

SEQ ID NO: 174977 - DNA, 483 bp, Homo sapiens
atttgtattttttgtagatacggggttttaccatgtttccaaggctggtttcaaactcctaaactccagcaacccacgttagcctcccagagtgttggggttacaggtgtgtgctaccgagcctggctatgattattgtatttttaaatcctaaaatttcatttggttctttatatcatccatttctttgctgagattgttgatattttaaatttgtttctaaagggtttstaattgcattttagagtgtttttatgatagctattttgaaattcttgccagtaatttcaccacgtgtgtcatcttagtgttcattaactatatttttccatttgagaggttttcttaaatatataacagtgatattgaggtgttcttttggctgtgctatagtccctagttattcaataaaacactaatttatgtgttgtcatgaatgtattttgtaaatgtgattaaagttcacaatcaattgaccgtaat

SEQ ID NO: 174978 - DNA, 641 bp, Homo sapiens
tttcagacaattataaaaagaaatggataaagaaatgtaaatgacgataaggtatctgtgtgctacttggaattgtaatatgttgatactagtagtagacttatactgcaatcttagcaatcacactgcaaggtatttacatatatgaatttacatatatgaatttaaacgttttaaattcacatgtatttayatatatgaacttaaaacgtttaaattcatatatgtatttacatatatgaatttaaaacttatgttcagacaaaaatttgtccatggaggattatagaagttttatttacaatctctaaaacactgtaaataactaagattttgttcaacagatgagtgatgtgtgaaataatactttatactattcagtgataaaaggaaattagcttttgatgcaataaaaatatagctgaatctcaagcacattttgaaaaaacaaagccaaatttgaaagactacatgtcacattattccacacatatagcattctggaaaaggccaaactattggcatgaaaaattgtttgtttgtttttcttttttggagaagacaaagtgtttgctacaaaaacaatccacagggaaatgtttagggttatttaactcctctgtatgatacttgattggtgc

SEQ ID NO: 174979 - DNA, 583 bp, Homo sapiens
aaaattgtttgtttgtttttcttttttggagaagacaaagtgtttgctacaaaaacaatccacagggaaatgtttagggttatttaactcctctgtatgatacttgattggtgctacatgactttacacatttgtcaacattgttgaactttatatcaccaagagcgaaatttaatgtaagaaaatttaaaaaccagactgttgaggaaccacagaagggaaaatagcctgttacaaatgtggtatatgttagagaggatctagaaatagtgacacatttgtacaaataagcatacccagcgctcaggatttagtttctatatatccattctccagttgaaggaaccagaaattctggaagtaattactgatgctacacctggggcaaggaaaaatacatgatgaacctggatcactttatattactaaaagttaataagtgttgaaacaaaaaaaataactgataggaacatttccaaatgatatagaagcctatcagagattccaatggtcaatgctggaataatttgagcaatgaaatatataacatagyattggattataacctacagtattaaataaa

SEQ ID NO: 174980 - DNA, 505 bp, Homo sapiens
tttgaactgaggagtgatgtgttcgaagaaattccttatcatttggggttgagagtagtatcttctggagtatcagtaagaccttgaaccacactggtgagggtatgggtaagtgtcaacacatgaatcaaccatgagtacttatgaatcctccttcctctgtcagcttcttcctgtgagacctacgagtacccacagcgtggtggagagagtgcaggccggtctgctgaatccatgagtgatggagtyggctctttcctggtgagtgtgggttaacccaagggtcctcaggccggcctggttaggtaaaaggtcacaccttatggaattaaaagcacaaccccaaaagagtgatggcgtctccatcttaggaccctgcccaagttcttgtctcagttcagaaccctgcgttgagtctttggacaagtaagatataagtattctagtctggaagaaatgtatgtgctaaggtagactggattacaaggttcaccaaccttgtagg

SEQ ID NO: 174981 - DNA, 505 bp, Homo sapiens
tttgaactgaggagtgatgtgttcgaagaaattccttatcatttggggttgagagtagtatcttctggagtatcagtaagaccttgaaccacactggtgagggtatgggtaagtgtcaacacatgaatcaaccatgagtacttatgaatcctccttcctctgtcagcttcttcctgtgagacctacgagtacccacagcgtggtggagagagtgcaggccggtctgctgaatccatgagtgatggagtcggctctttcctggtgagtgtgggttaacccaagggtcctcaggccggcctggttaggtaaaaggtcacaccttatggaattaaaagcacaaccccaaaagaktgatggcgtctccatcttaggaccctgcccaagttcttgtctcagttcagaaccctgcgttgagtctttggacaagtaagatataagtattctagtctggaagaaatgtatgtgctaaggtagactggattacaaggttcaccaaccttgtagg

SEQ ID NO: 174982 - DNA, 506 bp, Homo sapiens
agaattgtcactgtttgtcaggaagagaaaatgggctagtggaagcccagtcttgagttcttgtcttgttaccatttaaaattgacatttaattttcaaatcactgttggtgcctaatcacttaagttattaatttattctgttgtattcttttttttaaattgtaacatatttatccggtgggtgggacaggagtgtgttcaagtgggtcatgtttttgctgtggtgacacatggtacaggcttggagcttgcaggtccctttctactgtggtgttggagcaggacaataaagtccactagaartgcaccccagaaccagctgccgtgtccatcttgtcttgaggagcttggtggtggaacctgttctcactccagtctgttccaatttttgctttatttggaaataattgggtatttttcttggctgtgaataagaacaaatgctctctacctcagcgtctgttgtaaagtggaaatcatactagcatttacccatccagcttt

SEQ ID NO: 174983 - DNA, 483 bp, Homo sapiens
gtttgtcaggaagagaaaatgggctagtggaagcccagtcttgagttcttgtcttgttaccatttaaaattgacatttaattttcaaatcactgttggtgcctaatcacttaagttattaatttattctgttgtattcttttttttaaattgtaacatatttatccggtgggtgggacaggagtgtgttcaagtgggtcatgtttttgctgtggtgacacatggtacaggcttggagcttgcaggtccctttctactgtggtgttggagcaggacaataaagtccactagaaatgcaccccagaaccagctgccgtgtccatcttgtcttgaggrgcttggtggtggaacctgttctcactccagtctgttccaatttttgctttatttggaaataattgggtatttttcttggctgtgaataagaacaaatgctctctacctcagcgtctgttgtaaagtggaaatcatactagcatttacc

SEQ ID NO: 174984 - DNA, 483 bp, Homo sapiens
gtttgtcaggaagagaaaatgggctagtggaagcccagtcttgagttcttgtcttgttaccatttaaaattgacatttaattttcaaatcactgttggtgcctaatcacttaagttattaatttattctgttgtattcttttttttaaattgtaacatatttatccggtgggtgggacaggagtgtgttcaagtgggtcatgtttttgctgtggtgacacatggtacaggcttggagcttgcaggtccctttctactgtggtgttggagcaggacaataaagtccactagaaatgcaccccagaaccagctgccgtgtccatcttgtcttgaggagcttggtggtggaaccygttctcactccagtctgttccaatttttgctttatttggaaataattgggtatttttcttggctgtgaataagaacaaatgctctctacctcagcgtctgttgtaaagtggaaatcatactagcatttacc

SEQ ID NO: 174985 - DNA, 687 bp, Homo sapiens
tgggggcagtgaagtgtctgggtaacttcaggggcttccacttggccctttctactacagactcttactcggctggatgtggtggctcacgcctgtaattccagcactttgggaggccgaggcgggcggatcacttgaggtcaggagttcgagatcagcctggccaatgtggtgaaaccccatctctactaacattagagactacaaaaattagccgtgtgtggtggtggcatgcctgtaattccagctactcaggaggctgaggcaggggaatcgcttgaacccaggaggtggaggttgcagtgagccgggatcaagccattgtactccagcctgggtgacagaacaagactctgtctcaaaaaaaaaaaagattcttactcctcaggtcagaaaaacaacacaagaattctaatatctgctaaatatatatctgctgatctctacttccagaaactggggaattaaccacagggtgggtccgygaatgcatagaaccaatgtgaaatgcatttgggctagaagtcattttatcacttggctttcatcattcaaattcatcatctaaaaatggggggctgcatgcggtgcctcacacctgtaattccagcactttgggaggctgaggtgggtggatcatctgaggtgaggagttcaagactcatcctggcccacaatgcaaaaccc

SEQ ID NO: 174986 - DNA, 480 bp, Homo sapiens
gccattttctcccagctcaacatcaaaacccctttcatctgctgtctaaacgcaaacaaagcaaaccttccaccaggcctttctttccagataaattaaaactctcatgtgctggggcctaaatcaagcctacaggccttccctakataaatccgctctcaacctgaaatcttcttgccacacgtgctccttgtaagataattttgcagtagctaatcaataatgcaacagtaaattgcatttaaataaacattagcagcccctcttaatgaataaaacctcatctgcaatttgtcaaagtcagaaatattggactcttttgatattcattagaatattggaaattggagctttgacaggttttatgtacattgcaattaccatcctgtggggggttgggagatactaaaaaaaggcttacttttatacatcccggacggaatatagtggaacatacagcaggtttctagactggaattc

SEQ ID NO: 174987 - DNA, 578 bp, Homo sapiens
gtgtagtttccaacactttatgtttgaatacttttcactgagtttaaattttttttaaataaaattattaatagccctatggctctctccttaattggtactattgggtagagtttacaaagcttgtgacagctggctgtgtttctctttatatggctaatgatctggatttgtcccttttgtgtgtgtgtgtgtgtgtgtgtgtgtgtgtgtgttgagatggagtctcactctgtcacccasgctggagtgcactggcacgatcttggctcactgcaacctctgcttcctgggttcaagcgattcttgtgcctcagcctcccgagtagctgggattacatgcgcccaccaccatgcctggctaattttcatgtgtttagtagagacaggggttcaccatgtgggccaggctggtctcttaactcctgaccttaagtgatcctcctgcctcgacctcccaaagtgctgggattacaggcgtgagccactgcacccagcctggatttgtccctttctctgatactgcatcttggcttctgagttgttattgaagtcaaatgccttttctacctatttca

SEQ ID NO: 174988 - DNA, 578 bp, Homo sapiens
gtgtagtttccaacactttatgtttgaatacttttcactgagtttaaattttttttaaataaaattattaatagccctatggctctctccttaattggtactattgggtagagtttacaaagcttgtgacagctggctgtgtttctctttatatggctaatgatctggatttgtcccttttgtgtgtgtgtgtgtgtgtgtgtgtgtgtgtgtgttgagatggagtctcactctgtcacccacgctggagtgcactggcacgatcttggctcactgcaacctctgcttcctgggttcaagcgattcttgtgcctcagcctcccgagtagctgggattacatgcgcccaccaccatgcctggctaattttcatgtktttagtagagacaggggttcaccatgtgggccaggctggtctcttaactcctgaccttaagtgatcctcctgcctcgacctcccaaagtgctgggattacaggcgtgagccactgcacccagcctggatttgtccctttctctgatactgcatcttggcttctgagttgttattgaagtcaaatgccttttctacctatttca

SEQ ID NO: 174989 - DNA, 578 bp, Homo sapiens
gtgtagtttccaacactttatgtttgaatacttttcactgagtttaaattttttttaaataaaattattaatagccctatggctctctccttaattggtactattgggtagagtttacaaagcttgtgacagctggctgtgtttctctttatatggctaatgatctggatttgtcccttttgtgtgtgtgtgtgtgtgtgtgtgtgtgtgtgtgttgagatggagtctcactctgtcacccacgctggagtgcactggcacgatcttggctcactgcaacctctgcttcctgggttcaagcgattcttgtgcctcagcctcccgagtagctgggattacatgcgcccaccaccatgcctggctaattttcatgtgtttagtagagacaggggttcaccatgtkggccaggctggtctcttaactcctgaccttaagtgatcctcctgcctcgacctcccaaagtgctgggattacaggcgtgagccactgcacccagcctggatttgtccctttctctgatactgcatcttggcttctgagttgttattgaagtcaaatgccttttctacctatttca

SEQ ID NO: 174990 - DNA, 542 bp, Homo sapiens
tgcttggtcattcctggatgtgggtcaagctaactttgggagaaatttatagtttaagtgataatatcctttcccaaaactaaactgcctttgtaaaactaaagaaaggccaggaggttaggatggattccactaaaatgtaggtgtagttaagtgattagcatccattattctggaggtcatgagatgtgcaacttccccaattattcctgcaaataacattgaagcaagaaattttccctgatccctctgtgggtgggaactggagtgcatgggtgctggcagggacaaactccactaacttgaacctgctttgctcaaccccttgagggagggagtacacaggtgagggggtgcaggagctagagcaagcacttttgggtgccagcaggaatgaactttgtaamggctccatggcagcatctagggggagtgcccatgatccctgaagccccagaaggagcgttacagtaagcactcttttagttttgccatccgcggatggcttaagtgttaacagctcagtgaaaggtcagtgtgac

SEQ ID NO: 174991 - DNA, 629 bp, Homo sapiens
atatgacaaattcaattcaacagcaagaaaacaaataatctgattacaaagtgggcaaatgatgtgaacatacatttctcaaaagaagacataaactcggccaagaaatatacaaaaaaatgttcaacatcactaatcaggaaaatgcaaatcaaaaccacaatgaaatatcatttcaccccagttaaaatgactataatcaaaaacacaaaggataaataccggtgaggatgtagagaaaagagaactctcatacactgttggtggaaatgtaaattagtacasacattatgaaaaacagtatgaagtttcctcaaaaactaaacatagaactaccacatgatccaacaatcccactgctggtatgtatccacaagaaaggagatcagtaatatcaaataaatatctgctcccatgttcactgcattcacaaaagccaaaatatggaatcaacctgagtgcccatcaacagatgaacacatttttataatgtgggatatatatatatatgtaaaatgaacaatataatattattcacccataaaaaaggagatcctgtcacaacaacatggatggagatggaggacattatattaagtgaaataagtcaggcacagaaagaaatttat

SEQ ID NO: 174992 - DNA, 629 bp, Homo sapiens
atatgacaaattcaattcaacagcaagaaaacaaataatctgattacaaagtgggcaaatgatgtgaacatacatttctcaaaagaagacataaactcggccaagaaatatacaaaaaaatgttcaacatcactaatcaggaaaatgcaaatcaaaaccacaatgaaatatcatttcaccccagttaaaatgactataatcaaaaacacaaaggataaataccggtgaggatgtagagaaaagagaactctcatacactgttggtggaaatgtaaattagtacacacattatgaaaaacagtatgaagtttcctcaaaaactaaacatagaactaccacatgatccaacaatcccactgctggtatgtatccasaagaaaggagatcagtaatatcaaataaatatctgctcccatgttcactgcattcacaaaagccaaaatatggaatcaacctgagtgcccatcaacagatgaacacatttttataatgtgggatatatatatatatgtaaaatgaacaatataatattattcacccataaaaaaggagatcctgtcacaacaacatggatggagatggaggacattatattaagtgaaataagtcaggcacagaaagaaatttat

SEQ ID NO: 174993 - DNA, 629 bp, Homo sapiens
atatgacaaattcaattcaacagcaagaaaacaaataatctgattacaaagtgggcaaatgatgtgaacatacatttctcaaaagaagacataaactcggccaagaaatatacaaaaaaatgttcaacatcactaatcaggaaaatgcaaatcaaaaccacaatgaaatatcatttcaccccagttaaaatgactataatcaaaaacacaaaggataaataccggtgaggatgtagagaaaagagaactctcatacactgttggtggaaatgtaaattagtacacacattatgaaaaacagtatgaagtttcctcaaaaactaaacatagaactaccacatgatccaacaatcccactgctggtatgtatccacaagaaaggaratcagtaatatcaaataaatatctgctcccatgttcactgcattcacaaaagccaaaatatggaatcaacctgagtgcccatcaacagatgaacacatttttataatgtgggatatatatatatatgtaaaatgaacaatataatattattcacccataaaaaaggagatcctgtcacaacaacatggatggagatggaggacattatattaagtgaaataagtcaggcacagaaagaaatttat

SEQ ID NO: 174994 - DNA, 404 bp, Homo sapiens
tatttcctctctcagttaaggtaaataagtgtttctgccaccaaattcctatcttaataaagaaaggttttgggtttgtttttaaatgtcataaatccctakaccaagttcaaatcactttcagcatctggctcctggtcttctctgccaaatgagcttaaattcaatttttttccgcccaaaccataatcattcttttgagttgtccaggtactttttcttttctttcatgtgcccgcagtgaaatgttgtccctattgtgcatcatcataactttttgccgatccatgccaccgccactgctgcacatcgttggcaagcccctgagccacactgatgggctagttatctccaccagtgctgggctgaagcggccagagctgattgttaaggttcatgaattc

SEQ ID NO: 174995 - DNA, 548 bp, Homo sapiens
cacaacacctggcctgatttggtttttctttttctagtctaacagatattcttagcttattaatttttagtttttttctataaacactcatggctatagatagaccttaaagtaccactttggcagtatttcataggttcatgataatttaatttaaaatacttcacatttatttatttgatgtattcactacttataargtgtttcataatttcaaagcttgtttttattttcaactttttctaattatcttttgcttattgatttcttacttatttgcattgtggtcagaaaatttgatttgtatactaatttcctgaaatatataaagatttagtttatggcccagcctgtgaagagctttcataaatgtaatattatgtgcttaaatctgtacattatctagttttagagtaaaactatatggtcattagatgaaacataccaattatttcattcagatattttgttttctttttactttagctccttgatctattagttacttaaaaagttgtattaaaatattccagtgtgatgatgatttt

SEQ ID NO: 174996 - DNA, 619 bp, Homo sapiens
gaatttatttatttttatttgaatttatttttatatttacgcaagattcaatgaacacytgctatatgctagacattgagaggtgctaagggcatgaaggtacatatgactcagtcattgccctcagtgagcttaccgtctagcgagggagtcagacaaaaacaacttcaaagcaacagagaagacactaggggaggagagaccagctctccgtgaagtagtggaagaactcaaaaagagcttcaagaagtagctttaagatgccttcaactgagtccttaaggacaagtagaaattaactaaatttaatttaggcagtctgggcaaagaagaatcaaggagggaagagcatgtttcatatggggaagggcctattaaaataggacattgtgctttattaactagaaagggcttgaaagaccatcaagcttatattctccaattcgtagatgatgaaattgagggtgagaaagaggcaaaatgatctactaaatttcctttctctcctttcccctggataactcctagtcattcttctggcctcaaatgacatctcattttgctactggaaacattctgaactacctttaggctaagtagctgtccctgctctgagctc

SEQ ID NO: 174997 - DNA, 548 bp, Homo sapiens
ggccagttgtgagttctaaatattcaggtttacaaattggtaggaaatagagatggaaaattaaggctgatatatatagtgagcaaaccattctctgaaaataagttatttcagaaaacatgtattagtcacctccattatgctatataaatagcattttaamcccatagaatgaagtagatgttttattctcatcatgtttagcattaggcttgtgtagctgtagattttctaaagtcacaaagcttgaaaataaatttggacataattttctttgtttttcaccctgaattcttcctccctccttgtttcagaaatataagcacacagaaatatatatatatctgaactataggccatatatagtatatatatttagagatagtcttcacaaatatggttcatatttagaaattgatattgcaaataaagctttagcagaaatagttttgtgtgtgtgtgtgtgtgtgtgtgtgtgtgtgtatgtgtgtgtgtgtatttaagtataagggcaatgcttaaccgttttgtaaatggcaccaaaatat

SEQ ID NO: 174998 - DNA, 548 bp, Homo sapiens
ggccagttgtgagttctaaatattcaggtttacaaattggtaggaaatagagatggaaaattaaggctgatatatatagtgagcaaaccattctctgaaaataagttatttcagaaaacatgtattagtcacctccattatgctatataaatagcattttaacmccatagaatgaagtagatgttttattctcatcatgtttagcattaggcttgtgtagctgtagattttctaaagtcacaaagcttgaaaataaatttggacataattttctttgtttttcaccctgaattcttcctccctccttgtttcagaaatataagcacacagaaatatatatatatctgaactataggccatatatagtatatatatttagagatagtcttcacaaatatggttcatatttagaaattgatattgcaaataaagctttagcagaaatagttttgtgtgtgtgtgtgtgtgtgtgtgtgtgtgtgtatgtgtgtgtgtgtatttaagtataagggcaatgcttaaccgttttgtaaatggcaccaaaatat

SEQ ID NO: 174999 - DNA, 548 bp, Homo sapiens
ggccagttgtgagttctaaatattcaggtttacaaattggtaggaaatagagatggaaaattaaggctgatatatatagtgagcaaaccattctctgaaaataagttatttcagaaaacatgtattagtcacctccattatgctatataaatagcattttaaccccatagaatgaagtagatgttttattctcatcatgtttagcattaggcttgtgtagctgtagattttctaaagtcacaaagcttgaaaataaatttggacataattttctttgtttttcaccctgaattcttcctccctccttgtttcagaaatataagcacacagaaatatatatatatctgaactataggccatatatagtatatatatttagagatagtcttcacaaatatggttcatatttagaaattgatattgcaaataaagctttagcagaaatagttttktgtgtgtgtgtgtgtgtgtgtgtgtgtgtgtatgtgtgtgtgtgtatttaagtataagggcaatgcttaaccgttttgtaaatggcaccaaaatat

SEQ ID NO: 175000 - DNA, 609 bp, Homo sapiens
ccctgtaatttaaaggattactattccttcattgtgcttataaccactttccttcgaattaaaaattattcaaaaattcaaaagaaaattgaagagagatgctgctagtaaaagaagtgtgtgagcaccatcatctagtttttaaaaatggaacatctttatattatgctttaacagaattaattttaaaagcttgatggttcctcaaatggtgaatttgcatcaagtattattaagcctactacattctatagaaagggatcactgtatatttaatttttccatatacaattataactcatatatgtggtacatttatctaaacaaacctagtttccatttctggaagtttattttgaacagcgcratccaaaactgactttccacaagaacaaagttacatatgggaattatacttctggagaacaaccagaagactgtgcacatcatgaaataaaataagagaagaaacattaaaaggaatttggacctgagcaacatttatcaaagatagtcattagtaataagtcccatagttcaaatctagatgtttactaaagacaaaacaacaacaacaaaaccatgtgatttggtcagctgactcactaa

SEQ ID NO: 175001 - DNA, 585 bp, Homo sapiens
cttttattcaacatagtactggaagtcttgtccagagcaattaggcaagacaaacaaagggaatcaaaattatcaaagaagaaatcaaattagccttgttcacagataatatgatcttatacataaataaacctaaagactccaccaaaaaactgttagataaacaaattcagtaaaattccagaatacaaaatcaacattaaaaataagtaacatttatataggtcaacagcaaacamtctgaacaagaaatcaaaaaggcaatcccatttacaatagctacaaaagtagaaaataccaaggagtcaatttaaccaaagaagtgaaagatctatacacggaaaactatatgacactgaggaaagaaattgaggaggagacacaaaaatgaggaaatatttcacgttcatgaatttgaagaatattgttaaaatgacactactacccaaagtaatttacagatccagtgcaatttctatcacaatcctgaataaattcttcacaaaaatagaaaaaataataacatttatgtggagccacaaaagaccttaaatagctaaagcaatcctgagcaaaaagaacaaa

SEQ ID NO: 175002 - DNA, 585 bp, Homo sapiens
cttttattcaacatagtactggaagtcttgtccagagcaattaggcaagacaaacaaagggaatcaaaattatcaaagaagaaatcaaattagccttgttcacagataatatgatcttatacataaataaacctaaagactccaccaaaaaactgttagataaacaaattcagtaaaattccagaatacaaaatcaacattaaaaataagtaacatttatataggtcaacagcaaacactctgaacaagaaatcaaaaaggcaatcccatttacaatagctacaaaagtagaaaataccaaggagtcaatttaaccaaagaagtgaaagatctatacacggaaaactatatgacactgaggaaagaaattgaggaggagacamaaaaatgaggaaatatttcacgttcatgaatttgaagaatattgttaaaatgacactactacccaaagtaatttacagatccagtgcaatttctatcacaatcctgaataaattcttcacaaaaatagaaaaaataataacatttatgtggagccacaaaagaccttaaatagctaaagcaatcctgagcaaaaagaacaaa

SEQ ID NO: 175003 - DNA, 585 bp, Homo sapiens
cttttattcaacatagtactggaagtcttgtccagagcaattaggcaagacaaacaaagggaatcaaaattatcaaagaagaaatcaaattagccttgttcacagataatatgatcttatacataaataaacctaaagactccaccaaaaaactgttagataaacaaattcagtaaaattccagaatacaaaatcaacattaaaaataagtaacatttatataggtcaacagcaaacactctgaacaagaaatcaaaaaggcaatcccatttacaatagctacaaaagtagaaaataccaaggagtcaatttaaccaaagaagtgaaagatctatacacggaaaactatatgacactgaggaaagaaattgaggaggagacacaaaaatgaggaaatatttcacgttcatgaatttgaagaatattgttaaaatgacamtactacccaaagtaatttacagatccagtgcaatttctatcacaatcctgaataaattcttcacaaaaatagaaaaaataataacatttatgtggagccacaaaagaccttaaatagctaaagcaatcctgagcaaaaagaacaaa

SEQ ID NO: 175004 - DNA, 580 bp, Homo sapiens
gtatgagggaataggtgcctgagcagcttcctgaagctttaaaagaccgttggcctcgtgttttaatgcaattcatgtattggtctttgtcacattggataacattttaaagttaagcagggtacttttttaattgaaattccttgaaattcgagtcctcagttttttcttcatttgcgtaaagtttatcggggggratttaattttctcagctttttgttaagagcacttcctccaaaaaatttttttcaagtaataatgctctgctttgggttggtttttgtaagattttttgcacacctaaagagtgtttgcttttgtgctagccttatccctccactaaagttattttaaataatttcacatttctgcaaattagcactttgcttatctgcaatcttttactttgatttttgaagttttaaagcaattggagtaatactgttgaatgaactagtttcacttccaaaatagaaaaaattgtaaatccttgccttatgcagctttctcagaattctgcttcttcctagtactagatgtgtagccatttgcttagtggactaatccgcaaggcacaccc

SEQ ID NO: 175005 - DNA, 547 bp, Homo sapiens
catttgggggtcacaggttaatcagagcctaggatttaccaggttaatatctgaaaacatattattattttacagtgagaattgcgtatttgataaatgtcatcagatagtattaaaggaaaaatagtcttagctagcaatttagaaaataaattgctctgattagttgctaaaaaaattccagatggattaaacaattgaagaaaaaccaaattatttttaaaaactagcagaaaatggaagtaaatatgtatcctatctctaaaggagtaattttctaagttttaaaatcatataagaaagaacataggaaaagagaaattaaaatactttttaaaaatttgcccctcaacaatatataaaaaggaaaacaaaagacttggaaaatatttccagcacatatgagtcaaggaatgttacatggttatataacasaaactgttattcattgcagattaaactgatgccttaagaaagcaatttgtcatctgagcgtggtggctcacgcctgtaatcccagcactttgggagacccaagcaggtggat

SEQ ID NO: 175006 - DNA, 562 bp, Homo sapiens
gaggaagtgtgtgggggggtgggcagcctgccctgccccatccctatctgaatctcccctggcccggagcagctgtggttgtgatgtcctccagccctgaaatgggccaagatggcagagggcagcctcgggcctctccttagtgccagagctcccagctgggattagccccacccttccctacttagcgggctcttcccaatgccccagagctgtcacacagstgggctccaccatgcactgggcttgaggcctggggctgtcttggagagacagagaaggggaatatgagtgaatgaacgtgatgtgtgtgggggcaagagtgtgtgagtatgaatatatgtatgaatgaatgtgtgagtgtatgatgtgtgttgtatgactctgatgtttgagcgtgtgaagtatgtgtggtgtgtgtctgaggtgtgtgtaagggtgcaatgtatgttgtgtgatacgtgtgtggtgtgtgtgtggtgtgtggctacagtgtgagtgtgtgtagtgagtgtgaacatgtagtgtgtggctatgagagtgtgagtgtgttatgtgtaat

SEQ ID NO: 175007 - DNA, 562 bp, Homo sapiens
gaggaagtgtgtgggggggtgggcagcctgccctgccccatccctatctgaatctcccctggcccggagcagctgtggttgtgatgtcctccagccctgaaatgggccaagatggcagagggcagcctcgggcctctccttagtgccagagctcccagctgggattagccccacccttccctacttagcgggctcttcccaatgccccagagctgtcacacaggtgggctccaccatgcactgggcttgaggcctggggctgtcttggagagacagagaaggggaatatgagtgaatgaacgtgatgtgtgtgggggcaagagtgtgtgagtatgaatatatgtatgaatgaatgtgtgagtgtatgatgtgtgttgtatgactctgatgtttgagcgtgtgaagtatgtgtggtgtgtgtctgagrtgtgtgtaagggtgcaatgtatgttgtgtgatacgtgtgtggtgtgtgtgtggtgtgtggctacagtgtgagtgtgtgtagtgagtgtgaacatgtagtgtgtggctatgagagtgtgagtgtgttatgtgtaat

SEQ ID NO: 175008 - DNA, 533 bp, Homo sapiens
aggttaatcagagcataggatttmccaggttaatatctgaacacatattattatttcacagtgagaagtgcgtatttgataaatgtcatcagatagtattaaaggaaaaatagtattagctagcaatttagaaaataaagtgctctgattagttgctaaaaaaattccagatggattacacaattgaagaaaaaccaaattatttttaaaaactagcagaaaatggaagtaaatatgtatcctatctctaaaggagtaattttctaagttttaaaatcatataagaaagaacataggaaaagagaaattaaaatactttttaaaaatttgcccctcaacaatatataaaaaggaaaacaaaagacttggaaaatatttccagcacatatgagtcaaggaatgttacatggttatataacagaaactgttattcattgcagattaaactgatgccttaagaaagcaatttgtcatctgagcgtggtggctcacgcctgtaatcccagcactttgggagacccaagcaggtggat

SEQ ID NO: 175009 - DNA, 533 bp, Homo sapiens
aggttaatcagagcataggatttcccaggttaatatctgaacacatattattatttyacagtgagaagtgcgtatttgataaatgtcatcagatagtattaaaggaaaaatagtattagctagcaatttagaaaataaagtgctctgattagttgctaaaaaaattccagatggattacacaattgaagaaaaaccaaattatttttaaaaactagcagaaaatggaagtaaatatgtatcctatctctaaaggagtaattttctaagttttaaaatcatataagaaagaacataggaaaagagaaattaaaatactttttaaaaatttgcccctcaacaatatataaaaaggaaaacaaaagacttggaaaatatttccagcacatatgagtcaaggaatgttacatggttatataacagaaactgttattcattgcagattaaactgatgccttaagaaagcaatttgtcatctgagcgtggtggctcacgcctgtaatcccagcactttgggagacccaagcaggtggat

SEQ ID NO: 175010 - DNA, 640 bp, Homo sapiens
tgtaattttaatcaaaagtgttaggctacatagtgcattgtaaattttcaattatgcctaatataaataagcacaaccaacactatttttcaaagtcacataaaagtgttyaagaaatcacagaggctctccacataataaaagtaaaagtgtgaaaggcagaatttagaatgatttgttagagaagaactgtaggttctgcatataaaataggctcatttaacaatatgccattctgtatgccccaaaggatatgggggaaagttaagacacttcattttaaatcaattgtgaaatgtggtttaattatcagaagcaaatgagataattttttccaccaatagagcagttttaaatgttgttcactttattttagatattgtgagcataaaaatgatttgctaaacccagacaaaatttttgaagagtttcctgaatccaaacatgtttacactataataaattatttccaagacaccaggaacaccatagctaaaatacaattcaaatgagatctacatttaatgtagaagaaccagacatcccttatctatatcaactactaatatccctgctgtgaactataaattaacgaggttcattttgtgtgtgtggccatggagccaggcttccacgcccc

SEQ ID NO: 175011 - DNA, 640 bp, Homo sapiens
tgtaattttaatcaaaagtgttaggctacatagtgcattgtaaattttcaattatgcctaatataaataagcacaaccaacactatttttcaaagtcacataaaagtgtttaagaaatcacagaggctctccacataataaaagtaaaagtgtgaaaggcagaatttagaatgatttgttagagaagaactgtaggttctgcatataaaataggctcatttaacaatatgccattctgtatgccccaaaggatatgggggaaagttaagacacttcattttaaatcaattgtgaaatgtggtttaattatcagaagcaaatgagataattttttccaccaatagagcagttttaaatgttgttcactttattttagatattgtgagcataaaaatgatttgctaaacccagacaaaatttttgaagagtttcmtgaatccaaacatgtttacactataataaattatttccaagacaccaggaacaccatagctaaaatacaattcaaatgagatctacatttaatgtagaagaaccagacatcccttatctatatcaactactaatatccctgctgtgaactataaattaacgaggttcattttgtgtgtgtggccatggagccaggcttccacgcccc

SEQ ID NO: 175012 - DNA, 641 bp, Homo sapiens
ataaacaaaaatgaattggtgacagcactgagaatgtcaaggtatagttttggctcccagcaagctgggtttcagggctcaaattaggtcatcagggttgggttttcctctatgggttttggcttcattcttcttattaaatttattctctgagcgattctccaatcattatctccggttacactgccatcttagcttcaagtccattaaggaagagaatgagtctcctttctagaacaaccataaaaatgaactttattggcacttatttgacttcgattggatcacattttcacccctgagytcaatgaccaaggtaatatgatgcactgagtgagttaaatccaggtcccatactttacactggagctggggatgggagttacccaaagcatatgggctgagaggggaatagtgtcctgaggaaaaatgaatatgattactgaaaatgggagaaattaatctagattgcatacaaaaataatgtattttcttacagatagtttcaataattaggtgccaacagttcctctcttccctgggtgcacatgctactcatcccatcaagaggtggagtccatttcccctccctttgaataaggctggctttgtgacttgctttgcctaatagaatgcagcac

SEQ ID NO: 175013 - DNA, 631 bp, Homo sapiens
gaatattacaaacaactctatgcccacaaatttgataaccaaaatgaaakggaacaattccttaagatacaatccaccaaaacttacacatagaaaaactaatagtctaagtagacctttgcaatgaaatgaacatttttgtgcccttaaaatttatattttcaggcttgttgcagtggcttatgcctgtaatcccagcacttttggaggcagaggtgggaggattgcttaaactcaggagttcaagcctggaaaatatggtgaagttctgtctctactaaaaatacaaaaattagccaggcatggtggcatgtgcctgtagtcagagctactcaggaggctgaggtgagagaatctcttgagcccatgaggtgaaggttgcagtgagctgagatggagcttctgcatttcagcctggggccacagagcaagattctgtctcaaataataacaataataatataatatatatatatttcaaaatattatatatatatattcagagcctaatcccagtatgatggtctttggaggtgtggaggtggggcctttgggaacagttagattatgaaggtggagttctcatgaatggaattagtgcccttataacaagaggtcagagagctaggca

SEQ ID NO: 175014 - DNA, 521 bp, Homo sapiens
caaaacgttctgtaatcctctaagcatctgggtaagtctagttccaggattcaaatccatataattttcattttcatggctaaaatggaggaaagtataaaaatatatgtaaatagataataaaggtaactccattcatctttcygtatctttgaatcggtgtcttgctcttttgatgttcagtgtttggtcttagatataactcctgtgttttgttgaccaagatggaattcatactggtataagtggtcatttcgtgagtccaaagtagaactgccataatgacctcattcttctctacttgctacctaatccaggattttaatgtaggctagtactgtacttgtgacctattttgtcttctaagcttttaagaacatcatgatttgacatatattgggaatgcttagataacactgcctgccaagcatgtaaaaggtaaactcagaaatgctcaggtaaactcaagcatgtgaaaggtaaactagacatttcagagattaatctcagacagtagaaga

SEQ ID NO: 175015 - DNA, 521 bp, Homo sapiens
caaaacgttctgtaatcctctaagcatctgggtaagtctagttccaggattcaaatccatataattttcattttcatggctaaaatggaggaaagtataaaaatatatgtaaatagataataaaggtaactccattcatctttctgtatctttgaatcggtgtcttgctcttttgatgttcagtgtttggtcttagatataactcctgtgttttgttgaccaagatggaattcatactggtataagtggtcatttcgtgagtccaaagtagaactgccataatgacctyattcttctctacttgctacctaatccaggattttaatgtaggctagtactgtacttgtgacctattttgtcttctaagcttttaagaacatcatgatttgacatatattgggaatgcttagataacactgcctgccaagcatgtaaaaggtaaactcagaaatgctcaggtaaactcaagcatgtgaaaggtaaactagacatttcagagattaatctcagacagtagaaga

SEQ ID NO: 175016 - DNA, 574 bp, Homo sapiens
ttttgtttctgtagttttacttgtgctttagctttttctaaaaatattcttaatattttagtttgaggtttcattccttgtatactgtatctttcaatttctctaaattttaaaaaatctcttattttccagtgttttggaagagttttttcactttgttctctgaatcattgataygatttttttttgcaatttcagtttggctctttattgctctttaatgtggatttttattctgctgttgtcttttgtttttttcataatcattattttagccatctcatcctgcagcctctttatcttagctgatagtatgttcattcctactcctgaatgagaggcggcccatataggctattgattaccaaaacacagaatgtgtaggtttctgcaggccccaaactctttcttcttggatactggatcaattatatcactatttgatcaatgtcaaatctccttcttatatcaacattgatagaaatctatgtcaatgtcctaatctaataggcattgtctagcagactttctattatgtagtagattcttttttcctgagatggaactttctccc

SEQ ID NO: 175017 - DNA, 600 bp, Homo sapiens
ttcccgttctactattctttggtataacccttgtccttaacgatccaagatatttgctaatgtgccaggcttactttccaagttccaaatggaagaaaaagggtgagctgaaaatggtatgccttttctcttaatgcaaacaataaatcccaatgctttttattttcaaaaatttgtggaaatatagtgtctaagatactttccattttaaaaattattttctccaatgttagattcatctgcattttacaaaatgcttttcatgggattttttaatttatttactttaagtcttaggaaatagcaaagatgaagatgaattttagacagggaaatataggctcatccaaaaatatacatacttttgaaaagcttatactttttctgctacrtcaagccactttcataaaagagtaaaatgtttttctttgaattttaataaagactacatttatatttcttagaaataaagagtacttaaactgtttgatagattttcttagaaaaccaaattatattaaatagcaattaacttagaagtctattttttcctctaaaaattaataatattttattcatgaggcactgtggcatacgtgg

SEQ ID NO: 175018 - DNA, 397 bp, Homo sapiens
taatttgtgcataaggtcttctctgcttcctctggaaccaggggccaggactctgttctaagaacactaattgttggtgtctgaagactgccatakagccaggaacaggattgggtaggacaagtaaaaaactcctcaaagatttttaccattttgaagtcacttttttactattttttttaatcagtgtttacttggttgctgtaaacctttgactctttttctgagttttgacaaaattacttttgacagtttctgctttttttttaatgcttctttaggaggatgaaagcttggagctgctgctccatcatttcgctcatattaacctcaacatgtattttaaaattaccactacattatactgcactccagttttgtgtaacttatttccctt

SEQ ID NO: 175019 - DNA, 377 bp, Homo sapiens
gatgcagaatagcatttggtgcttaatataacgccaattcaaataataaaaatatctcaggaaactagaaataaaggagacctttctctatttgacaaagaacgtatttttaaaaacctayagcaaacattgtacgtaatgatgaaagactggatgagttctctctaagattgcagacagggcaatggtgtccaatcacatcattcccttactaaaatagcacttggatttctaaccatttttgtatagcaggaaaaagaaataaaatacatacaggttaaaaaggaagaaataaaattttctctatttgaaaatgacattattgtctacatagaaaatcccaaggaatgtgaaaacaattttctataactcataaa

SEQ ID NO: 175020 - DNA, 629 bp, Homo sapiens
atacctcgaatggctaacacagtattgatgcaaaagaacatatttggagaactgatactatccgacatcaaatcttactgcagacattttggaagataatttagtaatttcttacaaaattataaattcttaccatacagttcrgtaatcatgctccttgatatttacctaaaggagttggaaacttacatccacgcaaaaatctgcacatggatgtttatggctttattcataaatgccaaaacattgaaggcactcaagatgtctttctataagcaaatggacaaataaacttgttcatccacacaagggaatatgattgagtcctaaaaagaaatgcactatcaaaccatgagaaagacatagagaaatccaaagttcatattgctaagtaacagaagccaatataaaaggctacatactatacgatttcaaatatatgacattctagaaaaggcaaaactatgaagacagtaaaagatcagtggttaccggatgtgtgagaggggtgggagggatgaacaggcagaactcagatgattttgggggcagtgaaactactctgtatgctattgtgatagtggacacatgtcatcatataatttgtccaaacccatagaatatacaac

SEQ ID NO: 175021 - DNA, 619 bp, Homo sapiens
tcctggctaatatttgtacttttagaagagacagggtgtcgccatgttggtcaggcttgtctggaactcctgacctcgtgatcctcccgcctcagcctcccaaagtgcaaggattacaggcgtgagccaccgcacctgaccaaaaacaattttttgttttgtgagtcccgggccggatttcaacaggtgacagaaggataagtgaattcttggtagaggaaagacactggactgtgacttaagagctcagggatgtgattgagatcagggaagagtttcagaaccagtggattatatggtttataagacaatattgaagagccatatcaattttagaagtcggaaagtgaacagcgtcactgccttggcagaacagaaaaagatatgctcaagttcatccatgstgcacaaatctaggtaggcgcaggaatgctatgttggaaagaatcaatatatagcagcccctttaatcttatgacttatacctctatctcaagccaatatcattttctataagtactccatatgaatcaatttatctattataaaaaatgactttttatatgggtggagctatggtttggatctcagaaacttatggaattttaagcactgtaat

SEQ ID NO: 175022 - DNA, 616 bp, Homo sapiens
gggcgcggggcacgaaaaaaagtgcacaaaatgcattagatgtgcgaacggagtgaccgggacacaacaccttcttggtgaattttaggccttcagttatctcattttcaagtttcaacgttcagccaagtttatacaaaaatgtgaatctcacatttagcttaaaatgactccctttccaccccacggcattcaggccgccctgaactccgtattgtacagcctttttctctcctcccctgcccatcgttttgcctstggcttctccaggacagaggcaggtcttgtgggatgtgaatgagagttaagaggacattgacctttatactcagttagtgttgtttcttgctctagagcaactgaaaaatacttctcatcacggcaagcatccagaatgatcaatcatttatgggctacttagtaggatagttacggaccatcacctggtaaaccatatccttgacatgatccatgccctcttctcctgctgtttggagacatctttcagcttctgtcctttggtgatgtcaggatattagtgtctgcataggtcacctgtctgagttacctttccactaatttatagctttgtatgttgtagaaaacgggtaggaaa

SEQ ID NO: 175023 - DNA, 578 bp, Homo sapiens
gcagctttagctatgtgattcatgcgatccagtggtgcctgaagtatcagtggctgataagggtactgtctgaatactttgccaggcctctacagatgaatcacagttagtcccttaggattttggagcaaaggtctgccattctcctcatataactattcctctactaagaaacagctttatacctgctacttagtagagactgaaaatttaaccatgggcaccaaattaatgtcatcacatgacctgagcatctcattatgaactggatattatctaagccataaagttgggtgtgcacagcagcacaacacttaatcatcaacagaagtggtatatatctgataaggcccatgcgtaccctaaaaatacaagtaagttgcatgaaaaagtgtcccaagtctccatggtccccactcctgctacattaccatagtttcatggagtttttgctatgatcacctgtcagaagaagagaagattaaggcctggtttatacatagctttgcatatatgtaggtaccactcaraagcaggcagcttatcacatttgtctattactttaataacattatgct

SEQ ID NO: 175024 - DNA, 405 bp, Homo sapiens
ctctgctttctcccttcctgtgtttcaactcctcaatacccagtgggacactaggtgtcaggagaggaaacttcagcatgattataacacactggactggttcctagtgcacaaggcaaccatcacaatccccatgctccatgttagtcctgatgaacacacactccagcaggctcatcggaactcctttattccctcttgagtgcccaaggaatacaacaccaatgaaggacamaaccccaaatttatactttcactgtggttaattctaggctcaagagagtgtcttggattaggaattacctgaacatgtggtactcatccaattttcttggagtcactgaactttggtttgtccctctatgaatctgggctaaacatgcccgctctgcctatctcaggaag

SEQ ID NO: 175025 - DNA, 562 bp, Homo sapiens
tgaggagggattaggaaagaaagcttaaataattacttaaaaaaccatgttcagtttaaggaaaccagcatattttcccattctgttcaccaacagtttcctcatgaaagataatgactaaaaaagaaattcaagtggcatgaaagawgaaaaggctatctcacacctcagaaaccagagcttgacataaagctggaaagctatgtcttgtgtaacttattttttgaggtgtctcaagtagtgatatttttgttgcccaaacactgtctttgcagaactaccagaaaataatgaacaagaaagttgtgtatacttacatgccatctgacgactggggtggatatacgtggcattttttttgcttcatgggagaaataatcccaacaaaaaagcgtctgttgttagggtggggagaagaaacctggtaacagtgtgtaccaggaatcattgctttttatgtgattttaaaaattagagtatcagcaaattaggagcatgttacaggcagaacttttttctcccacataacttgtatgctgaagccctaatccccaatgtgact

SEQ ID NO: 175026 - DNA, 562 bp, Homo sapiens
tgaggagggattaggaaagaaagcttaaataattacttaaaaaaccatgttcagtttaaggaaaccagcatattttcccattctgttcaccaacagtttcctcatgaaagataatgactaaaaaagaaattcaagtggcatgaaagatgaaaaggctatctcacacctcagaaaccagagcttgacataaagctggaaagctatgtcttgtgtaacttattttttgaggtgtctcaagtagtgatatttttgttgcccaaacactgtctttgcagaactaccagaaaataatgaacaagaaagttgtgtatacttacatgccatctgacgactggggtggatatacgtggcattttttttgcttcatgggagaaataatcccaacaaaaaagcrtctgttgttagggtggggagaagaaacctggtaacagtgtgtaccaggaatcattgctttttatgtgattttaaaaattagagtatcagcaaattaggagcatgttacaggcagaacttttttctcccacataacttgtatgctgaagccctaatccccaatgtgact

SEQ ID NO: 175027 - DNA, 449 bp, Homo sapiens
tcataagctttttgccattggagagtcttgccttgaggttgatggttgctaaatgatcaaggtggtgattcctgaagattggggtgtctgtagcaatttcttaaaataagacaatgatgaaatttaccamgtcaattgattcttcctttcatgaatgatttctctgtagtatgcaatgttgttagatagcgttttacccacactagaacttctttcaaaattggagtcagtcctctcataacctgctgctgcattatcaatgacatgtatataattgtctaaatcctttgttttcatttcaaccatgttcacagtatcttcaccagtagtaggctgcatctcaagaaaccattttctttattcacttataagaagcaactcctcaaccactaaatattcatcatgagattgcagcaattccatcccatttttaggctccacttctaatt

SEQ ID NO: 175028 - DNA, 572 bp, Homo sapiens
cgcaacccatttgtgaattaaacaggtaaattggctttgtccacactggaagaggatcaactgcttgagcttgcaaatgacactgaccttaaaagtatgtttgagacaacttcaagtctccatacattctggattaaagtcaaggcaggggcatatcctgaagttaacacaaaagcattgaaaagcctgcttccatttccaaaattctaccttagggaagcagggttttctgcagtgacagcaactacaacaggattaagcaacacaattcgggtgtcactctctcccatcagcccaagatggcgaacatctatttccaggaaaacaagctcagggatcccactgattctacattatggtgagttgtataattattgcattatatattacaataataacagaattaaagtccaaaataaatgtattgttyttgaatcatcccccaagcatcccctgcccttgagtccatggaagaattgtcttccatgaaaccagtccctggtgccgaaaagactggggaccactgttttaaatcacccctatactgcatataatgctttctatagatgcaa

SEQ ID NO: 175029 - DNA, 571 bp, Homo sapiens
taaatctttgtcatcctaattgtgatacacgagtggtctagaatgatgccagccaaattccaagttcagaaaagccaaaattcggacaaaaatgcacaggataatctattatgtatggttgaagtgttggttcaagaagtctcgaagtacaaattggagatcagaatccaycagttctgctctcccaaaagtaatgaatattcttaactgggacctcagctgaggtgggctggagccaagacacaggacaaccttctggttcactgccaagaccaatgtctgcaggtagttgagtcttttcaccaaggcactagtatgcatgattttttctggaccccttggcagatggttttggtcaaggccaaatgtgactatagccaagcctcttggagaatggggctatttccaggcttgagcctaggtgcataatcagcagatcaaccacttgggtatcagactgcactcaaaataactgtcctaggtcttgggcatcattggtgttgcataatctcctacctgaatcctgaggcttctgcagagaggcttttgtctatggatggattaagaattc

SEQ ID NO: 175030 - DNA, 500 bp, Homo sapiens
agcaacaactctcgtttccatcttcatctcttcctacatgatttcctgtcatgactaattacactgttttcttctgcgactcctaaagggattctcttcacagctcccagacctcagtgttttttccagttgtaaatttgatgacacaacctttttgtttggaaaacatcagtgttttcccaatgcaataagatttaatccaatccctttacaatggccccatttaatctgtcccctgactgtgtttcaagatggtttctcctcctcayaccagttcccaatattttgacaactttcaacttatttttgtcctctggacagactgagacttattcgtgtctgggagattttgtatttactcttctctcaggcaaaatgcccttccccaagatttttgcctgtctccttctatggctacagcacagtgtcttcccacgccagactcttatattctatccctacactgtgtttaattttctttacaacatttagcatttgta

SEQ ID NO: 175031 - DNA, 399 bp, Homo sapiens
atgaacttaaatcaataggttaactctttcataagaccttattattttaatatttttttttctaaaatagaaaaaagaaaaaacttgactagaaagggggcatggrtgaggacacgctctgaagccctggagctacttcatcgtccagtaaccttcttgggcacgtgggatggtcttagattagaagacaatttatatccattttactctcgagacacttatttactaactgttgatgcaagtctcaggaacgctaatttctcttggcagcttaataaggtgtttttgatttgcatatttagaatttggatgactgtatttgaaattaccattgtatacttctatgactttagaaaaaaatgaaagaaaataaaaaacagaagactataatatagcatt

SEQ ID NO: 175032 - DNA, 399 bp, Homo sapiens
atgaacttaaatcaataggttaactctttcataagaccttattattttaatatttttttttctaaaatagaaaaaagaaaaaacttgactagaaagggggcatggatgaggacacgctctgaagccctggagctacttcatcgtccagtaaccttcttgggcacgkgggatggtcttagattagaagacaatttatatccattttactctcgagacacttatttactaactgttgatgcaagtctcaggaacgctaatttctcttggcagcttaataaggtgtttttgatttgcatatttagaatttggatgactgtatttgaaattaccattgtatacttctatgactttagaaaaaaatgaaagaaaataaaaaacagaagactataatatagcatt

SEQ ID NO: 175033 - DNA, 379 bp, Homo sapiens
gaattcatatcacaattaattggataatataatcacgttttcttctggaaataagaatctatctgcattttgaatacccatccataaatggtaaaattgtatttcctaygagttttgcaggatgggcacaaaacatggagaattgcccacaaaaacatcagtcagtttatagctaaataggtgttatgtgcagtgtagcaggttgggttacgaactgacaaggagagaccaacacacgtgcacacactcccaccacacatacacacttttttctctctctctctttctagagcagaaacaggtagaatatttttaataaagtttttctcttgctctggattctatatacttgtttcattcctgtacagttaggatcttg

SEQ ID NO: 175034 - DNA, 379 bp, Homo sapiens
gaattcatatcacaattaattggataatataatcacgttttcttctggaaataagaatctatctgcattttgaatacccatccataaatggtaaaattgtatttcctatgagttttgcaggatgggcacaaaacatggagaattgcccacaaaaacatcagycagtttatagctaaataggtgttatgtgcagtgtagcaggttgggttacgaactgacaaggagagaccaacacacgtgcacacactcccaccacacatacacacttttttctctctctctctttctagagcagaaacaggtagaatatttttaataaagtttttctcttgctctggattctatatacttgtttcattcctgtacagttaggatcttg

SEQ ID NO: 175035 - DNA, 379 bp, Homo sapiens
gaattcatatcacaattaattggataatataatcacgttttcttctggaaataagaatctatctgcattttgaatacccatccataaatggtaaaattgtatttcctatgagttttgcaggatgggcacaaaacatggagaattgcccacaaaaacatcagtcagtttatagctaaataggtgttatgtgcagtgtagcaggttgggttaygaactgacaaggagagaccaacacacgtgcacacactcccaccacacatacacacttttttctctctctctctttctagagcagaaacaggtagaatatttttaataaagtttttctcttgctctggattctatatacttgtttcattcctgtacagttaggatcttg

SEQ ID NO: 175036 - DNA, 334 bp, Homo sapiens
attatatactgcaattgtttcatggtaaatctaactccaactagcgtgtgagctccctgaggataaggactgtgtcttttcattggtagactctcactacctagtatatagtccagtactttatcagagttattgaatgcattaatgaatatgtaatttaatttttttgtaatrccataaatataatttttccagttggtacatacttatattatatatattattgttattttaaatcttgccagtagtcttatttatcattttgtttctttaatgcattcttacacgtctaaagatgttattgtttcaattatcaataaaatgctgaaaaaag

SEQ ID NO: 175037 - DNA, 508 bp, Homo sapiens
attactagcttgctacgcattattaggttatattctatcttctacttataatcagttagaataagaagggttgggacatcagcaagaaggcagaataggcacttccagcactcatccctctatggaaacatcagtttgaataactatctatgcctgaaaataccttcacaaaagctaagaaatttaagtcagagattaaagtacctgagtggagcacagaaataagaaaagacactttacagagcatgggaggaacaatttcaccttagccacattaccccttccccacacctgtacagcacagcatggagacagaaccccttcgcatgggacaaggagagtgaaatgagtacccagctttgccattgacccaagcaccaggtcagtcttaatgatccctgataccagatcagcctccatggccccargctcctttcctagcacagcaaaggaagcaatgaacaaaatgaaaagacaacctaaagattaagagaaaatatttgccaac

SEQ ID NO: 175038 - DNA, 537 bp, Homo sapiens
cacagtttgggccctggtgggggcctgataccatgcagtaagagtctgtcttcaggaccctatgatgctgtgcaagggtgcasgctgtggtgagggggctgaggcaattcctatgctcctgggtggggatggctaaaggagagagcctgtcctctgtgtttgccctgctggtaaggagggtgtagggttgctgtcaatgacagcagcctgaggcaggtggctctcagactctgcaaaatgcatgccttgtctcccattgtcccagagacagcttggaaggtgtgcagcactgcctattctccggcgtgttggacactgtgtggactggagtgggaatccaactgcactgctgggtgcaactggtgtcactgcagccctccatgtgtttacaggaggacatcagtgggggttccagggatgcggagatgaaggggctgtgcaccccaaggcattatgcagtcttgaaaggtccaggctttcaaaatagcatcatactgcagctgcttgggtcttgggggtggggagtggaactcagtg

SEQ ID NO: 175039 - DNA, 361 bp, Homo sapiens
agagaaaatattcactttttatgcatcggacgaaggactagaatgcagaatctacaaggaactcaaacacaccagcaagaaaaaaacaaataatcccatcaaaagtgggcaaaggacatgaatagagatttctcaaaagaagatatgcaaacagctaacaawcatacaaaaaatgttcaactcatcatccgggaaatgcaaattaaaatcataataagataccaccttactcctgaaagaatggccataattaaaaagtcaagaaaacaatagatgttggcatggatgttgtgaaaagggtacacttttacactgctggtgggaatataaattagtataaccactaaggaaaacagtatgg

SEQ ID NO: 175040 - DNA, 361 bp, Homo sapiens
agagaaaatattcactttttatgcatcggacgaaggactagaatgcagaatctacaaggaactcaaacacaccagcaagaaaaaaacaaataatcccatcaaaagtgggcaaaggacatgaatagagatttctcaaaagaagatatgcaaacagctaacaaacatacaaaaaatgttcaactcatcatccgggaaatgcaaattaaaatcataataagataccaccttactcctgaaagaakggccataattaaaaagtcaagaaaacaatagatgttggcatggatgttgtgaaaagggtacacttttacactgctggtgggaatataaattagtataaccactaaggaaaacagtatgg

SEQ ID NO: 175041 - DNA, 401 bp, Homo sapiens
gaattcataggacaccagggcaggctgaactcctggttgtctcttccctgctccattattgccagcattcatttccatggccactggcaataaatgtacctcttgtagacactttgtcaccctcaattcactatccttttgttcaatttattattattactatttcactagctttaggggtacaagtggtttttggttacatggattwattgtatagtggtgaaatcttggcttccagtgttaattaaatgaagatgttatcacccatatttcagccacatctcatttatgatggtggatattgtcataaagcctatgtgttgtgattcctcttcatcaaatgacattactagaagatataccttccaaacatagacaggctgggttttcccaggtcatcc

SEQ ID NO: 175042 - DNA, 408 bp, Homo sapiens
atgctgtttgatagcattttaaccacagtagaacttctttcaaaattaaagtcaactctcttaaaccttgcctctgtcttatcaactaagtttatgtaatattctaaatattttgttgtcacttaaactatgttcccagcatcttcaccaggagyagatttcatcccaagaaaccactttctttgctcatccataagaagcaacccttcatctgttcaagttttatgacaagattgcaataattctgtcacatcttcagtctccaattctaattctggcccttttcttgtttgtatcacatctgcagatatttcctcccctgatgtcttgagcccttcaaagtcatccatgagggtcagaataaacttcttccaatctcctgttaatattgatattttgaccccctcc

SEQ ID NO: 175043 - DNA, 408 bp, Homo sapiens
atgctgtttgatagcattttaaccacagtagaacttctttcaaaattaaagtcaactctcttaaaccttgcctctgtcttatcaactaagtttatgtaatattctaaatattttgttgtcacttaaactatgttcccagcatcttcaccaggagcagatttcatcccaagaaaccactttctttgctcatccataagaagcaacccttcatctgttcaagttttatgacaagattgcaataattctgtcacatcttcagtctccaattctaattctggcccttttcttgtttrtatcacatctgcagatatttcctcccctgatgtcttgagcccttcaaagtcatccatgagggtcagaataaacttcttccaatctcctgttaatattgatattttgaccccctcc

SEQ ID NO: 175044 - DNA, 458 bp, Homo sapiens
ggtgggaattgaacaatgagaatgcatggacataggaaggggaacatcacacacctgggactgttgtggggtggggggagggggaagggatagcattaggagatatacctaatgctaaatgacgagttaatgggtgcagcacaccaacatggcacatgtatacatacgtaacaaacctgcacgttgtgcacatgtaccctaaaacttaaagtataataataaaaataaaaaattaattaattaaataaatttwaaaaataaaaataaattaataaattggcttcattaaaatttaaaacttctaaacttcaaaagcaactgttaaaagaagtaaaaggcaggccacactctgggtaaaaatacctacaaattatgtatctgataaatgatttatatcagaatatttattgtcaacaaaaagaataagatgacacaacttttaaaaactggcaaaatac

SEQ ID NO: 175045 - DNA, 646 bp, Homo sapiens
tcttgggagcctttggcaggtccatagggatgaatgacagcacagacctttgggattttggagcaggactttgccatcttctgtagataaccactctcctttagagagacagcttttggcctggttactgggccttagtagagactgaacacttgaccatggaccatgtgtcaccaagttacaataaaacctaagctgtccatcattaatttgtttttacctggtccagcaagtcatagagctgcacatgcatagcaacactccatcattaaatagaagtggtatatatatatgataagatccaagcaggtcctgaagatacaagttaaatgaagaagtcgtccaaatttcccactcattctacactatcttttctctcacagcctgcttctatggcctcatagagagttttctatgatcagtggacagagttagagaagagtcaggcctggtttacagacttttctgcacattgtgcaagcaccacctaaaagtggacagctgcagtaatacagctcctctctgggatatctctaaagaacagtggtgaagacaaacctcctactgggcagaactttaggstgggcacgtggttttgcggtttcgttggaaggagagaaggtcagatgtttgactatatatgaat

SEQ ID NO: 175046 - DNA, 541 bp, Homo sapiens
atgagaaattttcagggcagataatgtagacagagctcttaaaggtacagaggaacagtaaatataagaacagagaaatggtaaagagtttcaaatgtttagaataaacaagmtaatgaatagacagcccttttatataaatggcttataaaaataacttaaacctttcatcctctgatattttgactaatatgaatggcttcttcctggcatttctgcctgcagaaatgctaccctagagagactttggaagccaatgaaaagcaggagacacagataacataatggtagccactaatacacagaaaagataaagaaaataagatatttagatatggcaaggagtcctgggaagcagcaaagtcggttatattattggaaatgtagtaaatagtattaggtgagattggaagggtgtttgaaatcaactagaaaatggtatgctaagcaaagtcaactacttgtattaagtggaacataaacatatgagcagaaagttaatatcttttcattgtccaaaaaaaaaaaaatgagctggatc

SEQ ID NO: 175047 - DNA, 595 bp, Homo sapiens
ccttgctgtatcacacttcacatcttaaatcgtcagcttcaccaacatgatgctcgggatcgataaggtcaggtaagagcttgttcttttttaatgttattttaatctggtacagrctaaagcatttttgccaccatcatgaagcaaaagaaacctgtctgctgtgatgttttatgtatttagacaaatgcagattcagatatattcactgattcattaagtaacaaatgaattaccgtatattaaattatttaatgagcaggtactatgtaccagacaaattgttaagcagggaaggtgcagtaacaaaaggacccttgtgttatctaccttcacacacatagagtgtataatacatttttaaataaggatgtaatgaaaatcagaagccaatataatcctttcattccgaccatattccctaagtttccatgcacaatgatattcactggtttcaacagcctcctgaatagtgacaacgaaaatgaaattaaaacatggctttcactgatggcaaaatttaacatgctgaaatttatttcagattgaatcagaattattaaataattagaaaattttttccttaccaggaaat

SEQ ID NO: 175048 - DNA, 595 bp, Homo sapiens
ccttgctgtatcacacttcacatcttaaatcgtcagcttcaccaacatgatgctcgggatcgataaggtcaggtaagagcttgttcttttttaatgttattttaatctggtacagactaaagcatttttgccaccatcatgaagcaaaagaaacctgtctgctgtgatgttttatgtatttagacaaatgcagattcagatatattcactgattcattaagtaacaaatgaattacygtatattaaattatttaatgagcaggtactatgtaccagacaaattgttaagcagggaaggtgcagtaacaaaaggacccttgtgttatctaccttcacacacatagagtgtataatacatttttaaataaggatgtaatgaaaatcagaagccaatataatcctttcattccgaccatattccctaagtttccatgcacaatgatattcactggtttcaacagcctcctgaatagtgacaacgaaaatgaaattaaaacatggctttcactgatggcaaaatttaacatgctgaaatttatttcagattgaatcagaattattaaataattagaaaattttttccttaccaggaaat

SEQ ID NO: 175049 - DNA, 595 bp, Homo sapiens
ccttgctgtatcacacttcacatcttaaatcgtcagcttcaccaacatgatgctcgggatcgataaggtcaggtaagagcttgttcttttttaatgttattttaatctggtacagactaaagcatttttgccaccatcatgaagcaaaagaaacctgtctgctgtgatgttttatgtatttagacaaatgcagattcagatatattcactgattcattaagtaacaaatgaattaccgtawattaaattatttaatgagcaggtactatgtaccagacaaattgttaagcagggaaggtgcagtaacaaaaggacccttgtgttatctaccttcacacacatagagtgtataatacatttttaaataaggatgtaatgaaaatcagaagccaatataatcctttcattccgaccatattccctaagtttccatgcacaatgatattcactggtttcaacagcctcctgaatagtgacaacgaaaatgaaattaaaacatggctttcactgatggcaaaatttaacatgctgaaatttatttcagattgaatcagaattattaaataattagaaaattttttccttaccaggaaat

SEQ ID NO: 175050 - DNA, 487 bp, Homo sapiens
attgctggtgtggttaggctttgtgtccccacccaaatctcatctggaattgtaatccccatgtattgagggaggaacctggtgggaggcaattagatcatgaggtcagtttcccccatgcttttattgtgatagtgagtaagttatcatgagatcttatggttttataagtgtttggcaagttcttcctttaccactcatctctctyctgccgccttgtgaagatgtatatatttgcttccccttccaccatgattgtaagcttcccgaggcctccccagccatgtgaaacggtgagtcaattaaacccttttcctttgtaaattacccagtctcgggtatttctttatagcagtgtgaaaatggattaatacaattacaaaattagggtttagcatgttggaatctcatttcagagtaaaatggtaaaatgttaaaatcgcactcaagtcgttgtgtaatagcctggaaaagctagcattttgca

SEQ ID NO: 175051 - DNA, 487 bp, Homo sapiens
attgctggtgtggttaggctttgtgtccccacccaaatctcatctggaattgtaatccccatgtattgagggaggaacctggtgggaggcaattagatcatgaggtcagtttcccccatgcttttattgtgatagtgagtaagttatcatgagatcttatggttttataagtgtttggcaagttcttcctttaccactcatctctctcctgccgccttgtgaagatgtatatatttgcttccccttccaccatgattgtaagcttcccgaggcctccccagccatgtgaaacggtgagtcaattaaacccttttcctttgtaaattacccagtctcgggtatttctttatagcagtgtgaaaatggattaatacaattacaaaattagggtttagcatgttggaatctcatttcagagtaaaatsgtaaaatgttaaaatcgcactcaagtcgttgtgtaatagcctggaaaagctagcattttgca

SEQ ID NO: 175052 - DNA, 491 bp, Homo sapiens
atctctatgaataaaattcttatattgtcaattttggttgtctaaatttaggtactcaattttttcatgccgtcatggaatatgagtgactctgtgtcataatctgcagccctcattacacacatgaacacttcctgtgtcttatcctaccaaattaggatataattcttcatatcctaactttgcttaggtcagtaatcattgttttyatcatgtctgtgtaaataatattcacagctgagccatgtaatactatgttgatatttccttcactacataatattttattttatctttaaatttgtcttgtttcttaattgcttgtttttttttctatgtgcttattactaattcaactgaaaattcttccaaagtagtataaatattctctcaatctattctatttcatctgttagtttcatcacttggaaaagattttttggatcctctgatctgctccaatttaggcaatttgtttataagactgctcc

SEQ ID NO: 175053 - DNA, 606 bp, Homo sapiens
aattaccagcctcaggtttaaccttataagccttaccacaagactattttaaaagagacctagaagcaattcactgcaaataaggaaagaaaagatacttacaaatgactcactcatccaacttttattgagtaattgctaagtactttcacagtatggactgtggtgtctatatagtcagtactttgtatccaaggattctccattcctrgattcaaccaaaaagtgaccaaaaagatttgggggacacaaaaatacaaaataacaatatgacaattaaacaaacatgaatgaaaacagagtataacaactattcactctattctactctattcagaaataagcaagttagaccaatcagagaaccctgaggattaatggtggaattgattgtctggttaatagcatttgcattgtaataggtattatacataatttagagatgatttacattttacagaggatgtgtgtagggtatgtgcaaatactataccatttatataagagacttgagcatccaagaattttgtctcctgctctccaagtgcttttactaggctcatgatgaggcaccacctaaggataacccactgtcctggtttgcca

SEQ ID NO: 175054 - DNA, 557 bp, Homo sapiens
ggtggggtgcgtcccagacccttcaacaaccagatctcatgtaaacttattactgaaaggagggcaccaagcctttcatgaggaatccacccccacgatccaaatacctcccactagacgccgcctccaacattagggatcacatttcaacatgagatttggagaggactaacctccaaactctatcactgttcaggctaagaggcacatggtcaagtcaagaaaaggcttccgaggagcctgactacagttaamgtcaaggatggtgtcttgtcagtacctaagaattgtgtgcacttggcagaattaatctgcgttcttctcttcatagatcctcacatataatacacacatagccctgtcttctctaataggaaactcctgcgtggactgcctattttgcttcttctccatctaaatcacagtcttcagagcccagccaaaaaaaaaaaaaaaaaaattgcatcttcatagaacttttatgaagtcgatggttccttatgacttttttactctcagggttaattatttccattggcgagccctttcgagcggaa

SEQ ID NO: 175055 - DNA, 557 bp, Homo sapiens
ggtggggtgcgtcccagacccttcaacaaccagatctcatgtaaacttattactgaaaggagggcaccaagcctttcatgaggaatccacccccacgatccaaatacctcccactagacgccgcctccaacattagggatcacatttcaacatgagatttggagaggactaacctccaaactctatcactgttcaggctaagaggcacatggtcaagtcaagaaaaggcttccgaggagcctgactacagttaacgtcaaggatggtgtcttgtcagtacctaagaattgtgtgcacttggcagaattaatctgcgttcttctcttcatagatcctcacatataatacacacatagccctgtcttctctaatargaaactcctgcgtggactgcctattttgcttcttctccatctaaatcacagtcttcagagcccagccaaaaaaaaaaaaaaaaaaattgcatcttcatagaacttttatgaagtcgatggttccttatgacttttttactctcagggttaattatttccattggcgagccctttcgagcggaa

SEQ ID NO: 175056 - DNA, 503 bp, Homo sapiens
aattaacttgatctaataagaaagaatgtgatgtttgggtaaaagactgaatggctaacaaaagcctcacaggccagacgcagtggctcacgcctgtaatcccagcactttgggaggtcaaggcgggctgattgcctgaggtcagaggtttgagaccagtctggccaagatggtgaaaccccatctctactaaaaatacaaaaaaaattagccaagcgtggtggcacgcacctgtaatcccagygactcaggaggctgaggcagggggattgcttgaaccatggagatagaagttgcagtgagccgagatgataccactgcactccagcctgggtgacagagcgagactctgtctcaaaaaaaaaaaaaaaaaaaaaaaaaaaatcacaaactgtgactagggagatgcttagtgattccttctgatgaaagctttggagtaatttagggtttaaaaacgagaagcagagtagaggacgaggcttttgataacaatgctgcag

SEQ ID NO: 175057 - DNA, 402 bp, Homo sapiens
tccaggggtggggaggggaggggagagagtttgacaattrgaaacaaacacgcaaatacttgtatcaggttacatgttaatactatgcatagaaataagacagagtaatggatatagaaagatcaagcattaagagggattctttttaaaatagggcagtcatgaaaatattctcaaatgatattttatttagcaggaccagaaagatttgagagaccatatagcaatgtgtggaaagaacatacaaaggctttgagtaaggaatatgtttagcattttcatagaaccaaacgacgaatcaggccagagcagtgtgagccaagggagaggtgtagaaattaggtcaagtgagtagcaagtcagtagccagcatcagttcatacaaagccttgttgtccatgg

SEQ ID NO: 175058 - DNA, 402 bp, Homo sapiens
tccaggggtggggaggggaggggagagagtttgacaattggaaacaaacacgcaaatacttgtatcaggttacatgttaatactatgcatagaaataagacagagtaatggatatagaaagatcaagcattaagagggattctttttaaaatagggcagtcawgaaaatattctcaaatgatattttatttagcaggaccagaaagatttgagagaccatatagcaatgtgtggaaagaacatacaaaggctttgagtaaggaatatgtttagcattttcatagaaccaaacgacgaatcaggccagagcagtgtgagccaagggagaggtgtagaaattaggtcaagtgagtagcaagtcagtagccagcatcagttcatacaaagccttgttgtccatgg

SEQ ID NO: 175059 - DNA, 485 bp, Homo sapiens
cagtatcttagatgtttcagatgtgagaatgaatctagtccttgttaatctctaacatttaattttaattgaataataaaatgatcagttcatgatgagttcatttctcacagacctgtttccagatactcaatattaaaacggcttaattgcaagtgtgaagctgattttcaaataaagagacattgttggtagaaaagtacaaactggtcttacatgaaaactataaaattctgcacagttatgcttctttttggaaawtttcagaagctccatatgtcttctttgtcttctcaaacaacttcttctgatgggtcataagacccaagtggtagcacatttttcactgcagtatagacctactgcagagcctgttttaattcaggccaaatctaaactggatgccatgaattaatcagttaatgagttatatcatcatgtctaaatgtagaatattttgcttccataatttaaaaaggcccaac

SEQ ID NO: 175060 - DNA, 588 bp, Homo sapiens
tggtataagaggatgggaggagagtaaagttaaatcatttattcctctggctcctttcctttctggctatgggtttgcagtgggtgtgtttttctctggccttctcctgaaccatttgttgaaaagactgctctttcccccattgaattattgtattcaaaatatttgaataaaactttaactctgtagaaaatcaactgtccataaatagaagaatttatttctgggctttcaattcatttccatgtattcatatatctatccagcactacactttcttgattgccagagccttgacatcaagaagtatgtgtccttcaagaagtacgcatccttcaagtttttctttttcaagattatgttggctactctgaatcccttgcatttccatatgaattttacaatctgtttgcattttctgcaaggacatcagaaggaatttttataaggattgcactgaatctktggatcaattttgggaatattgtcattttaagaatagtcttctgggactgtcttttcatttatttgggccttctttaatttctaacactaatgttttctagtactcaaggtacaagtcttgaa

SEQ ID NO: 175061 - DNA, 588 bp, Homo sapiens
tggtataagaggatgggaggagagtaaagttaaatcatttattcctctggctcctttcctttctggctatgggtttgcagtgggtgtgtttttctctggccttctcctgaaccatttgttgaaaagactgctctttcccccattgaattattgtattcaaaatatttgaataaaactttaactctgtagaaaatcaactgtccataaatagaagaatttatttctgggctttcaattcatttccatgtattcatatatctatccagcactacactttcttgattgccagagccttgacatcaagaagtatgtgtccttcaagaagtacgcatccttcaagtttttctttttcaagattatgttggctactctgaatcccttgcatttccatatgaattttacaatctgtttgcattttctgcaaggacatcagaaggaatttttataaggattgcactgaatctttggatcaattttgggaatattgtcattttaagaatagtcttctgggactgtcttttcatttatttgggscttctttaatttctaacactaatgttttctagtactcaaggtacaagtcttgaa

SEQ ID NO: 175062 - DNA, 529 bp, Homo sapiens
catatgacatcaactaatgaaccagatgtgtgaataaaaatgttagaaagacagaatgaaatgtgaggactcttggaaactggaggccagtacctcttgggaagccagtggccaatayacctggcaggatgcaggtccacttttactatacttgtcactttttaaagagatgtcagagtttctaattttaagtgaattttaccagttttcaaatattggctcaaaataattctgggaccaggtgaaacacctcccctttaggctaaatccagttcccagaccaatggcttttagcctccgcaggccattctgcactttgcaaaactgaaataatatgggcagaaaaaaaagactcaggcttaaattctggctcaggtttactaacctctgaacctcagctttctcatctcaagttcagaatcatgcctgcctcactagattactgtagccattaagtgaaataacgcctgtaactcaattagcacagtgtctcatacgaaacacatgcttccacccatgttcctagtta

SEQ ID NO: 175063 - DNA, 520 bp, Homo sapiens
ggcaaatctgggcttcaaacacaaatctttaaacttaaaacctacacttttaccacaatgcaattctttcattaaatcaagcagctactcaacatttattggtatacaaagcaaatggttttggggtaggaacataaaaatgtgtcctacttttttgttgcttcttcttcctgaatcttgaatagtttctcaaaggggttcagtttgagggaacaattcgtatctacaaatttgtcttttaaaaggcattcagagttgcttgaatcttagagctgacagagacctcaacaaaatggaaacattatattttacagatggaaaacctgaaatccagaaagatagagtgactttactaggtctcagttccatcttttaaagtgcataattaaattgtgtacaatttcttggttattgtcacgtgtattaaacttwacattttttctttttccttcttctggcattatttgtgaaattcaacagtgataaatatgctttggcttcattatacctatacacatta

SEQ ID NO: 175064 - DNA, 571 bp, Homo sapiens
acgcacaaatcttttgtaagcatctatctagaaggtatgtagaaaacctagcagaacacaataattaaaaaaatactaccatttgctgagaccctacaggttcaaacactccratgcaggcactacgctagacattttacatatgttctttctaaccttttaaaacaattcaaggtttctccatttttccagttgggaaactacagctaaggaagcttaataacttctgagggactgctattccatggaattccaaagccctggttgtctccacattatcctgctgcttcttttatcacaagagctcaagttgggagggagtgaaattcttaaaagtgaagctgtgctatcagctaagtaatattcagtaagagctatgtcaccatggaatttttatggatttgtctattttgaagagtttgtcttccaagtgaatttttaaattagtaaaatatcatattgctgattatgaaaaaagaaactttaatagttttttttctgtttgttatttcgctttattctaaaatgaaaacctactttgtaaacaaacaagtttacatttcctccaaat

SEQ ID NO: 175065 - DNA, 529 bp, Homo sapiens
cagagaccccagagatggggtttcaccatgttggtcaggctggtctcgaactcctgacctcgtgatttgcccacctcrtgatttccctgcctcagccacccaaagtgctgggattagtccatgcccacttctatgataaaatacttgtgacttggtaatttataaagagcagaaatttattctggagactgagaagtccaagatcaagaagccagcaggttttgtgtctgccaaggtccatggtctctgcttccaagatggtgcctttaacactgtttcctcacatggcagaaaaacagaagacagcaaacccactccgtcaagcccttttataagggccctaatccatccatgacagttccacatgactttaatcacctcctaaggcctcacttcttaatattattgcactgatgattacgtttcagcatgtgaatttggtggaacacattgatatcatagcactattacctatggatctgcggacctacgtgaaggattagaaattagacacctgttgattgaatgt

SEQ ID NO: 175066 - DNA, 330 bp, Homo sapiens
ctaccttttcataaggaagcttacaaattgtatggcttttttcatgtttaaatttacaatagtccaatttatttacattcctcttagttgcaaaataattcwtcctccccaaagacttctcaagaaatctcatcaaatttcaatatcaggctcaatgatcagtatctggtctaagatagatgtagctcttatgattcatctcctatcgatttagtgactcgtaaactaaaaggataagttacctgacctgaacatggatactcccattccaaaagagaaggagtagaaggtcacattactctgcaaacacaaagtttttcttgattaaag

SEQ ID NO: 175067 - DNA, 430 bp, Homo sapiens
ggagtcagtgctgaagctcccttctcttctcgcccccgcttcaccagacaacagccttgacaaggcccccagtctgtgctgccgcctcccccagccccatgctgayggcagggcagctggtccttgtgggttttgagccccaggaggctgccacttaaggcatgagcagggctgttattctcagcaacgcgagggactctcatcctgggtttcatttattaattggactctaatgaagcatcactaattgctgatggtgctacaacactgcaggtgggcctcagtttacagaataactgactctggagtaaggagggcaccaactggaggccagcagctcccagtccctgagggcccagctcttcccctgcccttgcctgcagggcatgggggctgctctgggaaaaagaaagggcaccttccgagaaac

SEQ ID NO: 175068 - DNA, 419 bp, Homo sapiens
gaattcaaggaccattaactccctgttgttcctacctcctcctctcaccctagcccttccccccagcacatggatccaaaaatgccctaagtgatgggcagtcctagttcccctgcaacatctgctggctaatcctggcctattgagggcaaggctgcctgtctgtttggataagggcactggagttagcagcttccaatcttgccaggcccagtggagtagctgagagtgctgagctttggaatcaggcttgcttcggtgctcacagcccagcctctcatccactggctgtgtggccttgggcaggtaaactggccaaacccctgcctggaaaagctgcctgctgatctctgcaccctagcagtgttgrgtgggttaagtgagagggagcctgagaagctgatggtgagcatccagct

SEQ ID NO: 175069 - DNA, 583 bp, Homo sapiens
ccatctgacctgttcatgaattctcaatactttcctgccatcccttagggagaaggatgccaaaaggtctcagacactagagagccatgtccaagcccaatgaaggtgtgagctcaaatcaaaatgaggtccatggctgccaacccctccttctccccatttcaatccacaatggcagccaaaattctacttcttgccttgcatgctacctgacatgcagtgactcctcatcaaatatacatggaataaaagaataaatgaatgggtgctgcagctgcaaggacttcatggtgaatttaaccacattagcactttatacttaggctcctaaattggtcttcaagattctagaatcaaagggagtcagttattggccaattctcagatagtttaccaagaaatagttccactacaaagagatttagcttccgtgtgtgccactgcaggtgtgaaaacatctgtgtgtcagtttgcatgtatgtgagagcgtgtacatatgygttaagagtgtgcatccttcttgccaaggtatgtgtgcacacatctgtgtgtctgtgactgtgtgtagatattcacacgtgat

SEQ ID NO: 175070 - DNA, 583 bp, Homo sapiens
ccatctgacctgttcatgaattctcaatactttcctgccatcccttagggagaaggatgccaaaaggtctcagacactagagagccatgtccaagcccaatgaaggtgtgagctcaaatcaaaatgaggtccatggctgccaacccctccttctccccatttcaatccacaatggcagccaaaattctacttcttgccttgcatgctacctgacatgcagtgactcctcatcaaatatacatggaataaaagaataaatgaatgggtgctgcagctgcaaggacttcatggtgaatttaaccacattagcactttatacttaggctcctaaattggtcttcaagattctagaatcaaagggagtcagttattggccaattctcagatagtttaccaagaaatagttccactacaaagagatttagcttccgtgtgtgccactgcaggtgtgaaaacatctgtgtgtcagtttgcatgtatgtgagagcgtgtacatatgcgttaagagtgtgcatccttcttgccaaggtatgtgygcacacatctgtgtgtctgtgactgtgtgtagatattcacacgtgat

SEQ ID NO: 175071 - DNA, 572 bp, Homo sapiens
tgttgctgcagagaagcagttgttttgctggaaggagggagtgcgcgggctgccccgggctcctccctgccgcctcctctcagtggatggttccaggcaccctgtctggggcagggagggcacaggcctgcacatcgaaggtggggtgggaccaggctgcccctcgccccagcatccaagtcctcccttgggcgcccgtggccctgcagactctcagggctaaggtcctctgttgctttttggttccaccttagaagaggctccgcttgactaagagtagcttgaaggtaagccagtggggaggagggctccagggccagcggcgggagcgggaggcctgttggacataggggctggttccctcttggtccatccctgctggtctgaggtgcrtgggacaatccctagcttggagccgtccagggggcatctgcttcttccacaacccacaactgaggccccagaaatcccagctgcgtttgggctgagcctctggcctcacccaagtcagctgagaggtcctggcgggggtttatttaggcagctgcctggctaagtttgaacagaacagg

SEQ ID NO: 175072 - DNA, 357 bp, Homo sapiens
agctcttgcacctatcacagtgcttagctgagtaaatgttatttcccttcctcttaagttcttccatttttccacagaagaacataaagccaaagaaaatcatgtttgcacatttttagcagctatattgggatataattcacatatcatacaattcacccatttraagtataaaattcagtggattttgtgtattacatcattttttaaattgtggacaaatatatgtcataaattttgccaatttaaatattttaagtgtacaattcagtggtattagttacattcaaaatattgtacaaccataaccattatctatttccaaaaccatttcatgacttcaaatagaaactctgt

SEQ ID NO: 175073 - DNA, 587 bp, Homo sapiens
tatacatagaggactccaagttggctggcccttaagaggaaataggataggattctgagtctcttttatctttttttttttaatttttgaggttaaactagataaatctaattttcaggatatgctcaygcaaaactgattgaaataacaaaagtgtgtggaaatgtgtaaagcccaactgatttttgttattttcacatcaaactggggttttcaaatcggtctatctacctactgtgtgtgtatggtagagggaaagggtctttgtttcaggttccatacttttatgcaaattaaataccaaaacaccgtctagtccataggctggcaaagtacacctgtttttgtaacgaagttttattgcagcagccatgctcattcatatacgtgttgtctatggctgcttttgcactacagcagcagaactgagtagtgtgacaaagatagtatgatccgcagagccttaaatattcaccatctgggcctttacagaaaaacattgttgacccctgatctttcaacacattttgcattctttccaggtgaacaataaagaaaacgtccttggcacactactgcagaagctt

SEQ ID NO: 175074 - DNA, 599 bp, Homo sapiens
catcgtgtatatggatcatatttgctttatgcaatctgtcattgatgggcatttaggttgattccatgtcttttctactatgaatagtgtttcagtgaacattcgcctgtaagtgtctttatggtagaaagatttatgtttctctgggtatatacccagtaatggattgctgcrttgaattgtagttccgcttatagctctttgaggaattgctatactgctttccagaatagttaaactaatttacactcccaccatcagggtataagtgttcccttttgtcagtaacctcaccatcatctgttttttttttttttttgactttttagtaatagccattctgactggtgtgagatggtatctcattgtagttttgacttgtatttctccaatgatcagtgatattgagtcttttgttcatatgcttcttggccacatgtatgtcttcttttgaaaagggttcatgtcctttgcccactttttaatgggttctttttctcttgtacatttgtttaagttccttatagatgctggatattaaacctttctcagatgaatagtttgcaaattttttcttgcattttgtaggctgtctgttc

SEQ ID NO: 175075 - DNA, 504 bp, Homo sapiens
ttaaagtgttcttcctgacattagaaactgtaatatctccttactgatatcaaaatccataaaatccactaaagtttggaaatcccaatctatctatgtggagagagtatgcctgtgagtgaagccaagccaacaasagcaatgtcaagggtaggaaaaaaagaagcagtcctgaaaataatgtttgaacatccccagatccagctgtgcttggaaacagtttgaattgcataatacacagtagcacagacatgtaagcttttgatttgttttcagcttaggtttaaacttgcacttccaatattgaaactcaattagtcctaatatacatccattctttgcaagaatactctgaagccacattaaataagtagattaggatgtaaaaccaactgttctgtttgctaatatatatgaatatcagttttaggagaattttatagatattgttagttttctaggaaagattcctttttaaatatggatttaaccttttttttttcc

SEQ ID NO: 175076 - DNA, 590 bp, Homo sapiens
agtggtgagtttcggactgcctataatacattccttttagagtttcataattcaagatacgaggagcttggcaaaggttaaaaatataatgtaaaatatgactaaatattttaaaaatggaaatgccattctaaaaactatagatttcagaatagagcaacaatgactaaggactgtctgcattttgatttccatcgcttagagtacctctttcacagagaatggcaatcacatattctcctctccactgaagcaccaataacaatgaatgtggtagaatttcagttaaatatccaggtgaggtagggggagctaccatttaacttgatatataaatataatattgatatatatctatatatatcaataaaaattgatatatatatatctcaagtgacatctgggtttgaagtctaatacaacattcttcattgggaatctgaaaactgaagaacttggagagggagaaaataggagaaggagaaartggtttttttttttatcattagtgcagtctaaaaaaatcttgatcatttttaacgttttcctcaggttgatttcatgcaattccttttactttttaaagcttt

SEQ ID NO: 175077 - DNA, 512 bp, Homo sapiens
tttggagttttcttagtcaatttgtgccactataacagaatacctgagacagggtaatttataaaggacagaaatttattttcttatcattctggaggctatgaagttcaagatcgaagtgctgggtctagtgagggccttcttcctgcatcctcaccaggcatacaacagaagggcaggttcccaaacactccatgcttattttataaggtttttaatcccatttatgaggaagaggccctcatgtcataattacctcctaaaggctccacttcttaatactaccacatcaaccacacctgaattttgaagggaacatattctaaccatagcgggaatacattgcaaaatgaggttcttattttatttttctccaaaaggttaatcaattgctagacaagcatttgtgaaataatcctttatttcccaccccaccgttttttaatgtytccagcatattagttatattttactgatctctttacacataatcactagtatactacaatttc

SEQ ID NO: 175078 - DNA, 564 bp, Homo sapiens
tgcttggttctcattctctctgttgcctgctgtgctgtgagacatgactatcaccttctgccatgatggtgaggcatccccagccacatggaactgtgagtccaagaaacctctttttctttataaatacccagcctcaggtatgtctttattagcagtgtgagaatgcactattatataatttaaagaactgcctgttcatgccaacccctacatctccaagctccagtactaccaccacagccccaagcttcagtgaacccagggaccagctctgccccagtagaccacagcacctagccagttcccaaaaactcaggctccatacccaccaccatggacmccaggtgtattaattcatttccacacttctaaaaagaactgtctgagactgggtaatttatttaaaaaaataaaaggaggtttaattgactcacagttacacatggctggggttggcctcaggaaacttaccatcatgatgctagacaaagggaaagcaaggcacgtcttacatggcagcaggtgagagagagagcagggtaaactgccacttataaaaca

SEQ ID NO: 175079 - DNA, 562 bp, Homo sapiens
tgcttggttctcattctctctgttgcctgctgtgctgtgagacatgactatcaccttctgccatgatggtgaggcatccccagccacatggaactgtgagtccaagaaacctctttttctttataaatacccagcctcaggtatgtctttattagcagtgtgagaatgcactattatataatttaaagaactgcctgttcatgccaacccctacatctccaagctccagtactaccaccacagccccaagcttcagtgaacccagggaccagctctgccccagtagaccacagcacctagccagttcccaaaaactcaggctccatacccaccaccatggaccccaggtgtattaattcatttccacacttctaaaaagaactgtctgagactgggtaatttatttaaaaaaataaaaggaggtttaattgactcacagttacacatggctggggttggcctcaggaaacttaccatcatgaygctagacaaagggaaagcaaggcacgtcttacatggcagcaggtgagagagagagcagggtaaactgccacttataaaa

SEQ ID NO: 175080 - DNA, 564 bp, Homo sapiens
tgcttggttctcattctctctgttgcctgctgtgctgtgagacatgactatcaccttctgccatgatggtgaggcatccccagccacatggaactgtgagtccaagaaacctctttttctttataaatacccagcctcaggtatgtctttattagcagtgtgagaatgcactattatataatttaaagaactgcctgttcatgccaacccctacatctccaagctccagtactaccaccacagccccaagcttcagtgaacccagggaccagctctgccccagtagaccacagcacctagccagttcccaaaaactcaggctccatacccaccaccatggaccccaggtgtattaattcatttccacacttctaaaaagaactgtctgagactgggtaatttatttaaaaaaataaaaggaggtttaattgactcacagttacacatggctggggttggcctcaggaaacttaccatcatgatgctagacaaagggaaagcaaggcacgtcttacatggcagcaggtgagagagagagcagggkaaactgccacttataaaaca

SEQ ID NO: 175081 - DNA, 514 bp, Homo sapiens
ttcttatacagtctgcagatacgtgagtcaaacaaacctcttttcttcataaattagccagcctcaggtactcctttatagcaatgcaaaatggaccaacacactactcttagtcgtttatcaaagcgaactaaaaacttatatttacacaaaaacctacctctacatgttaacagcagttttagactttcattgctaagaatccaaagcaattttaatgtccctcaactgrggaatggataaacagatgaaacaaatttatctaatagaaactaaacaaaacacacagcagatacacataccaatatggatgactctgcaacacattatgttatgtgaaataaggcaggcctaaaaggctacatattggatgattttacatacatgttgttctaaaaataacaaaactctagtatctaaaaatagcaaatatatcacaaaatagagctggtagtggggagagggtttgactataataggacagggaaatcttgcccagtattggaactattct

SEQ ID NO: 175082 - DNA, 514 bp, Homo sapiens
ttcttatacagtctgcagatacgtgagtcaaacaaacctcttttcttcataaattagccagcctcaggtactcctttatagcaatgcaaaatggaccaacacactactcttagtcgtttatcaaagcgaactaaaaacttatatttacacaaaaacctacctctacatgttaacagcagttttagactttcattgctaagaatccaaagcaattttaatgtccctcaactggggaatggataaacagatgaaacaaatttatctaatagaaactaaacaaaacacacagcagatacacataccaatatggatgactctgcaacacattatgttatgtgaaataaggcaggcctaaaaggctacatattggatgattttacatacatgttgttctaaaaataacaaaactctagtatctaaaaatagcaaatrtatcacaaaatagagctggtagtggggagagggtttgactataataggacagggaaatcttgcccagtattggaactattct

SEQ ID NO: 175083 - DNA, 514 bp, Homo sapiens
ttcttatacagtctgcagatacgtgagtcaaacaaacctcttttcttcataaattagccagcctcaggtactcctttatagcaatgcaaaatggaccaacacactactcttagtcgtttatcaaagcgaactaaaaacttatatttacacaaaaacctacctctacatgttaacagcagttttagactttcattgctaagaatccaaagcaattttaatgtccctcaactggggaatggataaacagatgaaacaaatttatctaatagaaactaaacaaaacacacagcagatacacataccaatatggatgactctgcaacacattatgttatgtgaaataaggcaggcctaaaaggctacatattggatgattttacatacatgttgttctaaaaataacaaaactctagtatctaaaaatagcaaatayatcacaaaatagagctggtagtggggagagggtttgactataataggacagggaaatcttgcccagtattggaactattct

SEQ ID NO: 175084 - DNA, 566 bp, Homo sapiens
gaccaaaatgaaaggactacaggtcccatggaagtacaaaatccagaggagcagttaaaccttaaagctccaaactgatctcctttgaccccatgtcttacatttaggttatgctgatgcaggaggtcggctcccacagctttgagcaactttgtccctgtggctttgcaggatacagcacccctcctggctgttttcatgaactggcattgagtgtctgaggcttttccaagtgcacggcacaggctgtcagtggatctagaattctggggcctggaggaccctcttctcacagctctactggacagtgycccagtcgggactttgtagggtccctgaccccacatatcccttctggactgccctagcagaggttctccatgaaggttccacctgtgcagaaaacttctgcctggacatgtttccatacatgctctgaaatctaggtggaggttcccaaaactcaattcttgacttctgtgaacctgcaggcccagcaccatatgaaagctgccaaggcttggggcttgcaccctctgaagcaacggcctgagctctatgttggc

SEQ ID NO: 175085 - DNA, 474 bp, Homo sapiens
tcttatgttttttattacttatatgttcatataattaagcaaatttttaaaccctttacttttcagaatttgaatcactgatattctctctctccctttctctctctgtctctgtcactttttttcatttttggagagagaggattttgctgtcacccaggctggagtgcagcagcgtggtcatggctcactgcagtcttgacttcccaggcgcaagccatcctttcacctcagcttccctagtagctgggactagggaagtccatatcgagctaatgttatttgttgttgttgttagtttatttttttttgtagaaatggggtctcattatgttgcccaggctgttctcaaactcctgggctcaagcaatcctccccsctcggcctcccaaagttctgggcaagcccccatgcccaaccttgactcactgcttctctaaggctcttcacatatattcttttttaaggaaataa

SEQ ID NO: 175086 - DNA, 395 bp, Homo sapiens
taagttaaaaaaagatagaagaccatgaaacattaaaaagttaatatatattataaacaaaggaacaaaactcttattgtttaatatgatataagcacaaattttataatagctaattggcaacaacttcatttgaataatttgcttgagttaacccacttacatacgtaatttcataaatttgtaataaaaaaagggaaacaattcccaataaaattttggataatcctattacaaaaagatattttttagaaactgcttgccataggaaattttaaccctcatttgcctcttggagtcaagagaaaactccactaaggacasagctaacctctctaaaactttaactggtatgaagttttataaagaccctggctacaggaccaaagttcaat

SEQ ID NO: 175087 - DNA, 545 bp, Homo sapiens
catggtaaattatacttttttccaygtaagagcacctgattgataagcttttacttgttaattatgtaaaggaaccaattaaaaatattattttgatgcacaattgtctctgaaggtgttagggttctaatggtaatgcaaggacttctcaaattgttatttataaatagttgatacacaagtaatataactacaaaaagcatctgataatgtggccatgtgttacaaaattgttacatgtgttcatataagggaccacctgaaaaggcttagtgtgagcaacgaggctgtttattcacttgggtgcaagcgggctgagtctgaaaaaggagtcagcgaagggaggtgagattatcattggttctttcaggtttgggataggcagtggaggcaggagcaatgttttgcatgcagggaatagatgttacaaagtacattctcaagggtggggagggtgtattgtcacaaggatggggaggaatgttacgaagtacattcacaagggcaggaaggatgtactgtcacaagcagggggaggaatgtta

SEQ ID NO: 175088 - DNA, 600 bp, Homo sapiens
ttaaaaatattattttgatgcacaattgtctctgaaggtgttagggttctaatggtaatgcaaggacttctcaaattgttatttataaatagttgatacacaagtaatataactacaaaaagcatctgataatgtggccatgtgttacaaaattgttacatgtgttcatataagggaccacctgaaaaggcttagtgtgagcaacgaggctgtttattcacttgggtgcaagcgggctgagtctgaaaaaggagtcagcgaagggaggtgagattatcattggttctttcaggtttgggataggcagtggaggcaggagcaatkttttgcatgcagggaatagatgttacaaagtacattctcaagggtggggagggtgtattgtcacaaggatggggaggaatgttacgaagtacattcacaagggcaggaaggatgtactgtcacaagcagggggaggaatgttaggaagtacattcaaaagggtggggaatatcacaaagtacattcacaaggatggggaatatcacaaagtacattatcacaagggcaggggattgtcacaatggcttgactgtggtggggccagctcatagggcc

SEQ ID NO: 175089 - DNA, 519 bp, Homo sapiens
agatggtatagacaaatctgtgaaatatataccttactaatataaaattgttaaatgtcttttattcctgaaaaatactctttttcttttgtaactctggggaaaagttcatatgtaacaaccagtggttttcaaaaaggaaagattttcacaaatttttctatgtacttctgttttactaggtatcttagaagatgctttctaatatccttcagaaagccaataatctagaaaggtatgacacaaaagtagcaaatataaaggtacttcagctctagttctaatatattatttgtgacttgtgagagatccaatttaagtacacaatgtgtttatttaatagagttgctgtactagaayatggaaattcctacagtatcaaacagaatctatgatttacttcaaagcccccttttggaactcattgatgactgaggaaggtaaagagtacagaaaaaaaaaaagactgaaatttaaataaactgtatgtcagcaacacttaaactcatcaaaaacaca

SEQ ID NO: 175090 - DNA, 429 bp, Homo sapiens
ccttcacacattaggagataagtgactctgggataatcgcagtgtgttaattttggtaacgtagttgggtgtgcacacatctggcagtactctgctttgctgtgtcagtttgatcagctactctcttcagttaagaatgaagtgtatgcctttgacactaaatgaagataactggctcttatgggatattsgtggctagattagcactatgccctaaatagctaagcattcaaaccaaaatccagtcaccactcatccccaaacctcagtatatgaacttattctgagtcttggagtatagtaatgtgttactcatgaacattttatcaatgctatttaaatgctcttttcagaataatctaaaattatggaaacaaatggctaattcacattaaggctcttcatagtccctactatgaatcatagact

SEQ ID NO: 175091 - DNA, 456 bp, Homo sapiens
attctatagaaatttaaagttcttatccattatactaaactcattgttttcctgtgttattttttgctgctcctttaagcagcaaaaattattaacaagcaattaaaatattaaacaaagatggcttaatcattttttaagcagaggtaaccagaaagaattttcaatgacactttaatttttggtctttgaggaaggaatcaagaccttgaagttatatctatattatttaataattatttactttaaaaaatgataggtttcctagtttcctyacagatactgacttaccacaagttctacagttatacatatagtaactttttaagggactatttcttgctcatgtaatattacttttcaggagatgtaatgtattttgaatggctgttattattgtttaaaatttattcacttcattgtcttgcaactaggctgaaaagttttagaaatgaa

SEQ ID NO: 175092 - DNA, 590 bp, Homo sapiens
aaacatgtcatttgatatttttgagccgtagttctgctctagttaattatcacaacataacaaaccaccccaacacttagtgatttaaaaccgacaatttaaattctctcatactccagtgggcccaactggctttcttacctggtggtctcagggaagtattccaaaaaagtgaaatggaagctgcgagatctcttaggacttctagcctctagaagtcatagtgccacttcaccacattctattagtctcagaaagtcacaaggccagcccagattaaatggtgggaaatagattctacctcttgatgggaggaactgtaaacatttcatgaccatatgccatcagtcactattcttttctatctttaatttttaacacattgtgttatgttgtattrttaccaaagcactgaagaatgttagcaagtgaaactttagattatttgtctctaaaatgtgcctcctaattttgttctgctttaccattgtgaagaagatatttgaaaggaggtaatgagcatggagatgctttgaaaacctataaatagagccctttataatctaagatgttactatgatttatggaag

SEQ ID NO: 175093 - DNA, 583 bp, Homo sapiens
tttgttaaaaatcttgtgaattctgcagtgaattttttccagagtagttatcattgtcctaccaattagaaattttaatgttgattaaaaagcaaaacggtccaaatgtctgcagttttactttctaaaacagagaaatgaaatggatcagcactacagaaaattatcaaaattagcttttaatagcagtagctaacgttatgcagtgcttattatgtgccatccctttgagatagatatccccacttttagatgagaaaattgaggcatggataggggattaaatttgtctaaatttgcagagcatgaggatttgtttctaggaatytgtttaaagattatacaatgctttgcgatggttatagtcttgttttatagattaagtgcttttaatcgcttggctccaccctctttcagtttgcgctctctcagacatacgtgacagccaccactgaatttcacaaaggtctttttttcagacattgtaagaatgtgcaggagtccaatgttttttgggctttggggacattctgtatgaaacttaaggatttatagtcatatgtattttaataacagacaaaac

SEQ ID NO: 175094 - DNA, 423 bp, Homo sapiens
ggtgaccttgggtttgatgatgagtttttagatacagtaccaaaaggatrattcaggaaaacaaaaattgataagttgggcttctttaaaatttaaaacttctgttttatgaaagacacagttaaaagaatagaaagacaagccacaggctacaagaaaaaaaatctttgcaaaacacatatctgataaattgtagccattatatacaaagaaatcttcaaactcaacaacaagaaaacaagcaatccagtttacacatgtgtaagtgatctgaacagataccttatcaaagaagatatacagatggcaaaagatgcatatgaagagatgctggacattacatctcattaggaaatcacaaattaaaacaagatgttgttttacagtacaaacctattagaattactaaatccaaaacactgg

SEQ ID NO: 175095 - DNA, 553 bp, Homo sapiens
ctacataggaacactagtactctttttttagaaataaactataggccaggtgcagtggctcacgtctgaaattccagcactttaggaggccgaggcaggcagatcacctgaggtcaggagtttgagaccagcctggccaacatagtgaaaccccatctctactacaaaaatacatatatatatatatawaaattagccgggcgtggtggtgggtgcctataatcccagctactcagtaggctgaagcaagagatcacttgaacccgggaggcaaaggttacagtgagccgagatcgtgccactgcactccagcctgggtgacagagcgagactccatctcaacaaaaagaaaaaaaaaataaagaaataagaaactataattttactcttctctgtgaggaaaaagattttatgtgaagcaatatataagctttaattattgtataaattatccatgaaagggcaattactgactactcagtattttttaatgtaaaacatgcagtaatatatttcagtatcccctgtaattacagtaagattaattaacctt

SEQ ID NO: 175096 - DNA, 553 bp, Homo sapiens
ctacataggaacactagtactctttttttagaaataaactataggccaggtgcagtggctcacgtctgaaattccagcactttaggaggccgaggcaggcagatcacctgaggtcaggagtttgagaccagcctggccaacatagtgaaaccccatctctactacaaaaatacatatatatatatatataaattagccgggcgtggtggtgggtgcctataatcccagctactcagtaggctgaagcaagagatcacttgaacccgggaggcaaagkttacagtgagccgagatcgtgccactgcactccagcctgggtgacagagcgagactccatctcaacaaaaagaaaaaaaaaataaagaaataagaaactataattttactcttctctgtgaggaaaaagattttatgtgaagcaatatataagctttaattattgtataaattatccatgaaagggcaattactgactactcagtattttttaatgtaaaacatgcagtaatatatttcagtatcccctgtaattacagtaagattaattaacctt

SEQ ID NO: 175097 - DNA, 259 bp, Homo sapiens
attaacctaggttggaattataattagacatsaaagtttaaacttttttatctgaaccgagatgcaaaagtaaattggttctgtgttctggagaattgtaaaagaattccttaattccttagcaaaatttggaagtcagtatcaagtggtgaggataggaaagttgaagagactgtggaccaggcaagaccttatcagttgatttaggaagcagcagtgacagaggccagacaggtaacaagagaaaagagaaggtgga

SEQ ID NO: 175098 - DNA, 259 bp, Homo sapiens
attaacctaggttggaattataattagacatgaaagtttaaacttttttatctgaaccgagatgcaaaagtaaattggttctgtgttctggagaattgtaaaagaattccttaattccttagcaaaatttggaagtcagtatcaagtggtgaggataggaaagttgaagagactgyggaccaggcaagaccttatcagttgatttaggaagcagcagtgacagaggccagacaggtaacaagagaaaagagaaggtgga

SEQ ID NO: 175099 - DNA, 542 bp, Homo sapiens
ggccaaggtggaatgatacggtttagatttgtatccccgcccaaatctcatgtcgaattgtaggaggggcctggtaagaggtgattagatcatgarggcagatctctccattgcttttcttgtgatagtgagtgaattctcacaaaatctgatggtttaaaagtgtgtggcagttccccctttactcttgctctctctctctctcctgctgcactattgtgaagatgtgcatgcttccccctcaccttctgccatgactgtcagtttcctgaggcctcccagtcatgcttcttgataagcctgcagaactgtgagtcaattaaacctcttttctttataaattacccagtctcaggtagttctttacagcagtgtgatgaatggactaatacagaccaggacatgaaaatagctatcataaatatactcttacatgttccagaaagtagaagaaagcatgagaataatgagcagaaaaatagaagatattaaaaagaccctaatcaaacttctaaagataaaaaaaaatacaatatctaaac

SEQ ID NO: 175100 - DNA, 383 bp, Homo sapiens
ccaacctttactgagtgcttaataaccaaccattaactcttgcactgtttaaatgataagatgtgtcactgataaaactgatcagtcctgtcaagtcagcccatactttctctgaaataagatttgagggarttttctagtagacagacttgaaaggtctatcaacccatacagggttaagatgtccccaaatacaatttgtgcccctactttccttcagtatttaatcacctgaagatcccctccaatctaattaagattctcttttagtttatttttatttgcctgtttacttattttttcattagtttgtgtgtgtgtgtgtgtgtgtgtgtgtggggagacagggtctccctctgtcacccaggttggagtgcagtagt

SEQ ID NO: 175101 - DNA, 464 bp, Homo sapiens
caaaccaggaataataacctttagaaactaacaacatgacagagatagcccgaggaggtaattgagaaaggaaggatatcataggtccccacagtttcatgaaccaaagtgttatgagaatttgctggcagtcatctaggaaaactcttcaacagagatttgattcaactctttaattcactgtaaacaaccagctacaatgttccttttattttccygggctatagactgaacacccaagagctttgagtgcatggcaatgacccttctcctcttccccttttgcacctggaaaagaaatgggtcaaaacagcacactacttaggatttttctgagatagggtttcaggtaccttttatccatttaggattttaggtgatatgtatgcatctaactttcggggatgatggaagcctagaatggtctttggccatgtggctcctcctcccactccatgaaagaa

SEQ ID NO: 175102 - DNA, 524 bp, Homo sapiens
cttgattaatagtgtttgataatgtctgtggtataaatattccttccgtggctaactttcaagctaccaatggtttaacaaccagctttctaatttcctgaaatttgtacttttgcaatcaggtacaagccagctctggtacatcactgttggtgtcccttctagggctgacttctggtctgtaccactctacactgggacgctggaagactaagtctttgactcttgttggaaagaaagcgtataggatggcatttctcaaactccatagcagggaacttgttaaaatgcaaatgcccgcagactgctattakgcactctgaattatcataggggtggaagggttcccaaaaatttgcaccattaacacactccccagatgattctgatgcaggcggtgtgagggccacactttgagagtcactggcttggaaagtggaagggatggagataaaacaggtgagagtggtgggaaatggagtcaggcaagaggagagaggattatggaggaaatgatgacccac

SEQ ID NO: 175103 - DNA, 524 bp, Homo sapiens
cttgattaatagtgtttgataatgtctgtggtataaatattccttccgtggctaactttcaagctaccaatggtttaacaaccagctttctaatttcctgaaatttgtacttttgcaatcaggtacaagccagctctggtacatcactgttggtgtcccttctagggctgacttctggtctgtaccactctacactgggacgctggaagactaagtctttgactcttgttggaaagaaagcgtataggatggcatttctcaaactccatagcagggaacttgttaaaatgcaaatgcccgcagactgctattatgcactctgaattakcataggggtggaagggttcccaaaaatttgcaccattaacacactccccagatgattctgatgcaggcggtgtgagggccacactttgagagtcactggcttggaaagtggaagggatggagataaaacaggtgagagtggtgggaaatggagtcaggcaagaggagagaggattatggaggaaatgatgacccac

SEQ ID NO: 175104 - DNA, 524 bp, Homo sapiens
cttgattaatagtgtttgataatgtctgtggtataaatattccttccgtggctaactttcaagctaccaatggtttaacaaccagctttctaatttcctgaaatttgtacttttgcaatcaggtacaagccagctctggtacatcactgttggtgtcccttctagggctgacttctggtctgtaccactctacactgggacgctggaagactaagtctttgactcttgttggaaagaaagcgtataggatggcatttctcaaactccatagcagggaacttgttaaaatgcaaatgcccgcagactgctattatgcactctgaattatcataggggtggaagggttcccaaaaatttgcaccattaacacactccccagatgattctgatgcaggcggtgtgagggccasactttgagagtcactggcttggaaagtggaagggatggagataaaacaggtgagagtggtgggaaatggagtcaggcaagaggagagaggattatggaggaaatgatgacccac

SEQ ID NO: 175105 - DNA, 407 bp, Homo sapiens
cttgcctggtattagactaagccctgagctctgagcaggaagaatcccacgccaaggacgtgatcagtttttgccgatcctgggggcaaggctggatttctaagccttcctagaatttcagcccttgttctagatggtgggaacccaagaacattccaagtgaatgactgaaagtcctgaaggaatctgtgctcatatcaccaaaccacctatctccttctgcaggagagggcagcattggccccagcctccctgtgaggcccttcacatcctcatttccatttctctattgcttctgggggacaaggaccttgtttatcttttcaggccagggcctgcctctcagtatgtggaagaatgaggcasgtaggtgattgtaacgtacagggattgggaagcaccattag

SEQ ID NO: 175106 - DNA, 413 bp, Homo sapiens
cctcctacccccaagcctgaaagtcttttattcaaaccastcatctggaaagcaagcctcccactgttgcttaattcactcaagaaaagattagaagaacctgtttaccaagcttctaaaagttgctcataaaattcagcaggagcctgaaatcctcagagacttctatttttaccaaaaacacacacacagaagtggagaattttcaaatgaattagacatgagattgatctttttatacaaaaggagggtgaaaaggaacagtgatgctgtttgaactccccgacaccccacacacacacacaccgccccgcatttccctaagctgccttgacttgatggcattggtgagacctgagctctgccctgacccaggcacagaccatggttggggccagggttttctcaagacc

SEQ ID NO: 175107 - DNA, 413 bp, Homo sapiens
cctcctacccccaagcctgaaagtcttttattcaaaccactcatctggaaagcaagcctcccactgktgcttaattcactcaagaaaagattagaagaacctgtttaccaagcttctaaaagttgctcataaaattcagcaggagcctgaaatcctcagagacttctatttttaccaaaaacacacacacagaagtggagaattttcaaatgaattagacatgagattgatctttttatacaaaaggagggtgaaaaggaacagtgatgctgtttgaactccccgacaccccacacacacacacaccgccccgcatttccctaagctgccttgacttgatggcattggtgagacctgagctctgccctgacccaggcacagaccatggttggggccagggttttctcaagacc

SEQ ID NO: 175108 - DNA, 413 bp, Homo sapiens
cctcctacccccaagcctgaaagtcttttattcaaaccactcatctggaaagcaagcctcccactgttgcttaattcactcaagaaaagattagaagaacctgkttaccaagcttctaaaagttgctcataaaattcagcaggagcctgaaatcctcagagacttctatttttaccaaaaacacacacacagaagtggagaattttcaaatgaattagacatgagattgatctttttatacaaaaggagggtgaaaaggaacagtgatgctgtttgaactccccgacaccccacacacacacacaccgccccgcatttccctaagctgccttgacttgatggcattggtgagacctgagctctgccctgacccaggcacagaccatggttggggccagggttttctcaagacc

SEQ ID NO: 175109 - DNA, 413 bp, Homo sapiens
cctcctacccccaagcctgaaagtcttttattcaaaccactcatctggaaagcaagcctcccactgttgcttaattcactcaagaaaagattagaagaacctgtttaccaagcttctaaaagttgctcataaaattcagcaggagcctgaaatcctcagagacttctatttttaccaaaaacacacacasagaagtggagaattttcaaatgaattagacatgagattgatctttttatacaaaaggagggtgaaaaggaacagtgatgctgtttgaactccccgacaccccacacacacacacaccgccccgcatttccctaagctgccttgacttgatggcattggtgagacctgagctctgccctgacccaggcacagaccatggttggggccagggttttctcaagacc

SEQ ID NO: 175110 - DNA, 473 bp, Homo sapiens
tgaagctccatatatcaaatgttcaaatatggaaaatccagtggaaggggtttattttctctaagattgcattgagctaatagtatgatgagactttaaaaatggcactgggaatttacatatcatcattaacrggtgtggtgagcccagaaccaggtacagatggttctattgtgcttggtgctggacaggctacagctagactgttgagatcctttcaaggaaccatattttcagagaggtgaacaatcacaaatggagcacattcaggggatgatgtgctggtgcaatatcaggaaaccaagtcatatgaggactgggtaagggcacaagggattctttgcctggagccaagcagacgttagggacatgtgagctgtcctcatatatcccaatggctgccatgtgggggagggatcaggctgatgccagggactccagatggcagatccaggactaggtggaatgacaag

SEQ ID NO: 175111 - DNA, 474 bp, Homo sapiens
tttataaattgatttttatatacaaattttttcactttacaaatttatcataagtaattttccatgtgcttatgtagtctttggtgataagatgttaatgaccacatatatcagattgtgtgatactytctttaattaattccttcctgtgagacatgtgttagatagcttctgattttttgctaatacaaacctgctttaaggaacattactatttacctttggataaattcccttaaaaaaaacaaattactgtgccacatgtataagcccatttaaagctcttgatacatattgccgatgccctgcagaaagtctgtatcaatttgcactcctgccagctgggtatgacagtgcccttttcactgaagctttgccaagccatagtcactctgttataactcagctcaggcgaacacttcatgtcattattactgtaatgcttagaaagaagagggcaagagccacagtgct

SEQ ID NO: 175112 - DNA, 474 bp, Homo sapiens
tttataaattgatttttatatacaaattttttcactttacaaatttatcataagtaattttccatgtgcttatgtagtctttggtgataagatgttaatgaccacatatatcagattgtgtgatactctctttaattaattccttcctgtgagacatgtkttagatagcttctgattttttgctaatacaaacctgctttaaggaacattactatttacctttggataaattcccttaaaaaaaacaaattactgtgccacatgtataagcccatttaaagctcttgatacatattgccgatgccctgcagaaagtctgtatcaatttgcactcctgccagctgggtatgacagtgcccttttcactgaagctttgccaagccatagtcactctgttataactcagctcaggcgaacacttcatgtcattattactgtaatgcttagaaagaagagggcaagagccacagtgct

SEQ ID NO: 175113 - DNA, 513 bp, Homo sapiens
cacctttatttttgatttataaggacccgggtgattacattcgaaccacccagataatacaggataatctccgatctgaagatcagctgatcagtaatgtagtatagcatgtttacacattctggggattaggatggggacatctttggtgggggtaggggctattctgcctaccacagatattgaataagtagcacaatgtggttctgccttgaagaagataggcacaggtgctgtggctcttccccaatattgggaaagggagaggaagagggatgaggaaggactttctggagggcacgcagtgatggacatacyggctctagagtactggttgtcaaatttccaggaatgctacctaaaataaccatttgtggtttgaaatcagccatgggaggaagatttatggcatggaaattgacaaatgtgacaaatcagggttttttttttttcctttcccagagagccagttgttaaaaatttatcagcacactactgatgaggtggccccag

SEQ ID NO: 175114 - DNA, 553 bp, Homo sapiens
aaattaatccaattgaaaaataggcaaagattctaaacagacatttttcaaaagaagacataaatgatcaagtatatgaaaaaaatgcttaacatcattaatcataagagaaatacaaatcaaaaccacagtgagatatcatctcatctcagttagcatatctatcatcaaaaacacaaaaaataacaaatgctggtaaggatgccatggaaagggaactctcatacactgttgatgggaatgtaagttagtatagccattttgaaaaacagtatgcaggtttctcaaaaaaactaaaaatagaactattgtacaattcagcaatcccaatactgagtatttatctaagggatgaaaaataggaataccaaagagataccaggacttccatgtttattgtagctttattgaataaagttcaatttttagttctatttttagttcttagttttagtttaaccaagacatggcytcaacctaaatgtccattgcaggcgaatggacaaagaaaatgaatatatgcacaatggaatactattcagctatgaaaaat

SEQ ID NO: 175115 - DNA, 553 bp, Homo sapiens
aaattaatccaattgaaaaataggcaaagattctaaacagacatttttcaaaagaagacataaatgatcaagtatatgaaaaaaatgcttaacatcattaatcataagagaaatacaaatcaaaaccacagtgagatatcatctcatctcagttagcatatctatcatcaaaaacacaaaaaataacaaatgctggtaaggatgccatggaaagggaactctcatacactgttgatgggaatgtaagttagtatagccattttgaaaaacagtatgcaggtttctcaaaaaaactaaaaatagaactattgtacaattcagcaatcccaatactgagtatttatctaagggatgaaaaataggaataccaaagagataccaggacttccatgtttattgtagctttattgaataaagttcaatttttagttctatttttagttcttagttttagtttaaccaagacatggcctcaacytaaatgtccattgcaggcgaatggacaaagaaaatgaatatatgcacaatggaatactattcagctatgaaaaat

SEQ ID NO: 175116 - DNA, 597 bp, Homo sapiens
ttcaatagcagctgatgcagtgtcagctaaatgtacattggaattttttcatataatgcagtaatagcagttctataattttttyccctaaaactacatacattaagtaaaacaaatgtcatctgatagtagtggcagggctgctaataaacaggcagagatttgtgatgaaacaaaagtaacagtctatataacaagaagataataaatagtagtgatggtttttaaagggagcctttgagaaaaatcatatggagaagcttaagctgacattcagaaagagttgtttccatagaagcacatattaacatgagctactttgagaaatttatttaaagtgaagtgattttttttacttttagctgagtgtctggtttttcagtgtattttgaaactatacgacgctccccccaccccaaacactgttatgtgtgtaaatgggagagagagtaacgaaattagaaaagagagcaagtaaaaacaggaatgtgtcctaatatttttaaggtgatcactataataatccttttgaaagtagtatgatgcattattgctgtctgaaatgaaattgaagtttgacacacccatattatctcc

SEQ ID NO: 175117 - DNA, 597 bp, Homo sapiens
ttcaatagcagctgatgcagtgtcagctaaatgtacattggaattttttcatataatgcagtaatagcagttctataatttttttccctaaaactacatacattaagtaaaacaaatgtcatctgatagtagtggcagggctgctaataaacaggcagagatttgtgatgaaacaaaagtaacagtctatataacaagaagataataaatagtagtgatggtttttaaagggagcctttgagaaaaatcatatggagaagcttaagctgacattcagaaagagttgtttccatagaagcacatattaacatgagctactttgagaaatttatttaaagtgaagtgattttttttacttttagctgagtgtctggtttttcagtgtattttgaaactatacgacgctccccccaccccaaacactgttatgtgtgtaaatgggagagagagtaacgaaattagaaaagagagcaagtaaaaacaggaatgtgtcctaatatttttaaggtgatcactataataatccttttgaaagtagtatgatgcattattgctgtctgaartgaaattgaagtttgacacacccatattatctcc

SEQ ID NO: 175118 - DNA, 608 bp, Homo sapiens
ttaatgaaaaaaataagtttgtgcttttctccactgtacatttgctgtattcgtaaagacaaawataattagaaagcaggaagaatagttagcaaactttttaccctttgctaacatttaaactctttataaaggaacagaaacaattaaccttcctcactgtatcagaaattttaacacaacgaagtctttactgatactagtataaaagcaaaaattaattaaactgaaatttccaagcaaggtcaaagttctacatttgcgaggggacacattatagtataagcaaaaaagaaattaattaggtaccctactcttaaatatatatgttttgactgacacatattgcatttaataaaatattcctaaaatggactaatgaacagactagttaaactctatagtttctaacaagcatatatgtgttaatcatgatgtaattaaggagaagggaatggaaaaaatatccaaagatcatagttctacttgaaaatgttttctagtgtgtatttgtaaaatgaaagtgtactgttgcttaagtaacaactttattttgaaaaataatatgaataaagaaaaaacctttcagctacaaagaatactcattc

SEQ ID NO: 175119 - DNA, 608 bp, Homo sapiens
ttaatgaaaaaaataagtttgtgcttttctccactgtacatttgctgtattcgtaaagacaaaaataattagaaagcaggaagaatagttagcaaactttttaccctttgctaacatttaaactctttataaaggaacagaaacaattaaccttcctcactgtatcagaaattttaacacaacgaagtctttactgatactagtataaaagcaaaaattaattaaactgaaatttccaagcaaggtcaaagttctacatttgcraggggacacattatagtataagcaaaaaagaaattaattaggtaccctactcttaaatatatatgttttgactgacacatattgcatttaataaaatattcctaaaatggactaatgaacagactagttaaactctatagtttctaacaagcatatatgtgttaatcatgatgtaattaaggagaagggaatggaaaaaatatccaaagatcatagttctacttgaaaatgttttctagtgtgtatttgtaaaatgaaagtgtactgttgcttaagtaacaactttattttgaaaaataatatgaataaagaaaaaacctttcagctacaaagaatactcattc

SEQ ID NO: 175120 - DNA, 393 bp, Homo sapiens
tatatgtatatgacttgctttaattctgtattctcagtggctggtacacagtgggcactgaaaaaatagttttgaataaaaaattaaggaaaaaaagaatgattattagmtatagctagtgcttttaaggcagctatagtcattcacgtatttataactgagagcagagtgtggcttgccctctagtggtctgttttagcgaactttaatcctggcctttgaaagataaatatttacttgataatagtaaagtatttatagtaaaatatttacaaatggatggtaaaataattttcatttttaataaacatatgtctaataaagctttcttttgtccattttaaaattttatggtgaaacatcaaagagaatttggaaaactagaaataaaag

SEQ ID NO: 175121 - DNA, 393 bp, Homo sapiens
tatatgtatatgacttgctttaattctgtattctcagtggctggtacacagtgggcactgaaaaaatagttttgaataaaaaattaaggaaaaaaagaatgattattagctatagctagtgyttttaaggcagctatagtcattcacgtatttataactgagagcagagtgtggcttgccctctagtggtctgttttagcgaactttaatcctggcctttgaaagataaatatttacttgataatagtaaagtatttatagtaaaatatttacaaatggatggtaaaataattttcatttttaataaacatatgtctaataaagctttcttttgtccattttaaaattttatggtgaaacatcaaagagaatttggaaaactagaaataaaag

SEQ ID NO: 175122 - DNA, 539 bp, Homo sapiens
attataatttatgctagctttttcaagagtgctattgagaagtttagtttacaaagatgtgattcatataacamatatatatgttctttacatgtatctgccacagacttgggtcaagaggaaatgatagttgccccaaatggacaactaggaatttgaagacagaaagttaaagaaatgctaaaagtgctgtttgcttttttgctgtatttagaactgagcggtgggtaagcttgttcagaggggagtgctgtttgcagtaagtaagaggcagaagccctaagtgttcaaagacaaagaaaaatgaaatacatttgccacaaactggaggaccaggaagtgccatcttatattaccatccactgaatgttcattatttcatagaaaatgtcggtgggacttcaagaataggagtcatgttttactgctaacatatgtggagttaagataaaatcatgcattacaaaactgtaggaaataagtgtttaggattcttagtgatattacatagtggtgattgattaatgacataaatttga

SEQ ID NO: 175123 - DNA, 539 bp, Homo sapiens
attataatttatgctagctttttcaagagtgctattgagaagtttagtttacaaagatgtgattcatataacacatatatatgttctttacatgtatctgccacagacttgggtcaagaggaaatgatagttgccccaaatggacaactaggaatttgaagacagaaagttaaagaaatgctaaaagtgctgtttgcttttttgctgtatttagaactgagcggtgggtaagcttgttcagaggggagtgctgtttgcagtaagtaagaggcagaagccctaagtgttcaaagacaaagaaaaatgaaatacatttgccamaaactggaggaccaggaagtgccatcttatattaccatccactgaatgttcattatttcatagaaaatgtcggtgggacttcaagaataggagtcatgttttactgctaacatatgtggagttaagataaaatcatgcattacaaaactgtaggaaataagtgtttaggattcttagtgatattacatagtggtgattgattaatgacataaatttga

SEQ ID NO: 175124 - DNA, 482 bp, Homo sapiens
tggtgtgagattctttctccccatacaaggttgtggaaaagagcacagaccctggaggcattcagacctgagctaaaaatcatgagtgactgaagaattacttaatctctgctarccttggttttcttatctgtaaactgggagtaagaatagtatacacctaatagagttaagaagtttaaacaagcaaaaaaaaatggacaaattcttactgcaataatatgtattatttaatactaaacaactataaattttattatttgaagtagttgcatgcctttcttcaaagcagcattgttttttcagaaatatttgaaattctgtgtcagaacagaacgaacaatattttggaaactatcacaaaatatgaattcgtgtttttaaatttagcaaaggtaatagggacaaaggaagtcttctccgaaaaaaactaaaggacaccccagttctaaaaagttatattttatttggttatgtaattt

SEQ ID NO: 175125 - DNA, 459 bp, Homo sapiens
ataaaatgaaccattcattttttacctcggttttcatgtgctcactttaaagacagatgatatttaaatacatgaaaaagaatgagacaaaactattacttaaaaaacacaactttgcattgcattaatgaattaaaagttatgtagttgaaagatgagyattcctctccccctcatgatcctcatacctgggagatagtggcaaaaagggcatatcaattaaatacctttgaatctatctcatataagaatattttggacactttaatttaaaactcatgatggaaatgtgaaatgaaaggcttctccttcatgagaagaatttaatttacacttctgcaaattaattaaaatactttaaaatggaaaacttattttttaaaataatacagattaatacagcaaagccatcaaatggaagttatgaaatattttctagtttgtctctttaatatcttg

SEQ ID NO: 175126 - DNA, 591 bp, Homo sapiens
gtaaccactaccttgctaccacctatgttctctcaaggccctagggctctaaaatcagcaggtggcaaagccagtcatgttgtgtcctactcttcagggtgccaggctccacctggccctaggcaggtccagcaatgctgtctgtgagccagggtttggagtcaaaagcattagaattttgcctgatgttctattctactgtggctaagctggcactcagaccacaatataaaatccttcctgttttctctcctctttttcaaggcaggggagcctcttcctataggcaccacctccactggcccacatgggggttccaccaggccaccatcagtgttcacttaaagcccaagggctcttcagtcaggctcttacagtaaattctgccaggcttggaactcaccttcagggcagtgggctctcctctggcccagcgctggtccagaaatgctgttcaagagctaagtcctggaattggagaccccaagagcctgattgttgctctaccccagtgtggctgagctggtacytaaggtaaaagacaatgtcctctttacgtttctctctgcttttatgaaacagaaggagtct

SEQ ID NO: 175127 - DNA, 517 bp, Homo sapiens
ctttcaagtttacctaggttttggcccatggtggtgcggcttgctgagaaactcaagttctggctaattggatgctgattcccctctggctaggtctggtccaaatgctccctccatgagcgggcactggctgagcccagcatgtctttgctctcagctataacagggaagcactgagttcaatgtaaagtcctccagtcactgcactttcctttccccaagtgtacaggttctctgtgctacatggccgttgctgggggtggagggatggtgtctctgattcaagactgtctctctgaccctcttcaatgcctctttcaatgacatgaatttaaaactaggtactgggattgcttacctgatttttggttcttgtgatggtgctttcctgtgtgcagatagttgtcaayatttggtgtttttgcaggggctataaatgatgtggtcttctgttctgccatatcactccaccctgctttcttgatttctttttcaggtaattcattattgatgcata

SEQ ID NO: 175128 - DNA, 553 bp, Homo sapiens
ggctggccccaacaaatacagataaataataaaacatctcaagcttctagaatggaaaagatttataagcacggctggcgtggatgatgtaaaaaaaggttcaaaggctgtttgaaccataaactcaagaggaaaaatctgaatcatttagcaaaaagaagtgttacatgaggttttggtttttttttttttgtttcctcttctccttcttatgttttaagggaaagtttatttaacacaaagcacaagcatcccctttgttattggatatggttagagtcacagayatgcttttgatagatgaaagagaaatacttctggaaacaaaatattttatttgaaggaaaccttccaaaaacatgtcacatacttccgtgttaatgtgataagttgaatatgtaattgaaacttttttgattgtataaaaagcatcatttcccaaagtgcattctagaagcaggatgttaatggtgttttgggaaaaaaggtgttctgaggtcaaataaatttgggagatgctgatgtcaatttggatttgcttagaacaatgaat

SEQ ID NO: 175129 - DNA, 553 bp, Homo sapiens
ggctggccccaacaaatacagataaataataaaacatctcaagcttctagaatggaaaagatttataagcacggctggcgtggatgatgtaaaaaaaggttcaaaggctgtttgaaccataaactcaagaggaaaaatctgaatcatttagcaaaaagaagtgttacatgaggttttggtttttttttttttgtttcctcttctccttcttatgttttaagggaaagtttatttaacacaaagcacaagcatcccctttgttattggatatggttagagtcacagatatgcttttgatagatgaaagagaaatacttctggaaacaaaatattttatttgaaggaaaccttccaaaaacatgtcacatacttccgtgttaatgtgataagttgaatatgtaattgaaacttttttgattgtataaaaagcrtcatttcccaaagtgcattctagaagcaggatgttaatggtgttttgggaaaaaaggtgttctgaggtcaaataaatttgggagatgctgatgtcaatttggatttgcttagaacaatgaat

SEQ ID NO: 175130 - DNA, 553 bp, Homo sapiens
ggctggccccaacaaatacagataaataataaaacatctcaagcttctagaatggaaaagatttataagcacggctggcgtggatgatgtaaaaaaaggttcaaaggctgtttgaaccataaactcaagaggaaaaatctgaatcatttagcaaaaagaagtgttacatgaggttttggtttttttttttttgtttcctcttctccttcttatgttttaagggaaagtttatttaacacaaagcacaagcatcccctttgttattggatatggttagagtcacagatatgcttttgatagatgaaagagaaatacttctggaaacaaaatattttatttgaaggaaaccttccaaaaacatgtcacatacttccgtgttaatgtgataagttgaatatgtaattgaaacttttttgattgtataaaaagcatcatttcccraagtgcattctagaagcaggatgttaatggtgttttgggaaaaaaggtgttctgaggtcaaataaatttgggagatgctgatgtcaatttggatttgcttagaacaatgaat

SEQ ID NO: 175131 - DNA, 543 bp, Homo sapiens
tgtgtcagtggtggcaggagtgggccctggtcacttcttatgacaactttttatctcatatgagcagaagagaacttaatattcactagctatgtgtctccctgttaaatgagtattcatctaccaaagtggcctagttgttatctatgaaatagtcaccgacctctcccagagaggaagataactcccttccctgagcaattcttttttttttttttttttttgagatggtgtcttgctctgtcactaggctagggtgcagtggcatgatctcggctcactgcaacctcccgcctcccgggttcaagcaattctcctgtctcagcctcctgagtagctgagactataggtgtgtgcctaacacatccagctaatttttgtatttttagtagagacagggttttaccatgttggccaggayggtctcaatttcttgacctcgtgattcgcccccctcagcctcccagagtgctaggattacaggcatgagccaccgtgctctgggcacattatttattggcatatctgtgctcatttctttag

SEQ ID NO: 175132 - DNA, 641 bp, Homo sapiens
atgatgattttggttaagatcatcagaggaagagaggtctcatgatggtttggtacatattatcattattctcagtctcactgctgtccagaacaattaagataaatgggaaattcagaagaagtgggtggaatttttggatattagtgagggacaaaagaatccctcctccacagccctgcctcttttccaaaatgagaacatctcagacaatgaaacttggattgagctaatgtggacctggagggctaggaatatttgttaatacctctcaaggttgtttcagaatggattgttttgctagtggaatgctgaaatagatcagaggtcttctaattttcataagtactaaaaataatatgtatcagcctgaaaaagcrtgactgagaaattaagcctgatttcttttcccacttccttctacgattgcccttctcttacacttcacaaaaaaggggcacccttttcttctatcttgtgttgcaaccattgttgaattgtcttatagtgtagaaaccctactctcagtattaaataaaatgacaattacaaacgtgagtgtttgctttgaggaagtacataagtctaataacaataccaaatccatttgcacgtcatgatttcgaattttttgctttcaa

SEQ ID NO: 175133 - DNA, 551 bp, Homo sapiens
ataatagtttaggggtggaaaacttcattttacactcttaggtgctgtggctggcgtaagaattaaatgaacgcaagacagcattaacacgagaaaagcatacgaatttatttaatacttttttacagttacatgggagtcctcagaaaagaagagtgtaagaaaccatttggcacaaaagcttatctatctttttacacasagaatgatacattttggcgatgtgacacgacacggggtcttgggctatgggcagtaattgttagactgtgagtataaaatgggcaaaaatatggccgaaactaatgaatataaaggtggttttattaagtttgtgtgtacaggtctattctggtgttgactccaagtatctggtgataagaatgctctcttcctggtacagggagggcgcctttctcaagaaaaatagtatgaactgcttttaagtagaattgggaggggagaggccacgcgcactggctcatgcctgtaatcctatcactttgggaggccaaggcggggagattgcctgagctcatgagttcgagacc

SEQ ID NO: 175134 - DNA, 625 bp, Homo sapiens
tcaaaatgatagatcttagaatgtgaaaaatggactagaaaagactgaaggtggagaaaccaactaggaggctgcttcagtgattcagttaagaagcaataaagccctaaattttggaagcagtggtgtgaaaggagaagaggtagatctatcagagatttgaaaaataaaaatgaaatggcttggggactgattggaggcaggatgtgagttgagttagaggtaaagtgtttaagatgaccttcaaatttctgatttggagaactctaactgggtaacaaacatagagaatagagaagagggaatgccttgagggaagagtgctggttggagtttgaacatgtggagtttggagatgaccatttactgatgattaaaagtctctccatggtctggctcccattctaccttacagccttattcttattatatttttttcccaaattctgtgctggccatactcattktttccaaaaacaaaaacaaacaaaaaaacactgctgtttcacttctctatgtttttgctaaaaatgtagtagctttgcttactagcagggtcctctaatttaagaattaattcaggcatgcattagaaatatttgtggagcacctatgatatgccagg

SEQ ID NO: 175135 - DNA, 408 bp, Homo sapiens
cagtctcattattaaatctctgcatagcactttgctcatccattttagcagtacaatagtttatatttaattgtgtgcatatcctatagacaaatactgtccaatagaacttgctctgatgacagaaataatttaaattgcactgtccaatagagtagtcactatagttactatactgagcagcaaaaaagctaatatattggctatcgcacacgtggaatccatatgatgtgactgataaactgaatttttaatattattaattttaagtaatataaatttaattaaccacacattgctagtagttacacattttacastacagtagactacaaactcctggtggacagggacaagaattttcatctttcaatatatcatagtggttaattacatgagttttggaat

SEQ ID NO: 175136 - DNA, 551 bp, Homo sapiens
ataatagtttaggggtggaaaacttcattttacactcttaggtgctgtggctggcgtaagaattaaatgaacgcaagacagcattaacacgagaaaagcatacgaatttatttaatacttttttacagttacatgggagtcctcagaaaagaagagtgtaagaaaccatttggcacaaaagcttatctatctttttacacacagaatgatacattttggcgatgtgacacgacacggggtcttgggctatgggcagtaattgttagactgtgagtataaaatgggcaaaaatatggccgaaactaatgaatataaaggtggttttattaagtttgtktgtacaggtctattctggtgttgactccaagtatctggtgataagaatgctctcttcctggtacagggagggcgcctttctcaagaaaaatagtatgaactgcttttaagtagaattgggaggggagaggccacgcgcactggctcatgcctgtaatcctatcactttgggaggccaaggcggggagattgcctgagctcatgagttcgagacc

SEQ ID NO: 175137 - DNA, 551 bp, Homo sapiens
ataatagtttaggggtggaaaacttcattttacactcttaggtgctgtggctggcgtaagaattaaatgaacgcaagacagcattaacacgagaaaagcatacgaatttatttaatacttttttacagttacatgggagtcctcagaaaagaagagtgtaagaaaccatttggcacaaaagcttatctatctttttacacacagaatgatacattttggcgatgtgacacgacacggggtcttgggctatgggcagtaattgttagactgtgagtataaaatgggcaaaaatatggccgaaactaatgaatataaaggtggttttattaagtttgtgtgtacaggtctattctggtgttgactccaagtatctggtgataagaatgctctcttcctggtacagggagggcgcctttctcaagaaaaatagtatgaactgcttttaagtagaattgggaggggagaggccacgcgcastggctcatgcctgtaatcctatcactttgggaggccaaggcggggagattgcctgagctcatgagttcgagacc

SEQ ID NO: 175138 - DNA, 578 bp, Homo sapiens
attttcaggaaaattaagatgaactctttcactgaacttcccamagctttttgtcactcttgctatgacacttattaagcatcgtagatctcagagattagtcaggaaacctgactgactcacagcatcagccttttcttgccctaattcgtcttcaactctggccatctcccaagatagtggtgagactataaacagttggagcaactcctttctctgaggccttgatggagcacaggcctatggcacagttcctattctgtcacctttgtaggatcacacaaccacagctgatatttcttttgacatttcatttttgcctttcttttttattattatactttaagttctgggatacaagtgcagaacatgcaggtttgttacataggtacacacgtgccatggtggtttgctgcacccatcaacccatcatctacattaggtatttctcctaatgctatccctcctctagccccccgtccccgacaggccccactgtgtgatgttcccctccctgtgtccatgtgttctcattgttcaactcctacttatgagtgagaagatgcggtgtttggttt

SEQ ID NO: 175139 - DNA, 591 bp, Homo sapiens
ctatcaaaactccaatggcatttttcagaagatgctcgaaaattatcacaagcatcattatttggttaaatattcactaagtatcttctctgtgctaagttttggaaaataaggcaatgtaaaatggggtatcttctgtgacggaactgaaaatctggttgaacaaacattgcacatacataaagatattaattacaatgcaagaaactggatgctgtgagtaaaagagcgtaatgggcaataaacgcyattgggaggtcaaagaaggaataattcaggaagtcaaagatgatttgtgaatgcttacgagagaagaaaggggggtaggagctaagcacaaaaacaagtagaaaatactagtctacattttaaaatttatctggtgtgtatatatttatttgaatttaacacataaaactatgctgccacgtctatcccattcttttttctcttattgagatataattcataagacataatatgtattattttaaaatgtacaatacacagttattagtatattcacaaatttgttcaactctcactagtatctatctctgatcatttccttaccctcccccacatatccta

SEQ ID NO: 175140 - DNA, 583 bp, Homo sapiens
acggcaagcatttatcatttgtgtttcaagcaatccagctgtagtcttttaattatttttaaatgtacaattaaattaactttttactacaggtaccctgttttgctagaaaatactaagtgttatttattctttctaactatattttgtacccatgaatcatccctttttccccccaacccctgactacccttcctgcctctggtaactatccttctactctctatctccatgagttaaattgtttcaatctttaactcccacagattagggagaatttktggtgtttctctttctatgcatggcttatttcacttaaaataatgacctcctgattatcagagaaatgcaaatcaaaactacaatgagatatgttactccagttaaaatgtcttttatccaaaagacaggaaaaaataaatgctagcaaggatgtggagaaaagggatccctcatacactgttggtgggaatgtaaatttgagcaactattatgaagaacagttcatagcttcctcaaaatactaaaaatagagctatcacataatccagcaatcccactactaggtagatatgaaaaagaa

SEQ ID NO: 175141 - DNA, 581 bp, Homo sapiens
tctaaactcaaatttatccctttgtctaagttcattcctgctgctagaacagaatttctgagactgggttatttagaaaaagcagaaatttattttgaggctgggaaatgcaagatcagatcactggcaggttcagctatccattgagtgctgcttccaagatggcacctagatgctacatccattggaggggaagaattctatgtccgcacatggcagaaggtaaaagggcaagagatgaacaccttccatcgagtccttttagaacaacacgaatccagtcatgaatgcttcaacacctttcaaaatgccctgcctttcagtgctgttgcactggggattaattttccaaaacaaaaatgtggggggacacatagcaccctgctataattttagtagtcttgaaaatgtgagctgttgattataggagtgttgactgatccatgtcttcactgcacaactctgggtggaagagatgttgtttgtatcacacactatatgagtggtacttgtggatgtacaattagcaaagcagtagtcagttgttstgtgtgatcactcacctttattactaaagaaca

SEQ ID NO: 175142 - DNA, 443 bp, Homo sapiens
attcgtgaagtcatatttgatcttattatttaaactattgtcatgttctagggtatcatctttataccaactaagttgaaataaacacaatttataaagcaatagttaaaaatacatttctcatgcatatgttttgttttattcttagctgttatggggtagttctatgtttaaaagtaatttgtagtatcatatgctcaattttcttagattattcaaaagtttcttggcaacaacattcttaaaataaacaaatagattaatacgtaaacataagtgtttaggtaacatacgtagaagagcttgcccactggaatataaataagaccstcaacaactgacattatttcatccaaagaacaaagggaaaccatgaagttgtctgagtttacaagaaaaacatgtttgcttgtttttatgtctctctccctgcagaggacaga

SEQ ID NO: 175143 - DNA, 570 bp, Homo sapiens
gggaggccaaggtaggaggatcacttgactccaggagttcaaggccagactgagcaacatagtgagaccctgcccctaccaaaaatttaaaaattagccaggtgtggtatcatgcacctgtagtctcagctactcaggaggttaaggtgggaggatagcttgagcctgggaagtcaatgctgtgctgagccatgattggcaccactgcactccagcctgggtgactctgtctcacaagaaaaaaaaaagaactaagaattaagaaaaatacatttagcttttataagctatatttcatggattacmcatgaataaataatttactattggtttttcaggaaaaggcaaagccagcaccatgggaaacagtgaaaaatactgacatgttttttaaaaacataaaatatgtgttgatggtttaaaaacataaaatagatggaagaataaatctaactataagactcattgaaatatgtaaatggtcacacttagtgatcgagacattctcagatttgtaatctacagatcaaacagagtgagcaatatgttgtttacaagaggcatacttaa

SEQ ID NO: 175144 - DNA, 517 bp, Homo sapiens
ttataaaaataatgtaaaaaaaaacggcatgataggccttttttacttgtgattactgaagtaaacagaaatcccaaataaaatattagtaataaaaaaccaaatcataggggaccaggaatagaaagaaatattataacttgataaagactatatcccaaaaccaatagcaggcatagtactcagtggagacctattaaacccacttaagaacacagagagtggttactgtcacctccagtatggaaggtaatggagggaagatacagccaaagaaataagatgagccaaagaattaagaagcatatcaatagaaagggaagagacaaaattattattaacttcagaatatgatttttggctgcacgttgtggctcacgcctgtaatcctagcactttggraggctgaagcgggaggattacttgagttcaagagttcaagacctgaataggattttctacagcaaaaagctataaacaaataaaaatcaaatggtacaatctttgttgtaaatcc

SEQ ID NO: 175145 - DNA, 485 bp, Homo sapiens
tattcaatataatcgttttcaagattccttgaggatgagaaaaagtttttgaatgattaaaacaaaaaatagaccccttttaaaaatatgaaaaaggtgagttaacagctgagtcagtgctgatctctgccctcatcgtttcctgaaaagcagcgctatgacagaatgtgaatgaatttgtctattgcaaaaaaatgccaagacattgtcatcaaaaccctggaattttaattaaaaggrttaggggactttaaactatgtacgttttcctatctttcatctcttctcattctttagctagacttccttaagtggaattatatgtaaattactgatattaagaacatttttgctaaattcacaaaaattagatagaattatcaaaattcttgacacatgaccccatggtaattacggaactaatattacatgttcctcaggtaaagaagttaaagaaaggagtgaacatgaatgataacgcatct

SEQ ID NO: 175146 - DNA, 382 bp, Homo sapiens
atagagagaaaacacgttatctgatgtcattcatttctcacacttgttacctgtcccttcaaaggtatatttacatttttataatgctgttaaacacttcctttataagatgcaatatcttmtttactgtctgtgatttcgaacattctgttattattactatatcatatgaatgctttcttcttgttttttttctgactgcagttatttatttccactattccaccctaccaatgttcctcaaaaaaggcagaaaagaaagaaaatttttatctatcatttgtttattttagataaatatgcttctatcaaagacaaaatggaatataagtacttaactaaaatgtttggctacaaagataaagttcattgtgaagaattc

SEQ ID NO: 175147 - DNA, 484 bp, Homo sapiens
gaaacactagggagccatttaaaataaaaatgtagactgggtgcagtgtggctcacccacctgtaatcccagcactttgggaggtcgaggcaggtgaatcatttcaggtcagcagttcaagaccatactggccaacatggtgaaaccccatttctactgaaaatcaaaaaaaaaaaaaaattagccaggcatggttgtgcrtgcctgtgtcccagctactcaggaggctgaggcaggtgaatcgcttgaacccaggaggcagaggttgcagtgatcaatatcatgctactgcactcccacctgggcgatggagccagactctatctcaaaaaaacaaataaataaataaaaataagttaaaatgaaataaagacgtagataaatattagttggcatggaaagacatctatactgtattgttaagccaaaggaacagactacacgtaatataatctcaacttttattatctggctcgtaaggcaa

SEQ ID NO: 175148 - DNA, 600 bp, Homo sapiens
atagcttcaaatcatttaaaaaattgcctttttaaatagaaaggctctaaaagataattcaatgcttatgctacattgtacaactttggacacccagaagcaaagaaggacagtagctaactcagggtcctggaactcttctaggttaggagaggcaggttgggagaggtcactgactcaagtttcctaatctctagttcatttctactccacgacactaatcccctttataatccttattccataggttagctaagttaaacttagctttccagagatgtcatttaacttgccatattaataaatatggtacataggtcttcctgttactggatccgttcatgtgtgtatatggaaatctataagttaagtgcacaagtgtatatgttgtgtatattttctgttctttaataggtgagacaaaataaatgtcttaacttgttgaagctgcattatatttttcaaagttatcagtaagtacaactgtttggctaaaagaatcagttttgaaattcaacasactgacagtcaaggtttaaatcatgactctgcattttaatagttgtgcctgtttcatcatttgtaaaataaggattaata

SEQ ID NO: 175149 - DNA, 323 bp, Homo sapiens
ttactgtattcaggttcgattaactaaaaataatcaaaacccccgttcagcattcatttgacatgagatggaagatattctaagcaaagagaaaaatgtggacacagagaggygtgaaagtagatatgtttgggaaatattgagtatgttaatcaggcaaggcaagggatgtgcaaaaggatgttggtttaagcgaacacagatctgaggtaaaaagatctagcgtatgggctctgctcccaagggatgtggagcacttggacaagtaattcacatttctgagccttcattttctcacctacaaaatgaagggtaggtctaga

SEQ ID NO: 175150 - DNA, 588 bp, Homo sapiens
cttctgccctctaatgtcagactccaaatttttcagctttgggactggactgacttccttgctccttagcttgcagacagcctattgtgggacctcccattgtgatcatgtgagtcaatactccttgataaactcccctttacatatacctctgtcctattagttctgtccctccacagtaccctgactaatacaatggctaagctccaaatttttcaaatttttctgctctgcttcccttttattataaattctgtctctaatatctctcctctcacatcgtactgtatgcagttaaaagtagccatgcagctccttcaatgttttgcttagaaatttcttctgccacacattctaattcagtactcttaaatttgtcttccatakagtcctatgacatggacacaattctgctaagttccttacaactgtgtcacaaaaataacttttatgtcattttacaatattttgttcctcatttccattgagacctcatcagaatggcctttaccattcatgtttctaccaacattctaatcatgaccaattaagtaatatctaagaagttccaggcttctttacatctat

SEQ ID NO: 175151 - DNA, 588 bp, Homo sapiens
cttctgccctctaatgtcagactccaaatttttcagctttgggactggactgacttccttgctccttagcttgcagacagcctattgtgggacctcccattgtgatcatgtgagtcaatactccttgataaactcccctttacatatacctctgtcctattagttctgtccctccacagtaccctgactaatacaatggctaagctccaaatttttcaaatttttctgctctgcttcccttttattataaattctgtctctaatatctctcctctcacatcgtactgtatgcagttaaaagtagccatgcagctccttcaatgttttgcttagaaatttcttctgccacacattctaattcagtactcttaaatttgtcttccatatagtcctakgacatggacacaattctgctaagttccttacaactgtgtcacaaaaataacttttatgtcattttacaatattttgttcctcatttccattgagacctcatcagaatggcctttaccattcatgtttctaccaacattctaatcatgaccaattaagtaatatctaagaagttccaggcttctttacatctat

SEQ ID NO: 175152 - DNA, 362 bp, Homo sapiens
gagcgaattactgaatgctctcaattttctgagtagagcacacaagtctctgtaaagaaagaaacaagaggcagcagagccttgtaaattgccaagattcaatttgctaaatcagtggagmacacttagggaggggtgaaaattatctttagagcccattcttgaagttctgaatttccgaaacagatatctacagaggcacagcaatacagatagcccaagttaccctgcagggctgccagaaagcagtggcctgggcacctgctgggagacagatcttgtttttgaagaggaattggaatttcattataaagccagagagaaacggttagtctcgcagacagaatttttttcagagagct

SEQ ID NO: 175153 - DNA, 552 bp, Homo sapiens
ttcccttattcttccactcatcagctaactcctgacttcagttttctctcttcactggctttgcctgagactaaagtctgcttttatcaacaccttaaattatcacacaacattccrgtttagaccaagtttcttgtcttctttgtttagttcttcctttaacagcagtggggcccaggggagggtaaaaataaggctcacataccattaaacatatgtcttatctccctaccttgccaaatacactttcctaatgaaaaaatccaaagacatgggtaacaaacactatggtttcataaggctgaaaactagcaagatatcaaagacaaatgaatttagttattattgcacatgtctggttgtactgttgatgcatgattaatgtataaatcagtaataaagacaagtttaatttttgatctattatttattacataaaatgtgtttttcttgctttcattttagcaaaatgattatttcataataattattaatattttcacctattttaagatctactggtagcaattattctaaaagatgaaaagacaa

SEQ ID NO: 175154 - DNA, 598 bp, Homo sapiens
gaggtacaactggtttctgtttttctctcagaggggagtgatccatgaagatgctaagtcagtacatcataaatggagagagtcagaagcctcctattcctccatgttgctgatgtcattcccccatgatttatttttaaatgcatttctccttttaccaaaatgtttgtttgccctatactgttttgaatccaacaatatttccagactctcttattttctataataattcatccaaaactattttgtatttttttacagtcaagttacttttggagagtgacttttttttgcaattatcttatacagtattttcttggatagaagagagccacaaatccaagggaattcagacagcctctakaagctggaaaagattataagaaagtggattcttccctatagcctctggaagcagtatagctctgccaataccttgatgttagctcagtgaggcccacatcagacttttgacctccaggactgtaatacatttgtttttcttaaacctgtcagtttgtggtaatttgttatagcagcagtaaaactaatgcaggatatattaaaatattttctttcttttaattttatcattaga

SEQ ID NO: 175155 - DNA, 420 bp, Homo sapiens
agctttttcaaaacatttgtaacattgctgtgtgttcatttggtatctcaattctgcaatggaaaagactatgggcaatcatacttcttatgacattacaggcatctttttctctgattgaatgtttattggattttttcacttatgttttatatttattgatctgaattatatttgattcaaaatactgctagaatkagaaagtttaggtccttttttcattaaccaaatcagctggcatggcattttgacctctatctatcttacatagagagtttagataaagatagatcgatttagatatgtatctatatatatatagcctattttcagcaaatgaaaggtttcctcaataatgcttttgtttattgcatatattttatattccagttcttttgatgtcattcttggtaatctgtg

SEQ ID NO: 175156 - DNA, 446 bp, Homo sapiens
cagtaagttggcgtttcgcctakcctggcgttcaccttccttacggctttctctgcggcttgttgcatctctattcacaaacacttgattggctgtttccagtaactgtgaggtattcacacctgcaaactcagccttgtttctgcaattttctcctgatatctttcacgctttgactaactaaggccatgttaatcatgcgctgatcttcagggctatctggatcaaaaggagtgtacatacggtaagcctcacacagtctttcatagaattgtgccggactctcctcttttccttggatgacctcagagaccttatttacatttgtagccttttgagaccctttctttagaccttctattaatgtctcacggtaccatcttagcctctccacgtctggtccctcattcgggtcccgttgggggtctgttcctggcagctgaatt

SEQ ID NO: 175157 - DNA, 446 bp, Homo sapiens
cagtaagttggcgtttcgcctatcctggcgttcaccttccttacggctttctctgcggcttgttgcatctctattcacaaacacttgattggctgtttccagtaactgtgaggtattcacacctgcaaactcagccttgtttctgcaattttctcctgatatctttcacgctttgactaactaaggccatgttaatcatgcgctgatcttcagggctatctggatcaaaaggagtgtacatacggtaagcctcacacagtctttcatagaattgtgccggactctcctcttttccttggatgacctcagagaccttatttacatttgtagccttttgagaccctttctttagaccttctattaatgtctcacggtaccatcttagcctctycacgtctggtccctcattcgggtcccgttgggggtctgttcctggcagctgaatt

SEQ ID NO: 175158 - DNA, 402 bp, Homo sapiens
atatgaccttcgttccagaagggccctgcccatgcccagaagaaagaacttccttatctctgaaggcgcacggacacacagaagaatctgagcaaacaagtctcactatgtgttccccaggtgtgaaccattagattatacctactttgtctgatcatacttctcaaccttccacttcatcatagctagcataagaaacacacagttttacctgtkttattaagccttcacttcagaaggccctctatcatagaaaagtataaaataaatgtgtatgtaatctgtctttgttataggagccttttaattaaaaaaaaaaaccctcaggagttaaaacatcttgaaagggactgatagaaaatcttaaatatactttaatacaaaatggcataatacattgtc

SEQ ID NO: 175159 - DNA, 402 bp, Homo sapiens
atatgaccttcgttccagaagggccctgcccatgcccagaagaaagaacttccttatctctgaaggcgcacggacacacagaagaatctgagcaaacaagtctcactatgtgttccccaggtgtgaaccattagattatacctactttgtctgatcatacttctcaaccttccacttcatcatagctagcataagaaacacacagttttacctgtgttattaagccttcacttcagaaggccctmtatcatagaaaagtataaaataaatgtgtatgtaatctgtctttgttataggagccttttaattaaaaaaaaaaaccctcaggagttaaaacatcttgaaagggactgatagaaaatcttaaatatactttaatacaaaatggcataatacattgtc

SEQ ID NO: 175160 - DNA, 402 bp, Homo sapiens
atatgaccttcgttccagaagggccctgcccatgcccagaagaaagaacttccttatctctgaaggcgcacggacacacagaagaatctgagcaaacaagtctcactatgtgttccccaggtgtgaaccattagattatacctactttgtctgatcatacttctcaaccttccacttcatcatagctagcataagaaacacacagttttacctgtgttattaagccttcacttcagaaggccctckatcatagaaaagtataaaataaatgtgtatgtaatctgtctttgttataggagccttttaattaaaaaaaaaaaccctcaggagttaaaacatcttgaaagggactgatagaaaatcttaaatatactttaatacaaaatggcataatacattgtc

SEQ ID NO: 175161 - DNA, 402 bp, Homo sapiens
atatgaccttcgttccagaagggccctgcccatgcccagaagaaagaacttccttatctctgaaggcgcacggacacacagaagaatctgagcaaacaagtctcactatgtgttccccaggtgtgaaccattagattatacctactttgtctgatcatacttctcaaccttccacttcatcatagctagcataagaaacacacagttttacctgtgttattaagccttcacttcagaaggccctctatcatagaaaagtataaaataaatgtrtatgtaatctgtctttgttataggagccttttaattaaaaaaaaaaaccctcaggagttaaaacatcttgaaagggactgatagaaaatcttaaatatactttaatacaaaatggcataatacattgtc

SEQ ID NO: 175162 - DNA, 385 bp, Homo sapiens
cacaacatcatgagggattccctgagcacacacttcactctctctatctttgctcatgctgtgccctcaacctggaatgccatgccttcttctagccatttttttccatcaggattctattatccttcaaatcctggtttgccrctgtaatggggccttcctacatgctccagcctgaaggaattgattcttgcccctcctctctgacacctctttcatgttccttgtctggctcttcctgggggaccatgtttatttctattataaaaaatgtatattaatagtgaagactttattgagtgctctgtatttggcaggcattatgctaaatttttcacctgcatcctattactgaatgcttattctcaccctttaaggaaaatat

SEQ ID NO: 175163 - DNA, 375 bp, Homo sapiens
aatctcaggaaaaagaattactcctcaggtggtagtttaaatcatgtccacaaattcttcarcattctctttataaagtgaagcctaaatgtcttctccttcactgtagactggactcagtaactcacttctaacaaatagaataaggtggaagtgacatgtttgacttctgaggcctatgtttaaaagaaattatggcttctttcttgctcatattcttggatcacttgttttggtagatggcagctgccacatcatgaggatatcaagacatcctatggtgaggcctgtgtgacaggaaactgaggcctcctgccaaaagccctgcgaatgagccatcaaaaaagtggatcatccagtcccattcaagccttc

SEQ ID NO: 175164 - DNA, 687 bp, Homo sapiens
ctgattttattacattgattttgtatcctgaaactttactgaaggtttcagaagtcttttggcagtcgttagggttttctaggtatagaatcataccgtcagtgaagagatatagcttgacttcttttcctgtttagttgccttttatttctttctcttgcctaattgctctggctagcacttccagtactatgttgaatacgagtaatgagagtgagcatccttgtcttgtttcagttctcaaggggaatgtgtccactttttgcccattcaatgtgatgttggccatgggtttgtcatagatggctcttattattttgaggtatgttgcttcaatgcctaatttcttgagggtttttatcatgaagggatgttggattttatcaaaagctttttccacatctattgagattatcatatggtttttgtttttaattctgtttatgtgttgawcacatttattgatttgcatatattgaaccaactttgcattctaaaaatgaagcctacttgattgtggtgagttaattgtttgatgttgttgaatttggcttgatagtattttgttgaggatttttgcatctacattcatcagggatactgccctgtagttttcttttcttgtgtctttgccaggttttggtatcagggtgatactgacgttgtagaatgagttagggaggagtc

SEQ ID NO: 175165 - DNA, 687 bp, Homo sapiens
ctgattttattacattgattttgtatcctgaaactttactgaaggtttcagaagtcttttggcagtcgttagggttttctaggtatagaatcataccgtcagtgaagagatatagcttgacttcttttcctgtttagttgccttttatttctttctcttgcctaattgctctggctagcacttccagtactatgttgaatacgagtaatgagagtgagcatccttgtcttgtttcagttctcaaggggaatgtgtccactttttgcccattcaatgtgatgttggccatgggtttgtcatagatggctcttattattttgaggtatgttgcttcaatgcctaatttcttgagggtttttatcatgaagggatgttggattttatcaaaagctttttccacatctattgagattatcatatggtttttgtttttaattctgtttatgtgttgaacacatttattgatttgcatatattgaaccaactttgcattctaaaaatgaagcctacttgattgtggtgagttaattgtttgatgttgttgaatttggcttgatagtattttgttgaggatttttgcatctacattcatcagggatactgccctgtagttttcttttcttgtgtctttgccaggttttggtatcagggtgatactgackttgtagaatgagttagggaggagtc

SEQ ID NO: 175166 - DNA, 386 bp, Homo sapiens
cctggccaacatggcaaaaccccgtctctactgaaaatacaaaaattagcagggagtggtggcacatgcatgtaatyccagctattcaggagactgaggcaagagaatcgcttgaatctagaggcagaggttgcagtgagccaagatcatgccaccacactcaagcctgggtgaccgagcgagactctgtctcaaaaaaaaaaaaaatcaaaatgttaccagaaattagttgtaggcaagatcgtgagtaattttcaagtttcttttttgtaaatctgtactttctaaattgcctaaaatgagcacacattaattgcataagaatttatgcatagtttttttaacttccaatgcatgagctcattttcatcatgacaagaaactga

SEQ ID NO: 175167 - DNA, 386 bp, Homo sapiens
cctggccaacatggcaaaaccccgtctctactgaaaatacaaaaattagcagggagtggtggcacatgcatgtaatcccagctattcaggagactgaggcaagagaatcgcttgaatctagaggcagaggttgcagtgagccaagatcatgccaccacactcaagcctgggtgacmgagcgagactctgtctcaaaaaaaaaaaaaatcaaaatgttaccagaaattagttgtaggcaagatcgtgagtaattttcaagtttcttttttgtaaatctgtactttctaaattgcctaaaatgagcacacattaattgcataagaatttatgcatagtttttttaacttccaatgcatgagctcattttcatcatgacaagaaactga

SEQ ID NO: 175168 - DNA, 498 bp, Homo sapiens
acaaaaccagcagagatgcagccactaaataatgtaatttwaaaaaagtagggaacgaattacatgaataaaatataacaccaggtctgtatttaaaaatatgataagttatatgtagaaaaaagaaagattgtggtggctttcaatatctgtttaatttttcttcccccagaagctctttatgtaccattctaagattgttttactgcttcatttttaaaggattgacgtgtttgctctgttggtagtttccctttcctttggttgttggcttaaaggactgagacctcaaaagatgatttgagacatgtaagcagctttcctggactagacgaaggtgaactcttgagttgggagatccctcattccttgccaagtccagagtggaaacggtctgggaagctgctccactttgcagtgagctgttcacataggtctgacctccttggtgtaggcaaactcactttgcatctgaagccaggaactagcctggtgtcc

SEQ ID NO: 175169 - DNA, 474 bp, Homo sapiens
caaatggattgacgagtcttgactgattttagaaactggccttttaaatttaatttcaggaatccaagaaaacaaatgttaaagtttgcaaaataagagaatatggagttatagatgaatggaacagaatagataacccagatacaagtccacagacctacaacaatctgatcttcaacaaacctgataaaaagaagcaatgaggaaataattccctgttcaataaatggtgctgtgataactggctagtcatatgcagaagattgaaactagaccaattccttatgccatatacaaaaataactcatggtagattaaatacttaaatgtaaaacccaatcctataaaaaccctggatgacaacmtaggcaataccattcttgacataagaataggcaagtatttcatgatgaaggccccaaaagcagtcacaacaaaagcaaaaactgaaaaatggcatattgttaaactaaa

SEQ ID NO: 175170 - DNA, 474 bp, Homo sapiens
caaatggattgacgagtcttgactgattttagaaactggccttttaaatttaatttcaggaatccaagaaaacaaatgttaaagtttgcaaaataagagaatatggagttatagatgaatggaacagaatagataacccagatacaagtccacagacctacaacaatctgatcttcaacaaacctgataaaaagaagcaatgaggaaataattccctgttcaataaatggtgctgtgataactggctagtcatatgcagaagattgaaactagaccaattccttatgccatatacaaaaataactcatggtagattaaatacttaaatgtaaaacccaatcctataaaaaccctggatgacaacataggcaataccattcttgacatargaataggcaagtatttcatgatgaaggccccaaaagcagtcacaacaaaagcaaaaactgaaaaatggcatattgttaaactaaa

SEQ ID NO: 175171 - DNA, 474 bp, Homo sapiens
caaatggattgacgagtcttgactgattttagaaactggccttttaaatttaatttcaggaatccaagaaaacaaatgttaaagtttgcaaaataagagaatatggagttatagatgaatggaacagaatagataacccagatacaagtccacagacctacaacaatctgatcttcaacaaacctgataaaaagaagcaatgaggaaataattccctgttcaataaatggtgctgtgataactggctagtcatatgcagaagattgaaactagaccaattccttatgccatatacaaaaataactcatggtagattaaatacttaaatgtaaaacccaatcctataaaaaccctggatgacaacataggcaataccattcttgacataagaataggcaagtatttcatgatgaaggcmccaaaagcagtcacaacaaaagcaaaaactgaaaaatggcatattgttaaactaaa

SEQ ID NO: 175172 - DNA, 423 bp, Homo sapiens
tggatataccacaatttatatatttttcttggcaaacaktggactgcttttaatttgaggccattataaattgagttgctatactatggtcaatggattttttaaagaatgccaagaaaattcaatgagaaaaaaaatcttttcaaagaagggtgttggggaaactggatatccacatgcaaaagaatcaaatcggacccctacctcatatcatatacaaaattaactcacaatagactaaatccccaaatgtaagagttaaaactataaaactcttataaaagttttcttacaagaaaacataataattctgtaattaatgtttttcttataagaaaatataggtgtaaatttttgtgacactggattaggaagtagttgcttagatataacaacaaaagcacaagcaacaagagagaaaaa

SEQ ID NO: 175173 - DNA, 423 bp, Homo sapiens
tggatataccacaatttatatatttttcttggcaaacagtggactgcttttaatttgaggccattataaattgagttgctatactatggtcaatggattttttaaagaatgccaagaaaattcmatgagaaaaaaaatcttttcaaagaagggtgttggggaaactggatatccacatgcaaaagaatcaaatcggacccctacctcatatcatatacaaaattaactcacaatagactaaatccccaaatgtaagagttaaaactataaaactcttataaaagttttcttacaagaaaacataataattctgtaattaatgtttttcttataagaaaatataggtgtaaatttttgtgacactggattaggaagtagttgcttagatataacaacaaaagcacaagcaacaagagagaaaaa

SEQ ID NO: 175174 - DNA, 510 bp, Homo sapiens
agttagtcaaaaatgtggcatgagcacgctacattttacagttcaccaagtgattctcatgtgcagtcaatgttgaaaatcacagttttaagggctcttttcttttagttctgaccttgtctgtttcacctgaaaataaaatgcastcagaaaaaaaggtttttctgtatctctcccccatattcagagagaatctgttgagggagaaacccaaggtctatccatttttttctagggagaatagaaaataaagataaaggggataaaacatgttagatcatgtcatttccagcctcaaaagccattgatggctccctctttcactcataatatcacataagtcctacacagttttggatataacttaaaaaatgaatgggtatgtaaaaacataaaatatacacagtgatgtatggcatataataaagagctcatattttaaaaaattaagttcttataatggccaatagagaccttagatgatacgcctacctcaatttcccccattat

SEQ ID NO: 175175 - DNA, 604 bp, Homo sapiens
gggtcatcacctctcacgttatataaaaatcaactcaagatgaattaaggacttaaatttaatacttgaaactgtaaaaagtttagaagataacactggaaaaacccctctaaacattggcttgggcaaggattttatgaccaaaacccccctccccccaaaaaagaaaaacaacaacaacaacaaaaaaaagataaatggctggaatttaattaaactttagtttagtttaaactgccatgccagttgtgcatggcaaaagaaacagcgagcagagtggcagaaaatcttcacaatctatacatctaacaaaggactgatatccagaatccacaaggaattcaaacaaatcatccagaaacaaacaaacaatcccatcaaaaagcgtgttaaggacatgagcagacaattcttaaaagaagatatataattgtccaaaaagcataaaaaagctaaacatgactaatgatcaggaaaatgcaaatcaaaaccacaatgtgataacaacttrttcatgcaagtccacaatcaaaaaatcaaaaattagatgttggcgtgcatgcagtgaatagggaacacttctacaggtcagaaaacacacaca

SEQ ID NO: 175176 - DNA, 551 bp, Homo sapiens
taagtatcacacaggacatgtttttgagtcaagcctgggaatggcaaacaatattagtatccatatttcattggctagaaatgatgcacatgcccccacttyattgcagtggggttaaagaattttggctaatggtgttcccaggagaaataaagaataggttaagtgaacaaccagccagcttctgctacaactagcatacaattaatatgctttcacaactagaattgtttctttgagaaagagctgtgactggtgtcaggcaggagccttgttcctgttgaagttaggctgtcagatctaagaatctctagagagcatttatttcaatttcctcagtgttgggacttctgatgcccacaaactgggggtcggggggaaggaatatggccaaagttagtaccagagctgagacaagagccagctagagtgtttgcctctcatctataccattggcattcaaacattttttaccatgacctatagtaagaaataactttttatcacaacccaatatatactttcatgcattttatctgtaaaacttttat

SEQ ID NO: 175177 - DNA, 551 bp, Homo sapiens
taagtatcacacaggacatgtttttgagtcaagcctgggaatggcaaacaatattagtatccatatttcattggctagaaatgatgcacatgcccccactttattgcagtggggttaaagaattttggctaatggtgttcccaggagaaataaagaataggttaagtgaacaaccagccagcttctgctacaactagcatacaattaatatgctttcacaactagaattgtttctttgagaaagagctgtgactggtrtcaggcaggagccttgttcctgttgaagttaggctgtcagatctaagaatctctagagagcatttatttcaatttcctcagtgttgggacttctgatgcccacaaactgggggtcggggggaaggaatatggccaaagttagtaccagagctgagacaagagccagctagagtgtttgcctctcatctataccattggcattcaaacattttttaccatgacctatagtaagaaataactttttatcacaacccaatatatactttcatgcattttatctgtaaaacttttat

SEQ ID NO: 175178 - DNA, 616 bp, Homo sapiens
ttcttgtctcaggcaagaattagtctgcactacagggcagataaattggtttaaaaattagtagagtcagctatcaccaaagtcaatagagcagagccaggaggaatgatgcaagagacaagtcattttaacactttctggagctaagtggggcataaaaaatagtttgaaagtactttgaattaggggattcagtttgtgcctaacatctgtccaaacctccttcttgtcctctgagtcagagttaatctgatcttggcttaaaacccctggaaaaagaaattaaccagctaggtcactgctgcttgggaatatattatgccaggaatcagaataatcaagaagaatgcatcagccacgtgattctggaagacttgctgtttgaggttggacaactctacaaaaacgtaaccattagactctgggctctggcaaacagattcccagtccattatacaacactgaggaaactgtacagcattttgagtctgaataaaaaatatattttctgtaaaattatttatttttctgcactccatttargctatttgtttatgcgtgggtttgatgtgtgtagctatggcttgctaagatagttgaaaaggtttataagcaa

SEQ ID NO: 175179 - DNA, 610 bp, Homo sapiens
ggttgagtaactaatttttttattataccgtaattttatggaatcttgtggtgattggtacatgaccagtgactcactttggctagrataacagcagagcaaagcaagaggtttcaggtgttagctgagtgccggtctggcttggggcttgtctccaataccctttgttccccagctctgggtgggatagtaacaacaatcatagcaactcctcacatacgtagcacaatctggagtttccacagcactctcacatacattatctcattttacccttgaacataatccagggtagtttctgtgcttttgctcccacttgggaagagtattttagcagtcagtagaagaacgttttccctcaaaatcagcctagagtttgctgttcttaatttcatcctatttcttttataatggtatctttgtattcttggctacacagtctcttttccccattcgtttaacaattatttttcagcagttgccaaacactaaccaaatatttatatttttaatttacagtctgctaagttgtatttgtcttttgaggtttgtgctttgtttgttgtctttgtgcacgtacgcatgttttgaaggcaaaacaattgactca

SEQ ID NO: 175180 - DNA, 591 bp, Homo sapiens
ataccaaaataaaaggaaatatatgtccatacaaagacttgcacaggaatactcatgattttatttgcaatagctcaaagtcagaaacaatcttaatatcaatgggtagatgaatgattattcaagttgtagtatatccataatatgaaatactcttcagcaataaaaagcaaactaatgacacatgtaacaacattgacagagtttaaatgcattatgttaaataaaagaactcaagtatagtttcatttatataayatttgaaacaggcaaaattataggaacattgaacagatcagtggtttccttgggttggttgtagtggtagggagtgattacaaaggctttgataagaaaaatttttgtgtgtgatgatgttaatattctttatcttgggcttacttataattttgtgattatatatttgtccaaactcacagaatttagaacaaaaattatattttagtaagtgtaaattaaaaattgatttaaaacatgaagatatatatctcagtagtttaatattaacatagcaaacaaaacttatacacaagcagtcacatatggtacagtgcaaagtgcatgatattt

SEQ ID NO: 175181 - DNA, 664 bp, Homo sapiens
gtcttctaaactctcagggttggcttcagtaatctcttaagtcccatgctttccattgcagccccagatagttccccaggccaacagaagactattcatggggttttcaagcatggtagaaaaggcccattgtctctcaaccccagaacatccctctcttctgccaataagagccttgttcctgattcatgtgaaacatgaaacagccacccttaccacgctggcaatgtctgttgaagaactgcttgcagtagaggaagaagagccccaggaaggccagggtaaacaccactagcaggctgctcaccagtgcaacaagtgtggcctcctgagggggcactgtgggtgyatctgcctccactaagctcaactggaaggcacctgtgagacaaaaaaatgggggaggtcagttagcatgggcagtaaacagtcaccctgaccctggacctggacttcctcaggctgtcacccttctccctagggccttccccaattagggtggctatgctggttttacttctttctagagcaggcaaaattataaagaacaaggcaaaataatttgtatatagtgctggtatgtagaaattagtacaattaatcgaagatgcacatatcctgtgatctttctgtgccacatctaattatataatccagatcaatg

SEQ ID NO: 175182 - DNA, 517 bp, Homo sapiens
atgtagccaaaaggagacctaattccacaagagaggggtgcactgctttgataccaagtacatcataacttcttttaagtctacagtgagatttaccttgaactttggtcttcagctgagagtgatgatggaaaagcggtcaagtactcatctgtgactgacaatgtgctaagcactttatagaggtatcttgggaagacaccacttctctcttctgggagcttaaactgaatattatgtttataagaagaatatttcgactaagttctgagaggtgaggatgggagaaacctccaacagctagaaaagcccagacaagcttggtctcataaagcaagctcacctgggcaaacagtccccacagacagcattagaggtagctgtgcagttgaccttctgaacacgattgatgacagcacaggtgatgcaactctgacatytgtggtggccccagctgcttttgtacctgcgaggagggcaggctgtgcagtaggcatctccaccctctccataacca

SEQ ID NO: 175183 - DNA, 234 bp, Homo sapiens
ggatatattaagtaggccttggtattaacagaaatagcaaacaaattaaaattggactctcggtaacaattgggagaaatgaatattcacacacttcagcatgaaattgaatctagttgtcctggtgcctcttgctcattcaaggagaacatstttattgaagaaccatcatgttaagtgtcacttaagactagtatggagtcacctggcttcagtacatttctttcagaaatg

SEQ ID NO: 175184 - DNA, 609 bp, Homo sapiens
tatcatcatctccactcagagataagggatctgaaagctcagagaggaaaagtgatgtttctaagtccacacagctaatgaaagggagacaggcattacattcgtctccaggctgtaagacaataatcaataagttaaagcaacaaacatacatcactcatcatatacagagactcttcctgattggaatttctgtggggaaaatgggagctacactgactgacactgatttgacacctcatctattacctgagtcatttcaaatactccctaatatgtcaccttccctaaaccattctattcaccccttggtgccacatcaatctctatgaaatgctcatgtcacctccctgcttaaaatcccttaaaagaatcccagtcatccttaagaataaagtcagttttcccaacaagacgtccaaagccatttgcagtctacccccagcctctcacccttyctactcctaaaccccatagagttctgccaggtctggtttcctctacctgagatggtctttcacccaaggccaactcacagttgtttgtgcaaagcacccaaggccaacccacaacacccaaggccgactcacagttctatctgtgaagctt

SEQ ID NO: 175185 - DNA, 582 bp, Homo sapiens
atcatctccactcagagataagggatctgaaagctcagagaggaaaagtgatgtttctaagtccacacagctaatgaaagggagacaggcattacattcgtctccaggctgtaagacaataatcaataagttaaagcaacaaacatacatcactcatcatatacagagactcttcctgattggaatttctgtggggaaaatgggagctacactgactgacactgatttgacacctcatctattacctgagtcatttcaaatactccctaatatgtcaccttccctaaaccattctattcaccccttggtgccacatcaatctctatgaaatgctcatgtcacctccctgcttaaaatcccttaaaagaatcccagtcatccttaagaataaagtcagttttcccaacaagacgtccaaagccatttgcagtctacccccagcctctcaccctttctactcctaaaccccmtagagttctgccaggtctggtttcctctacctgagatggtctttcacccaaggccaactcacagttgtttgtgcaaagcacccaaggccaacccacaacacccaaggccgac

SEQ ID NO: 175186 - DNA, 609 bp, Homo sapiens
tatcatcatctccactcagagataagggatctgaaagctcagagaggaaaagtgatgtttctaagtccacacagctaatgaaagggagacaggcattacattcgtctccaggctgtaagacaataatcaataagttaaagcaacaaacatacatcactcatcatatacagagactcttcctgattggaatttctgtggggaaaatgggagctacactgactgacactgatttgacacctcatctattacctgagtcatttcaaatactccctaatatgtcaccttccctaaaccattctattcaccccttggtgccacatcaatctctatgaaatgctcatgtcacctccctgcttaaaatcccttaaaagaatcccagtcatccttaagaataaagtcagttttcccaacaagacgtccaaagccatttgcagtctacccccagcctctcaccctttctactcctaaaccccatagagttctgccaggtctggtttcctctacctgagatggtctttcacccaaggccaactcacagttgtttstgcaaagcacccaaggccaacccacaacacccaaggccgactcacagttctatctgtgaagctt

SEQ ID NO: 175187 - DNA, 526 bp, Homo sapiens
tttaccacgtcctcaagtcattgcaattgccaagggaggtaatacgcacagtgtctagcgtgctatctggtgcasaatgctaagaatctgctcttgaaaatgttcaatcttttctgctcccctttctaatataagacatttcttctaggctgcaagaaatatattttctagcttgatgactagaatttatcaagattttgtttgacatcctcctgccaccctaagtagtggggcacttgtatatgtaaacaaacattacaccaagtgtgctaacacgggtgttttctgggggctacagaagcccgagggagtgttctcgcatccccttccatcaccttacatggagtcttgatcttatctatttcaaagaggagaaaaacaatttttcttttggagaacataagcgattgaggtatgaggaagctcatgcttaaggaagacatcggcatgtagacacctgctgactgtatcttaaggcttgtttctctgccagaaatcctggagaggttttggtagagagactgaa

SEQ ID NO: 175188 - DNA, 290 bp, Homo sapiens
ctgtctcttatggtaagtgagtctggtttacttccaaatatctccagtgtgatcgtactattttgcatcatyactagcaacatatgaaggttccagatgcttcacatcctcacaggcacttggtattgttagatttttgttagtgatggtggtggtggaggtggtggtggtggtggtggtgggttttagctattccagtaagtatatagtgatatcttattatggttttaatttacatttcctcaatgaataatgtgatgagtatattttcatatgcttatttgcattcc

SEQ ID NO: 175189 - DNA, 290 bp, Homo sapiens
ctgtctcttatggtaagtgagtctggtttacttccaaatatctccagtgtgatcgtactattttgcatcatcactagcaacatatgaaggttccagatgcttcacatcctcacaggcacttggtattgttagawttttgttagtgatggtggtggtggaggtggtggtggtggtggtggtgggttttagctattccagtaagtatatagtgatatcttattatggttttaatttacatttcctcaatgaataatgtgatgagtatattttcatatgcttatttgcattcc

SEQ ID NO: 175190 - DNA, 573 bp, Homo sapiens
tcaaatgctatgtaagaatgagtttatttgaaccaatatgaaaccaatatgaaaaagatgagaagtttatgagaaaagaaaccaaaatcttcacactaacaaactcaaatggaaacacatwtagtaattacttatgttttaaaccagaattattgacccagtttttccaaagatttaccttaactatgtgaacttggattcttatattaatgtttctaagctaacatttttagtaagagggatttttttaaaccttccattttaaagtgttagtttccttattttctgtaaatttgagaaatatgagatttatataagtatcaatttgtgaaaactcatcagatcactgctcctttaagatatttaataatataatccggaggtaataaaacatttcatatttgtacaatgagatatcaagggggtttctgaatcacagacacacagccctccagacacagaaagctcatagcttcagtctcaagttaaaaataatcccagaaacattaaaaaaaaatcactggtttagatctcaaagggctgtccttctagggaacataaaattcgtaattg

SEQ ID NO: 175191 - DNA, 382 bp, Homo sapiens
tagttggtaagtgcccaataaatgtcagctatttttattatcaatataactggctgctctatttctataaagttacagtcactctaatttgcgtgtcagttacagagtgggcatgcaagctttatagctaragggaagcagatccacactggatggaatcttttcattgtaatccccatgaaaatctctttgtggtgttgacacatgaacatctttcctcctgacaacttgtcttgagggaactgtagcttctgtcttgctgggcccagagtcccccgcctatgactcagctcccaggaggacaatgtaaagagaagtgaacccagctgccatgttttttcagggacaagggggcagccctgcctctgtgtcctcctaaaca

SEQ ID NO: 175192 - DNA, 469 bp, Homo sapiens
atacccattcatttttatcttggtaaccatttcatgcccctcaacagaattacctatattccccatgtgttataacgtttaatgattaattaatcatttaatgcccctcaacagaataacccttttgaacggaggttgtgtaactgcccagtgggttcaccttgcctgctgcctagacagaggcaatttataaagacaggaattgcaacagagaaagagtaattcatgcagagccagctgtgtgggagaccagagttttgttattacttaaatcagtctccccaaaaactctggggattagagttttcaaggagtgtttagtggatcatgggaagccagtgagccaggagtgctgattagtcagggatgaagtcawagggagtcgaagctgtcttcttgtgctgagtcagttcctgggtgggggccgcaagatcagatgagccagttaatttatgtgggtggtgccagc

SEQ ID NO: 175193 - DNA, 368 bp, Homo sapiens
ttatgcagactcttagagtacatgaaaagaatactgataattatggaatttgctgcttagcttgaagataatttcatgaaactcttccgatctattggcatggtggcccgtgtgtgagtgtatcgctgcygttctcaagacctgtgatctgacgcatgttctaagtgtgtttgaaactctgagctaattattcaattcagcaaataaagtcagcccagacagtttagcctacggggctggttgtttaacacatttaagtcatcctatagtccgaggctgggggtcacaatacagtctgctcccaatcccactggcaggacaaaagtgcctcttcataaaatggaaaccccaggggtccaccccagatc

SEQ ID NO: 175194 - DNA, 582 bp, Homo sapiens
ggagccagaggacccattgatgaagtccaaagtggccagtctcctacacactgagatgggggctggaagaaggagagaatggacctcgacggggtaatggagaaaaaccaacacataattattacctattcagatgctaggcatcttgggacctctgtttatgagaactgcagggaaaaaagaagctgatatatggactgggaaattgaagttagacatgggctggccttggtcaagtgctcagacagtttggccctgaccagaaatttccacctctgkgactttgtcaagctgagtcaggtgctttcaatgcactgcagatctatgggttgcattaattgcttgtaaatagtttggtgcctggttatacatgcctggcacatagagaggctctttatcaatatgaagggaaggcaggcggtccaagttcagggctccacatgagtgtctagattctactcagagatttccagtgataagggctcacacctcagggaaggcacttgaggcattgcctggggacccaggcttgctggctcctctggctgcctttgtcttactttatttccatcaatcagagat

SEQ ID NO: 175195 - DNA, 537 bp, Homo sapiens
tcctatacacacgtcacactaagcaggttagattttaccctaggagtggtgatattcagcaaagaatgttgagaaaatgagaagcaggatctgatttttctgttggaactacccctccctttgggaagacatgttgtaaggaatggaagctagacttgggaatttaggaagaaggtatattggttagggttctccaagaaacagaagccaagacaggattaagcatgcaaggattttatcagaaaaaaaaaattgtgagtttctggggagggagctaaagatggttgagaggtccatcagtcagcaatrcaagcccggccacaggtgaaggagagagagaagaaaggcaagtgacaatatcctagacttctgtgttgtccaaagaaggtttggcaaggcagtcaggagtcttccagccacagccggccatcagaagaatgtgtgtctcctagaaaggggcctgccttagtaagtaacactgccacattctgtcactggtggggagcccagacggtgcaatggatttcagggcacggc

SEQ ID NO: 175196 - DNA, 579 bp, Homo sapiens
tgaaggagagagagaagaaaggcaagtgacaatatcctagacttctgtgttgtccaaagaaggtttggcaaggcagtcaggagtcttccagccacagccggccatcagaagaatgtgtgtctcctagaaaggggcctgccttagtaagtaacactgccacattctgtcactggtggggagcccagacggtgcaatggatttcagggcacggcagtcaaggcccttggtcaattgcactcattgtagttggaggtctgtaaggtaccttctcatggctgtcacagaagtgtaaagtaataatccasgaagatgatttaatcggactaactagacataaactacgtcaccagcagtgcagcaaagggatatgagagacattggaaggtatgatcaattggaattagtaattgattgatgattattacagggctgttaagtaccactgtgcaagttgtgcactgcacaacgttatcttaaggaggagtgatgagtaaaacaattaaaatataaagtggctcatgcttatagcaggagagagactgggctctgaagtttatgcacctacctggtggctgtttg

SEQ ID NO: 175197 - DNA, 447 bp, Homo sapiens
aaaaaagagctggaatgaagatcttctcctaattggtcaaagggttagaaagtgaattgttaattaatcctgacagttcaacaagaggcgtctaactgtatctcaggtgagacagaggcaggaagcccctggcrgtgtggggacatattgctgggaggaagcttttcacaacacagtgccccagatctttggacctgtcttaaagtgagtgactcccaggaaaagacgttgaagtaaattaaaaggaatattcgtgtgcatgtgtctttatgatagaatgacttatattcctttgggtatgtatccattaatggaattgctgggtcaaatggtaggtccgtttttagctttttgaaaaatcaccatactgctttccacatggttgaactaattcacactcccactaacagtgtctaagcatgctcttttctccacaccctcgccaac

SEQ ID NO: 175198 - DNA, 447 bp, Homo sapiens
aaaaaagagctggaatgaagatcttctcctaattggtcaaagggttagaaagtgaattgttaattaatcctgacagttcaacaagaggcgtctaactgtatctcaggtgagacagaggcaggaagcccctggcggtgtggggacatattgctgggaggaagcttttcacaacacagtgccccagatctttggacctgtcttaaagtgagtgactcccaggaaaagacgttgaagtaaattaaaaggaatattcgtgtrcatgtgtctttatgatagaatgacttatattcctttgggtatgtatccattaatggaattgctgggtcaaatggtaggtccgtttttagctttttgaaaaatcaccatactgctttccacatggttgaactaattcacactcccactaacagtgtctaagcatgctcttttctccacaccctcgccaac

SEQ ID NO: 175199 - DNA, 623 bp, Homo sapiens
gatcctcctggatttctggtttggaatcactgcttagcaattatttagtaactgcaaatccctcacagaacgaggaatgaaagtctcaccaagacattcagagctcgttgcaatttggtactgagctgcccctccattcactgctcccagtctgtgcctctataatcacagccaccagagcacttcctctccccaggttcattctggttccttcgactggcatgtcctgctccttccaaacacatccatctcccatttctccctttattgaagtcctagtcattcttcaagtctcagttctaatcctagcttccctcccagtcttaccggattccctactcctttggatcatcagtgcatctcctgttctttcccttctttgagttcccagaatcattttattttttaaattaaaagttaataaaattgattttctgggggccataaaattctgtaaattttagyacgtgtataaaatcgtgcaaactgccataaacaggaaacaaacaattccatcaaccacaaaaactttctcatgctatcaccttggagtcatgtatatacgtgtatgtatacatatgtgtgtgtgtatctatacatacatatatatttatataatataa

SEQ ID NO: 175200 - DNA, 581 bp, Homo sapiens
agaagggaggtcaggttcattgagggcctattacatttggggtatgtttgagggtgaaaccccccrtagagtgttgtgaagtagaagctatcgcctcccactttgcagatggggaaataaagttctaagcaattaaataattactaaagggcagctactccttggcccagcaaatcactggaaatgctgacatggaagaacagcaggaagggttgtcctaagaagaattactttccttcttcagactagtagtgtctctatgtctgtggggaacgtgcacaagctcacactcaagagacagacttctcatcataaaaaaatttcacaaattacctctaagttgctctaaaacgggagtgcttatcatttttaggcatgtcagcactttttagaatctgaccaaagctatgtatgactcctttccctagaaaaatgtgtgcacacacataaatgcatacactttacttgaaatttctagaaggtttgtacaccctcagggatccatgagtcacagctttaaagcccacaaaggatacatctgcctccaaggagcccagcaactttatgacacactaaaacaa

SEQ ID NO: 175201 - DNA, 577 bp, Homo sapiens
aagcttgacaccagataaagaagggaggtcaggttcattgagggcctattacatttggggtatgtttgagggtgaaaccccccgtagagtgttgtgaagtagaagctatcgcctcccactttgcagatggggaaataaagttctaagcaattaaataattactaaagggcagctactccttggcccagcaaatcactggaaatgctgacatggaagaacagcaggaagggttgtcctaagaagaattactttccttcttcagactagtagtgtctctatgtctgtggggaacgtgcacaagctcacactcaagasacagacttctcatcataaaaaaatttcacaaattacctctaagttgctctaaaacgggagtgcttatcatttttaggcatgtcagcactttttagaatctgaccaaagctatgtatgactcctttccctagaaaaatgtgtgcacacacataaatgcatacactttacttgaaatttctagaaggtttgtacaccctcagggatccatgagtcacagctttaaagcccacaaaggatacatctgcctccaaggagcccagca

SEQ ID NO: 175202 - DNA, 604 bp, Homo sapiens
aagcttgacaccagataaagaagggaggtcaggttcattgagggcctattacatttggggtatgtttgagggtgaaaccccccgtagagtgttgtgaagtagaagctatcgcctcccactttgcagatggggaaataaagttctaagcaattaaataattactaaagggcagctactccttggcccagcaaatcactggaaatgctgacatggaagaacagcaggaagggttgtcctaagaagaattactttccttcttcagactagtagtgtctctatgtctgtggggaacgtgcacaagctcacactcaagagacagacttctcrtcataaaaaaatttcacaaattacctctaagttgctctaaaacgggagtgcttatcatttttaggcatgtcagcactttttagaatctgaccaaagctatgtatgactcctttccctagaaaaatgtgtgcacacacataaatgcatacactttacttgaaatttctagaaggtttgtacaccctcagggatccatgagtcacagctttaaagcccacaaaggatacatctgcctccaaggagcccagcaactttatgacacactaaaacaaacaca

SEQ ID NO: 175203 - DNA, 577 bp, Homo sapiens
aagcttgacaccagataaagaagggaggtcaggttcattgagggcctattacatttggggtatgtttgagggtgaaaccccccgtagagtgttgtgaagtagaagctatcgcctcccactttgcagatggggaaataaagttctaagcaattaaataattactaaagggcagctactccttggcccagcaaatcactggaaatgctgacatggaagaacagcaggaagggttgtcctaagaagaattactttccttcttcagactagtagtgtctctatgtctgtggggaacgtgcacaagctcacactcaagagacagacttctcatcataaaaaaatttcacaaattacctctaagttgctctaaaacgggagtgcttatcatttttaggcatgtcagcactttttagaatctgaycaaagctatgtatgactcctttccctagaaaaatgtgtgcacacacataaatgcatacactttacttgaaatttctagaaggtttgtacaccctcagggatccatgagtcacagctttaaagcccacaaaggatacatctgcctccaaggagcccagca

SEQ ID NO: 175204 - DNA, 383 bp, Homo sapiens
agatatggaaataataataagtgtgtgtttgtgtggacttatatgtacatatttcctatctctgtgttgactgggtctcaaagcattgacatcacacgaacactaagcatgctaagcacccasatcttgatttctaaaatcattctacatggacaggaaccacagctgcttggagaagtggctgattccaaggctggacacggacactataagatgatcctggagcatcttttttgtaccacaatataaagaaatgctcaaagaatgatggggagatctggcaagtaccaactggaccaggtgatcaagtggggatatggtcagtgtggttgccttctgatgtgatatgctgagaagagctcagcagcgtttttgtggaattc

SEQ ID NO: 175205 - DNA, 383 bp, Homo sapiens
agatatggaaataataataagtgtgtgtttgtgtggacttatatgtacatatttcctatctctgtgttgactgggtctcaaagcattgacatcacacgaacactaagcatgctaagcacccacatcttgatttctaaaatcattctacatggacaggaaccacagctgcttggagaagtggctgattccaaggctggacacggacactataagatgatcctggagcatcttttttgtaccasaatataaagaaatgctcaaagaatgatggggagatctggcaagtaccaactggaccaggtgatcaagtggggatatggtcagtgtggttgccttctgatgtgatatgctgagaagagctcagcagcgtttttgtggaattc

SEQ ID NO: 175206 - DNA, 391 bp, Homo sapiens
gaattcatgtggcttatgtgtaaacatatacacatacccagatatggaaataataataagtgtgtgtttgtgtggacttatatgtacatatttcctatctctgtgttgactgggtctcaaagcattgacatcacacgaacactaagcatgctaagcacccacatcttgatttctaaaatcattctacatggacaggaaccacagctgcttggagaagtggctgattccaaggctggacacggacactataagatgatcctggagcatcttttttgtaccacaatataaagaaatgctcaaagaatgatggggagatctggcaagtaccaactggaccaggtgatcaagtggggatayggtcagtgtggttgccttctgatgtgatatgctg

SEQ ID NO: 175207 - DNA, 487 bp, Homo sapiens
ctctttgttatggagtttgtccttcctgtgttaaaatttggacacactttctacttgaatctaaaaaggatgatttctaagaagttactgaagcaatgcaagatcaaaacataataaccacattcattcttaatcagcattacagtgaaagtaatttaccamagaacacataattaagtcataaatgaaatctcaagacagaaattgctccccttttaagatttctcattgtccatacactcagaaatgagaagagggattttctcattctgatcctaaatctatcactgaaatgatgacttcacttgcatttatgcattttgctttattttgtgattactttatctcactatcctcccctttttctgcttgtgtgattgccttaatccttttatctagaaccagcgggagttccattagcttcagctttttggtatgccttagccacagaaaactattttgtgattcaaaactgctctaaaattca

SEQ ID NO: 175208 - DNA, 487 bp, Homo sapiens
ctctttgttatggagtttgtccttcctgtgttaaaatttggacacactttctacttgaatctaaaaaggatgatttctaagaagttactgaagcaatgcaagatcaaaacataataaccacattcattcttaatcagcattacagtgaaagtaatttaccacagaacacataattaagtcataaatgaaatctcaagacagaaattgctccccttttaagatttctcattgtccatacactcagaaatgagaagagggattttctcattctgatcctaaatctatcactgaaatgatgacttcacttgcatttatgcattttgctttattttgtgattactttatctcactatcctcccctttttctgcttgtgtgattgccttaatccttttatctagaaccagsgggagttccattagcttcagctttttggtatgccttagccacagaaaactattttgtgattcaaaactgctctaaaattca

SEQ ID NO: 175209 - DNA, 542 bp, Homo sapiens
ggacaaaatcatctccccacctccaccttagggtatgtactccccatctcaagtcataagataaacctaytgtggtcagaaggcagagtactctaataaccttgttatagttgaagagactgagtccatgaaaaagttacggaccaaggttatacacagagctggtgacagtcttgaggctaaaacccaacgttttactcttagctaatgttcttttgggcttaatgaatgaactactgctgtggaaatgtttttttttttttttaaaaaaaaaaaaaaaaaaaaacctttcattgtgttttgccagaataaagactgaacatggccctagcggaagagctaaattcattatctttaaaaaatgaaattttctcaaatcataaatgcagtcaccaagtgtaccttctttctctgcattgcagtacaccaaaatgccagtcctctctacaaacacattttatggatcccaaagcagagagattgacgttgttccatttcctgttcacagtataatcaggacaaaggaataagattagtattgt

SEQ ID NO: 175210 - DNA, 539 bp, Homo sapiens
cacatcaggctcagaaggtacaaagttgacatatcaattttcccatgraaagagatcttgttttgacaacactagtctttcagttacctagactcaaaatctagaagcagccctgctcaccttcatctccttcacagcctgaactgagtcaagggtcaaatcacatagctgggttagagatatttttgacacaattccttccttcctttccacccactttgagttggcacttgcttaaacactccctgttttacctctggatagttacagtgcccctcacttgtttcctcatctccagtaattatccattccaacccatcctttaaacccatgccaaaatcactttcataaagcttacctccacattcaaatctcagtactctaccaggcacatggtggctattcaggtaatattttctggatggatggatgggtagatggacaatgtatttactgatcatttactatatgcctgacattgtgctgggtattaaagacagcaggaaacaaaccaacttctaacaaaacacttccctgct

SEQ ID NO: 175211 - DNA, 539 bp, Homo sapiens
cacatcaggctcagaaggtacaaagttgacatatcaattttcccatgaaaagagatcttgttttgacaacactagtctttcagttacctagactcaaaatctagaagcagccctgctcaccttcatctccttcacagcctgaactgagtcaagggtcaaatcacatagctgggttagagatatttttgacacaattccttccttcctttccacccactttgagttggcacttgcttaaacactccctgttttacctctggatrgttacagtgcccctcacttgtttcctcatctccagtaattatccattccaacccatcctttaaacccatgccaaaatcactttcataaagcttacctccacattcaaatctcagtactctaccaggcacatggtggctattcaggtaatattttctggatggatggatgggtagatggacaatgtatttactgatcatttactatatgcctgacattgtgctgggtattaaagacagcaggaaacaaaccaacttctaacaaaacacttccctgct

SEQ ID NO: 175212 - DNA, 587 bp, Homo sapiens
tttagcctaaaaataatgctaatgactgacagtagtagcagcagcagggaatattaaataccacttaactatgtgtcaggcacggcactgctcaccactctttttcctactcccattttasaaaggggaaaactgagacacaaagagattaaaggaacttttgttcttctcattgttcaagctcagacctaactaactctcgccttcttggagagccatttttggatgatccgtagataacctctttccctccatcactgtttttcataacgtttctttgtgaaaccaaggtgatactcaaaagcctttgcaatgaggctagctctatccagcagccttcccattttgtaatcccatctcactaagaatcagccgtttggtgtgtaacctccctacctgggtgccccaggagaacaataaaggagtctgtctggttcagtgttccagtgctaggtctggcccctggcattacagagacagagcaactgtcttgtgtgttaacaagtagtcaccgccctcccctgtgggcagccaaagtaatctagaaggcttatcagaagtgaaactcctccattaaagttcaccca

SEQ ID NO: 175213 - DNA, 587 bp, Homo sapiens
tttagcctaaaaataatgctaatgactgacagtagtagcagcagcagggaatattaaataccacttaactatgtgtcaggcacggcactgctcaccactctttttcctactcccattttacaaaggggaaaactgagacacaaagagattaaaggaacttttgttcttctcattgttcaagctcagacctaactaactctcgccttcttggagagccatttttggatgatccgtagataacctctttccctccatcactgtttttcataacgtttctttgtgaaaccaaggtgatactcaaaagcctttgcaakgaggctagctctatccagcagccttcccattttgtaatcccatctcactaagaatcagccgtttggtgtgtaacctccctacctgggtgccccaggagaacaataaaggagtctgtctggttcagtgttccagtgctaggtctggcccctggcattacagagacagagcaactgtcttgtgtgttaacaagtagtcaccgccctcccctgtgggcagccaaagtaatctagaaggcttatcagaagtgaaactcctccattaaagttcaccca

SEQ ID NO: 175214 - DNA, 587 bp, Homo sapiens
tttagcctaaaaataatgctaatgactgacagtagtagcagcagcagggaatattaaataccacttaactatgtgtcaggcacggcactgctcaccactctttttcctactcccattttacaaaggggaaaactgagacacaaagagattaaaggaacttttgttcttctcattgttcaagctcagacctaactaactctcgccttcttggagagccatttttggatgatccgtagataacctctttccctccatcactgtttttcataacgtttctttgtgaaaccaaggtgatactcaaaagcctttgcaatgaggctagctctatccagcagccttcccattttgtaatcccatctcactaagaatcagccgtttggtgtgtaacctccctacctgggtgccccaggagaacaataaaggagtctgtctggttcagtgttccagtgctagktctggcccctggcattacagagacagagcaactgtcttgtgtgttaacaagtagtcaccgccctcccctgtgggcagccaaagtaatctagaaggcttatcagaagtgaaactcctccattaaagttcaccca

SEQ ID NO: 175215 - DNA, 437 bp, Homo sapiens
caccttgaaatgtaagtaagtctttactggrtagctttaaatatatgtgcacttggcctttctctccccagccctctttttagagtattctaaatagttaaagacccagactaccttgccccctattgtggttcaaatatggtgtggtactcagatacttgcattctagaaagcttatttcattctcccatgtcataagtttgtcagctctgcactcagttgcctggggggatatggcaagtgctataacagaggctgtctttcatattttattttgaaccttttccagtgttcaccatctctctctcgttttttaaggatcaagctagtttagtttacctaagaacataggcctatgggcatgactacaaacctctttctgttcctcttatgaaggccagtatgtcattttagagtgccctgttcaaatttaaatg

SEQ ID NO: 175216 - DNA, 437 bp, Homo sapiens
caccttgaaatgtaagtaagtctttactggatagctttaaatatatgtgcacttggcctttctctccccagccctctttttagagtattctaaatagttaaagacccagactaccttgccccctattgtggttcaaatatggtgtggtactcagatacttgcattctagaaagcttatttcattctcccatgtcataagtttgtcagctctgcactcagttgcctggggggatatggcaagtgctrtaacagaggctgtctttcatattttattttgaaccttttccagtgttcaccatctctctctcgttttttaaggatcaagctagtttagtttacctaagaacataggcctatgggcatgactacaaacctctttctgttcctcttatgaaggccagtatgtcattttagagtgccctgttcaaatttaaatg

SEQ ID NO: 175217 - DNA, 562 bp, Homo sapiens
ttcaaatttaaatggggtgacaatacctcagacttgactgcctaggttgaattttttctcctgggttttctatgcagtgggtattttcaggtagaggctagaaagctttagcctttttcccaaggcttgctgaattgtaggagttttgtcttagaaygctttttctagacactttaagaactttaagaagattcaaacttattacccaaatttcctgtaggctttgttttgtcagtttttgcttctgtcttgcctggaggcctgacacctcctgtcttccaggtaaattgacttcccttgtacatcttaccagaaagatatttaccctaacttgttacacaaactattgccacagtacctgtggatttttaagttaactaacatgtgtatttctctttaaaggttttgtgcacagaccaaacaaatcaccctcagtcttcccagcagtcagatgtggtaactaagactaggacggataatataggttgtgaggtggcaaacaacttagggtcctaagattttgccaagactgtcatcattacctggagtataatgggactaa

SEQ ID NO: 175218 - DNA, 567 bp, Homo sapiens
ccccaagtttcagaacaattatgaaactctttcagccgttcccagattgttatgaaaatagattttctttaggctacaggtacaagagaagatacttcttttaaggctaaagatatcttagtgtgttcaaaaagctctttgcctgacaaaggacccattgttttaaaagaagccagaagggagatttcagttgtttttttttccccttcttctccagtccaatttctgttggatctggctgcctctcctctcattctatttagatgattacatttctagaatctggttttagtgacaggaaattaaatactctattacctggattagataaatataaaccaactccctgtgcytaaattgggaataataaaccacagagtcatggaaactttataaaccatcaaatcaaatgtctcaaatgatttatgttccagcaactcaaaagagggaccatccaacaacactttaaaaacctccttttagaaacattctatgagacagtctaccccatggatccaaaatggatttttggcttagtttagttatttttaaaatgttttaacaaga

SEQ ID NO: 175219 - DNA, 374 bp, Homo sapiens
atacaccaccgactgaaagtataaaaagacactctgcagtctcctaagaatggcatctgaattgtcttgtcagtttggtttctactctcagtgcaaatatctttaaataatttaaagtggaaccccaccaacgtttgccactacacttactctctgaacctggacgtgtcgctcttttgtgctcaatttcctaatctctgaattayaatgatagagaaagcattttacttatatcccagggttattataaggaaaacacaaaataatggaatgggaaaccagtatgtcaatagtataaatacattatttttttctgatttctagtatattttgaagatgataaattatagggatattcaggtaatgagaaatta

SEQ ID NO: 175220 - DNA, 403 bp, Homo sapiens
gagcgccacatgtttgatatgtagggaagtaagtgggtgtcctggacacggtccactattcatcataataccacagccctgttcattcccagagaggagagttaaaaccatgaaaccatatgtagaatattaaaaatcatttaacattaaaatgcacattatgaaggcatgcactttggacaaggctacagtccaagagctctgagaaatctccagttcagtagataattgttgtaaaggtaaactgagttatctatatgtacmtacacatgcggatgtttgcacacaggcgcatgcatgcacacacagagggactgtcatagaagcttagtcctcatctcttcaatgctgcctttcatcactctgttttccttactgatttctgtagtgaggtcaatatcaa

SEQ ID NO: 175221 - DNA, 392 bp, Homo sapiens
gctatctaatgttacagaggtcaagagcctcctctctgtgactcagttcccctatttgtcaaatgaagtgctttgggttcatgggtgactaatacactaccttccaattctactttctctgattcttgctgaggcctcaagtttgggggtcaggtatgctaattcatccctgctcctcaataatttaccggagttattaatatatatgtcttctctgtccagactcttcatctccagtatgggagaacccagtactgtgaagagcccacagaaacctggccccaggctattaaaaaaaawttctttttgagacaggctcttgctctgttgcccaggttggaatgcagtggtgcaatcatagcccactgcaatctcaaactcctgggcttaag

SEQ ID NO: 175222 - DNA, 460 bp, Homo sapiens
ttcctgagacatgtacccactctctttagactgttgccatctaaggtgcacacgctggatttccacatgctgcaggaatwgaagaacctcttagaaacctggtcttcataaacttaaggcttatctgggttagctgcaagagacagcaagagaacccatgcagatctttcatatgctcccatctgactcattccctgtcctcttctccccacgaccattcctgccccaacttggcccagaaaccaaatgtgaattttctatttcccacctcagcactagtccatgccaggacaccagctgacaatttcttggttttattgtcaatagctgtaccatgtgatcaattactgtcttcacttagaacgaagccagagcccaagaatatttatattctaccaatacgtgcctgttacaagagaaggaaatatgagttattaagtttaactttttatgtgaattc

SEQ ID NO: 175223 - DNA, 460 bp, Homo sapiens
ttcctgagacatgtacccactctctttagactgttgccatctaaggtgcacacgctggatttccacatgctgcaggaattgaagaacctcttagaaacctggtcttcataaacttaaggcttatctgrgttagctgcaagagacagcaagagaacccatgcagatctttcatatgctcccatctgactcattccctgtcctcttctccccacgaccattcctgccccaacttggcccagaaaccaaatgtgaattttctatttcccacctcagcactagtccatgccaggacaccagctgacaatttcttggttttattgtcaatagctgtaccatgtgatcaattactgtcttcacttagaacgaagccagagcccaagaatatttatattctaccaatacgtgcctgttacaagagaaggaaatatgagttattaagtttaactttttatgtgaattc

SEQ ID NO: 175224 - DNA, 425 bp, Homo sapiens
ttaaaaagcaacagataccacacacagtatagttcttctccacttaattcctattaaagaccgataaaaagaaaagcttttattgaaatgcttgggttagaggaaacgggattacaattggagctgatttttggtaagtatttaactagcaaaggttaattagaattgtaacaatgagatgtaagagaacacattctgatcgattgattaatgagatgtcagaaggtataagaatccacctttgggagaaatattaaaaatgaaatgtgtttgcaaagccatgatgtcttttctcttcatttattaacacaagaagcaaccrtggatgtttttccatgggtaacaatgtacagaaaattacgatctccaagttggccaaaagcagcaccaacatgttacccaagtctctaccatccaaaaatgtc

SEQ ID NO: 175225 - DNA, 430 bp, Homo sapiens
tgtttctcaaacacataattccctgctatagatggcattgacctcactcctaaactctaagggtctgtattgtgattcttttatttgagattccataaacatcatgtggcaacttttgactccacagacacctctaattccatagggtctgttggattataaagcccaattatcagcatagcttgaacctcagcctggacctgctatagagctctttccagttctgggtactccagagttacagctggtgggagagtggtattccccagtgtggaatatgctgctttcagaccttgaggcccaccaggcattgtgcttccttcttagtggtaggaggtgcaagatgcaayaatctgtgctttactttgaagatgttccattgtgctccagatcactggacccttaaaaacttacctattgtggcaggtct

SEQ ID NO: 175226 - DNA, 444 bp, Homo sapiens
cttgaaatattttttaatttcacttatggcaaaaattaaagacctatttattaacctaattatgatctcctttaatcttatttgaaatgctgataaaaacttttcttctaatctctcatatataactatatgtatatacccagtaatgtttgatttgttctatcacccttccttccctccctcccttccttctttccttccttccttttctctttctttctttctttctctttctttctttctttttctttctttcttccctccctccctccctcccttctttccttccttccttccttccatcyatctatctatctatctatctatctatctatctatctatctatctacctatctatctatctatatatccatctagaaagggcccaaggccatcttggctttctggtttaagaacgagggcaataacttaggttactgatt

SEQ ID NO: 175227 - DNA, 549 bp, Homo sapiens
ttatatcagtacaggcttatgtagaaaagaactattttaaaccattggcacgatcctatccacatgtaaacagatgctgatttactaagtggttaagaactaagcattaactgaaaygcttcttaaggtgacagcaggaccagtctggctgtcccagcaggttccaggcctcagcagggccaccctctgcactctgctcctggggtcttggggctgagttctcagtggctgccttcactgcacatcctggcccagctgatctcacatcctgtgatgtgatttaacgctgccctgccctcactgggggtccccaatctgccctcctttctgtttctcttaagttaaactttttggggggtcaattttagatttacagaaaagttgcaaagatagtagcgagttccactgtattcctcccgcaatgccagtttctcccattgctgtcatcttacattattctgcatatttgtgaaaactaagaaataagagatacagacgcccaaaggatgggccctacgtgagtaccccaacaagtttcatgttcagaca

SEQ ID NO: 175228 - DNA, 523 bp, Homo sapiens
agcattgagtgcctacactctgggtgtctacaagctccctccccctggcaggggctccatgccttgttctctgtggtgtctctggtgcccagcagggatcctgggccagtgtgtggcttcaagaaatgttgtgggctgactgaatgaatgaatgagtgaatgaatggataaatagactaagggatacgtggataaggagtataaacaaagtggttcttggaggtttcaaaagagaaggaagggcatttagytggagagaatgggcaagtcctcagcggagctctggcatctgcactgtctggcgggaagtaaagggctgagttgagaatccaagacactgctgatgagaatcagcacaagtgtgagtgtggaagcaggaggggagggacggtttcaggcaacagtgtggaactattgaggctgaagtccaggaaagatgtgaaggagaagaggaaaaccagaccacattacgccaagggagcctggtttacaggaccagtgggagatgaacataataaccagt

SEQ ID NO: 175229 - DNA, 588 bp, Homo sapiens
tcactgctgtgtgacaccctgccccctgccctgtcccacctcctgtcacagcccccactgtcttcactgctgtgtgacaccctgccccctgcyctgtcccgcctcctgccaccagcccctactttccttttgctctggagaatgtctcaatgcaacaatgcaaaactacaaaagacaaatagagctactttggagtgagggtagtagatcaactgctcaaatgtagctaggttgtggcttatcaaaaacttcagtagtttggccagggctggtggctcatgtgtgtaatttcagcactttgggaggcctgggtaggaggatcacttgaggccaggagtttaagaccagcctaggcaacatagtgagagcctttctctacaaaaaattttaaaaattagccaggtgtaatggcctacacctgtaatcccagctactcaggaggcgaaacaggaggatggctggagctcaagtttgaggctgcagtgaatcatgattgtgccactacactccagcctgggcaacacagcaagaacatctctctaaaaataaaatttaaaaaaaaaaacagcttcagggagcttctggaac

SEQ ID NO: 175230 - DNA, 588 bp, Homo sapiens
tcactgctgtgtgacaccctgccccctgccctgtcccacctcctgtcacagcccccactgtcttcactgctgtgtgacaccctgccccctgctctgtcccgcctcctgccaccagcccctactttccttttgctctggagaatgtctcaatgcaacaatgcaaaactacaaaagacaaatagagctactttggagtgagggtagtagatcaactgctcaaatgtagctaggttgtggcttatcaaaaacttcagtagtttggccagggctggtggctcatgtgtgtaatttcagcactttgggaggcctgggtaggaggatcacttgaggccaggagtttaagaccagcctaggcaacatagtgagagcctttctctacaaaaaattttaaaaattagccaggtgtaatggcctacacctgtaatcccagctactcaggaggcgaaacaggaggatkgctggagctcaagtttgaggctgcagtgaatcatgattgtgccactacactccagcctgggcaacacagcaagaacatctctctaaaaataaaatttaaaaaaaaaaacagcttcagggagcttctggaac

SEQ ID NO: 175231 - DNA, 517 bp, Homo sapiens
aatggaatgaacatcttcatggatgtagggttgtaattttctgtggcattattccttatgactctatatttaaataaacaaccttctatattcttcctgatgagaaaactatgtcgtccaattaattacatttccatgacactgtctccttgccagtgcccagcagggattttttcaaagcaaaaatcagaagcccactagctaggctgatgttggctatagtgagacagggcacacggccaagtccccatccctcctttttaagagactggaaataggattttaacttctgtgttattcctcttcagaaccactgcaatttcttttccctttaaaggcsgtgggactgagtaatttgaacacagcaggacccacttgattcatactttttggtcaataatccaatatagctactatcaaaaacactcctctgaccatatttacattttcacctttttgtcagatgacagcatagtctacctcaacagaagggataaataagttattcggttactga

SEQ ID NO: 175232 - DNA, 597 bp, Homo sapiens
aagatacctgtgcactatcctcatagtgaccttagcaactttcatttacatttttacctgyccactttatgtctgcccatatacccccaggtattctacagagaaggaggtaagactaccacactctcactcagtggccctattcatattgaacactttacatttcaatatcctaccagccttgacattcaaagccagcccaaatttaaagtaatgttaacttgaaagaaaaacattttataacaattcttcagaaggtgacataaaagaaagacaaagatacatattttaaagggtaaaggaaaaaaagacaatcttttagctattatgtatgttagtttagagattcagtacagttcaatgataataatcaccaaaatagtaatgtattacctgaccacatttatcaaggtgtttctggagatatttttttctaacatcaaaaactagaatgcctaaaatcagttccttttaatccaagacatcccacccccttttcctaaattctttaaatactgataagtttctagatgtttccttattatttaaagataaacatcaagatatgatataaaaagaaaaaaaaaaacacttgca

SEQ ID NO: 175233 - DNA, 597 bp, Homo sapiens
aagatacctgtgcactatcctcatagtgaccttagcaactttcatttacatttttacctgtccactttatgtctgcccatatacccccaggtattctacagagaaggaggtaagactaccacactctcactcagtggccctattcatattgaacactttacatttcaatatcctaccagccttgacattcaaagccagcccaaatttaaagtaatgttaacttgaaagaaaaacattttataacaattcttcagaaggtgacataaaagaaagacraagatacatattttaaagggtaaaggaaaaaaagacaatcttttagctattatgtatgttagtttagagattcagtacagttcaatgataataatcaccaaaatagtaatgtattacctgaccacatttatcaaggtgtttctggagatatttttttctaacatcaaaaactagaatgcctaaaatcagttccttttaatccaagacatcccacccccttttcctaaattctttaaatactgataagtttctagatgtttccttattatttaaagataaacatcaagatatgatataaaaagaaaaaaaaaaacacttgca

SEQ ID NO: 175234 - DNA, 597 bp, Homo sapiens
aagatacctgtgcactatcctcatagtgaccttagcaactttcatttacatttttacctgtccactttatgtctgcccatatacccccaggtattctacagagaaggaggtaagactaccacactctcactcagtggccctattcatattgaacactttacatttcaatatcctaccagccttgacattcaaagccagcccaaatttaaagtaatgttaacttgaaagaaaaacattttataacaattcttcagaaggtgacataaaagaaagacaaagatacatattttaaagggtaaaggaaaaaaagacaatcttttagctattatgtatgttagtttagagattcagtacagttcaatgataataatcaccaaaatagtaatgtattacctgaccacatttatcaaggtgtttctggagatatttttttctaacatcaaaaactasaatgcctaaaatcagttccttttaatccaagacatcccacccccttttcctaaattctttaaatactgataagtttctagatgtttccttattatttaaagataaacatcaagatatgatataaaaagaaaaaaaaaaacacttgca

SEQ ID NO: 175235 - DNA, 511 bp, Homo sapiens
aattacatttatttaatttctgctttcatacaaaggcataaaattatcagtttaaattttaaaaaatattattataaaattacatgcttagaagtctgttgattgttttcccacagccattttataactgaaaccctcaattttggatatgaatgtataataaacgcacatgttcattctaaacattttcttttcaaatacttttacattcctttaggtttcctaaagaaatgtaaattccttctgccacttagtttttgctatttttagcagtttcttaaagtctgcaaattcctttcactcagtttttgcacttagttcataatgacttcacatttgacattgattgtccacaaaaggggttatttttagtttcaaaaggtgaacgttatttgttttagaarttctcgcgtatatttcttagtctaaagataggttttctaacataaaaatgtgatagtgtagtctgtttgctgagcacttgtagtggaacaaactcagtgctaaattc

SEQ ID NO: 175236 - DNA, 458 bp, Homo sapiens
tgttttcagttttcattattatgagtaaaccctccataaacatattgcatacaaatttttatgtgaacataagtttttgtttcacctaaacagatactatacaggactgaaattttagtaagtatatgtttaactttgtgagaaactgcccaactgtttttgcaaagtggctgtacagatttacattttcaacagcaacatgtgagagttccagttgctgcacgtccttgtgagcacttagggttgtatttttaattttatccactctaatgggtgtgragtggtgtcttattaaggttttaataagcatttctctaatttaatgcattatattacttctttttgttggtttgtaaactgcttatcttctttggtgagtttgatcgaatcatttgtccatgtttgtgtttttgattatatttcagatacaagtctttaccagttatgtgctttgtaaa

SEQ ID NO: 175237 - DNA, 443 bp, Homo sapiens
agaattcatctagaaaaaatcagacacattcctgctctttcttctgtagcagagtgaaatactatttttatgctattctcatttttaatttaaaaggtaaagtccctaaaaaatatcctttggaaaacctgctaatgaaagctcagatcttggggacagcatagcaatgtagaagagtgtgggccgagagacctgtgtattctcttagccccagcacttcctagacagataaacatgggrgcttcagtatgtaggtaaggagtttcataagctttgccgtattcatacagcaaatgtatgaaacaattgctgtaatatgaactctctcacctgttgtgtctgtttcttctctctcatccactgagtaaaattccttcataagcggggtatcccttgagaaagcctagtgcctagagataagttcatgaccctttctcttttct

SEQ ID NO: 175238 - DNA, 390 bp, Homo sapiens
aaacaattgctgtaatatgaactctctcacctgttgtgtctgtttcttctctctcatccactgagtaaaattccttcataagcggggtatcccttgagaaagcctagtgcctagagataagttcatgaccctttctcttttctttaaagtgcattctargtacgtcagtgaattcagtcttatatttgccactcaaacttgttttgagtggtgtgaatacaaagaacaaaggttatttttagaaattctaataatggaatctgtttcagccaagcagttagtaaatgtcaaaagctttcccccaaaaaatctggacgctaactcttacacaactgctcaccaaaacaatttttccttgagtcttttaaaaggagtatgtgctattaggtt

SEQ ID NO: 175239 - DNA, 390 bp, Homo sapiens
aaacaattgctgtaatatgaactctctcacctgttgtgtctgtttcttctctctcatccactgagtaaaattccttcataagcggggtatcccttgagaaagcctagtgcctagagataagttcatgaccctttctcttttctttaaagtgcattctaggtacgtcagtgaattcagtcttatatttgccactcaaacttgttttgagtggtgtgaatacaaagaacaaaggttatttttagaaattctaataatggaatctgtttcagccaagcagttagtaaatgtcaaaagctttcccccaaaaaatctggacgctaactcttacacaactgctcaccawaacaatttttccttgagtcttttaaaaggagtatgtgctattaggtt

SEQ ID NO: 175240 - DNA, 563 bp, Homo sapiens
tgtttgcctctgttctcaaaatactttccaatatcaaacttttatagcgattaagagctaccaactgaaggcaaatatgtttttaaattactccaccactttttaattttttttaatagagatgaggtcttgctgtgttgttcaggctggtctctgactctggcttcaagcaatcctcccactttggcctcccaatggtctcggattacagacaygaacctctgtgcccagtcataccccaccaattgatgctatgacattttatgcaacatgatcattttttgtgaagctttatgctagatacctcatcagcttaagtcccgctctgagccagttatctgtgaagcagcaaagcaacaagtgacatctgaaaaggtgatttcaaatgaagcatttctcaatccaaatcagataggaaattaaggtataattatttgataagataaagaatgtttaagttattaaacagatatagtatgtaaaatatagccatctgttttaaaaattttccaatggctatcacctgaaaaaataaatgtgtgttgtttatgcatggacctatc

SEQ ID NO: 175241 - DNA, 569 bp, Homo sapiens
aaatgcctacatacatttatatccatatgaataaaacrgtagaagctgaaatataaaataacatgccactgctgctggagagatttaagccaattatctgctatcctggagcatcagacatatatatctatatctatctataatattatatatttcataatttatatatttatatattggtataatatattgttttatacagattatattattatatgctgtttttcaccaatgttgtttacatatattatacattatttatatccggtgactacataattgtgcatggtacatcccgtctctagtcagttgtcatgacaagagttttaatcatttatgcttactttatgattctattgtacaatttttattggacattatttcagtttttattaattaacagggcatatcaaatacctccatacacactttattacagatttttttgtcccaaatatttttagcatttttttaaatatgaaaatagatagtttggaaacaagcttctatcatctactatttcttcagttatttgaatgcagatggcctatcacaggacacaagaagtt

SEQ ID NO: 175242 - DNA, 569 bp, Homo sapiens
aaatgcctacatacatttatatccatatgaataaaacagtagaagctgaaatataaaataacatgccactgctgctggagagatttaagccaattatctgctatcctggagcatcagacatatatatctatatctatctataatattatatatttcataatttatatatttatatatyggtataatatattgttttatacagattatattattatatgctgtttttcaccaatgttgtttacatatattatacattatttatatccggtgactacataattgtgcatggtacatcccgtctctagtcagttgtcatgacaagagttttaatcatttatgcttactttatgattctattgtacaatttttattggacattatttcagtttttattaattaacagggcatatcaaatacctccatacacactttattacagatttttttgtcccaaatatttttagcatttttttaaatatgaaaatagatagtttggaaacaagcttctatcatctactatttcttcagttatttgaatgcagatggcctatcacaggacacaagaagtt

SEQ ID NO: 175243 - DNA, 593 bp, Homo sapiens
aagcttctatcatctactatttcttcagttatttgaatgcagatggcctatcacaggacacaagaagttgagaatgtgctaggagaattgccagcactgctcaatacaggtgtttgcccaggtctaccttttgactctctcacttgatctgttcttgtgcttctcactttcctgggcagccagtcccttactgagtatttctggccttcagtatctgcttcttccggttcctttgatgcagcacccacttgggctcgcttctgtagttcgctaaactcagttgcttatcattgtaatatttccgtaatatcagaatgactactgtctcaacttaggagacatccacttgtcttctccagcacctgactgagttcttgccatataaatttttgttgaataaattcaatgtttggcttttcacatcatcataaacaagacttacaycaacaatcatgggggaatttgaataaaattaagattaggtctgacttttgcaattttacaacttacaagttagtgttaacaaaatgtataaagatggtgatatgccattttgaaacatattaagcattttcatctttagaacagccttc

SEQ ID NO: 175244 - DNA, 531 bp, Homo sapiens
tataatatttgtggcaggcagcttctaagatggytgccaataatctccacctcctagtattcccactcttgtggagtcccctcgaatgttataccaaggctgaagtgttgcagcagagagtagaagaaatggcaagtcactcccaagattcaggtataagactttggcttctatcttgagcattgttgctcactcactttcattctctttcttaaatcacttgctttggggacacccctgctctgggctgttctgtttaaaacaattcatatggttcaccttctaccagcagccacatgagttagctgaaagtggatgtgttatcaacagtcaagttcagagattgcagacgcagctgagagtttgactgcaatcccatgtgaggccctgagccagaaccattccactaaccctctctgggattcctgacccatcaaaactatgggataaagaaaaagtatactgttttaagccacttcgttttaggataatttggttacacaatacaatattattcgtatatgtattgcc

SEQ ID NO: 175245 - DNA, 531 bp, Homo sapiens
tataatatttgtggcaggcagcttctaagatggttgccaataatctccacctcctagtattcccactcttgtggagtcccctcgaatgttataccaaggctgaagtgttgcagcagagagtagaagaaatggcaagtcactcccaagattcaggtataagactttggcttctatcttgagcattgttgctcactcactttcattctctttcttaaatcacttgctttggggacacccctgctctgggctgttctgtttaaaacaattcatatggttcaccttctaccagcagccacatgagttagctgaaagtggatgtgttatcaacagtcaagttcagagattgcagacgcagctgagagtttgactgcaatccmatgtgaggccctgagccagaaccattccactaaccctctctgggattcctgacccatcaaaactatgggataaagaaaaagtatactgttttaagccacttcgttttaggataatttggttacacaatacaatattattcgtatatgtattgcc

SEQ ID NO: 175246 - DNA, 485 bp, Homo sapiens
ttctttattttacacttaacaattatctaaaggcaggctgttaaataataatttaartttggattatttaattatttgaatggagagaaatgtcacatatccaagttcattaataatacatcaaaaaatcacatgtagacaatccactgtaaaggttgacatgagatgtcttataacacattcagcaagacataaagaatcaatttttaaaattgattgtgtagactctgcatctcactttgtcagtttctcagtattgcgtatgtatgccaacacctggtatgaaacatccatctgattcatatgctccattacctaccctttatttcatgaaattacaaagtcccattgaggaacagtgagttgtccaagggtaaagagaagattttcagacctagacaaaatttatggctctaatataacaaacatctacatttcttttaagtaaaacatttatttaacacgcctataataaagttaaataa

SEQ ID NO: 175247 - DNA, 485 bp, Homo sapiens
ttctttattttacacttaacaattatctaaaggcaggctgttaaataataatttaagtttggattatttaattatttgaatggagagaaatgtcacatatccaagttcattaataatacatcaaaaaatcacatgtagacaatccactgtaaaggttgacatgagatrtcttataacacattcagcaagacataaagaatcaatttttaaaattgattgtgtagactctgcatctcactttgtcagtttctcagtattgcgtatgtatgccaacacctggtatgaaacatccatctgattcatatgctccattacctaccctttatttcatgaaattacaaagtcccattgaggaacagtgagttgtccaagggtaaagagaagattttcagacctagacaaaatttatggctctaatataacaaacatctacatttcttttaagtaaaacatttatttaacacgcctataataaagttaaataa

SEQ ID NO: 175248 - DNA, 405 bp, Homo sapiens
gggctagctttagtatagcaggaagcaaaaattcttatacattcaatgtttatctttttcaagaagcacttacagccaaactctaccacagaagtagaaattctctagtctaaaagatattgttttaatactcaattattttcatttaaacyctaaaagtattaaaaacatgaagagtgagatacccaatcccctcaaaagtcatttatagacacagggtatcataacaccttaggcaacattaagaacaaatagagttgcagcaactacactactgtagccacaaagacttttttttttttttcctgaatgggtgggcacctatttttacttgattggtttgtataaattaactgtgtgtttgaggttttttcctgagctgattactcagactaaaaaaagtcc

SEQ ID NO: 175249 - DNA, 438 bp, Homo sapiens
ggtagtctaatccattctctacacagcagtctttcaaaattttgaagatggctttgatgccacatcagtattttcccagatgcctcttgagtcccttatcctctgctgtttgccaagcttgttggtcaatgttccatggctgagtggtgagatagcatcagtgtctggtcatggggagtctccagggcctgattaatgccaagcatcaaggggcagtgactttccttgttctggtaactgtccttcccatcggtggaaattgcygtattgtggattaatgtagagcttttctgacctgaaacatagatctgtttcttgtgaaaccctatttatgtttctctaaaagcagatatgctcccatctttgatttgggattttgattctgcccatacacagagcttccttccctaccttatatcacctttatctcatcccgta

SEQ ID NO: 175250 - DNA, 413 bp, Homo sapiens
tctgcattctcctgtgttttactggccaaatcttgtcagagatgttattctagaccacccaacttatcaatgtcatttyccacctccccaagcatttttgttcaaagtgcttatggctatcaaaaattaactttatcttattcatttattcttttgcatatttgtctgccccaccattagaatatgaactcattaaaaaagagtgaagttatctgtgttattcacagttgtgttcttgccacctataaaaagtcctagcgcaaggaacctcagtaaatatctgaataaataaatgagtggcaaatagataagaataaaacaactgaattggaacaccaagaggcggagtgtagggagggatatgccacagtactaccgtgtctctttctaaaaaataccacaacagaggctac

SEQ ID NO: 175251 - DNA, 549 bp, Homo sapiens
catatccatcactgtaaaatgctttttaaaaaggtaaaacagcagcctccatttttttttwaaaaaaaacctactctatgccaagcactctacaaagccatttagataaactatttcaaattctccccataatcctgtaaagtagaaattactgtctcagtttcagatgaaaaaccagactcagaaaagttcagtaaaagtcatacgggtctagaatttttaatgtttttggtttactatttattcttgtatttggaaattgaagtaatataattttcatcatactctgaaatacacaaatgctaaagttaacaaaaaataaccaataaagactgacacgactggcaataaaatcctttaatttttctttttgagagagaagcatgcttttaaatacagcacctgtaaacaagttagtgaagtatatactattttgagattccccctctcaattttttttttggaatgttaggttacaacatcaactgcattacgtaacagttattgaaagcaagtcagggtaaaattttatagccaaaaatattcata

SEQ ID NO: 175252 - DNA, 407 bp, Homo sapiens
ctatttattcttgtatttggaaattgaagtaatataattttcatcatactctgaaatacacaaatgctaaagttaacaaaaaataaccaataaagactgacacgactggcaataaaatcctttaatttttctttttgagagagaagcatgcttttaaatacagcacctgtaaacaagttagtgaagtatatactattttgagattccccctctcaattttttttttggaatgttaggttacaacatcaactgcattaygtaacagttattgaaagcaagtcagggtaaaattttatagccaaaaatattcatagcagcaacttttaaaatatgattttattaaatcaagtcattgcacttggtcattttattgctacagcaaaacaaggcctttacattataatact

SEQ ID NO: 175253 - DNA, 505 bp, Homo sapiens
gcgagggaagaaccaagcccttttctttcgcagctagaaggcaggtagcctggggcaagttttcaagcccatctcgcccactgtctggaaacagggctgttgggggaggcacggtgggattaagactgctccttcagtttgcgtgggagctgggtgaggcctgtgactgccagctttcccctacttccctgacaaccagcatgattcagcataggcagccatattcctcctagctacacaactccagtgacctggcaatctcaccttcatccccaacagcagccacagcaagacccgcccaagaagagcgtgagctcagacatgcctagccctgccccaacctgatggcccttccctacccaccctagtagtggaagactaagggcatataatcttgggagttctayggccccgcccactgctggtcccttgaatgacacaaaagatcattcaagggtactatgaacatcattatgcacataaactagaaaacctagaagagatg

SEQ ID NO: 175254 - DNA, 489 bp, Homo sapiens
tatcagccaaccagaaggatttcaatcaccagcttggtcagctgacagtctgcggctgctacttgcataattaggctttgtaatgaattactgagacttcaagtgagatttcacaaagtgctgtagaagttcccagacagactgtaggcatacacttcagatgatctcagggatggaagattmcacagcatctgtcattaaccatcccactgctttccctttagttaatgaccaatccatccctcctgcctgaatacagacattatggaagggaaaagaataatgaagcaaacagttattgtctgtttactctttaggatttgaacccaggtctgtaacttttttttaagtatgtcatgtggcttttccaaaataagaaagagctcatctttggtttgtttgtttgtttgtttgtttgtttgttttgaggctgagttttgctctgtcacccaggctggagtgcagtggcgcaatcttggtgaaagagct

SEQ ID NO: 175255 - DNA, 265 bp, Homo sapiens
gggggtcccctcgtctctcctctccccgcccgccggcggtgcgtgtgggaaggcgtggggtgcggaccccggcccgacctcgccgtcccgcccgccgccttctgcgtcgcggggcgggccggcggggtcctctgacgcggcagacagccctcgctgtcgcctccagtggttgtcgacttgcgggcggcccccctccgcggsggtgggggtgccgtccccgccggcccgtcgtgctgccctctcgggggggtttgcgcgagcgtcg

SEQ ID NO: 175256 - DNA, 265 bp, Homo sapiens
gggggtcccctcgtctctcctctccccgcccgccggcggtgcgtgtgggaaggcgtggggtgcggaccccggcccgacctcgccgtcccgcccgccgccttctgcgtcgcggggcgggccggcggggtcctctgacgcggcagacagccctcgctgtcgcctccagtggttgtcgacttgcgggcggcccccctccgcggcggkgggggtgccgtccccgccggcccgtcgtgctgccctctcgggggggtttgcgcgagcgtcg

SEQ ID NO: 175257 - DNA, 545 bp, Homo sapiens
tcccctcgtctctcctctccccgcccgccggcggtgcgtgtgggaaggcgtggggtgcggaccccggcccgacctcgccgtcccgcccgccgccttctgcgtcgcggggcgggccggcggggtcctctgacgcggcagacagccctcgctgtcgcctccagtggttgtcgacttgcgggcggcccccctccgcggcggtgggggtgccgtccccgccggcccgtcgtgctgccctctcgggggggtttgcgcgagcgtcggctccgcctgggcccttgcggtgctcctggagcgctccgggttgtccctcaggtgcscgaggccgaacggtggtgtgtcgttcccgcccccggcgccccctcctccggtcgccgccgcggtgtccgcgcgtgggtcctgagggagctcgtcggtgtggggttcgaggcggtttgagtgagacgagacgagacgcgcccctcccacgcggggaagggcgcccgcctgctctcggtgagcgcacgtcccgtgctcccctctggcgggtgcgcgcgggccgtgtgagc

SEQ ID NO: 175258 - DNA, 584 bp, Homo sapiens
gagacgagacgcgcccctcccacgcggggaagggcgcccgcctgctctcggtgagcgcacgtcccgtgctcccctctggcgggtgcgcgcgggccgtgtgagcgatcgcggtgggttcgggccggtgtgacgcgtgcgccggccggccgccgaggggctgccgttctgcctccgaccggtcgtgtgtgggttgacttcggaggcgctctgcctcggaaggaaggaggtgggtggacgggggggcctggtggggttgcgcgcacgcgcgcaccggccgggcccccgccctgaacgcgaacgctcgaggtggccgcgcgcaggtgtttcctcgtaccgcagggccccctcccttccccaggcgtccctcggcgcctctgcgggcccgaggaggagcggctggcgggtggggggagtgtgacccaccctcggtgagaaaagccttctctagcgatctgagaggcgtgccttgggggtacsggatcccccgggccgccgcctctgtctctgcctccgttatggtagcgctgccgttagcgacccgctcgcagaggaccctcctccgcttccccctcgacggggttggg

SEQ ID NO: 175259 - DNA, 494 bp, Homo sapiens
cctgaacgcgaacgctcgaggtggccgcgcgcaggtgtttcctcgtaccgcagggccccctcccttccccaggcgtccctcggcgcctctgcgggcccgaggaggagcggctggcgggtggggggagtgtgacccaccctcggtgagaaaagccttctctagcgatctgagaggcgtgccttgggggtaccggatcccccgggccgccgcctctgtctctgcctccgttatggtagcgctgccgttagcgacccgctcgcagaggaccctcctccgcttccccctcgacggggttggkggggagaagcgagggttccgccggccaccgcggtggtggccgagtgcggctcgtcgcctactgtggcccgcgcctccccccttccgagtcgggggaggatcccgccgggccgggcccggcgttcccagcgggttgggacgcggcggccggcgggcggtgggtgtgcgcgcccggcgctctgtccggcgcgtgaccc

SEQ ID NO: 175260 - DNA, 320 bp, Homo sapiens
cgggccgggcccggcgttcccagcgggttgggacgcggcggccggcgggcggtgggtgtgcgcgcccggcgctctgtccggcgcgtgaccccctccgccgcgagtcggctctccgcccgctcccgtgccgagtcgtgaccggtgccgacgaccgcgtttgcgtggcacgggggtcgggcccgcctggccctgggaaagcgtcccacggtgggggcgcgccggtctcccggagcgggaccgggtcggaggatggacgagaatcacgagcgacggtggtgsgggcgtgtcgtggttcttggctgcggtcgctccggggcgcc

SEQ ID NO: 175261 - DNA, 320 bp, Homo sapiens
cgggccgggcccggcgttcccagcgggttgggacgcggcggccggcgggcggtgggtgtgcgcgcccggcgctctgtccggcgcgtgaccccctccgccgcgagtcggctctccgcccgctcccgtgccgagtcgtgaccggtgccgacgaccgcgtttgcgtggcacgggggtcgggcccgcctggccctgggaaagcgtcccacggtgggggcgcgccggtctcccggagcgggaccgggtcggaggatggacgagaatcacgagcgacggtggtgckggcgtgtcgtggttcttggctgcggtcgctccggggcgcc

SEQ ID NO: 175262 - DNA, 432 bp, Homo sapiens
ctgatgaatcccattttcttactacagaagagctagcaaaaactgcaatatgatgtgtaaagtcagtgtaatcttatggacattataccaagtcacaacatgaggcatgagatacctcagatgttgttccctctaaatctcatgttgaattgtgatatccccaatgttggtggtaggtctggagggaggtgattggatctgggggtggatttctcagaaatggtctagcatcctgtccctggtgctgtccttgtgatagtgagtgaattctttcaagatctatttgtttaaaagtgtgtggtgcttkccctgccttgccaggtgatgtgcctgcctgctccttcttcaacttctgccatgaataaaagcctcctgaggcctcaccagaaggtaggcagatgccagaaccatgcttgtacagactgcagctat

SEQ ID NO: 175263 - DNA, 531 bp, Homo sapiens
ccaccagcagctcctgtcttcagtgtagaaaagctgtgggagcagagctgcccaaagccttgggagcccaccctatgcatcctggtaatgytctatgttcccaggatgtgggacatggtttcaaaggagattattttggaacatcgagatttaatgactgccctgctgggatttgaacttgtgtggggcctgtagtccctttcttttggccaatttatctcatttgtaatgggaatgtttaccaaagacctgtatcccagttttatcttagaagtcaataactggttttgattttacaggctcattggtggaagggacttgccttgtctcagaagaaactgcactttcgagtgatgccaaaacaggttgagacttttgggggactattgagaagggatgattgtattttgcaatgtgagaagaacatgagatttgaagggccagggatggaatgaaatagtttggatgttataccctttaagtctcatgttgaattgtaattcccactgttggaggtggggtctgttggga

SEQ ID NO: 175264 - DNA, 531 bp, Homo sapiens
ccaccagcagctcctgtcttcagtgtagaaaagctgtgggagcagagctgcccaaagccttgggagcccaccctatgcatcctggtaatgctctatgttcccaggatgtggracatggtttcaaaggagattattttggaacatcgagatttaatgactgccctgctgggatttgaacttgtgtggggcctgtagtccctttcttttggccaatttatctcatttgtaatgggaatgtttaccaaagacctgtatcccagttttatcttagaagtcaataactggttttgattttacaggctcattggtggaagggacttgccttgtctcagaagaaactgcactttcgagtgatgccaaaacaggttgagacttttgggggactattgagaagggatgattgtattttgcaatgtgagaagaacatgagatttgaagggccagggatggaatgaaatagtttggatgttataccctttaagtctcatgttgaattgtaattcccactgttggaggtggggtctgttggga

SEQ ID NO: 175265 - DNA, 531 bp, Homo sapiens
ccaccagcagctcctgtcttcagtgtagaaaagctgtgggagcagagctgcccaaagccttgggagcccaccctatgcatcctggtaatgctctatgttcccaggatgtgggacatggtttcaaaggagattattttggaacatcgagatttaatgactgccctgctgggatttgaacttgtgtggggcctgtagtccctttcttttggccaatttatctcatttgtaatgggaatgtttaccaaagacctgtatcccagttttatcttagaagtcaataactggttttgattttacaggctcattggtggaagggacttgccttgtctcagaagaaactgcactttcgagtgatgccaaaacagkttgagacttttgggggactattgagaagggatgattgtattttgcaatgtgagaagaacatgagatttgaagggccagggatggaatgaaatagtttggatgttataccctttaagtctcatgttgaattgtaattcccactgttggaggtggggtctgttggga

SEQ ID NO: 175266 - DNA, 532 bp, Homo sapiens
tttcagtgtgcctcggccagttggaagtagaaaaataagcataaagataaactttgtgaacttcaattcaagaagaaaaataggaattcacaggaatagagaagaacattccagacactgtggagggggaggtgggaaggcagcctctgttataacatttggttcataaaagggagtgaaacaccagtacgagagaagagcagccagtctccctctgcaactcacctttccactggggatctgtgcaatccagattaagggagagcactctgtttctcccaarccttggagctagcacaaaagtggctgagatatggggaaagaggaaagacactcagaaaagctgcaggcatttccccagacctgggactgagagaaggatgccctttttaatctgggctcatacaaagtcaatcattgttttgtgcctggcaatgatggccactgcagacactttaatcttgggctaggaattggagtgcttgctctggagcaggggagcagcctccacagccagaattgagtgttgagt

SEQ ID NO: 175267 - DNA, 532 bp, Homo sapiens
tttcagtgtgcctcggccagttggaagtagaaaaataagcataaagataaactttgtgaacttcaattcaagaagaaaaataggaattcacaggaatagagaagaacattccagacactgtggagggggaggtgggaaggcagcctctgttataacatttggttcataaaagggagtgaaacaccagtacgagagaagagcagccagtctccctctgcaactcacctttccactggggatctgtgcaatccagattaagggagagcactctgtttctcccaagccttggagctagcacaaaagtggctgagatatggggaaagaggaaagacactcagaaaagctgcaggcatttccccagacctgggactgagagaaggatgccctttttaatctgggctcatacaaagtcaatcattgttttgtgcctggcaatgatggccactgcagacactttaatcttgggctaggaattggagtgcttsctctggagcaggggagcagcctccacagccagaattgagtgttgagt

SEQ ID NO: 175268 - DNA, 331 bp, Homo sapiens
ccggttgcatgaagcacatctgtgtgtgttaaggcacttcccacagcatctgcgacacagaacagtggcagctgtgctcttcgtggtccctgcacacaggcccacagcagtatattgtgtgtttttttttatataaaaggctttgaaaatgccccacagcttcctcagtaactgactgtcaagaggggcagccttcaaaagtagaattctggcaaaggtcttcaaaagacacgaarttctggcaacgggcccatttccctcccgccttgctcttctggatgcatccattctctcccacagcatagtcgttttcttccactccactgtagag

SEQ ID NO: 175269 - DNA, 218 bp, Homo sapiens
tttgctttcatcttcggtggtggcggtgaaagaggcatgacactaaatcgacccttaggacgccgtttatgttgaagtcgaggagcttatcggggaaataggagaagtacggacgccacacgtgrccgagagaaaagtctgaaaatgcccctcgcatccaagcggggacccggcctcgacctcccgaaatcatacaccgagtggggaagcccagcaag

SEQ ID NO: 175270 - DNA, 510 bp, Homo sapiens
agactaatgactacctatggcctggtaatcacctaaggctttgttycacttaggtacttggtgccaaactgttgcctgctgttcagctggggtatggtgtccacctggggtctggatgtcagcctggggcttgttgtatacctgtatcttagatatccagataggggtctattttctgcttaggtgcagcagtccatctggtgcttgagtgtcaacctaaggcctgatgtctatgttggaccttgggttcacctgaggcctgatatccacctggggcctcaatgtccaaatggggcctgatgcccatctgggcgctgggtgtccacctgcagcatggatgtccactggtactttatgtccaccaggggcctaatgtccacctaaaacctggtgttcacctggggtctgatgttcagctgaagaccggatgtccacctggagccgaggaatccacccagggactggtgttgaactggggcctgatgaccacccggggacaaggtacacacc

SEQ ID NO: 175271 - DNA, 510 bp, Homo sapiens
agactaatgactacctatggcctggtaatcacctaaggctttgttccacttaggtacttggtgccaaactgttgcctgctgttcagctggggtatrgtgtccacctggggtctggatgtcagcctggggcttgttgtatacctgtatcttagatatccagataggggtctattttctgcttaggtgcagcagtccatctggtgcttgagtgtcaacctaaggcctgatgtctatgttggaccttgggttcacctgaggcctgatatccacctggggcctcaatgtccaaatggggcctgatgcccatctgggcgctgggtgtccacctgcagcatggatgtccactggtactttatgtccaccaggggcctaatgtccacctaaaacctggtgttcacctggggtctgatgttcagctgaagaccggatgtccacctggagccgaggaatccacccagggactggtgttgaactggggcctgatgaccacccggggacaaggtacacacc

SEQ ID NO: 175272 - DNA, 510 bp, Homo sapiens
agactaatgactacctatggcctggtaatcacctaaggctttgttccacttaggtacttggtgccaaactgttgcctgctgttcagctggggtatggtgtccacctggggtctggatgtcagcctggggcttgttgtatacctgtatcttasatatccagataggggtctattttctgcttaggtgcagcagtccatctggtgcttgagtgtcaacctaaggcctgatgtctatgttggaccttgggttcacctgaggcctgatatccacctggggcctcaatgtccaaatggggcctgatgcccatctgggcgctgggtgtccacctgcagcatggatgtccactggtactttatgtccaccaggggcctaatgtccacctaaaacctggtgttcacctggggtctgatgttcagctgaagaccggatgtccacctggagccgaggaatccacccagggactggtgttgaactggggcctgatgaccacccggggacaaggtacacacc

SEQ ID NO: 175273 - DNA, 510 bp, Homo sapiens
agactaatgactacctatggcctggtaatcacctaaggctttgttccacttaggtacttggtgccaaactgttgcctgctgttcagctggggtatggtgtccacctggggtctggatgtcagcctggggcttgttgtatacctgtatcttagatatccagataggrgtctattttctgcttaggtgcagcagtccatctggtgcttgagtgtcaacctaaggcctgatgtctatgttggaccttgggttcacctgaggcctgatatccacctggggcctcaatgtccaaatggggcctgatgcccatctgggcgctgggtgtccacctgcagcatggatgtccactggtactttatgtccaccaggggcctaatgtccacctaaaacctggtgttcacctggggtctgatgttcagctgaagaccggatgtccacctggagccgaggaatccacccagggactggtgttgaactggggcctgatgaccacccggggacaaggtacacacc

SEQ ID NO: 175274 - DNA, 493 bp, Homo sapiens
gatacctgcctggtgcccaagtattctcatgtgcctaatgtccactagttggcctggtgttcatctgagggcttggagtcaacmagtggctttatgtacacctggattctagtgtcctcctggggccttatgcttaccaggagtctggtgtacccctggggtctagtatccacctggagtctgggtgtccacctgagcctaatgttgagcttagactgagtgtcagcctgaggcctgatgtctacttagggcatagttattcacctggggcttgttgtttacctggggactaatgtcaaccttgagcctaagtatccacctggggaatagtgtccagttgcagccagatgtccacctatggcctgaagcatggttgttatcctaaggtcttgtattagtccattttcacactgttataaaatactacctgatattgggcaacttatgaggaaaagaggtttaactgacccacagttcttcaggcttaataggg

SEQ ID NO: 175275 - DNA, 490 bp, Homo sapiens
acctgcctggtgcccaagtattctcatgtgcctaatgtccactagttggcctggtgttcatctgagggcttggagtcaaccagtggctttatgtacacctggattctagtgtcctcctggggccttatgcttaccaggagtctggtgtacccctggggtctagtatccacctggagtctgggtgtccacctgagcctaatgttgagcttagactgagtgtcagcytgaggcctgatgtctacttagggcatagttattcacctggggcttgttgtttacctggggactaatgtcaaccttgagcctaagtatccacctggggaatagtgtccagttgcagccagatgtccacctatggcctgaagcatggttgttatcctaaggtcttgtattagtccattttcacactgttataaaatactacctgatattgggcaacttatgaggaaaagaggtttaactgacccacagttcttcaggcttaataggg

SEQ ID NO: 175276 - DNA, 490 bp, Homo sapiens
acctgcctggtgcccaagtattctcatgtgcctaatgtccactagttggcctggtgttcatctgagggcttggagtcaaccagtggctttatgtacacctggattctagtgtcctcctggggccttatgcttaccaggagtctggtgtacccctggggtctagtatccacctggagtctgggtgtccacctgagcctaatgttgagcttagactgagtgtcagcctgaggcctgatgtctacttagggcatagktattcacctggggcttgttgtttacctggggactaatgtcaaccttgagcctaagtatccacctggggaatagtgtccagttgcagccagatgtccacctatggcctgaagcatggttgttatcctaaggtcttgtattagtccattttcacactgttataaaatactacctgatattgggcaacttatgaggaaaagaggtttaactgacccacagttcttcaggcttaataggg

SEQ ID NO: 175277 - DNA, 490 bp, Homo sapiens
acctgcctggtgcccaagtattctcatgtgcctaatgtccactagttggcctggtgttcatctgagggcttggagtcaaccagtggctttatgtacacctggattctagtgtcctcctggggccttatgcttaccaggagtctggtgtacccctggggtctagtatccacctggagtctgggtgtccacctgagcctaatgttgagcttagactgagtgtcagcctgaggcctgatgtctacttagggcatagttattcacctggggcttgttgtttacctggggactaatgtcaaccttgagcctaagtatccacctggggaatagtgtccagttgcagccagatgtccacctatggcctgaagcatggttgttatcctaaggtcttgtattagtccattttcacactgttataaaawactacctgatattgggcaacttatgaggaaaagaggtttaactgacccacagttcttcaggcttaataggg

SEQ ID NO: 175278 - DNA, 537 bp, Homo sapiens
ccaggtggacaccagcactcaattggatacacacactcaaggtggacaccaggccccacgtgaattcgtacactccaggtgaacatcaggtcccaagtggatacctggactccaggtgtataccagtctctaaattaataccaggcctcagatggtccttaggagccatgtgggcattagtcatcaggaagttacctaggcccaaagtgcacatcargccacctgttgacacaagatctatttggaagtcaggccccaggtggacacccacgccctatgtaaatacttaggtcccaggttgacagcaggccctgtgttaacactcagaactcaggtggacatcaggcctcaggtggacatctgagttcatctggaacctcgtgttacaggccccatgtaaacaacaggccttaggtggatacccaatctctaagtggacatcagagctcagattgacacaaagactccagtagacataatgtaccaatgaatatccaggcctccggtaaatacccaggccccagattgacatcgggg

SEQ ID NO: 175279 - DNA, 537 bp, Homo sapiens
ccaggtggacaccagcactcaattggatacacacactcaaggtggacaccaggccccacgtgaattcgtacactccaggtgaacatcaggtcccaagtggatacctggactccaggtgtataccagtctctaaattaataccaggcctcagatggtccttaggagccatgtgggcattagtcatcaggaagttacctaggcccaaagtgcacatcaggccacctgttgacacaagatctatttggaagtcaggccccaggtggacacccacgccctakgtaaatacttaggtcccaggttgacagcaggccctgtgttaacactcagaactcaggtggacatcaggcctcaggtggacatctgagttcatctggaacctcgtgttacaggccccatgtaaacaacaggccttaggtggatacccaatctctaagtggacatcagagctcagattgacacaaagactccagtagacataatgtaccaatgaatatccaggcctccggtaaatacccaggccccagattgacatcgggg

SEQ ID NO: 175280 - DNA, 524 bp, Homo sapiens
ttcttgtgctgcatccccacatctaaaggctcctgcttcaggaatggcaggagtgagaatctttcttttctgacaatgcccttgtaggctcatccctcaccccagatgcctctggccatttagcagaaggtgcccccaagtaccacaggacaggagtcaccaggtagacatcaggccccagatggagctaccaggccaggcctcaccagtgatcccaccagggccacatcygcacattgtccttgtccagctggagcctctggagctcattgagacacaggcacatgctgaggtcacctgcagtctggaagtctttccagggacaatgttttcaggctgaaattcctttaaattcagtgaggttgttttcatgtttggaaattccagtggaaagtgagtgatattggtgacctctctcctttttcaattcctgcttcaggtgcagaaatacagctatttccagtgccagctgttgagccagtgctagcaccagggtcaaagccccctccagggacagcgctgga

SEQ ID NO: 175281 - DNA, 524 bp, Homo sapiens
ttcttgtgctgcatccccacatctaaaggctcctgcttcaggaatggcaggagtgagaatctttcttttctgacaatgcccttgtaggctcatccctcaccccagatgcctctggccatttagcagaaggtgcccccaagtaccacaggacaggagtcaccaggtagacatcaggccccagatggagctaccaggccaggcctcaccagtgatcccaccagggccacatccgcacattgtccttgtccagctggagcctctggagctcattgagacacaggcacatgctgaggtcacctgcagtctggaagtctttccagggacaatgttttcaggctgaaattcctttaaattcagtgaggttgttttcatgtttggaaattccagtggaaagtgagtgatattggtgacctctctcctttttcarttcctgcttcaggtgcagaaatacagctatttccagtgccagctgttgagccagtgctagcaccagggtcaaagccccctccagggacagcgctgga

SEQ ID NO: 175282 - DNA, 524 bp, Homo sapiens
ttcttgtgctgcatccccacatctaaaggctcctgcttcaggaatggcaggagtgagaatctttcttttctgacaatgcccttgtaggctcatccctcaccccagatgcctctggccatttagcagaaggtgcccccaagtaccacaggacaggagtcaccaggtagacatcaggccccagatggagctaccaggccaggcctcaccagtgatcccaccagggccacatccgcacattgtccttgtccagctggagcctctggagctcattgagacacaggcacatgctgaggtcacctgcagtctggaagtctttccagggacaatgttttcaggctgaaattcctttaaattcagtgaggttgttttcatgtttggaaattccagtggaaagtgagtgatattggtgacctctctcctttttcaattcctgcttcaggtgcagaaatacagctatttccagtgccagcygttgagccagtgctagcaccagggtcaaagccccctccagggacagcgctgga

SEQ ID NO: 175283 - DNA, 442 bp, Homo sapiens
gaggcagaaaacaaattggagactcgtcatctatttgggagtgtatggcatgtatttattgtcctaggtgctgggtttatttttttcagctaatgacagttttccatgctttatggtaagtgaccataaagtaagtggtaagtgacttacccttcaggcagttcagcccaggacagtcagcagaagactgtttccagaccccacctgctagttacagatcatccctgatagagcagagaggggtgaccaggtagtgactttatagtcastggaggcaaagcccatttttggacagttcattgagggcttacagataaaaggttcacaaattatgcagtgagctggatggagtgtgaagcgtatttatgggtcgtgcacatacataataggtttactttttgagatttcaaaacatgttttaaacttaacctaggattcccac

SEQ ID NO: 175284 - DNA, 442 bp, Homo sapiens
gaggcagaaaacaaattggagactcgtcatctatttgggagtgtatggcatgtatttattgtcctaggtgctgggtttatttttttcagctaatgacagttttccatgctttatggtaagtgaccataaagtaagtggtaagtgacttacccttcaggcagttcagcccaggacagtcagcagaagactgtttccagaccccacctgctagttacagatcatccctgatagagcagagaggggtgaccaggtagtgactttatagtcactggaggcaaagcccatttttggacagttcattgagggcttacagataaaaggttcacaaattatgcagtgagctggatggagtgtgaagcgtatttatgggtcgtgcacatacataataggtttactttttgagatttsaaaacatgttttaaacttaacctaggattcccac

SEQ ID NO: 175285 - DNA, 534 bp, Homo sapiens
atagggcgcgggcccgggtggagccgccgcaggtgcagatcttggtggtagtagcaaatattcaaacgagaactttgaaggccgaagtggagaagggttccatgtgaacagcagttgaacatgggtcagtcggtcctgagagatgggcgagcgccgttccgaagggacgggcgatggcctccgttgccctcggccgatcgaaagggagtcgggttcagatccccgaatccggagtggcggagatgggcgccgcgaggcgtccagtgcggtaacgcgaccgatcccggagaagccggcgggagccccggggagagttctcttttctytgtgaagggcagggcgccctggaatgggttcgccccgagagaggggcccgtgccttggaaagcgtcgcggttccggcggcgtccggtgagctctcgctggcccttgaaaatccgggggagagggtgtaaatctcgcgccgggccgtacccatatccgcagcaggtctccaaggtgaacagcctctggcatgttggaacaatgtaggta

SEQ ID NO: 175286 - DNA, 518 bp, Homo sapiens
cagaactggcgagttgatttctggacttggatacctcatagaaactacatatgaataaagatccaatcctaaaatctggggtggcttctccctcgactgtctcgaaaaatcgtacctctgttcccctaggatgccggaagagttttctcaatgtgcatctgcccgtgtcctaagtgatctgtgaccgagccctgtccgtyctgtctcaaatatgtacgtgcaaacacttctctccatttccacaactacccacggccccttgtggaaccactggctctttgaaaaaaatcccagaagtggttttggctttttggctaggaggcctaagcctgctgagaactttcctgcccaggatcctgtgtgaccaaaagtgcctctgctgggagctgggatcctcgggaccatgcttgctagcgctggatgagtctctggaaggacgcacgggactccgcaaagctgacctgtcccaccgaggtcaaatggatacctctgcattggcccgaggcctccgaagtaca

SEQ ID NO: 175287 - DNA, 218 bp, Homo sapiens
gacctgaaaccctataaagaatcccaaagaagctggctggataaagcctgctatggatgtctttatactcaaagactgatgaggcaattcgaatatgtgtccccaccaaatctcwtgttgagttatgcttcctaatgttggaggtggatcctggtataaggtgattgaatcatgaaggcaaatttctcatgagtggttcagcactatccccttggtac

SEQ ID NO: 175288 - DNA, 218 bp, Homo sapiens
gacctgaaaccctataaagaatcccaaagaagctggctggataaagcctgctatggatgtctttatactcaaagactgatgaggcaattcgaatatgtgtccccaccaaatctcatgttgarttatgcttcctaatgttggaggtggatcctggtataaggtgattgaatcatgaaggcaaatttctcatgagtggttcagcactatccccttggtac

SEQ ID NO: 175289 - DNA, 480 bp, Homo sapiens
aatggtgaaatctacaaccataagaaggtaggggaaaagaagccagatgtgtggatgtgattaaacttcagagcttgttggttacgatgagattatatattctgtatcatgctttttactttgcaaagcattctatgttatctcatttgctctaagtatgtagatagggaactgatgaataaaatggtgagtgaaatcacttggtcacaaaaaagtgataaaaatggggattacacagtttctttgactcttagaattttttctccttctccccagctttttgttttgaaaaaaattctaacatacagaaaagaacagaatagtgagcacctagattgaataatcattaatgttttgccatatttgcttgatttttctttctacacacacacacayacacacacacatacacacacacacacagttttttgccaaatcatttgagagtatggtgcagattttgtgacactcctaaatata

SEQ ID NO: 175290 - DNA, 166 bp, Homo sapiens
gcgccaccgcaccgcagcctgggtgacagagcgagagagactcagtccaaaaaaaaaaagaaagaaaagaagaagaagaagaaaaaagaacgggcccaaatactgcattgtcgctsaacgttctcccaaaaggccagaaaccccctgactcaggtcaaggaggtgg

SEQ ID NO: 175291 - DNA, 369 bp, Homo sapiens
  misc_feature (1)...(369): n = A,T,C or G
cgagagagcgccaccgcaccgcagcctgggtgacagagcgagagagactcagtccaaaaaaaaaaagaaagaaaagaagaagaagaagaaaaaagaacgggcccaaatactgcattgtcgctcaacgttctcccaaaaggccagaaaccccctgactcaggtcaaggaggtggtgtttcgttttctctctccctctctctctccctcctctctctctctctctctctcccccncccccctccccatctctctctctctctctctcctctyttctccccccgaacttttatttgtcgttcaagcatacatgagcaagattgtgacataggtaaagttgtgacgggggtgttcagtgtgcagatgatttca

SEQ ID NO: 175292 - DNA, 369 bp, Homo sapiens
  misc_feature (1)...(369): n = A,T,C or G
cgagagagcgccaccgcaccgcagcctgggtgacagagcgagagagactcagtccaaaaaaaaaaagaaagaaaagaagaagaagaagaaaaaagaacgggcccaaatactgcattgtcgctcaacgttctcccaaaaggccagaaaccccctgactcaggtcaaggaggtggtgtttcgttttctctctccctctctctctccctcctctctctctctctctctctcccccncccccctccccatctctctctctctctctctcctcttttctccccccgaacttttatttgtcgttcaagcatacatgagcaagaytgtgacataggtaaagttgtgacgggggtgttcagtgtgcagatgatttca

SEQ ID NO: 175293 - DNA, 547 bp, Homo sapiens
atgagcaagattgtgacataggtaaasttgtgacgggggtgttcagtgtgcagatgatttcatcacccgggtagtcagtgctgtgtccgacagtattcgtgttttgttttttcctgaagctgtctctccttccacccctcctccctcaagcaggcttccgcgtccccggtccccctcgttctgcccatgcaagaactgtcatctgtaagttcccacttctagatgagaacacgcggtatttagccgatctttgctgtcatcttcggtggtggtggtggtgaaagaggcatgacactaaatcgacccttaagacgctcccctccgtccccaccccgcaccccctccccacacacaccctcattcccggaccccctcctcaaacgcaagaaaggaagaaatgaaagtaagaggtgagcctgcaaggcggtggaggcgggggatctcagagggcgagcaagcgatggcggtcgggggatgtgtcggctgaggtatcaaaaataggggacccagttttcagccccaacacaccccctaatcctcagccgca

SEQ ID NO: 175294 - DNA, 546 bp, Homo sapiens
tgagcaagattgtgacataggtaaagttgtgacgggggtgttcagtgtgcagatgatttcatcacccgggtagtcagtgctgtgtccgacagtattcgtgttttgttttttcctgaagctgtctctccttccacccctcctccctcaagcagrcttccgcgtccccggtccccctcgttctgcccatgcaagaactgtcatctgtaagttcccacttctagatgagaacacgcggtatttagccgatctttgctgtcatcttcggtggtggtggtggtgaaagaggcatgacactaaatcgacccttaagacgctcccctccgtccccaccccgcaccccctccccacacacaccctcattcccggaccccctcctcaaacgcaagaaaggaagaaatgaaagtaagaggtgagcctgcaaggcggtggaggcgggggatctcagagggcgagcaagcgatggcggtcgggggatgtgtcggctgaggtatcaaaaataggggacccagttttcagccccaacacaccccctaatcctcagccgca

SEQ ID NO: 175295 - DNA, 546 bp, Homo sapiens
tgagcaagattgtgacataggtaaagttgtgacgggggtgttcagtgtgcagatgatttcatcacccgggtagtcagtgctgtgtccgacagtattcgtgttttgttttttcctgaagctgtctctccttccacccctcctccctcaagcaggcttccgcgtccccggtccccctcgttctgcccatgcaagaactgtcatctgtaagttcccacttctagatgagaacacgcggtatttagccgatcyttgctgtcatcttcggtggtggtggtggtgaaagaggcatgacactaaatcgacccttaagacgctcccctccgtccccaccccgcaccccctccccacacacaccctcattcccggaccccctcctcaaacgcaagaaaggaagaaatgaaagtaagaggtgagcctgcaaggcggtggaggcgggggatctcagagggcgagcaagcgatggcggtcgggggatgtgtcggctgaggtatcaaaaataggggacccagttttcagccccaacacaccccctaatcctcagccgca

SEQ ID NO: 175296 - DNA, 561 bp, Homo sapiens
taaagttgtgacgggggtgttcagtgtgcagatgatttcatcacccgggtagtcagtgctgtgtccgacagtattcgtgttttgttttttcctgaagctgtctctccttccacccctcctccctcaagcaggcttccgcgtccccggtccccctcgttctgcccatgcaagaactgtcatctgtaagttcccacttctagatgagaacacgcggtatttagccgatctttgctgtcatcttcggtggtggtggtggtgaaagaggcatgacactaaatcgacccttargacgctcccctccgtccccaccccgcaccccctccccacacacaccctcattcccggaccccctcctcaaacgcaagaaaggaagaaatgaaagtaagaggtgagcctgcaaggcggtggaggcgggggatctcagagggcgagcaagcgatggcggtcgggggatgtgtcggctgaggtatcaaaaataggggacccagttttcagccccaacacaccccctaatcctcagccgcagccagcctctgggtggggttgcgcctgtcaaagctt

SEQ ID NO: 175297 - DNA, 561 bp, Homo sapiens
taaagttgtgacgggggtgttcagtgtgcagatgatttcatcacccgggtagtcagtgctgtgtccgacagtattcgtgttttgttttttcctgaagctgtctctccttccacccctcctccctcaagcaggcttccgcgtccccggtccccctcgttctgcccatgcaagaactgtcatctgtaagttcccacttctagatgagaacacgcggtatttagccgatctttgctgtcatcttcggtggtggtggtggtgaaagaggcatgacactaaatcgacccttaagacgctcccctccgtccccaccccgcaccccctccccacacacaccctcattcccgsaccccctcctcaaacgcaagaaaggaagaaatgaaagtaagaggtgagcctgcaaggcggtggaggcgggggatctcagagggcgagcaagcgatggcggtcgggggatgtgtcggctgaggtatcaaaaataggggacccagttttcagccccaacacaccccctaatcctcagccgcagccagcctctgggtggggttgcgcctgtcaaagctt

SEQ ID NO: 175298 - DNA, 286 bp, Homo sapiens
tccaagaaaattactttgatatgccctctcatattagaataaatacattatacatgcctattgcctacatcaagttttgaattgtaccactttcaggtttaacctggccatacagcagattttcttaatggttggtgaacacggaataatagtttattcagataaactattttgcagaaacatttaaaatcagawattgcagaactactgagtatctgaactttaaagggacactcttaaccatattttgttttatttagtactcacactgacaagttgatttacc

SEQ ID NO: 175299 - DNA, 286 bp, Homo sapiens
tccaagaaaattactttgatatgccctctcatattagaataaatacattatacatgcctattgcctacatcaagttttgaattgtaccactttcaggtttaacctggccatacagcagattttcttaatggttggtgaacacggaataatagtttattcagataaactattttgcagaaacatttaaaatcagatattgcagaactactgagtatctgaactttaaagggacactcttaaccatattttgttttatttagtactcacrctgacaagttgatttacc

SEQ ID NO: 175300 - DNA, 482 bp, Homo sapiens
tatctgaactttaaagggacactcttaaccatattttgttttatttagtactcacactgacaagttgatttaccacctcattttcccaacaagtgtcaagatttcaatatgcagttagtggtttctaaaaacgttgactatttaattacatccttatagtttcccaaaattgcttatagtttgccctcatttagttaggtctataatatttctcaattagtgtaaaaatttctatgcctttttaattatcratgcatataatgatgtataaaaattattatgtagatagctcctgcaagaaaacttaaaatcaagagcttttagcatcaaagtatcagaatacaaactaaagaaaacacaccaatttggaaagattttctttaaatacattaaagtgaataaaatgttcacagagaataactcacatctaaggatacagacgttttcttaaagtgaaactatttttggctcactcagactct

SEQ ID NO: 175301 - DNA, 482 bp, Homo sapiens
tatctgaactttaaagggacactcttaaccatattttgttttatttagtactcacactgacaagttgatttaccacctcattttcccaacaagtgtcaagatttcaatatgcagttagtggtttctaaaaacgttgactatttaattacatccttatagtttcccaaaattgcttatagtttgccctcatttagttaggtctataatatttctcaattagtgtaaaaatttctatgcctttttaattatcaatgcatataatgatgtataaaaattattatgtagatagctcctscaagaaaacttaaaatcaagagcttttagcatcaaagtatcagaatacaaactaaagaaaacacaccaatttggaaagattttctttaaatacattaaagtgaataaaatgttcacagagaataactcacatctaaggatacagacgttttcttaaagtgaaactatttttggctcactcagactct

SEQ ID NO: 175302 - DNA, 470 bp, Homo sapiens
tcatgagttcacttcagagtttgttcaagacatacgtttcgtaaggaaacatcttagttagaagttattcagcagtaggtaccatccctaagtatttttcaccaaatycgtgacaataaagagctatctaaccagaaaaattagcgagtaccggcaccatccatagggctttgtctttacgcttcattagcacttaccatgccttacaatgtctaggattgaccctgatagcatttcggaaacaagctaatgctttgtccagttcttcagtgaagacaagctcacgccctaatgcgctataggcataagcatcatttggatccacttcgagagttctctggaagaattgaatcgcaatatcgtgttcccgttgcagaccgaaacagttccctgcagcacaccaggcctctggctggcgaatttttatccatgtctgtgaagtctttggacagaactgaaagagcaacctc

SEQ ID NO: 175303 - DNA, 473 bp, Homo sapiens
actctgtaattctcaatcctcctaacctctgagaattgtctttcagcttgcgtggactctgaaagtttacaataggcccttccgattttggcacagtacccaaccggtattgcagtggtgagaagctagatggctcaagatactgatagcttctttgccgtggtaagaacacaaagctaaataacctttccccctttcacgaagaaggctcatcaagccttccgctgctgctttttgtagattaaaagcctgaatctgaggcgcgattgcggctattttcccttctgaaatgacggaagagtccaattttgtcacttccaggctatcacttatgttcggtggagttattgctcctttattagtttyacttttggttcttctgtttgggattttaggtggaaacttcatttttaattttctcctattctcctcggttgtggagctgtcactagtcaagagtcgtgaatttcttc

SEQ ID NO: 175304 - DNA, 441 bp, Homo sapiens
tgggtactggaagatttaaaagctgccccctccatctcaccacctacaaactctcacatgtcctggaagatggggggaccctctccaccatcaccacttggctgaaggtggtccagacgtgaarccaaggattccagggcgcatagcctcgggcaggactaatggacttaaaaaacacaggctcagcaaaatccacttcacaacccagatggttcacatcacaccctctttcagggacccagagcagccactggaagagaaggagtaggaacgctctcttaaagtccacttatcctattccttcacattaagaccaaagtccaatgtatttaggtaaaaaataatttcttttagaaaatgctaaggtttgtcttctgaaatttaataacagaaacaaaaaaagaacactagaagtaaggaagtgagaccagaaaacacaaa

SEQ ID NO: 175305 - DNA, 441 bp, Homo sapiens
tgggtactggaagatttaaaagctgccccctccatctcaccacctacaaactctcacatgtcctggaagatggggggaccctctccaccatcaccacttggctgaaggtggtccagacgtgaaaccaaggattccagggcgcatagcctcsggcaggactaatggacttaaaaaacacaggctcagcaaaatccacttcacaacccagatggttcacatcacaccctctttcagggacccagagcagccactggaagagaaggagtaggaacgctctcttaaagtccacttatcctattccttcacattaagaccaaagtccaatgtatttaggtaaaaaataatttcttttagaaaatgctaaggtttgtcttctgaaatttaataacagaaacaaaaaaagaacactagaagtaaggaagtgagaccagaaaacacaaa

SEQ ID NO: 175306 - DNA, 441 bp, Homo sapiens
tgggtactggaagatttaaaagctgccccctccatctcaccacctacaaactctcacatgtcctggaagatggggggaccctctccaccatcaccacttggctgaaggtggtccagacgtgaaaccaaggattccagggcgcatagcctcgggcaggactaatggacttaaaaaacacaggctcagcaaaatccacttcacaacccagatggtycacatcacaccctctttcagggacccagagcagccactggaagagaaggagtaggaacgctctcttaaagtccacttatcctattccttcacattaagaccaaagtccaatgtatttaggtaaaaaataatttcttttagaaaatgctaaggtttgtcttctgaaatttaataacagaaacaaaaaaagaacactagaagtaaggaagtgagaccagaaaacacaaa

SEQ ID NO: 175307 - DNA, 403 bp, Homo sapiens
tcacttgatgagtcttgcagtctacagagggggtagggaatggcaggagttggcataggagtgagaggggaggaggcaaggtgaggggggccaggtgaggagggtggcacttgaaggggagttcaagactagcctgggcaacatggtgagaccactgcccctcaccrccgccatatctgttctcactctggtctcacacacatgcacaaattaaatttaatttaaaaattaaaaaattgttttaaaataagtagagtatttacatggattatgtatacattcattttgtagaactatagatcccatgtaactgggaactctttactcttctaacacaacatttatttagccacaaataaaagaagaccagtgatgtagcctgtacacaaaaaagtaagaacac

SEQ ID NO: 175308 - DNA, 403 bp, Homo sapiens
tcacttgatgagtcttgcagtctacagagggggtagggaatggcaggagttggcataggagtgagaggggaggaggcaaggtgaggggggccaggtgaggagggtggcacttgaaggggagttcaagactagcctgggcaacatggtgagaccactgcccctcaccaccgccatatctgttctcactctggtctcacacacatgcacaaattaaatttaatttaaaaattaaaaarttgttttaaaataagtagagtatttacatggattatgtatacattcattttgtagaactatagatcccatgtaactgggaactctttactcttctaacacaacatttatttagccacaaataaaagaagaccagtgatgtagcctgtacacaaaaaagtaagaacac

SEQ ID NO: 175309 - DNA, 449 bp, Homo sapiens
tttgctcagcaagtcacttgatgagtcttgcagtctacagagggggtagggaatggcaggagttggcataggagtgagaggggaggaggcaaggtgaggggggccaggtgaggagggtggcacttgaaggggagttcaagactagcctgggcaacatggtgagaccactgcccctcaccaccgccatatctgttctcactctggtctcacacacatgcacaaattaaatttaatttaaaaattaaaaaattgttttaaaataagtagagtatttacatggattatgtatacattcattttgtagaactatagatcccatgtaactgggaactctttactcttctaacacaacatttatttagccacaaataaaagaagaccagtgatgtagcctgtacacaaaaaagtaagaamactctggttagtctggggcaggggtaggggaaaga

SEQ ID NO: 175310 - DNA, 553 bp, Homo sapiens
tacggggttaaggcaaaggggaaattggatccctgccaggtttccaataaagaggcttcctcaggattcaaactcatttcatgagaagagcctggccccatcaggcacctcagcaacttgtcaaacatgtctcctgcaaggactatcctgtgtgcaacactgctaagctcyttgttttgggcagcaccaggaggggagggtcatttcttcttctgagacatggtggttgggtccaggtgacatccacagtctgggccctgacccctttcactctcagcgggaccccttgagacaccagcttcccttccttgctcgggtgtccacaccagcagttctacctactacattattacagccagatcaggatcaatgtcctctctctggaataaatgcagtgaccactgttctttgagcattatttatcttaaattattgttttaattagaaatgtatttcacttatattagccaaatttcctttcaatctaaccaaatttcttttaagtgaaaattaaatatttaccttctgctatcaagcattctatgtacacaaa

SEQ ID NO: 175311 - DNA, 553 bp, Homo sapiens
tacggggttaaggcaaaggggaaattggatccctgccaggtttccaataaagaggcttcctcaggattcaaactcatttcatgagaagagcctggccccatcaggcacctcagcaacttgtcaaacatgtctcctgcaaggactatcctgtgtgcaacactgctaagctccttgttttgggcagcaccaggaggggagggtcatttcttcttctgagacatggtggttgggtccaggtgacatccacagtctgggccctgacccctttcactctcagcgggaccccttgagacaccagcttcccttccttgctygggtgtccacaccagcagttctacctactacattattacagccagatcaggatcaatgtcctctctctggaataaatgcagtgaccactgttctttgagcattatttatcttaaattattgttttaattagaaatgtatttcacttatattagccaaatttcctttcaatctaaccaaatttcttttaagtgaaaattaaatatttaccttctgctatcaagcattctatgtacacaaa

SEQ ID NO: 175312 - DNA, 492 bp, Homo sapiens
acaagcagaattctcttgagcaatctattttcttgatttttaaaagtcaatgtactctcaaagaaacaaaactmttattcgtggattctgttatttgaaaacatttactgatcatttaccttacaccaaatgatctccagctcgtggaaaaatatgtaaagttgcccagctgcattaagcttaaactcttctgaaggagaaaagaagcaatggagtagggacattaaagcaggagtgtggtgatatggctgagacttctacttgcacactgtggtagctgtgtggagaatggattgaaaaaagggcaatgacagaagcttaaattagtatcaaatatggcaatcctgtaaatttaggtgtccttgaaataagaatgtataatagttctcattatttccccaagaaatctctgcatttggccttgtgagggaagcgctatagttaccaagtggtgggggtgggaaggtgaatttgaaacaacatttggaatta

SEQ ID NO: 175313 - DNA, 492 bp, Homo sapiens
acaagcagaattctcttgagcaatctattttcttgatttttaaaagtcaatgtactctcaaagaaacaaaactattattcgtggattctgttatttgaaaacatttactgatcatttaccttacascaaatgatctccagctcgtggaaaaatatgtaaagttgcccagctgcattaagcttaaactcttctgaaggagaaaagaagcaatggagtagggacattaaagcaggagtgtggtgatatggctgagacttctacttgcacactgtggtagctgtgtggagaatggattgaaaaaagggcaatgacagaagcttaaattagtatcaaatatggcaatcctgtaaatttaggtgtccttgaaataagaatgtataatagttctcattatttccccaagaaatctctgcatttggccttgtgagggaagcgctatagttaccaagtggtgggggtgggaaggtgaatttgaaacaacatttggaatta

SEQ ID NO: 175314 - DNA, 492 bp, Homo sapiens
acaagcagaattctcttgagcaatctattttcttgatttttaaaagtcaatgtactctcaaagaaacaaaactattattcgtggattctgttatttgaaaacatttactgatcatttaccttacaccaartgatctccagctcgtggaaaaatatgtaaagttgcccagctgcattaagcttaaactcttctgaaggagaaaagaagcaatggagtagggacattaaagcaggagtgtggtgatatggctgagacttctacttgcacactgtggtagctgtgtggagaatggattgaaaaaagggcaatgacagaagcttaaattagtatcaaatatggcaatcctgtaaatttaggtgtccttgaaataagaatgtataatagttctcattatttccccaagaaatctctgcatttggccttgtgagggaagcgctatagttaccaagtggtgggggtgggaaggtgaatttgaaacaacatttggaatta

SEQ ID NO: 175315 - DNA, 475 bp, Homo sapiens
gcagaattctcttgagcaatctattttcttgatttttaaaagtcaatgtactctcaaagaaacaaaactattattcgtggattctgttatttgaaaacatttactgatcatttaccttacaccaaatgatctccagctcgtggaaaaatatgtaaagttgcccagctgcattaagcttaaactcttctgaaggagaaaagaagcaatggartagggacattaaagcaggagtgtggtgatatggctgagacttctacttgcacactgtggtagctgtgtggagaatggattgaaaaaagggcaatgacagaagcttaaattagtatcaaatatggcaatcctgtaaatttaggtgtccttgaaataagaatgtataatagttctcattatttccccaagaaatctctgcatttggccttgtgagggaagcgctatagttaccaagtggtgggggtgggaaggtgaatttgaaaca

SEQ ID NO: 175316 - DNA, 475 bp, Homo sapiens
gcagaattctcttgagcaatctattttcttgatttttaaaagtcaatgtactctcaaagaaacaaaactattattcgtggattctgttatttgaaaacatttactgatcatttaccttacaccaaatgatctccagctcgtggaaaaatatgtaaagttgcccagctgcattaagcttaaactcttctgaaggagaaaagaagcaatggagtagggacattaaagcaggagtgtggtgatatggctgagacttctacttgcacactgtggtagctgtgtggagaatggattgaaaaaagggcaatgacagaagcttaarttagtatcaaatatggcaatcctgtaaatttaggtgtccttgaaataagaatgtataatagttctcattatttccccaagaaatctctgcatttggccttgtgagggaagcgctatagttaccaagtggtgggggtgggaaggtgaatttgaaaca

SEQ ID NO: 175317 - DNA, 515 bp, Homo sapiens
aatgtgtgtgtgtgtgtgtgtgtgtgtgtgtgtgtstgtctgtgtgtgtttgtgtgtgtgtgaagcagggagagagagcaagagtgaaagtgagcaagagagagaggagagagagagagagaatcagacagatacagaaaaagattgacagagctgcagagacagaattaaaaggggacaccaagaatattgagctgagaaactataaaatgggagtagccgttaaacagaatggggaagagcaaatttggggagtttcagtggctcaatatagacatattaattttgagattcctaactgacatccacgtggataagtcagggagtgttgggtgtagtgtccagtgtttaggtgtaataagaaatatcaggaaattaatgacacaaacattagtaagaaagcaaagataagaagtcgaagtcctgagcctaatggtcctctaatatttaaaaaatagaaaagatgaaacctgcaataaaggactaggggtaattatccaaaacatggtgggggg

SEQ ID NO: 175318 - DNA, 515 bp, Homo sapiens
aatgtgtgtgtgtgtgtgtgtgtgtgtgtgtgtgtctgtctgtgtgtgtttgtgtgtgtgtgaagcagggagagagagcaagagtgaaagtgagcaagagagagaggagagagagagagagaatcagacagatacagaaaaagattgacagagctgcagagacagaattaaaaggggacaccaagaatattgagctgagaaactataaaatgggagtwgccgttaaacagaatggggaagagcaaatttggggagtttcagtggctcaatatagacatattaattttgagattcctaactgacatccacgtggataagtcagggagtgttgggtgtagtgtccagtgtttaggtgtaataagaaatatcaggaaattaatgacacaaacattagtaagaaagcaaagataagaagtcgaagtcctgagcctaatggtcctctaatatttaaaaaatagaaaagatgaaacctgcaataaaggactaggggtaattatccaaaacatggtgggggg

SEQ ID NO: 175319 - DNA, 593 bp, Homo sapiens
ttgcaatccccgatccccatcacgaatggggttcaacgggttacccgcgcctgccggcgtagggtargcacacgctgagccagtcagtgtagcgcgcgtgcagccccggacatctaagggcatcacagacctgttattgctcaatctcgggtggctgaacgccacttgtccctctaagaagttgggggacgccgaccgctcgggggtcgcgtaactagttagcatgccagagtctcgttcgttatcggaattaaccagacaaatcgctccaccaactaagaacggccatgcaccaccacccacggaatcgagaaagagctatcaatctgtcaatcctgtccgtgtccgggccgggtgaggtttcccgtgttgagtcaaattaagccgcaggctccactcctggtggtgcccttccgtcaattcctttaagtttcagctttgcaaccatactccccccggaacccaaagactttggtttcccggaagctgcccggcgggtcatgggaataacgccgccgcatcgccggtcggcatcgtttatggtcggaactacgacggtatctgatcgtcttcgaacctccgactttcgttct

SEQ ID NO: 175320 - DNA, 477 bp, Homo sapiens
cccacggaatcgagaaagagctatcaatctgtcaatcctgtccgtgtccgggccgggtgaggtttcccgtgttgagtcaaattaagccgcaggctccactcctggtggtgcccttccgtcaatycctttaagtttcagctttgcaaccatactccccccggaacccaaagactttggtttcccggaagctgcccggcgggtcatgggaataacgccgccgcatcgccggtcggcatcgtttatggtcggaactacgacggtatctgatcgtcttcgaacctccgactttcgttcttgattaatgaaaacattcttggcaaatgctttcgctctggtccgtcttgcgccggtccaagaatttcacctctagcggcgcaatacgaatgcccccggccgtccctcttaatcatggcctcagttccgaaaaccaacaaaatagaaccgcggtcctattccattattcctagctgcggtatc

SEQ ID NO: 175321 - DNA, 413 bp, Homo sapiens
cgctgagccagtcagtgtagcgcgcgtgcagccccggacatctaagggcatcacagacctgttattgctcaatctcgggtggctgaacgccacttgtccctctaagaagttgggggacgccgaccgctcgggggtcgcgtaactagttagcatgccagagtctcgttcgttatcggaattaaccagacaaatcgctccaccaactaagaacggccatgcaccaccacccacggaatcgagaaagagctatcaatctgtcaatcctgtccgtgtccgggccgggtgaggtttcccgtgttgagtcaaattaagccgcaggctccactcctggtggtgcccttccgtcaattcctwtaagtttcagctttgcaaccatactccccccggaacccaaagactttggtttcccggaa

SEQ ID NO: 175322 - DNA, 343 bp, Homo sapiens
acgcatcccccccgcgaagggggtcagcgcccgtcggcatgtattagctctagaattaccacagttatccaagtaggagaggagcgagcgaccaaaggaaccataactgatttaatgagccattcgcagtttcactgtaccggccgtgcgtacttagacatgcatggcttaatctttgagacaagcatatgctactggcaggatcaaccaggtaggtaaggtagagcgcgkcgaggccccgacgcggccggacggccggccggggggcctcgcgaggacgggcccggcgccccgcaagcgaggaggacgacggacggacggacgggccgcggacgggcggacg

SEQ ID NO: 175323 - DNA, 560 bp, Homo sapiens
tcactcttgtttccacggctagagtgcaatggcgcgrtcttggctcaccgcaccttccgcctcccgggttcgagcgcttctcctgcctcagcctcccgattagcggggattacagggaggcacccccacgcctggcttggctgatgtttgtgtttttagtaggcacgccgtgtctctccatgttgctcaggctggtctccaactcccgacctcctgtgatgcgcccacctcggcctctcgaagtgctgggatgacgggcgtgagccaccgtgcccggcctgttgactcatttcgcttttttatttctttcgtttccacgcgtttacttatatgtattaatgtaaacgtttctgtacgcttatatgcaaacaacgacaacgtgtatctctgcgttgaatactcttgcgtatggtaaatacgtatcggttgtatggaaatagacttctgtatgatagatgtaggtgtttgtgttatacaaataaatacacatcgctctataaagaagggatcgtcgataaagacgtttactttacgtatgaaaagcctcgtatttatgtgtg

SEQ ID NO: 175324 - DNA, 634 bp, Homo sapiens
ttctttcttccttccttccttccttcctttctttctttctgtttcgtccttttgagacagagtttcactcttgtttccacggctagagtgcaatggcgcggtcttggctcaccgcaccttccgcctcccgggttcgagcgcttctcctgcctcagcctcccgattagcggggattacagggaggcacccccacgcctggcttggctgatgtttgtgtttttagtaggcacgccgtgtctctccatgttgctcaggctggtctccaactcccgacctcctgtgatgcgcccacctcggcctctcgaagtgctgggatgacgggcgtgagccaccgtgcccggcctgttgactcatttcgcttttttatttctttcgtttccacgcgtttacttataygtattaatgtaaacgtttctgtacgcttatatgcaaacaacgacaacgtgtatctctgcgttgaatactcttgcgtatggtaaatacgtatcggttgtatggaaatagacttctgtatgatagatgtaggtgtttgtgttatacaaataaatacacatcgctctataaagaagggatcgtcgataaagacgtttactttacgtatgaaaagcctcgtatttatgtgtgtaaatgaacg

SEQ ID NO: 175325 - DNA, 634 bp, Homo sapiens
ttctttcttccttccttccttccttcctttctttctttctgtttcgtccttttgagacagagtttcactcttgtttccacggctagagtgcaatggcgcggtcttggctcaccgcaccttccgcctcccgggttcgagcgcttctcctgcctcagcctcccgattagcggggattacagggaggcacccccacgcctggcttggctgatgtttgtgtttttagtaggcacgccgtgtctctccatgttgctcaggctggtctccaactcccgacctcctgtgatgcgcccacctcggcctctcgaagtgctgggatgacgggcgtgagccaccgtgcccggcctgttgactcatttcgcttttttatttctttcgtttccacgcgtttacttatatgtattaatgtaaacgtttctgtacgcttatatgcaaacaacgacaacgtgtatctctgcrttgaatactcttgcgtatggtaaatacgtatcggttgtatggaaatagacttctgtatgatagatgtaggtgtttgtgttatacaaataaatacacatcgctctataaagaagggatcgtcgataaagacgtttactttacgtatgaaaagcctcgtatttatgtgtgtaaatgaacg

SEQ ID NO: 175326 - DNA, 562 bp, Homo sapiens
aactgcctgtccaagtgttgcgccacaacacttggacctcgtcctagtttatgtcacagacagcccgagaccgttcttacggaaacaccccaggacaccgtcgaatgaaacggatggaatttagaatcttccaattcaaagtactccttgaatacagactccccagtgtcttctatcgattcagctgtcctttcacctgatactgtcccactgggaacaggaacttccatatgatctaaacaggttcaacataaaccaaaaactggtcgaagtttattaggaggaccagcagctgttagtccattaaccccaagtgttggcattttgccattagaaaccccaagtcccggagacggaccctattgacaaaactgcactggtatgagacaccgtctgtcaytgacgtgccatccaccggagccccttcaaaaaagcctgttgccagaatcggccaaaccggaacaccgtctgtcttctcgcagaggggaaagagccgaaaggtaactccagtccttgcaaaaacacaaagttctggtccgccgacaagggcaacacctcaggt

SEQ ID NO: 175327 - DNA, 562 bp, Homo sapiens
aactgcctgtccaagtgttgcgccacaacacttggacctcgtcctagtttatgtcacagacagcccgagaccgttcttacggaaacaccccaggacaccgtcgaatgaaacggatggaatttagaatcttccaattcaaagtactccttgaatacagactccccagtgtcttctatcgattcagctgtcctttcacctgatactgtcccactgggaacaggaacttccatatgatctaaacaggttcaacataaaccaaaaactggtcgaagtttattaggaggaccagcagctgttagtccattaaccccaagtgttggcattttgccattagaaaccccaagtcccggagacggaccctattgacaaaactgcactggtatgagacaccgtctgtcattgacgtgccatccaccggagccccttcaraaaagcctgttgccagaatcggccaaaccggaacaccgtctgtcttctcgcagaggggaaagagccgaaaggtaactccagtccttgcaaaaacacaaagttctggtccgccgacaagggcaacacctcaggt

SEQ ID NO: 175328 - DNA, 578 bp, Homo sapiens
tttatatgttatttttatttaagaatacaattaaaatgaaatgattaatctatcattgtttgcataaattgaatgactacataagaaaaacatatgtacataataaaatatatagataataaaatctggaaacagataaaaatattccctttttacttctgaagaggctaaaagttcaaagaagataacaatacactcaataatgatwaaaaatagaaagtaagaaattatttttaatattgtaagattcatattcctgtcttcccaaggattatttctttattaataaactttactagaagttttgtacatgcttactgcagcaatcacagataagaaaaaggaaaagaactttacttaaaatacaaatgctcagaaattacaaattttatattttgtacatattttttgataaaacaagaccatagtatgtttgtatgtataacttaattgatttttttctcactagctataacaaaatacatcttcgcacatcaatatacttctgtatctattgccaccttcaatggtcacatattattccatcctgtggatgcaactgaagtttatttatggga

SEQ ID NO: 175329 - DNA, 578 bp, Homo sapiens
tttatatgttatttttatttaagaatacaattaaaatgaaatgattaatctatcattgtttgcataaattgaatgactacataagaaaaacatatgtacataataaaatatatagataataaaatctggaaacagataaaaatattccctttttacttctgaagaggctaaaagttcaaagaagataacaatacactcaataatgattaaaaatagaaagtragaaattatttttaatattgtaagattcatattcctgtcttcccaaggattatttctttattaataaactttactagaagttttgtacatgcttactgcagcaatcacagataagaaaaaggaaaagaactttacttaaaatacaaatgctcagaaattacaaattttatattttgtacatattttttgataaaacaagaccatagtatgtttgtatgtataacttaattgatttttttctcactagctataacaaaatacatcttcgcacatcaatatacttctgtatctattgccaccttcaatggtcacatattattccatcctgtggatgcaactgaagtttatttatggga

SEQ ID NO: 175330 - DNA, 578 bp, Homo sapiens
tttatatgttatttttatttaagaatacaattaaaatgaaatgattaatctatcattgtttgcataaattgaatgactacataagaaaaacatatgtacataataaaatatatagataataaaatctggaaacagataaaaatattccctttttacttctgaagaggctaaaagttcaaagaagataacaatacactcaataatgattaaaaatagaaagtaagaaattatttttaatattgtaagattcatattcctgtcttcccaaggattatttmtttattaataaactttactagaagttttgtacatgcttactgcagcaatcacagataagaaaaaggaaaagaactttacttaaaatacaaatgctcagaaattacaaattttatattttgtacatattttttgataaaacaagaccatagtatgtttgtatgtataacttaattgatttttttctcactagctataacaaaatacatcttcgcacatcaatatacttctgtatctattgccaccttcaatggtcacatattattccatcctgtggatgcaactgaagtttatttatggga

SEQ ID NO: 175331 - DNA, 578 bp, Homo sapiens
tttatatgttatttttatttaagaatacaattaaaatgaaatgattaatctatcattgtttgcataaattgaatgactacataagaaaaacatatgtacataataaaatatatagataataaaatctggaaacagataaaaatattccctttttacttctgaagaggctaaaagttcaaagaagataacaatacactcaataatgattaaaaatagaaagtaagaaattatttttaatattgtaagattcatattcctgtcttcccaaggattatttctttattaataaactttactagaagttttgtacatgcttactgcagcaatcacasataagaaaaaggaaaagaactttacttaaaatacaaatgctcagaaattacaaattttatattttgtacatattttttgataaaacaagaccatagtatgtttgtatgtataacttaattgatttttttctcactagctataacaaaatacatcttcgcacatcaatatacttctgtatctattgccaccttcaatggtcacatattattccatcctgtggatgcaactgaagtttatttatggga

SEQ ID NO: 175332 - DNA, 417 bp, Homo sapiens
tgatttgaaagaattccctgtcaaatgaaaacgtacttttcatctaatgtgtatatataactgatatatatgacatattatatctggtatatatgtatacgtatcagttatatatatatatrtatatataacttatgatatataataaacaacataggccgggcgcggtggctcacacctgtaatcccagcactttgggaggcggaggcgggcagatcacttgaggtcaggagttcgagaccagcctggccaacgtggtgaaaccccctctctactaaatatacaaaaattagccaggcacgctggcacctgcctgtaatccaagctacttgggaggctgaggtaggagaattgcttgaacccggcaggcagaggttgcagtgagccaagattgtgccattggacaccagcctgggc

SEQ ID NO: 175333 - DNA, 427 bp, Homo sapiens
gaaagaattccctgtcaaatgaaaacgtacttttcatctaatgtgtatatataactgatatatatgacatattatatctggtatatatgtatacgtatcagttatatatatatatatatatataacttatgatatataataaacaacataggcygggcgcggtggctcacacctgtaatcccagcactttgggaggcggaggcgggcagatcacttgaggtcaggagttcgagaccagcctggccaacgtggtgaaaccccctctctactaaatatacaaaaattagccaggcacgctggcacctgcctgtaatccaagctacttgggaggctgaggtaggagaattgcttgaacccggcaggcagaggttgcagtgagccaagattgtgccattggacaccagcctgggcaaagaagtgagactcc

SEQ ID NO: 175334 - DNA, 417 bp, Homo sapiens
tgatttgaaagaattccctgtcaaatgaaaacgtacttttcatctaatgtgtatatataactgatatatatgacatattatatctggtatatatgtatacgtatcagttatatatatatatatatatataacttatgatatataataaacaacataggccgggcgcggkggctcacacctgtaatcccagcactttgggaggcggaggcgggcagatcacttgaggtcaggagttcgagaccagcctggccaacgtggtgaaaccccctctctactaaatatacaaaaattagccaggcacgctggcacctgcctgtaatccaagctacttgggaggctgaggtaggagaattgcttgaacccggcaggcagaggttgcagtgagccaagattgtgccattggacaccagcctgggc

SEQ ID NO: 175335 - DNA, 427 bp, Homo sapiens
gaaagaattccctgtcaaatgaaaacgtacttttcatctaatgtgtatatataactgatatatatgacatattatatctggtatatatgtatacgtatcagttatatatatatatatatatataacttatgatatataataaacaacataggccgggcgcggtggctcacacctgtaatcccagcactttgggaggcggaggcgggcagatcacttgaggtcaggagttcgagaccagcctggccaacgtggtgaaaccccctctctactaaatatacaaaaattagccaggcacgctggcacctgcctrtaatccaagctacttgggaggctgaggtaggagaattgcttgaacccggcaggcagaggttgcagtgagccaagattgtgccattggacaccagcctgggcaaagaagtgagactcc

SEQ ID NO: 175336 - DNA, 486 bp, Homo sapiens
ttgcgtatggtaaatacgtatcggttgtatggaaatagacttctgtatgatagatgtaggtgtttgtgtyatacaaataaatacacatcgctctataaagaagggatcgtcgataaagacgtttattttacgtatgaaaagcgtcgtatttatgtgtgtaaatgaacgagcgtacgtagttatctctgttttctttcttcctctccttcgtgtttttcttccttcctttcttcctttctctccttctttaggtttttcttcctctcttcctttccttctttctctctttctgtccttttttccttcgtgctttatttctctttcgttccctgtgtttccttcttttttctttcctctctgtttctttttcccttctttccttcgtttctttcctcattctttctctctttttcgtgtttctttccttcccgtctgtcttttaaaaaatggagtgtttcagaagtttactttgtgtatctacgtttt

SEQ ID NO: 175337 - DNA, 360 bp, Homo sapiens
ctacgcattctgcctctccgtgtgtctgcagcgacccgcgacagagtccgtgtgtgttctttctccctccctccctccctccctccctccctccgtgcttcagagaggcatctccaaacacccacgcgccgtgggttgtcttctgactctgtcgcggtcgaggcagagacgcgttttgggcaccgtttgtgtggggtkggggcagaggggctgcgttttcggcctcgggaagagcttctcgactcacggtttcgctttcgcggtccacgggccgccctgccagccggatctgtctcgctgacgtccgcggcggttgtcgggctccatctggcggccgctttgagatcgtgctctcggctt

SEQ ID NO: 175338 - DNA, 555 bp, Homo sapiens
agccggggaccgtcccgcccccgtcccccgggtgccggggagcggtccccgggccgggccgcggtccctctgccgcgatcctttctggcgagtccccgtgcggagtcggagagcgctccctgagcgcgcgtgcggcccgagaggtcgcgcctggccggccttcggtccctcgtgtgtcccggtcgtaggaggggccggccgaaaatgcttccggctcccgctctggagacacgggccggccccctgcgtgtggcacgggcggccgggagggcgtcccyggcccggcgctgctcccgcgtgtgtcctggggttgaccagagggccccgggcgctccgtgtgtggctgcgatggtggcgtttttggggacaggtgtccgtgtcgcgcgtcgcctgggccggcggcgtggtcggtgacgcgacctcccggccccgggggaggtatatctttcgctccgagtcggcattttgggccgccgggttattgctgacacgctgtcctctggcgacctgtcgctggagaggttgggcctccggatgcgcgcggggctctggcct

SEQ ID NO: 175339 - DNA, 489 bp, Homo sapiens
gtccccgtggggagccggggaccgtcccgcccccgtcccccgggtgccggggagcggtccccgggccgggccgcggtccctctgccgcgatcctttctggcgagtccccgtgcggagtcggagagcgctccctgagcgcgcgtgcggcccgagaggtcgcgcctggccggccttcggtccctcgtgtgtcccggtcgtaggaggggccggccgaaaatgcttccggctcccgctctggagacacgggccggccccctgcgtgtggcacgggcggccgggagggcgtccccggcccggcgctgctcccgcgtgtgtcctggggttgaccagagggccccgggcgctccgtgtgtggctgcgatggtggcgtttttggggacaggtgtccgtgycgcgcgtcgcctgggccggcggcgtggtcggtgacgcgacctcccggccccgggggaggtatatctttcgctccgagtcggcattttgggccgccgg

SEQ ID NO: 175340 - DNA, 555 bp, Homo sapiens
agccggggaccgtcccgcccccgtcccccgggtgccggggagcggtccccgggccgggccgcggtccctctgccgcgatcctttctggcgagtccccgtgcggagtcggagagcgctccctgagcgcgcgtgcggcccgagaggtcgcgcctggccggccttcggtccctcgtgtgtcccggtcgtaggaggggccggccgaaaatgcttccggctcccgctctggagacacgggccggccccctgcgtgtggcacgggcggccgggagggcgtccccggcccggcgctgctcccgcgtgtgtcctggggttgaccagagggccccgggcgctccgtgtgtggctgcgatggtggcgtttttggggacaggtgtccgtgtcgcgcgtcgcctgggccggcggcgtggtcggtgacgcgacctcccggccccgggggaggtatatctttcgctccgagtcggcattttgggccgccgggttattgctgacacgctgtcctctggcgacctgtcgctggagaggttgggcctcyggatgcgcgcggggctctggcct

SEQ ID NO: 175341 - DNA, 341 bp, Homo sapiens
cgggttattgctgacacgctgtcctctggcgacctgtcgctggagaggttgggcctccggatgcgcgcggggctctggcctaccggtgacccggctagccggccgcgctcctgcttgagccgcctgccggggcccgcgggcctgctgctctctcgcgcgtccgagcgtcccgactcccggtgccggcccgggtccgggtctctgrcccacccgggggcggcggggaaggcggcgagggccaccgtgcccccgtgcgctctccgctgcgggcgcccggggcggccgcgacaaccccaccccgctggctccgtgccgtgcgtgtcaggcgttctcgtctccgc

SEQ ID NO: 175342 - DNA, 582 bp, Homo sapiens
atgtcattatcacacatatcttcttaaacacaaagcacatgcactgaggcttttttttataatataacaaaatccagtgcataattatgttcacttccctaggtataaacagtcataatatttatcgcataattaaacaggcaagatttactcctttgggcatctaccagaacatatttaaatgttgtctttgaattgtgctatatacacaaatgtactttgtatttaagaaaaaaatggcttatccctaatcttctcaacaaaatcaagagaataaaataacgtaattkttcatctttagcttgcatgtggagaaactgaatataacttttaatttagtgggtgcccttgggtcactaatgagtcagaaataaaataaaaaacttaatttccattctgctgatttttaatgccgttatgtccaactcccaaagacttaataataaaacatcaacaaagtcacttgtaggtaataacattcttcaatgcttctgtgtatcttcctctagggataaacaggcatatctacatgtatttagtaataattctaaattgcacaaaagaaatagccctgatatcact

SEQ ID NO: 175343 - DNA, 447 bp, Homo sapiens
gatttaatttttcccaaaatgatgtatttctctgcctgatttttaaaaatacttaattatcataatctaagctccttactcatttccattgatctgttgtttttgtttcggtgccaaatgcacactgttttaattactgtgacattgtgagtttccctggtttgatttcactattcttaarctactttcagactactactgacacaatcattttttgatgtaaaatataccaccactttgtcaagttctcaaaaaatgcactatgatttcatctgggattgcatccaattttccattaaccacagtctccacattaaccgacatgttatcttaatagtgtgcacatttcctcactggaaaaccactggaatattcctaatggaatatttttgcatttattaaagtgtcttttatgtcctttaagaaagtttcaggatgtactccata

SEQ ID NO: 175344 - DNA, 447 bp, Homo sapiens
gatttaatttttcccaaaatgatgtatttctctgcctgatttttaaaaatacttaattatcataatctaagctccttactcatttccattgatctgttgtttttgtttcggtgccaaatgcacactgttttaattactgtgacattgtgagtttccctggtttgatttcactattcttaaactactttcagactactactgacacaatcattttttgatgtaaaatataccaccactttgtcaagttctcaaaaaatgcamtatgatttcatctgggattgcatccaattttccattaaccacagtctccacattaaccgacatgttatcttaatagtgtgcacatttcctcactggaaaaccactggaatattcctaatggaatatttttgcatttattaaagtgtcttttatgtcctttaagaaagtttcaggatgtactccata

SEQ ID NO: 175345 - DNA, 447 bp, Homo sapiens
gatttaatttttcccaaaatgatgtatttctctgcctgatttttaaaaatacttaattatcataatctaagctccttactcatttccattgatctgttgtttttgtttcggtgccaaatgcacactgttttaattactgtgacattgtgagtttccctggtttgatttcactattcttaaactactttcagactactactgacacaatcattttttgatgtaaaatataccaccactttgtcaagttctcaaaaaatgcactakgatttcatctgggattgcatccaattttccattaaccacagtctccacattaaccgacatgttatcttaatagtgtgcacatttcctcactggaaaaccactggaatattcctaatggaatatttttgcatttattaaagtgtcttttatgtcctttaagaaagtttcaggatgtactccata

SEQ ID NO: 175346 - DNA, 447 bp, Homo sapiens
gatttaatttttcccaaaatgatgtatttctctgcctgatttttaaaaatacttaattatcataatctaagctccttactcatttccattgatctgttgtttttgtttcggtgccaaatgcacactgttttaattactgtgacattgtgagtttccctggtttgatttcactattcttaaactactttcagactactactgacacaatcattttttgatgtaaaatataccaccactttgtcaagttctcaaaaaatgcactatgatttcatctgggattgcatccaattttccattaaccacagtctccacattaaccgacatgttatcttaatagtgtgcacwtttcctcactggaaaaccactggaatattcctaatggaatatttttgcatttattaaagtgtcttttatgtcctttaagaaagtttcaggatgtactccata

SEQ ID NO: 175347 - DNA, 555 bp, Homo sapiens
aaataaatataaaagtgctttgccacttttaaatgctttataaggatttttttttgttttttgtttaaataggaatgattattagtatacctcaatcaagaggggtaygttagcattactgattacaaaattatttatttatgtatttacttatttattttttgagatggagtctcactctgttgcccatgctggagtgcaatgggacaatcttggctcactgcagcctccgcatcctgggttcaagtgattctcctgcctcagcctcccaagtagctgggattacaggtgcgtgccaccatgcccggctaatttttgtacttttagtaaagaccgggtttcaccatgttggccaggatggtcttgaactcctaacctcaggtgatctgcccaccttgggctctcaacgtgctggggttacaggcatgaaccaccacacctggccaattacaaaacaatttaaattacattgaatatttttcttcaccttctttctacatggactaaataacttctcatattttctttgagattccatgatataatcatttggtc

SEQ ID NO: 175348 - DNA, 555 bp, Homo sapiens
aaataaatataaaagtgctttgccacttttaaatgctttataaggatttttttttgttttttgtttaaataggaatgattattagtatacctcaatcaagaggggtatgttascattactgattacaaaattatttatttatgtatttacttatttattttttgagatggagtctcactctgttgcccatgctggagtgcaatgggacaatcttggctcactgcagcctccgcatcctgggttcaagtgattctcctgcctcagcctcccaagtagctgggattacaggtgcgtgccaccatgcccggctaatttttgtacttttagtaaagaccgggtttcaccatgttggccaggatggtcttgaactcctaacctcaggtgatctgcccaccttgggctctcaacgtgctggggttacaggcatgaaccaccacacctggccaattacaaaacaatttaaattacattgaatatttttcttcaccttctttctacatggactaaataacttctcatattttctttgagattccatgatataatcatttggtc

SEQ ID NO: 175349 - DNA, 555 bp, Homo sapiens
aaataaatataaaagtgctttgccacttttaaatgctttataaggatttttttttgttttttgtttaaataggaatgattattagtatacctcaatcaagaggggtatgttagcattactgattacaaaattatttatttatgtatttacttatttattttttgagatggagtctcactctgttgcccatgctggagtgcaatgggacaatcttggctcactgcagcctccgcatcctgggttcaagtgattctcctgcctcagcctcccaagtagctgggattacaggtgcrtgccaccatgcccggctaatttttgtacttttagtaaagaccgggtttcaccatgttggccaggatggtcttgaactcctaacctcaggtgatctgcccaccttgggctctcaacgtgctggggttacaggcatgaaccaccacacctggccaattacaaaacaatttaaattacattgaatatttttcttcaccttctttctacatggactaaataacttctcatattttctttgagattccatgatataatcatttggtc

SEQ ID NO: 175350 - DNA, 584 bp, Homo sapiens
ctcatgtcatgtctcttgtattccctttgctrgaaacacacactcccagacccctctgcagctacaggtagtcatgtgaccttgctctggccagcagacataagggggaactcagttcagaagaaagatcccacctacttctgactcttccttcctgttaagaatgcagctgtatgagtagccttgtagttatctgtgaccataaaacaaccagcattgaaatgggaagggccctcattgaagcagaatggagagaatccggggccttgacgccactgatgagctaaataaccctgttaacattgacttcttaatcttcttttgtgttttaagccactacagcttggattcctgtgcttgcagtctattggatcctaaaaatcctgataaactgtcctattgatttatttctgggcaattttaggaaaggctttttattcatacaatgccttgacattgatatttcattactttgcagtaaatactgaaattattgagcattcccagtatatatatatatatattttcctgtctgcaagaaggagaaaataccttaagtatcttaagtttcttttgctttcatg

SEQ ID NO: 175351 - DNA, 576 bp, Homo sapiens
ttttttagtgctttctcatatgacaacaattgtgtttccactttctctaaaaagaatagaataattttatctttcctctaacatggttggttgaattttttaaattatactttaagttgtgggatacatgtgcagaacgtgcaggtttgttacataggtatacacgtgccatggtggtttgctgcacccatcaacctgtcatatacattaggtatttctcataatgctctccctcccatagtccccccacccccgacaggccccagtatgtgatgttcccctccctgtgtcatagttggtgttttttacaacatgagaagttcacayacagatgtaccttttttttgcaatactaccataggtagtgtgccttacaaacatataaattctgatgaattccatttcatactgttttcacttaaaatgtaaagtgaatttataatttcctaggctaaattatatttctgcaaaaagtgagagattaggtaaacctgcctgaggttacacagctggcagattgctgcactgggattccgttcctgacagctggcattcatcatgactcacgttcctacc

SEQ ID NO: 175352 - DNA, 572 bp, Homo sapiens
ttgtatatattgtgaaatcacaaatatatttstatagattgtgaaaacacaagatatacacatttgtatagattgtgaaaacacacacacacacacaaagctaattagcatttccgagaaaagttacctcttttgtggtaagaagcatttaaaatctaactttattgagcttcaagataatcaatttagacctccatgtagaattccttactcaggggagataggccaggagggagctggagatgtcctgtgctaagtcctgattatccatcatccaagtgagctagtctgtgtcctggggtcaggagcaggcaccagagtcctggcacctttagtccctctaccgacttcatccaccagtatcgtatcaccaacaaacgaagtgaaaacaggaatcccacagacctctggggcaaaatcaacatgtagctccttccttttccctttagggttcatttagaaatgactggcaatgcagacgcactctgtattccaccatatgtcagtgatttgaagacacaggtttttcacatctcaatggctctaaaatctagatgcatcttacgattgat

SEQ ID NO: 175353 - DNA, 572 bp, Homo sapiens
ttgtatatattgtgaaatcacaaatatatttgtatagattgtgaaaacacaagatatacacatttgtatagattgtgaaaacacacacacacacacaaagctaattagcatttccgagaaaagttacctcttttgtggtaagaagcatttaaaatctaactttattgagcttcaagataatcaatttagacctccatgtagaattccttactcaggggagataggccaggagggagctggagatgtcytgtgctaagtcctgattatccatcatccaagtgagctagtctgtgtcctggggtcaggagcaggcaccagagtcctggcacctttagtccctctaccgacttcatccaccagtatcgtatcaccaacaaacgaagtgaaaacaggaatcccacagacctctggggcaaaatcaacatgtagctccttccttttccctttagggttcatttagaaatgactggcaatgcagacgcactctgtattccaccatatgtcagtgatttgaagacacaggtttttcacatctcaatggctctaaaatctagatgcatcttacgattgat

SEQ ID NO: 175354 - DNA, 450 bp, Homo sapiens
cttgaaaccaataaacatgagttcttttgtattatgggtaaaaaaaagaaatgttgttgtatatatacaccatgcaatactatgcaaccctaaatggaakgaaattatgtcctttgcagcaacatggatagagctagaggccattatcctgagtgaactaactcagaaacagaaaatcaactaccacaggttctcacgtataagtgggagctaaacaggaggtatatatagtgatatggtttgtctgtgtccccacccaaatctcatcttgaattgtagctgctgtaactcccccatatggtggaagtgacctagtgggagagaagcgcatgatgggggcagttcccttcacactgttccagtggtagtgaatatgtctcatgagatctgatggttttataaatgggagttcctctgcacaagctctctcttgcccaccaccatgtaaga

SEQ ID NO: 175355 - DNA, 450 bp, Homo sapiens
cttgaaaccaataaacatgagttcttttgtattatgggtaaaaaaaagaaatgttgttgtatatatacaccatgcaatactatgcaaccctaaatggaaggaaattatgtcctttgcagcaacatggatagagctagaggccattatcctgagtgaactaactcagaaacagaaaatcaactaccacaggttctcacgtataagtgggagctaaacaggaggtatatatagtgatatggtttgtctgtgtccccacccaaatctcatcttgaattgtagctkctgtaactcccccatatggtggaagtgacctagtgggagagaagcgcatgatgggggcagttcccttcacactgttccagtggtagtgaatatgtctcatgagatctgatggttttataaatgggagttcctctgcacaagctctctcttgcccaccaccatgtaaga

SEQ ID NO: 175356 - DNA, 598 bp, Homo sapiens
cttaattttatttagtaagtcttgacatgaattttggaaccacgagatataagtaataaagaaaaggtcatatgatcttccagaaaagaaaaaatcatgcaaggttagggctaattttgtgatgccagtctttaacagtctcggagctattcacygtgtggagaactctgtgggacttattttttctccctttgatgtggaccatttcattctgtgctccattttccaactcagtgtattttataatgatatccatcatgactgtctgtcagcttatggcagcttaaaaaattgcctcaaggccagtaatgagaagaaatctttcccacttcctgtagattgttttgtgtgcttcacagttttctgcaccaaataataaaaaataacattgctttcaaaactgttctttagtttgcctctttatcttttcctttttaatcctttatagtttatttccctttgctttactgtgtttattctactgcgttttgttcataattaacaagacatagaaggcaagaatatattctccaaatggaaagtttttttaaaagccttaatttagctatcctttaatcccacaaaaaggaaactatct

SEQ ID NO: 175357 - DNA, 490 bp, Homo sapiens
gttagggctaattttgtgatgccagtctttaacagtctcggagctattcactgtgtggagaactctgtgggacttattttttctccctttgatgtggaccatttcattctgtgctccattttccaactcagtgtatkttataatgatatccatcatgactgtctgtcagcttatggcagcttaaaaaattgcctcaaggccagtaatgagaagaaatctttcccacttcctgtagattgttttgtgtgcttcacagttttctgcaccaaataataaaaaataacattgctttcaaaactgttctttagtttgcctctttatcttttcctttttaatcctttatagtttatttccctttgctttactgtgtttattctactgcgttttgttcataattaacaagacatagaaggcaagaatatattctccaaatggaaagtttttttaaaagccttaatttagctatcctttaatcccacaaaaaggaaac

SEQ ID NO: 175358 - DNA, 593 bp, Homo sapiens
gactagagctaggatgatctcgtgaagatgttccaaattcagagaaggaagcaagagtttataacccgtgctcctctactgacctattgctggacatgggcttgtctctgtgagtaaggtataatcttgaatggtatagcaccgtttggctgagggcaaggcttgaagaggggcagctggggagccattagcagccaatattcycagcagatggaagtaactcatctgttagttaaggggtcatcttggtagtgcaccactgcatcacctgcatacagggacataaatagggaaattgtgccaaatcaaaaggattaaggaaagatgctcctcaagaaatcatgacaaagatgctatctaaaggaggagaaggatttaaccattccagaagagcaatgaggctttctaaggagaggaagaagcacacgcaaataatctgtgaaatgattaacaggttgtgtttgaggaattttaaaagccagggtggctgaagcagaaagcacaatgagtgcttggtgtggacgtgggagcagattatgcggagcttttgtgaagaggtaaggatgtcacctttattcacagaacaacaggaa

SEQ ID NO: 175359 - DNA, 366 bp, Homo sapiens
gggtgccacagaatcgagatggatgtggatgtagtggtctgaacatggaacagggccctgaccacagagggcaggatggtcccagagcctccacagatgcaaagggcagttatggtcaatggcctgagctctggggaggcaagggggcacccctcctgttgtgcccaatttcattatgaagaaagcctgagctyctggttttagggattttagaaagaagcactttgaagagagtgggattaggagtctcaatcctgagtctggtccctaacggacagatttgtggcaaaatagagtagaatagacatttgaattttcatagatcaaattcatagatcagactctaccttaggctatttcattact

SEQ ID NO: 175360 - DNA, 366 bp, Homo sapiens
gggtgccacagaatcgagatggatgtggatgtagtggtctgaacatggaacagggccctgaccacagagggcaggatggtcccagagcctccacagatgcaaagggcagttatggtcaatggcctgagctctggggaggcaagggggcacccctcctgttgtgcccaatttcattatgaagaaagcctgagcttctggttttagggattttagaaagaagcactttgaagagagtgggattaggagtctcaatcctgagtctggtccctaacggacagatttgtggcaaaatagastagaatagacatttgaattttcatagatcaaattcatagatcagactctaccttaggctatttcattact

SEQ ID NO: 175361 - DNA, 366 bp, Homo sapiens
gggtgccacagaatcgagatggatgtggatgtagtggtctgaacatggaacagggccctgaccacagagggcaggatggtcccagagcctccacagatgcaaagggcagttatggtcaatggcctgagctctggggaggcaagggggcacccctcctgttgtgcccaatttcattatgaagaaagcctgagcttctggttttagggattttagaaagaagcactttgaagagagtgggattaggagtctcaatcctgagtctggtccctaacggacagatttgtggcaaaatagagtagaatagacatttkaattttcatagatcaaattcatagatcagactctaccttaggctatttcattact

SEQ ID NO: 175362 - DNA, 401 bp, Homo sapiens
ttctagtaatagtaacattcaaatattgccctcggggtgtgagtcattactgtgctacaattcaggcaggaattaggtgtttatcataaactccaataaagaagttccagttctagtccccacttaactcgggcctgatggaaagctccaagaatggctaaraagttctgctgatcaaaatgatgaactactcttcagttggtacaaattacctaatgtgcatacggtctaggtttagaagagagtgttttactaagtgaaataagccagatacaaaagaacaaatattatatggctctactcatgaagtactcaaaattggaagtacaacggtggatatcagggctggcaggagggaagaatggggagtcatttaatggacacagtttctatttagggtg

SEQ ID NO: 175363 - DNA, 426 bp, Homo sapiens
gctaaacataaaacaacggaaaaatatattctatacagatggtaaccaaaaagagattagtggtggccatgaatatatcagataatatagactttaagtcaaaaactgtcaagaaatttaaaaaatatatataatttgaaaagggtcaattcaccagaaagacatacaattataaatagatacacacccaaaagcagagcacccaaatatataaagcaaatatcaagagaactgaagggagaaatagcaacacaataatagcagagaattccaatactttcagtaayagaacatccagacaggaaatcaataagaaaatacagtacccgaacaacactatagaccaagcccattcaaccatggccagtgggccgtatgcaactcaggaccgctttgaatgtggcccgacacaaattcataaacgtt

SEQ ID NO: 175364 - DNA, 537 bp, Homo sapiens
aaaccaaatttctcattgaatttaacagttgtgttcctgtaatactgcatatataaattttataaaaatacttttaagcttatgtcccagtcttattcagtaaaattacttgtgttgttattattgttgttgagaattacagaaggctgggagatggcatgcaggctttgaaacaactagccaattctctctttactacagttgtaaacataccagaaaatgaagtcccactacaaggttaatgaactgattagtcttatgaaggaataagacatatttactgaacatgtattaccaacargatactctaattatgttactttatttaatcctcttggcaatgttatgaaatgaatatttccacccctgttttctagaagtgaaatgagtacttagaagttaagcaacttgccccatatcacggctgacaagccctagagcccaggattcaaattcagaactgtaagagcccagaattttaaaatgagattatgatatgcttttcatcatttttttccattcacatctcacaccgtc

SEQ ID NO: 175365 - DNA, 553 bp, Homo sapiens
tgtttcttttattcacagttgaatttgtgacactgagaagagacatccagtaaatctttgtaaactgaataaataaatcttgaatatatgaacaaaatttgatagcacgaactaaaggctgtaaatgtgaatagttaccatttaaaaattaagcttttgtagtaaaatttatgaaatatgcttctaaggaagctatattctttactgtgtattccgtttgcattgagcaacacaacaagcttgaaacaagagtgcctttactcttaaaactcacgtgcctcagtttttcccactcatgcaattggcctakcaaggatccacaaacctggggatattattaaattagaatgaaaatgtgaataattatttctccttaatgccccccaccccaataattgcttgcacctgtgattttctatacacacgttagtgccacactcttttcctccacatccaggtgaggagtaactgaagtcacttcacaaatttctccacactttataggcaaaaatgttggcacttgctgaccaaagactgcataagttttcacatt

SEQ ID NO: 175366 - DNA, 553 bp, Homo sapiens
tgtttcttttattcacagttgaatttgtgacactgagaagagacatccagtaaatctttgtaaactgaataaataaatcttgaatatatgaacaaaatttgatagcacgaactaaaggctgtaaatgtgaatagttaccatttaaaaattaagcttttgtagtaaaatttatgaaatatgcttctaaggaagctatattctttactgtgtattccgtttgcattgagcaacacaacaagcttgaaacaagagtgcctttactcttaaaactcacgtgcctcagtttttcccactcatgcaattggcctatcaaggatccasaaacctggggatattattaaattagaatgaaaatgtgaataattatttctccttaatgccccccaccccaataattgcttgcacctgtgattttctatacacacgttagtgccacactcttttcctccacatccaggtgaggagtaactgaagtcacttcacaaatttctccacactttataggcaaaaatgttggcacttgctgaccaaagactgcataagttttcacatt

SEQ ID NO: 175367 - DNA, 553 bp, Homo sapiens
tgtttcttttattcacagttgaatttgtgacactgagaagagacatccagtaaatctttgtaaactgaataaataaatcttgaatatatgaacaaaatttgatagcacgaactaaaggctgtaaatgtgaatagttaccatttaaaaattaagcttttgtagtaaaatttatgaaatatgcttctaaggaagctatattctttactgtgtattccgtttgcattgagcaacacaacaagcttgaaacaagagtgcctttactcttaaaactcacgtgcctcagtttttcccactcatgcaattggcctatcaaggatccacaaacctggggatattattaaattagaatgaaaatgtgaataattatttctccttaatgccccccaccccaataattgcttgcacctgtgattttctakacacacgttagtgccacactcttttcctccacatccaggtgaggagtaactgaagtcacttcacaaatttctccacactttataggcaaaaatgttggcacttgctgaccaaagactgcataagttttcacatt

SEQ ID NO: 175368 - DNA, 574 bp, Homo sapiens
ctctcttctgtttgaatttttatgtccccaaatctagtagtgayttcttagtagcttctgtgatttcaactatgctgtagcctgagtctctaatctccaagtgcagccccacctcacacctatacccaacagagacaatatcaatgattttctttgtcttattctctttctggctttggtctctcaaaactatgtctgaaaaaagtccagatttcaggctagaaggaaccattacctctttcttttcattttcctctccttttctttctttttattaaaggttcctgaacatagatatttagccaaggctataaaccaagcaaaaatattcaggggagagagaaggatgcagcagattttgatggcaatcagagttgacaactcttatcatctaggcctagcaatcccacccattggttataatatagagaaactctcaaatatgttctaggagacaacaatctttacagcaaaataatctgtaatgacaaaatactataaacattccttaatgtccatcaaaagaagcatagatgaatttagacatatgcatatggtgaaatactatacaaat

SEQ ID NO: 175369 - DNA, 467 bp, Homo sapiens
ttttttttgttgattttgtctggatgatctgtccagtgctgaaaggggggtgttgatgtctctagctatgattatattggagcatatctttttgttagctctaataaatatttcattttctgctgcagtgttggataaatatataaagttgttatatcttcttgctgaattgacccctttatcaatatatagtgagttttttgtctctttttgtagtctttgtcttgaaatctattttgtctgatataagtatagtgattcttgctcttttttagttttcattggcatggaatatctttttccatcactttattttcaatctttgtttttataggtgaagggtgtttcttgtaggcaacaaatcatctggacttgttttttttgtttgtttgtttttgttttaatcaattcagccagtcttttgattgggacttttagttcttytacatttaatgttactattcata

SEQ ID NO: 175370 - DNA, 270 bp, Homo sapiens
tagtccttctaagccctctgcttaattttgtaattctaattttgttctttttcctaaaaaaaatttcaaaatttatataactgtgagccccacaaaacctggacctgatgctcagtactataaatttaaatctacactcttattatgcaaacacggctttaaaaacattttcaaaagaacactccatattctcatgggatttttgtacctgaaactgctattttataaatcttggaactattacttakagcatccccatgtttaaaaagc

SEQ ID NO: 175371 - DNA, 562 bp, Homo sapiens
ggcagtgggccttcttgagctgcagtgggctctgcctagttcgagcttcccagccacttcatttacctactcaagcttcagcaatggcagatgcctctcccccagtcaggctgctgccttgtggttcaatctcaggttgctccactagcagtgagcaaggcttcataggcatgggacctgctgattcaggcatgggagggaatctccttgtctgccagttgctaagaccttgggaaaagcacattatttgggtggaagtgtcccgtttttccaggtagtctgtcatggcttcccttggataggaaagggaaatccccagaccccttgtgcttccggtgaggcaatgccgtgccgtgyttcagcttgccatgccccgcctcagcttgccatgccccgccgtgtttcagcttgccgtgcatggactgcccccaatgtccaaccattgccaatgagataaagcaggtacattagttggttgcagaaatcactcatcttgtgcgtccttcacgataggagctgcagaccagagctgttcctattcagccatcttggaatgcccccc

SEQ ID NO: 175372 - DNA, 562 bp, Homo sapiens
ggcagtgggccttcttgagctgcagtgggctctgcctagttcgagcttcccagccacttcatttacctactcaagcttcagcaatggcagatgcctctcccccagtcaggctgctgccttgtggttcaatctcaggttgctccactagcagtgagcaaggcttcataggcatgggacctgctgattcaggcatgggagggaatctccttgtctgccagttgctaagaccttgggaaaagcacattatttgggtggaagtgtcccgtttttccaggtagtctgtcatggcttcccttggataggaaagggaaatccccagaccccttgtgcttccggtgaggcaatgccgtgccgtgtttcagcttgccatgccccgcctcagcttgccatgccccgccstgtttcagcttgccgtgcatggactgcccccaatgtccaaccattgccaatgagataaagcaggtacattagttggttgcagaaatcactcatcttgtgcgtccttcacgataggagctgcagaccagagctgttcctattcagccatcttggaatgcccccc

SEQ ID NO: 175373 - DNA, 562 bp, Homo sapiens
ggcagtgggccttcttgagctgcagtgggctctgcctagttcgagcttcccagccacttcatttacctactcaagcttcagcaatggcagatgcctctcccccagtcaggctgctgccttgtggttcaatctcaggttgctccactagcagtgagcaaggcttcataggcatgggacctgctgattcaggcatgggagggaatctccttgtctgccagttgctaagaccttgggaaaagcacattatttgggtggaagtgtcccgtttttccaggtagtctgtcatggcttcccttggataggaaagggaaatccccagaccccttgtgcttccggtgaggcaatgccgtgccgtgtttcagcttgccatgccccgcctcagcttgccatgccccgccgtgyttcagcttgccgtgcatggactgcccccaatgtccaaccattgccaatgagataaagcaggtacattagttggttgcagaaatcactcatcttgtgcgtccttcacgataggagctgcagaccagagctgttcctattcagccatcttggaatgcccccc

SEQ ID NO: 175374 - DNA, 562 bp, Homo sapiens
ggcagtgggccttcttgagctgcagtgggctctgcctagttcgagcttcccagccacttcatttacctactcaagcttcagcaatggcagatgcctctcccccagtcaggctgctgccttgtggttcaatctcaggttgctccactagcagtgagcaaggcttcataggcatgggacctgctgattcaggcatgggagggaatctccttgtctgccagttgctaagaccttgggaaaagcacattatttgggtggaagtgtcccgtttttccaggtagtctgtcatggcttcccttggataggaaagggaaatccccagaccccttgtgcttccggtgaggcaatgccgtgccgtgtttcagcttgccatgccccgcctcagcttgccatgccccgccgtgtttcagcttgccstgcatggactgcccccaatgtccaaccattgccaatgagataaagcaggtacattagttggttgcagaaatcactcatcttgtgcgtccttcacgataggagctgcagaccagagctgttcctattcagccatcttggaatgcccccc

SEQ ID NO: 175375 - DNA, 562 bp, Homo sapiens
ggcagtgggccttcttgagctgcagtgggctctgcctagttcgagcttcccagccacttcatttacctactcaagcttcagcaatggcagatgcctctcccccagtcaggctgctgccttgtggttcaatctcaggttgctccactagcagtgagcaaggcttcataggcatgggacctgctgattcaggcatgggagggaatctccttgtctgccagttgctaagaccttgggaaaagcacattatttgggtggaagtgtcccgtttttccaggtagtctgtcatggcttcccttggataggaaagggaaatccccagaccccttgtgcttccggtgaggcaatgccgtgccgtgtttcagcttgccatgccccgcctcagcttgccatgccccgccgtgtttcagcttgccgtgcatggactgcccccaatgtccaaccattgccaatgagataaagcaggtacattagttggttgcagaaatcactcatcttstgcgtccttcacgataggagctgcagaccagagctgttcctattcagccatcttggaatgcccccc

SEQ ID NO: 175376 - DNA, 442 bp, Homo sapiens
ttaaaaaaatatataaataagcagaaatatatttctcactgttttgtgaagaaaagggaaactattttatttctagagaaaagctttttagaataggtggttagaaagaagctttgaagtttgacatgagtctaatcttgttctttagctaatagccaaggattttcaaagagttcttatgatgttggcagaaattgttcaccccttctgtgtttcccccaaccctgatcatttccaagttttcctcactatacaacttcaattatgccatgttttggaagagagctgcaagctaatcctataatatagaaagtgaaacasagatgcttcaggaagcatccaaaaattgtgtagatttctactttaggtactctaaaaatgtgcacatataggttatgtattaaaatgaatgttagggtctaaatcttatgaataatgaatt

SEQ ID NO: 175377 - DNA, 450 bp, Homo sapiens
gaattcatcctctcatataaactcaaagaattttatcttaaaaaaatatataaataagcagaaatatatttctcactgttttgtgaagaaaagggaaactattttatttctagagaaaagctttttagaataggtggttagaaagaagctttgaagtttgacatgagtctaatcttgttctttagctaatagccaaggattttcaaagagttcttatgatgttggcagaaattgttcaccccttctgtgtttcccccaaccctgatcatttccaagttttcctcactatacaacttcaattatgccatgttttggaagagagctgcaagctaatcctataatatagaaagtgaaacacagatgcttcaggaagcatccaaaaattgtgtagatttctactttaggtactctaaaaatgtgcasatataggttatgtattaaaatgaatgt

SEQ ID NO: 175378 - DNA, 525 bp, Homo sapiens
ttttcttggttaacttctgctaaaccagagaatcagataggcaaatagtaaattaggctgaatcaaaatatgttaattcctacttatgtgattatagaatactcaatgttttctctttctacatctagattataaccaatataattagcttcacaaatcagcatttggctgacatattgcacaaatcaatggggattattcttatctgcaaaacctgcacaactgtgtagtctatggtgttcctgtctgagaaaatgataaggttatggctattactcgcactttttccattacaggaaaacctcagagttcttccttctrtcattatcctgaagagctggcctgtctttcttcctccctcccttccttttttctctttcttcctttttctttcgtttttttttttttttttttggccacaataaacctaaacagagtgcttgtccagctgttgtcaaattcaagcctgtacactgtggactcagagattcggccactaccatctgaaagctgatcacatgctac

SEQ ID NO: 175379 - DNA, 458 bp, Homo sapiens
tgggctcaataagcttttatgtgttggccatgggacactcccctcccctcctaccactgccatttataacactttttatgggagaaaatgttgtgaattccacgcaatcaatgtttaaatgaactactagagcatcacctgctcatcaatcgggaactggctttaggaatctgactgctctgtccctgctggtccgggatctgtartggaagttctgtgtgttcagctgaactctcagcctcagttcagataatgcagtttctctctcctccctcagaatatcatacctaaacctctgaccccaacaggagtctgaagaccctttgcacatgactttcacaacagcagtgtggaattgaatatacaaacttgacttctagtcttttagtaaataaatattttccatgacccacccaaatttatcttcttacttcaccaagatctctaggaacttgttt

SEQ ID NO: 175380 - DNA, 368 bp, Homo sapiens
ctgtgggggaactgctgcaacgatccaatcacctctctccctctacatgtggggattacaggtccctccatcagcacaattcgagatgagatttgggtgggaacacasagccaaaccgtatcatctaccatcataaaaatacacgaaagtggaaaacctacaggtggaacacatacacacataaggaaaaagattccaaatattaccacgacagaaaacaaacaaatcatattgataaaagaaagagagaaagagagagagaagacacaaaaccagaaatcaattaataaaatgacaggaataaaccatatcaatatgaacctttagtgtgcatgatttaaactttccacttaaaagatatggactgg

SEQ ID NO: 175381 - DNA, 368 bp, Homo sapiens
ctgtgggggaactgctgcaacgatccaatcacctctctccctctacatgtggggattacaggtccctccatcagcacaattcgagatgagatttgggtgggaacacacagccaaaccgtatcatctaccatcataaaaatacacgaaagtggaaaacctacaggtggaacacatacacacataaggaaaaagattccaaatattaccacgacagaaaacaaacaaatcatattgataaaagaaagagagaaagagagagagaagacasaaaaccagaaatcaattaataaaatgacaggaataaaccatatcaatatgaacctttagtgtgcatgatttaaactttccacttaaaagatatggactgg

SEQ ID NO: 175382 - DNA, 368 bp, Homo sapiens
ctgtgggggaactgctgcaacgatccaatcacctctctccctctacatgtggggattacaggtccctccatcagcacaattcgagatgagatttgggtgggaacacacagccaaaccgtatcatctaccatcataaaaatacacgaaagtggaaaacctacaggtggaacacatacacacataaggaaaaagattccaaatattaccacgacagaaaacaaacaaatcatattgataaaagaaagagagaaagagagagagaagacacaaaaccagaaatcaattaataaaatgacaggaataaaccatatcaatatgaacctttagtgtrcatgatttaaactttccacttaaaagatatggactgg

SEQ ID NO: 175383 - DNA, 547 bp, Homo sapiens
gcactcaagcacaagaaaattttctctaaatgcttacttggtgtgctacgtgcaatttgttaggtttaaatccctatagcaatcaggagattttcacaaatcttttagcaaatagatatttttcagggtaagacaacatcatgtttctttggtaggtgtgttggatcttatgttagacaggttattaaagtacagggtattgctcatttcaacccaaatgatgaaggatccacaaagaaatatataatccatgtgaagagayagccgtaaggaaaggtaatacatttaatctgaagaatggtatgtatatataagtagatagatggatatagatatacaggtaaatacgcacactcatcaactcctatttaactcacattaagcttgcttaaataggcattggaagggaggcaatgcagcgttctttctaattaccacttattctcatatgtacaattgtgaagggcttattattaattactaaaatttaatatgaattatactttatgttgccattaattgtttaaggcacattctgcaggagatc

SEQ ID NO: 175384 - DNA, 492 bp, Homo sapiens
agatcttggcagctctctcttggggtccccaaggctcattaaacattttaagaggacgctgaacattttcctagtggatggtgagataactcacttccaagtgtgggaggaagtgcaatcttgcctgttgcaaccagcaaattctggaatgaggtttagacttggtgctaaaggtgtgaggggcaggtagcatgcagtctggctcctttttattaatagttagctgaaacttyacctttctatttcagaggaggtggacagcttttttactaccttatgtgatagggaagaatgaaagttcaagtgaaaggggaggctgggaataggctgcagttgggatgtgagacaagggtgggaggtgagagggtaggagggtcaggcaggggtctggctggccactgtcctaaatctgagcagtagcgtcagggctggaggttagctgatggtgacagcatataaccttggaggcatctggctgctcagccctttgca

SEQ ID NO: 175385 - DNA, 570 bp, Homo sapiens
agatcttggcagctctctcttggggtccccaaggctcattaaacattttaagaggacgctgaacattttcctagtggatggtgagataactcacttccaagtgtgggaggaagtgcaatcttgcctgttgcaaccagcaaattctggaatgaggtttagacttggtgctaaaggtgtgaggggcaggtagcatgcagtctggctcctttttattaatagttagctgaaacttcacctttctatttcagaggaggtggacagcttttttactaccttatgtgmtagggaagaatgaaagttcaagtgaaaggggaggctgggaataggctgcagttgggatgtgagacaagggtgggaggtgagagggtaggagggtcaggcaggggtctggctggccactgtcctaaatctgagcagtagcgtcagggctggaggttagctgatggtgacagcatataaccttggaggcatctggctgctcagccctttgcacaagccactcacttacttgacaacaacaagtcacaggatcacaggctgcggactctgaatagaaagggcgccattctg

SEQ ID NO: 175386 - DNA, 601 bp, Homo sapiens
gaattctgttgaagaacttcattaaaagatttttcttgccaataaaaagacacgcatgggagaaaccatctccttttctttcagtgcatgttgtcacatctgggcatgatgactgggtcttgacctacactgggtcttgaggagagtaaagatcacctggtggccacaagcagatcatctggaggcaaaactccttatctgaggacaaaatcaactcacttcaagaatgactgaggggaacacaccccaagtatgaagtcaccaagcctctgaattaatgcaccacgggccccccgtgcatcaggttttcttgttatgtgttatttmacctttttgggtataagttcaagtttttggtcacgtgtagctgaaagcatacacaagccaactacaaaaataatattcaatgctaaatacactaggaataatatctaaaggaaagagcattgcctttaagacagttccaaaaattgtaggcgtgagactcttccccagccaggcactgtactttagaggatcttctcttgctctctttcacacacatcactttcacagaaggtgaggagggcccaggtgtctgtatatggcatccacacctttc

SEQ ID NO: 175387 - DNA, 601 bp, Homo sapiens
gaattctgttgaagaacttcattaaaagatttttcttgccaataaaaagacacgcatgggagaaaccatctccttttctttcagtgcatgttgtcacatctgggcatgatgactgggtcttgacctacactgggtcttgaggagagtaaagatcacctggtggccacaagcagatcatctggaggcaaaactccttatctgaggacaaaatcaactcacttcaagaatgactgaggggaacacaccccaagtatgaagtcaccaagcctctgaattaatgcaccacgggccccccgtgcatcaggttttcttgttatgtgttatttcacctttttgggtataagttcaagtttttggtyacgtgtagctgaaagcatacacaagccaactacaaaaataatattcaatgctaaatacactaggaataatatctaaaggaaagagcattgcctttaagacagttccaaaaattgtaggcgtgagactcttccccagccaggcactgtactttagaggatcttctcttgctctctttcacacacatcactttcacagaaggtgaggagggcccaggtgtctgtatatggcatccacacctttc

SEQ ID NO: 175388 - DNA, 601 bp, Homo sapiens
gaattctgttgaagaacttcattaaaagatttttcttgccaataaaaagacacgcatgggagaaaccatctccttttctttcagtgcatgttgtcacatctgggcatgatgactgggtcttgacctacactgggtcttgaggagagtaaagatcacctggtggccacaagcagatcatctggaggcaaaactccttatctgaggacaaaatcaactcacttcaagaatgactgaggggaacacaccccaagtatgaagtcaccaagcctctgaattaatgcaccacgggccccccgtgcatcaggttttcttgttatgtgttatttcacctttttgggtataagttcaagtttttggtcacktgtagctgaaagcatacacaagccaactacaaaaataatattcaatgctaaatacactaggaataatatctaaaggaaagagcattgcctttaagacagttccaaaaattgtaggcgtgagactcttccccagccaggcactgtactttagaggatcttctcttgctctctttcacacacatcactttcacagaaggtgaggagggcccaggtgtctgtatatggcatccacacctttc

SEQ ID NO: 175389 - DNA, 601 bp, Homo sapiens
gaattctgttgaagaacttcattaaaagatttttcttgccaataaaaagacacgcatgggagaaaccatctccttttctttcagtgcatgttgtcacatctgggcatgatgactgggtcttgacctacactgggtcttgaggagagtaaagatcacctggtggccacaagcagatcatctggaggcaaaactccttatctgaggacaaaatcaactcacttcaagaatgactgaggggaacacaccccaagtatgaagtcaccaagcctctgaattaatgcaccacgggccccccgtgcatcaggttttcttgttatgtgttatttcacctttttgggtataagttcaagtttttggtcacgtgtagctgaaagcatacacaagccaactacaaaaataatattcaatgctaaatacactaggaataawatctaaaggaaagagcattgcctttaagacagttccaaaaattgtaggcgtgagactcttccccagccaggcactgtactttagaggatcttctcttgctctctttcacacacatcactttcacagaaggtgaggagggcccaggtgtctgtatatggcatccacacctttc

SEQ ID NO: 175390 - DNA, 596 bp, Homo sapiens
ataacactgaactggaaggtgagacaagagtggtcagaaagatggtgggaatagtaaaggctctggtgataaccaagtttgatgtgaagtggagagctcctctgttaaaaacaaagtggtcaaggaactgagagttgattggatgtcagagtcactaaatgtaatgacaggagctgagttataagctggagtgtgtaaagtggacasatcagtgataaaggtagatgacaacaagaggagggggaaagggagacttaaggagaacacattgatttcacagaagcagagggctttgctgggtgatgtcctggaagcagccgtgggctgcagggaaatcactccctatcttctggctggagagacaagtagttcaaggaagtcaagtttcacctacttgagaaagtgcaagagacacagagtgttgggagtcagccaagtttcatttacagagagtcttggaaacaaacattccagaaacccctggagattaaaggggaatttgatggccacaaagcagaaagtccagaggccacaggggaaggtggattttgtttttatttctgattgtcaagcagagaagagacctggtgagggca

SEQ ID NO: 175391 - DNA, 551 bp, Homo sapiens
  misc_feature (1)...(551): n = A,T,C or G
tgactttttctcaagcttctcctctcctcccatccattctgctaatatctaagttcagactctcaccttctcctgtctacaactctacgataatcttgaacttctctcccactctcatttccctcaatgccatcctccatacagctgcccttgtaatcactttaaaatgcaaatccaattccagttctgtttcccactatacattctatatcctgcatgatcccaattcttctccaggcatatttctggccattttctgcctcctggcttaatctccaacagcctagaatggacataataccctaacattggatagttttcttcctcctgggtctactcagcttgtccctctattagggcacccacctaccccccttcacctccccaacacttyctaatccctaaactaagctcagggaggcatttgtcatctctgcctggctcagatgagatgctctgccctgagtactatgagagattgggaagcaggattctatgtaggatggttaggagcctgggctcgtcatgagtaagaactggnnnnnnnnnnn

SEQ ID NO: 175392 - DNA, 557 bp, Homo sapiens
ttgtcttcacattgaataggtagaggaggagaggaagagaaggagttggtcttgctatctcaggggtggacgaggcagaggaaaattcacatataattggatccatacagtttaaacccatgttgttccccagggttaactgtagttccttacagtttacagagcactttggcatggaaatggaaactmtatacaacacaaacaaaaaagacaaatgcctgcagttcagcaaggtagaacaagttttcccaaatcacacagacaggatgtagtgaacttataactctactccacgtgatatatttccaagttcacagtccacaataaaacacaaggtgcactaattataagtcaatttaattctcaatagttttggacatgcggctaaaaattatatctagtggccatctgtcaacacatgtgaactatgaaactgggtattaaattatatctaatttaatacactgtacataggatctaattttacatactgtggcctaacagtgtgcaaaatgttaggctacccctgtagtgtacagtgtcacctctgtcatata

SEQ ID NO: 175393 - DNA, 557 bp, Homo sapiens
ttgtcttcacattgaataggtagaggaggagaggaagagaaggagttggtcttgctatctcaggggtggacgaggcagaggaaaattcacatataattggatccatacagtttaaacccatgttgttccccagggttaactgtagttccttacagtttacagagcactttggcatggaaatggaaactctatacaacacaaacaaaaaagacaaatgcctgcagttcagcaaggtagaacaagttttcccaaatcacacagacaggatgtagtgaacttakaactctactccacgtgatatatttccaagttcacagtccacaataaaacacaaggtgcactaattataagtcaatttaattctcaatagttttggacatgcggctaaaaattatatctagtggccatctgtcaacacatgtgaactatgaaactgggtattaaattatatctaatttaatacactgtacataggatctaattttacatactgtggcctaacagtgtgcaaaatgttaggctacccctgtagtgtacagtgtcacctctgtcatata

SEQ ID NO: 175394 - DNA, 636 bp, Homo sapiens
ggatccaattaaactaaagaacgtctgcagagcaaaaataattatcaaaagaaagcagacaatctacagaatggaagaaaatatttgcatgcaatgcaaccaacagaggtctaatatccataatttgtaaggaatttaattcaacaagcaaaaaccaaatgccatcataaaaaatgggcaaaagacatgaacggacacttctcaaaagaagacacacaagtggccaacaaacataaaaaattcacatcatcactaatcatcagagaaatgaaaatcaaaaccacaatgagataccatcttacaccagtcagaatgactattagtaaaaatgtaaacaaaaaaacagatgctggcgaggatgcggagaaaaggactgttcatacactgttgctgtgaatgtaaattagctcagccactgtagaaagcagtctggagatttctcaagaaacttaaaacagaactgccattcaaccaaccaatcccattactgggtatgtatgcaaaagaaaatawatcattctaccaaaaaggcacatgtacttgcatgttcatcacagagctattcataatagcaaagacatggaatcaacctagatgcctatcaatagtgaattagataaagaaaatgtggtacac

SEQ ID NO: 175395 - DNA, 539 bp, Homo sapiens
tagccaccctaatttcttcaatagtaaatatttacrtaatcataatatggcaaatgatacttattggtttttagtttcagagttagtctatagacaaacacaggaaagaattgtgtgcagaatggagaggaaatgtgaataccaacaatgtagagttgatgctatagctgacagaaggccagaggtgaagtctgtgaagaagggtggaaggaagtgtggagaacgaatttcttcctcctacctagtgtggaattaagagagaatttcaccaattaaagttgatgaaataagaaataaagggttcagtatgttactgaagtatgtcttgttaactaatagaatttaaatgatataattagtaaagcgagatatgaggagaggagggagaggtctgagctaaatactcatctttcctataaagaaatggaaagcctcctaagctgattaattaagaaatagaggtttatggataatatatggcattgtgagttttatgtataatatatagcataaccacaggaagaactcacaaggaaaca

SEQ ID NO: 175396 - DNA, 539 bp, Homo sapiens
tagccaccctaatttcttcaatagtaaatatttacataatcataatatggcaaatgatacttattggtttttagtttcagagttagtctatagacaaacacaggaaagaattgtrtgcagaatggagaggaaatgtgaataccaacaatgtagagttgatgctatagctgacagaaggccagaggtgaagtctgtgaagaagggtggaaggaagtgtggagaacgaatttcttcctcctacctagtgtggaattaagagagaatttcaccaattaaagttgatgaaataagaaataaagggttcagtatgttactgaagtatgtcttgttaactaatagaatttaaatgatataattagtaaagcgagatatgaggagaggagggagaggtctgagctaaatactcatctttcctataaagaaatggaaagcctcctaagctgattaattaagaaatagaggtttatggataatatatggcattgtgagttttatgtataatatatagcataaccacaggaagaactcacaaggaaaca

SEQ ID NO: 175397 - DNA, 583 bp, Homo sapiens
aactcattattttatgacaaggggcagaatctttttaagttgctggtttatgaaacatcctaattatgcttgtgtttgtcacattacaaaactctakaaattggaagctcagcatcaatggaatttatttttccacaatttataaacagaggtagtctttgttttcacgatggtctaggacttatatataagatacctgtggatgtgacaaaactatcaagctatcaaaaaaaaaccactcatccatagacccaagctgccatgtcaagaatcaatggaaaaattcaggacagtgcaaaaagcagccgcctcacaaaggaaaaaaaagagaggagtaaagtgccaggaatgagcagggagaaaaaatatataggcctctagatttttctgtttagctaatggcaagctataatattcaaggaaaccttcctaaggaaagtaagtaaagaaggctgaatatagtttttaaaaataaatcttcaaaacaatggaaatctgacaagttagtagagaattaacaagtcaaatttgaaagtggaatttgaggttggtagacatgagagctacttttgcctgatggcat

SEQ ID NO: 175398 - DNA, 473 bp, Homo sapiens
aaaactgattgcattgttacttttcatccagaattcattgattcactctgtctctctcttcatatatatttgggattataaacacagaggggaattttttctccccatgagagagagagagaaagagagaaagaaagtgagagagacacagagacagacagggaattatcctctgtgtccataatcccaaatggttcaaagtgttcaaacagctccattttatttgttcttcattcattcaatagacctatcctgaaaaccttctgtgtgagaagcactgtgctaaagttcagagcctagaaaaaattaatatgctttttgaggacatgagctatattatctttacctttccatgcctagcaagagggcctagcctaatgcgtgtacttggtaaatgtttgttacaatgaactaaacatcgcagggagatagctatacaggaaaatattractattagttaatgaaaccaaat

SEQ ID NO: 175399 - DNA, 469 bp, Homo sapiens
catttaaaagctacagcatgggcttgggataaggcaattctgttctctatttcttagagaagaaaagaatcccagtgcacaccaggaaaataattttggaaactcagttaattgtgaaggtgaggctgagccagcttgtggttaaagctacaaaggaaatattgttcacttcccataaatgatttcccgtatgtaaagtggggccgatcctagcaggtgacttcagagacatggaaacatttaaccacagatgaataaatcttgcaaacacattttttaaaaatgcaaagagtaacctataaaataaaatctgtggctgtcacatttggagactgaaagttcaaaaagcagggcctgtttataccaaccacaaaggctagggatctgtggttttattggatttctcatcccaagaaaatatttacacttggaggaraaaatgcgtttttagctataaaaaccatatgta

SEQ ID NO: 175400 - DNA, 549 bp, Homo sapiens
agttatagaaaagagaatcatcagcttacagagttacctaaagccatgagactggctgagattatcttgggagtgaacatggataaagaaaatttctggagactgaatcctgatgtagttcagtgtttggaggtcaagaagagagagataggctaaagaagctgagaagaagctgcctgtgaagcaagaggagaattaagagagaataaattgtgccttggaggccaaaggaagaaagtatttcaaggaaaaggggaacaactaagtcagttgcttcctacagataaagtaagacaaggactcaggaatcaccattttattgggcaattagaggtcattggttttcttgtaagagatgctttgttgaagcagtgggtgcaaaggccctatagaatgggttcaaaaacagaatggggcataattaygaatatctaagtgttttaaagaagcttcctacaccacagttaacctggaaatgatacattcttgaacacacattgcattgctagcttcaaaggagatccgaagaacacacccacactctctcat

SEQ ID NO: 175401 - DNA, 449 bp, Homo sapiens
tatgcaaatccataaatgtgattcaccacataaacagaattaaaaacaaaatctatatgatcatctcagtagacacagagaaagcgtttgataaaatccaatatcccttcatgataaaaaccctcaacagactaggcattgaaggaacagacctcaaaatcataaaaactatctatgacaaccccacaggcaacatyatactgaatgggcaaaagctgaaaccattccccttaaggactggaacaagacaaggatgccaaatctcaacacgtctgtgcaacataattctgtaagtcttagccagagcaatcaggcaacaagaagaaataaaagacatccaaatgggatgagaagaagtcaaattatctctctttgctgatgatatgattctatacctagaaaaccctaaacactctgccaaaaggctcctagaactgataaacaacttc

SEQ ID NO: 175402 - DNA, 632 bp, Homo sapiens
aatagatgaaggttagcacttttatttaaaaagaagttggttccagaatggttatgacaatgacaacagtggcaatgaagaagaggaggagaaagaagagaccaacattcttcgattggttaccatgtgctgagtattaggcatatgctaagtatttaacatccataagtctcataaccctataaactgagtactattatcatctacttattttattgaggtaaaattcacctgacataaaattcaccattttaaagtgaattagtataattacaatgctgtgcaaccaccacctctatctagttcccaaatgttttcattgtcccaaaaggaaatgtcatacccattaagcagttaattcttaactgctcactcttcccttcatscagcccatggcaacaacaaatttgcattctgtctctatgtcatcccgattttacaaatgaagaaattcagtgtaagaggttaggctacctgtccaaagtctcactactaaaaataataaatcttgggttctgtctccttcctcaaaataactaaggtatatgtattagggctctctagtaaaacagaactaataagatatatgtacatatgaaagggagtgtgttaaggagaattgactcacacga

SEQ ID NO: 175403 - DNA, 247 bp, Homo sapiens
aagatctttttaaaatacttgcatgtcatactaaakgaacactttgggctttgctggctgatcacccttagcaactccagagcaatggcttgggaaagttgttttcatgaaagactccctctgtactacatttcttcctcaaaacagaattatttgaactatatttgaagagcataattttaaaccggattaatttcagggtccataaatgaaaagctgacacacacaaagaaacttcagccaatag

SEQ ID NO: 175404 - DNA, 247 bp, Homo sapiens
aagatctttttaaaatacttgcatgtcatactaaatgaacactttgggctttgctggctgatcacccttagcaactccagagcaatggcttgggaaagttgttttcatgaaagactccctctgtactacatttcttcctcaaaacagaattatttgaactatatttgaagagcataattttaaacyggattaatttcagggtccataaatgaaaagctgacacacacaaagaaacttcagccaatag

SEQ ID NO: 175405 - DNA, 521 bp, Homo sapiens
ctatctagaaggtcacaaaattcttaggctggcagtatcccaaaagatcagctagttcagcccttttattttcaattaaagaaactgaagcatggagcgcttaagagaatttatacatgagagctttaaaactctagcatatatttaaattrttgttgtcccaaacagaagtttaatatcaaaaggatataattagtgttcatgcatattctaatacatacaaattgtttataatagaataaataatctgccacttctttagaaatcaaaaaagcacaatggtggcataagtctaatatttcattgaaattcccagaagtaagtaattcagtttttctgctaatctaggctcaatctcctttcagttattaaacatttactgagcacttacggaatgctgagtatatagctcaaaactccaaaattttttctggtgagaattttgtctttaaaaatggtgaataaaatctttaggtacacttcttctgcctatgagttcttttaccttttaataactttca

SEQ ID NO: 175406 - DNA, 547 bp, Homo sapiens
gacataaacacactcattgtcctaggtctacacagggtcaggatcatcaatatcagtcttctacctccacaccttgtcccactggaaggttttcaggggccctaacaggcatggagctgtcttctcctatgataacaaccccttcttctggaagacctcctgcagaatccgcctgaggctattatacagttaactttttttcattagtagaatgagaacactttaaaagaatgattaaaagtatagtaaacacataaaacagyatcaatctatgatcattatcaaatactgtgtatcacacacactcatatatcctagacttttatgcaactggtaccacagtaggtttgtttacaccagcatcaccacaaacacatcttagcacaacgcattatgctaagatttcatgatggctacgatgtcacaaggtgatagagatttttcagctctattataattttatgggaccagcatcgtgtatgtggtttgtcattgacctaaacgttgttacgtgacacatagctgtacaactctgattctctaaaaa

SEQ ID NO: 175407 - DNA, 577 bp, Homo sapiens
atatattgtgatatatttaaattcttctattgtttaagaaagactatttccattctttgctatttgaaaaatgctaagataaataaccttgtatgcaaatattggactaaaaattgatttttatttcctcagaatatatcccatgaatgagatttattggtcaataggaattaacatccttagggttcttcatatacagctcccarttgcttttccaaaaggttatcctaatttgcacttctattggtagggtttgagggtcctggtcaaactattccctattcagcattgaaaaatacctttaagtaatctttgctaatctgatacataaaacagtacataactaacaaattaatttgaaaatctttgcttacagcaagttttttagtagttaataactcatcatgatgtatttcttctgtgaattgttgaattgtctgtatacattttttagccatcattttttattatagtatttgtgttttattatggtatcgttttattacatagacctttgttatgttttggaaacttttttttctcacaattgctattcatctttcattttggtttacat

SEQ ID NO: 175408 - DNA, 626 bp, Homo sapiens
aaataagaaaataagacaaaaaagggaaacaaatttacattcttccaggatgatgatccataccatgatctttcatagtacaatgtactgtgaacaaatacatttctaagatttaccattttttatttcttttagaaacctgggacactataccgtgatttcaggaagaagcaacaggaccatacttcatctgtgatttcttctctgcctttcaccagggctccttttctctctgaagtatcacttctcacacacattcccaattttctcaaaatccatatctactaaaactgcaattttccatgttgaggaagaactttttgaatcaaattatcaagggaagaaaaagtatatgaggrtagaccaaattaagaaattgcaaatcaaaaatctgttagggtatattttgcattgaacatatagtactaagtgcattaataagaaaatttaatggttctattcaaatagaagcatttgtctttccctcgctttaagaagtattcaaagctatgatggattatttttcatattgtgtttgaaagagcaaggatatataaaataatttcctattttgattttaaagaaaaaatattattttggatagaaagtttcgtagcttgcatgtc

SEQ ID NO: 175409 - DNA, 582 bp, Homo sapiens
tgttattttttctccaattcgttaatgtacatttctattttaacaattattttcctctgtattcttagtttgttttcccatcctaatgccttgagcttaatatttaagtgattcatttttattcttttttttgtggggggggatgaygaagtttcattttattgattttcagtacccaagtgtggcaatgtaaggttgccacagacagcaagtgacatgacaccacaaggaccttctaagagaattattcttacttttgatggaagacatcacttaaacaaacaaacaaaacatttaaagaagctctcttggtttttataattcctaactgtaggctattattttagtacagagcaaaaaattctccttggttggtcacatcattcattattgaaagggaaactcagtaacaaaggaaacaaaacactgaaataaagaactaaataatttactgaaaggtagtttcagaaattattaataattattaatcagaaatgattaaaaataccgcaatatttttattgaccacacagaattcgcccatatcctatagcttgtgaatttacaatgttgcacctttat

SEQ ID NO: 175410 - DNA, 587 bp, Homo sapiens
aagaggtgtagtgtaatatattgccctcacaagaatcagcacatcacccaaactgtaaacaaacaaaaaaagaaggcctatgaactgacctatccatgaaggatggaatcctccctcctttgaagggagcaaaagagtgagaaagcatatatgaatatggtaaatacttatactttcttttgaaaaagttcaaatccacatatgcataaaaaagagctggaaggaatattttctgactctatttctacctttctgatgtgtacataaatgtctagagttaatatcaatcttaagtctagtatatacacaacactttcagcaatgcaatagtaaaaagaaaactgggataagactcataaaacctggaattaaatatcttcactgtcactggcatttaacaagtcacttgctgtcttagagtgggttccccacaaacaaattctaattcaaatatttcagtataagtagttgactcggaaggtgattccaagaacaccactatttcaatataaaaatggaacasaaaaaggagaaaagttaataataaatgtgttatgaattatcaccatgggcaactggagattgat

SEQ ID NO: 175411 - DNA, 587 bp, Homo sapiens
aagaggtgtagtgtaatatattgccctcacaagaatcagcacatcacccaaactgtaaacaaacaaaaaaagaaggcctatgaactgacctatccatgaaggatggaatcctccctcctttgaagggagcaaaagagtgagaaagcatatatgaatatggtaaatacttatactttcttttgaaaaagttcaaatccacatatgcataaaaaagagctggaaggaatattttctgactctatttctacctttctgatgtgtacataaatgtctagagttaatatcaatcttaagtctagtatatacacaacactttcagcaatgcaatagtaaaaagaaaactgggataagactcataaaacctggaattaaatatcttcactgtcactggcatttaacaagtcacttgctgtcttagagtgggttccccacaaacaaattctaattcaaatatttcagtataagtagttgactcggaaggtgattccaagaacaccactatttcaatataaaaatggaacacaaaaaggaraaaagttaataataaatgtgttatgaattatcaccatgggcaactggagattgat

SEQ ID NO: 175412 - DNA, 587 bp, Homo sapiens
aagaggtgtagtgtaatatattgccctcacaagaatcagcacatcacccaaactgtaaacaaacaaaaaaagaaggcctatgaactgacctatccatgaaggatggaatcctccctcctttgaagggagcaaaagagtgagaaagcatatatgaatatggtaaatacttatactttcttttgaaaaagttcaaatccacatatgcataaaaaagagctggaaggaatattttctgactctatttctacctttctgatgtgtacataaatgtctagagttaatatcaatcttaagtctagtatatacacaacactttcagcaatgcaatagtaaaaagaaaactgggataagactcataaaacctggaattaaatatcttcactgtcactggcatttaacaagtcacttgctgtcttagagtgggttccccacaaacaaattctaattcaaatatttcagtataagtagttgactcggaaggtgattccaagaacaccactatttcaatataaaaatggaacacaaaaaggagaaaagttaataataaatgtrttatgaattatcaccatgggcaactggagattgat

SEQ ID NO: 175413 - DNA, 565 bp, Homo sapiens
tgttttgcaggatgtgattaaaataattaaccacgctaaagtacatgcccttaactcacatctgttcccctagttctgtgagaagatggatgcagagcacacatgtcttgtcttatactcagaagtgagatggctttctaaagatggccagagktttttagttgtcagagctgctccagaggtttgttttagaaaagagtcaccactggcagcatgttccagtgacacagaatgggtcacaaaacttgcttacttttgtaacatatccaacctgctcaatgaacttaatatgtcacttcaagggagaatgacaactatgttcaagtcagcagataaagtggctgcattcaaagccaaactggaattatgggagcgatgagtgaacattgagatttttgacatgtttcaaacattagcatagattttgaaagagactgagccagggccttctttctctgagctggttcatgatcacctatcccagctttcaaaagaatttgagcattacttcccaaccataaaagactgccaaactgggaaggaatggatctgttgggaaccatct

SEQ ID NO: 175414 - DNA, 562 bp, Homo sapiens
aggcccttgagacattctgaaggaaaaatggaagtttctcaaagtggaggtgttgacaatgctggtcttactcatttgattttagtgtcttgtaacaaaggtatagcttacatgccattgattgccaccaaggtaattatttttataaatagaagaccaagaaatttttcttttttaaatactttgtaatgagaagtgaagtaacattgaaatttcacacagaggtttgccatttatcttttgacaaaatattaaaaacagttgttaaaatttaagttaaatatttctattttataaaaagatacatattttaagtttgctaaatttttrtgaaggaaatgacttccagcagtatgctatctgaaatatatatatatttatatgtatgtgtatatatatatacacacacatacattaaatatctctctcaaagaaaagggtgaaatttaaaacataagtgagaaagtaaaaggtaatttttaaaaattctctctattcagagagcatttcagaaatggatatttagaagttttcattgctttgtaattttattgctgaaagt

SEQ ID NO: 175415 - DNA, 485 bp, Homo sapiens
ggattataggcatgagccatcatgcccaaccttgtttcctaatttttagtcttctgactctttttgtcattttctttcttctgctacaatgtaactatgtttttgtttttataacttcttgagttgaacgcttaatttagttttattctttttttatttagatgaacttttaagtttatgtatttatattctttaaaactagaatatttttatccttattttattattacaagttttttagtatatgtatttatacttttataagtatatgtattatgcttttttaatatgagkttttaagtttttgtattacactatttttaagtgtatgcattatacattttaagtacatatatttttatgtatatgtattatgtttcttaaagtataagtattatgcttttttaagtgtttttatttatatgtattatacttttatgtttttaagaatgtctttatcctttttaaattagaagattattatt

SEQ ID NO: 175416 - DNA, 572 bp, Homo sapiens
ttgaaatcaatactaactgattcatccttcagtgttgctttagttcccaggcatgagaaataaggtattttggaaaaaggaggattctagagctcttcaactatatagtcaaactttaaaaattttaatagtagtaacataatcttacaaatatcttttatgtatttcaatgactcaaataacataggttattttaatctgactttaatcctcttctacactctgccaggtatgtagaacaggtattttcactgaacagaggaaataaaaacagaaagctcagagaagttaaatgactttttcaaagtcacttatcttttgagtggaagatacaataccagcaacctatgtctttagattmtataaaaagtgttctttttgtcaataatgtcttgaaaatatcacacttagttctctgctttacaaaacatgtttctcaaaatactttaaaattttcttgatgaatcagaaaggttttttgaattcaaaaattgaactatgcagtaatatattgctattttttgcattttggaacatgaaatattacttttcccaacactgtataatttcag

SEQ ID NO: 175417 - DNA, 575 bp, Homo sapiens
ggatcaattcagcaagagaccataacaattataaatatatatgccctcaacactggagcacccagacatatgaagcaaatattattagaattaaagtgatagacacaaatacaataatagttagggacttcactacccgatcacagcgttgaacaaatgatctatatagaagatcaacaaagaaggttaagacttgcagaaactgcaccatagacaaaaataggactaacagatatctacggaacatttcattcaacaccttcagaatacatattcttctcatcacatagaacattctccgggatgaaccatgttaggccactaaacaagtctcaacaaatttttaaacattgaaatcatattaagtatcttcttaaatcacagtgaaataaaactaaaaattaataaggggaactttggaaactacgaatacagggaaattaaatgtcatgctcttgaatgaccaatgggtcaatgaagaaatcaagaaggaagtttaaaamattttttaaataaatgaaaattgaaacacaacatgccaaaacctttgggatacaacaaaagcagtaaaaaga

SEQ ID NO: 175418 - DNA, 393 bp, Homo sapiens
caaagacgcctacttttatcactgttatacaacatagtattgatagttctagccagaaaaaatagacaaaagaatgaaataaagggcattcaaataggaaaagagaaagtcaaattttttttctttgcagacaacatgattttatgtatagagaaacctaataactccaccaaaacctattagaactaagaaacaaatttagtaatttcagggtacaaaatcaacatacaaaaatcagtaatgtttccatacaccaataataaaataactaaaamagaaattaataaggtaatcccatttataataggtgtaaaaataaaatgtccaggaataaatttatccaaggaagtaaaagatctctacaatgaaaactataaaagagtgatgaaagaa

SEQ ID NO: 175419 - DNA, 568 bp, Homo sapiens
cctttattatttagaggaatttctcctaaatttctagttgtctaagagtttttaatcataaaatrgtgttgaattttatcaaatgcctttctgcatcaaatgagatgatcatgtattttttttcttcattctcttaatgtgatataattatattgatttactctcttattttgaaccactcttgcatttttgagataaatcccacttggtctttgtgaataattcctttaatatgctggtggatttgactgactaatattgcgtttagaaggtttacccgcatacttataagaaatgttaatctgttattttctttcttgtaacatctttatctgatttcgatattggagtaatgttagcctcatataatgaattaggaggtgttttctttttcttcaactttttggaagagattgagaaagattgatagtaattcttctttaaatgttcagtataattgactggtgaagccatctaatccagaacttttctctgttggatagtgtttgtttgcttattcagtctcttacttactataaatctattgagatttttttatttctccttg

SEQ ID NO: 175420 - DNA, 537 bp, Homo sapiens
aaggagatagaggaggttaagaagtagatacagaaagtattatgtacaagcatccatattatgaaatattctttttttattagaaaaaagtatgcattcttccataaatctaattttaaaattttttgaaaagtttytgattttaattattttgttatatattcaggtcatatgtttgtattctgcaataaagagtataatatatatatatatatataaattaatacacattcgagagaacttgcactacagtcacaattttttttgtcagtattctgcagtcttcaaaaatctctttagctaaggtgaatagtccttattttgcagtggaggtgagctgaaataaatgtctgctggtttctatcaattatatcttcttttcccacattcgatggtctaatcttagatttccctcacctttatattgcaggcaatagaaactgccaaacttaaaatcagttttgaacttgaagagtttacatagggtcaatggagttggaagttaggattgttttctatttaaaaggtatttcagct

SEQ ID NO: 175421 - DNA, 537 bp, Homo sapiens
aaggagatagaggaggttaagaagtagatacagaaagtattatgtacaagcatccatattatgaaatattctttttttattagaaaaaagtatgcattcttccataaatctaattttaaaattttttgaaaagtttttgattttaattattttgttmtatattcaggtcatatgtttgtattctgcaataaagagtataatatatatatatatatataaattaatacacattcgagagaacttgcactacagtcacaattttttttgtcagtattctgcagtcttcaaaaatctctttagctaaggtgaatagtccttattttgcagtggaggtgagctgaaataaatgtctgctggtttctatcaattatatcttcttttcccacattcgatggtctaatcttagatttccctcacctttatattgcaggcaatagaaactgccaaacttaaaatcagttttgaacttgaagagtttacatagggtcaatggagttggaagttaggattgttttctatttaaaaggtatttcagct

SEQ ID NO: 175422 - DNA, 450 bp, Homo sapiens
ttttctataagtctctaagtccttgaaacatgtacatttcctttactctttgtttattttgcttacttcttggkaatatgcttttctcacccagtattcatcctctattctctatcactgactactgctttcctggcctccatagcacattgtaactaaatttataatctcttttgtacataagatgaggttattaatatataaattggaaattccaatttagtgatcaatgtgtagtttctcttttgaaaattttaatattcccatcacaattagtaataacaaatggcattatggtctttcctgttgtaatctattttgctttctcataactcttttattaagaatatttcaaagagtaagaaatgtctctcaggtaacctcggcatctaattttctgctttggctcccgtgcttggcatatacacagacattcacactactagagtc

SEQ ID NO: 175423 - DNA, 398 bp, Homo sapiens
gtgttagtttagagtgatgttgtgttagaacttaataaacattaccaactgtagccatttcataataattaagttacgaggaacatttattaaaatatttaaaggaaagatccctaaaatagaactaaaacattaagttagcaatataggtygtaatatattttccatgctgcttcctataaatttatcttcctcacacctactatttaacctttttaaggccccctatgcttacttattttatgtaaactttagcataataatgcaatattcacaaaatctttaaaaagaacaggccactctggttttataggcatgctgttgttttatacacagtttgttacagagcataaacatgctatattcaaaataagaataccagcagcagaaaacagcag

SEQ ID NO: 175424 - DNA, 430 bp, Homo sapiens
agccaccatcaacctgggtctctaaataactacaatgagtagatgttttgctgccaagtcacttcagacatatagactaagtgagaaacttttattaagcactgagatttgagaaggttttttttagtgattattaacccatcctcacaaagtcaaacacaaatttcaggaatacaatcatcttaacttcaagtttaattaaaaaaawgagtgatttaataactagttctcagacaaactatcttatataatcatatttaaaaatgacaggattttattgagaagtcgagagacttcagtctctgactaattacccccctttcttcttgcttcaccacagagagaagtgaaataagataaactggaagtacaaatggaacctttatagtaaagtgttataatccagcatttaaactatttccatgctatt

SEQ ID NO: 175425 - DNA, 714 bp, Homo sapiens
tatgggtgactgacaccaagagtccaatgactcacagggttgtgtctgaacattacctgaatttttcttcagtgcctcacagtcaacatgtccaaaagaaacaagtctccttcctaaaatttatttcttctactcaatttcccagccacagaatgcaaccaccattccctcaagttttctgagttaaaggtacatgatccacccttggcttctctatatttcctggtttactaggtgatatggcttggctctgtgtccccacccaaatatcatctgaaattgtaatccccatgtgtcgagggaagaactcaatgagagatgattggatcatggggacagttcccccatgctgttctcatgatagtgaaaaagttgtcatagatctgatggtttaaaagtggcagtttcccctgcatggactctctctcctgccaccttatgaagaaggtgcttgcttctccttcgcctttcaccatgactgyaagattcctgaggtctccccagccatgtggaactgtgagtcaactaaaaacctcttttgtttataaactgcccagactcatgtattatctttataacaatgtgaaaatgaactaatacagataattggtaccagcagaatgggatactactaaaagatagcgtgaaaatgtggaagcaactttgaaacaggcagaggttgaaacagtttggaaggctcagaataagacagga

SEQ ID NO: 175426 - DNA, 505 bp, Homo sapiens
ttgctaagaatggtttaacatttttctgatgctgggtaactttctttggctttcagcctcaacagcaacactattcactacattttaaaaatcagttgtcatctcatgagtccacaaatatagccattttcccatagctttatcacacaccatagaygttactttagtactttatggagtggcctcacgtagatatcaaagaatttattcttcccttttctagatatacagtattattgattattaatattgaactgatgaccaaccccactatacccataccttaatgaagcttatctaatgcccatatttgcctccataaagaatattacagtaaacttgtgctttggaacaccagatagcactttagcattacacttgggggccattttaaaaagtgaaatcacaaacaaaaagccccaaaatgcaaaaaacagggcattcaatagacctggaaaaggttacttatatacagtatgagaactgaaacaagaaggtagagtct

SEQ ID NO: 175427 - DNA, 594 bp, Homo sapiens
agctgaaaccatttacagttatacaacagacaaatatagaaagatcactatcaaaaagctgtgaaagaaaaaaagtcagtaatcaattagatgactgtctgtttctctttgctattacttttaaaaataaatttaataaaagaattacctatttacaataggatgagcactgtttcaatctctaaaattatcttacttttgacttttgttaaactctacactaaackgccccgttgataacactgtgctttctgagtggacacagtattataggggcaaagtctctaaagtcatgtagacttgacttctcccacatctgcattttcaagctgtgtgatcatagaccacttcatttttttccttatcttgttattccttacctattaattggatacaaaaagatttgtacttatatacctgtatacctaatatgatcatccaacataaccaatgtacactatatttatgaggtttttctgattttatttctcctgcctcctttctttgtcgaagtattgtcagtgtcctaataatgcttttttattaaagactaataagaaaatggacatgtttacctgcaatcaaaatactgag

SEQ ID NO: 175428 - DNA, 594 bp, Homo sapiens
agctgaaaccatttacagttatacaacagacaaatatagaaagatcactatcaaaaagctgtgaaagaaaaaaagtcagtaatcaattagatgactgtctgtttctctttgctattacttttaaaaataaatttaataaaagaattacctatttacaataggatgagcactgtttcaatctctaaaattatcttacttttgacttttgttaaactctacactaaactgccccgttgataacactgtgctttctgagtggacacagtattataggggcaaagtctctaaagtcatgtagacttgacttctcccacatctgcattttcaagctgtgtgatcatagaccacttcatktttttccttatcttgttattccttacctattaattggatacaaaaagatttgtacttatatacctgtatacctaatatgatcatccaacataaccaatgtacactatatttatgaggtttttctgattttatttctcctgcctcctttctttgtcgaagtattgtcagtgtcctaataatgcttttttattaaagactaataagaaaatggacatgtttacctgcaatcaaaatactgag

SEQ ID NO: 175429 - DNA, 594 bp, Homo sapiens
agctgaaaccatttacagttatacaacagacaaatatagaaagatcactatcaaaaagctgtgaaagaaaaaaagtcagtaatcaattagatgactgtctgtttctctttgctattacttttaaaaataaatttaataaaagaattacctatttacaataggatgagcactgtttcaatctctaaaattatcttacttttgacttttgttaaactctacactaaactgccccgttgataacactgtgctttctgagtggacacagtattataggggcaaagtctctaaagtcatgtagacttgacttctcccacatctgcattttcaagctgtgtgatcatagaccacttcatttttttccttatcttgttattccttacctattaattggatacaaaaagatttgtacttatatacctgtatacctaatatgatcatcyaacataaccaatgtacactatatttatgaggtttttctgattttatttctcctgcctcctttctttgtcgaagtattgtcagtgtcctaataatgcttttttattaaagactaataagaaaatggacatgtttacctgcaatcaaaatactgag

SEQ ID NO: 175430 - DNA, 616 bp, Homo sapiens
tacataaaacacttggcatggcaacacagtaagctcttaataattgttagctataattattaatattcttgcctgaatattgtaggagttaaataagttggtttagacctgttaaataagctttaaaatcttaaatattctttgaatctttattttttaaagtgttgcaaactaaaaaatcaacttaaaaattaacttttagaatggattttcatttgtaaatttaatgctttttaaacttctgattttatcacatcatcaaatctatgcttagaggtaaaactaatgtcyactttagagaaatctttgtgttccaatttattttttgctggcatgtcaactgaaaagttctactaagggtacaaaggttgttatgtctatttagtaactttgaggtaaataaaaaagcagagttttatctaagcaagtcatacgatatggacattggctggcccgatgcttctattcacatacaatattaaaactgcagctgttacaagtagatgaagttaccctgatcatctacaagattttcaattctggaaatcaaataattgtgtttgtttgttgtatacatgaggggaggcagggtgtctccaacggggctcaggacaca

SEQ ID NO: 175431 - DNA, 604 bp, Homo sapiens
tcctaagtaagcctataattgttcatctcataatgcacttgagtttctgtctgcttgaagttagagtttaggatgccaggaagatactaatagggacacttgcaactcgtttcaccatcacaatctgcctccaatctcccatagagaattctctgtctgagtgagaagtagtggcagagamaatgaggaggcaaatgtagggaatggcatttcagacagtcaagaaaactggaaattcagcgatttcacgtaatagcgttttaaaaaccagcactggtagttctgaggtaacagagaaagtaaaggataacttgagagaagagtggaaggacatgtgggacaaatggaacacagtcttagattgagttctggaaacaagaaagaaatagaggaccttgaactacatgaaaataaattttaactttgaagttcagaagagcggttagaaagtagtaatttaaaaaactgtattaataagcataaggaaatagataaaggaagaagttcgcaggacagaacaaagagtagaagatttgcaggatgtattttttttttcctattttccaaaataacaatagggctaatgaatctttgggagggggac

SEQ ID NO: 175432 - DNA, 604 bp, Homo sapiens
tcctaagtaagcctataattgttcatctcataatgcacttgagtttctgtctgcttgaagttagagtttaggatgccaggaagatactaatagggacacttgcaactcgtttcaccatcacaatctgcctccaatctcccatagagaattctctgtctgagtgagaagtagtggcagagacaatgaggaggcaaatgtagggaatggcatttcagacagtcawgaaaactggaaattcagcgatttcacgtaatagcgttttaaaaaccagcactggtagttctgaggtaacagagaaagtaaaggataacttgagagaagagtggaaggacatgtgggacaaatggaacacagtcttagattgagttctggaaacaagaaagaaatagaggaccttgaactacatgaaaataaattttaactttgaagttcagaagagcggttagaaagtagtaatttaaaaaactgtattaataagcataaggaaatagataaaggaagaagttcgcaggacagaacaaagagtagaagatttgcaggatgtattttttttttcctattttccaaaataacaatagggctaatgaatctttgggagggggac

SEQ ID NO: 175433 - DNA, 538 bp, Homo sapiens
cacaggtaaaaacaaatcacttataatttcacaacctaaaggcttctattaacaattttgggaatttttaaatgtgtatatatatatacataatatataatgtatatatgtatatatatctatatatgcatatataatatatatttatatgtaatatataatgtatacaaatgtgtgtgtrtatatatatatatagatgaatgcttttttcctatagaaaatgatttatagtggctatggactgaactgtgcctccttgcaaaatttacatgttgaagccctgactcccaatatgactgtacttggagacatgaccattaaggagataattaagattaaataaggtcataagggtaggttactaattttatagaatttgtggcctagatctctttctctctctctctctctctctctccccagcccccaacccagtccccatgcacatcaagggaaggccacgtgaagacacagtgagaagatgaccatccataagccaggaaaagaggccctcaccaacctgactatgctggcaccc

SEQ ID NO: 175434 - DNA, 620 bp, Homo sapiens
aataggtgggggaaatataacaagtagcatgtgtcaaatccttattttttatagcagaaagcaaatacatcaggtaccacctaaagttaataaattaagaaaaggtataactttattatatctatattataaactgatggaagtaattattcaacaaaaacagaggttaaaagaaaagtctaggaccaaagagtgttagtcttcattataagctcttytgttttaattttaatctttaccatttttgtattatttaataaaaatgaaaattaatgttaaaatcagctgacaatgttttgtataaaatccctacataagagaatactaacatataagtaatagtaaggttaacaaaaactaagctaaatacaatgtctcaccacagtggaattcatcacgtccatcctcacaatctttctgaccatcgcatatccaggtattcaaaatgcatcttccactaggacaactaaaataattttcttcacatttgtgtttgttttgaactgtgataaaatatggaatgtcaaacaatttcattttagacttctgaaatataggtagataaatcattaatactccctaaactgaaagagataaataacaagtaagcttaaaaatag

SEQ ID NO: 175435 - DNA, 620 bp, Homo sapiens
aataggtgggggaaatataacaagtagcatgtgtcaaatccttattttttatagcagaaagcaaatacatcaggtaccacctaaagttaataaattaagaaaaggtataactttattatatctatattataaactgatggaagtaattattcaacaaaaacagaggttaaaagaaaagtctaggaccaaagagtgttagtcttcattataagctcttctgttttaattttaatctttaccatttttgtattatttaataaaaatgaaaattaatgttaaaatcagctgacaatgttttgtataaaatccctacataagagaatactaacatataagtaatagtaaggttaacaaaaactaagctaaatacaatgtctcaccacagtggaattcatcacgtccatcctcacaatctttctgaccatcgcatatccaggtattcaaaatgcatcttccactaggacaactaaaataattttcttcacayttgtgtttgttttgaactgtgataaaatatggaatgtcaaacaatttcattttagacttctgaaatataggtagataaatcattaatactccctaaactgaaagagataaataacaagtaagcttaaaaatag

SEQ ID NO: 175436 - DNA, 428 bp, Homo sapiens
atgcatagcaagaatactcaacaaaacccaaaagaagtttgaaatctaaccctaagaaaacagaaaaaaaaaaaaaaaagaaaattcaggatttgaaagacaacatagcaggattaagaaagaactaaacagaacttttggaattaaaaaaaatcactgcagaatttcaaaatacaattgaaagccttaacaatagattagaccaagcagaagaaagaattccaaagctttaagactggtccttcatattaatttttttcaaaaataaaaaagaattttagaaaatgaacaaagcttttgagaaatataggatcaagaaaagtgataaaatctatgacttattgagattcatgagagagaagagaaagtatgcaacttaraaaacatatttgatggtataattcatgaaaatatccccaatcttgcta

SEQ ID NO: 175437 - DNA, 527 bp, Homo sapiens
agatctcctgcaagatactgaacaagacaatcatccccaaggcacagcacacggtcattgggctatccaacatcaacayaaaagaagtttgaaagcagctacaaaaattggccacatcacctgtaaagtgaaacctagcagactaacaacagacttctcagcagaaaccttaaaatctagaagagattggggacctatttttagcattcttaaggaaaataaatgccagttaagaattttacactaacctccatagataaaggagaaataaagtctttcccagacaagcaattgttaaaggactagatcaccaccagatcagtactagaagagagcctgagggggttctttgaatggaaatgaaagaatgatactaccacaaaagaacacataagcacacagcccatgaaccctacaaagcaactacacaaatgacactaaaaatcacctagctaacaacactacaacaagaataaaatctcacatatcaatattaaccttcaatgtaaatggccttaaaagacata

SEQ ID NO: 175438 - DNA, 558 bp, Homo sapiens
ggacctatttttagcattcttaaggaaaataaatgccagttaagaattttacactaacctccatagataaaggagaaataaagtctttcccagacaagcaattgttaaaggactagatcaccaccagatcagtactagaagagagcytgagggggttctttgaatggaaatgaaagaatgatactaccacaaaagaacacataagcacacagcccatgaaccctacaaagcaactacacaaatgacactaaaaatcacctagctaacaacactacaacaagaataaaatctcacatatcaatattaaccttcaatgtaaatggccttaaaagacatacagttgtaaactggataaaaaagcaaaacctatccttctgccatcttcaagagatctatctgacataatgacacccataggctcaaagaaaaggatggagaaagatctatcatgcaaatggaaaacaaaaaaagagcagtatttgctattcgtatatcagatataatagactttaaacaacaacagtagaaaaaaataaagaagagcacctagattcataa

SEQ ID NO: 175439 - DNA, 557 bp, Homo sapiens
gacctatttttagcattcttaaggaaaataaatgccagttaagaattttacactaacctccatagataaaggagaaataaagtctttcccagacaagcaattgttaaaggactagatcaccaccagatcagtactagaagagagcctgagggggttctttgaatggaaatgaaagaatgatactaccacaaaagaacacataagcacacagcccatgaaccctacaaagcaactrcacaaatgacactaaaaatcacctagctaacaacactacaacaagaataaaatctcacatatcaatattaaccttcaatgtaaatggccttaaaagacatacagttgtaaactggataaaaaagcaaaacctatccttctgccatcttcaagagatctatctgacataatgacacccataggctcaaagaaaaggatggagaaagatctatcatgcaaatggaaaacaaaaaaagagcagtatttgctattcgtatatcagatataatagactttaaacaacaacagtagaaaaaaataaagaagagcacctagattcataa

SEQ ID NO: 175440 - DNA, 558 bp, Homo sapiens
ggacctatttttagcattcttaaggaaaataaatgccagttaagaattttacactaacctccatagataaaggagaaataaagtctttcccagacaagcaattgttaaaggactagatcaccaccagatcagtactagaagagagcctgagggggttctttgaatggaaatgaaagaatgatactaccacaaaagaacacataagcacacagcccatgaaccctacaaagcaactacacaaatgacactaaaaatcacctagctaacaacactacaacaagaataaaatctcacatatcaatattaaccttcaatgtaaatggccttaaaagacatasagttgtaaactggataaaaaagcaaaacctatccttctgccatcttcaagagatctatctgacataatgacacccataggctcaaagaaaaggatggagaaagatctatcatgcaaatggaaaacaaaaaaagagcagtatttgctattcgtatatcagatataatagactttaaacaacaacagtagaaaaaaataaagaagagcacctagattcataa

SEQ ID NO: 175441 - DNA, 588 bp, Homo sapiens
atccccaaggcacagcacacggtcattgggctatccaacatcaacataaaagaagtttgaaagcagctacaaaaattggccacatcacctgtaaagtgaaacctagcagactaacaacagacttctcagcagaaaccttaaaatctagaagagattggggacctatttttagcattcttaaggaaaataaatgccagttaagaattttacactaacctccatagataaaggagaaataaagtctttcccagacaagcaattgttaaaggactagatcaccaccagatcagtactagaagagagcctgagggggttctttgaatggaaatgaaagaatgatactaccacaaaagaacacataagcacacagcccatgaaccctacaaagcaactacacaaatgacactaaaaatcacctagctaacaacactacaacaagaataaaatctcacatatcaatattaaccttcaatgtaaatggccttaaaagacatacagttgtaaactggataaaaaagcaaaacctatccttctgccatcttcaagagayctatctgacataatgacacccataggctcaaagaaaag

SEQ ID NO: 175442 - DNA, 520 bp, Homo sapiens
aaaccatatatcacatgttcccagttgcaagtgggagctaaacattgagtacacaacgaagtaaatatggaacaatagatactggggactccaaaaggggagagggaggaaggaggcaaaggactgaaaaactattaggtaccatgttcactaaatgcgtgacaggatcaatacaagcccaaacctcagcatcatgcagtatacccaagtaataagcctgcacatgtccactctaagtgtaaaatcaaaatttaaacaattatatacatgataaaagaaccatcacaaatttagaaataataaatgtgtcatctactaaaaaatcagactttcayagtagattgtgtgtgtataaacttttgtgtaaaatacttatgaatataatttcttaaaattgtttaaaaattattatatatcaactaaacatgaaaaacatgggtgtagcagcagggtggagagaggcaaaccaatatgagacaaaatttaatagtgtcctatatagaatctctacttccagtta

SEQ ID NO: 175443 - DNA, 520 bp, Homo sapiens
tttgggctaaaaaatatttttgctggcctagcacggtggcttactcctgtaatcccagcactttgggagaccaaggtgggtggatcacctgaggtcaggagttcaagaccagcctgggcaacatagtaaaaccccatctcttctaaaaatacagaaattagctgggtgcagtggtatgtgcctgtaattccagctactctggaggctgaggcaggagaatcgcttgagcctgggaggcggaggttgcagtgagtcgagattctgccactgcactccaatctgggcaacacagcragacttcgtctcaatatattttataaaatatatattatattttatttatgtatatatatatatatatagcttagttgttttaaaatcactgttaaaacatattttgaaaaagttttagaaactagcaaatgtccaagccacatggtttaaaagctaaataataaatacaatgtaattctctagcaactgaatttagctatgactgaacccattacaaaggttgctt

SEQ ID NO: 175444 - DNA, 467 bp, Homo sapiens
taattgataagctggagtccattaaacttaaaagcctgttctgcaaatgacaatgtcaagagaataggaagataagccacaaactaatagaatatatttgcaaaacatgcatctaatgaagaactgttatccataatatacaaaaaacacttacaactcaacaagagaaaaatgaacacctgayttaaaaaaatgggcaaaatgccttaacagacacctcatcaaacaagatatacagatagtaaataagcatatgaaaagatgttcaacatcacatgtcattaggaaactgcaaatcaaaacaacaatgagatactactacatctctattagaatccagaacagtgactacataaaatgctgatggggctatagagcaacaagaactctccttcactgctgataagaatgttaggtggtacagccactttgaaagactgtgttgtggcttcttacaaaactaaata

SEQ ID NO: 175445 - DNA, 558 bp, Homo sapiens
taccatagcaatttgggttgtttttatcgtgagttccacaagtgagcaacatttgcagccttgcctaggagacctaggtagtaccaggagggactgattctacaaagcatgcttggccagaggccttcacagaggcaaagtccctttggagaccacataaggagttccagcagaggccaggcctggctgacccacccctgttcctgggccccggatcctggaccaggccagctcagccctgaggagacaggtcyggagaaatgtcctgctctcttccctgatccacctcagccctggagactccgggatcaaaacttatgtcttgtctattacccctcctagaatgtaagctccatgcatgcaaggaattttgtttgtttaatcatctactgtagccccagtgcctagaacaatgctgtcacacaaaagcaaaataaatagttgtcagatgaatgacaaatctaaggtctagatttatctgtacactttgggtagtctccattgtgcctgcaaaataattgttctcttccattgagatctttcacagggttccacagg

SEQ ID NO: 175446 - DNA, 546 bp, Homo sapiens
ggtgtgtgcccatccatcctgctgcctacaccactacagatggagtggacctccatctctacctctccctgtgatggcttctccaggctgagtctccaggcatctgcttttctgggatggatatttggcctaagctatggcagggccagaatctcctgtttcctgtctcctgccaggcttaatcaggtagatacccatgatctctctgcttccagctttccttctaagaggagagaacacatggctctctaggctacaatagggtcaggctgctcaaccccaatgtgacataatttctaaaaacgtctatgtttccttcctgacaaccctatagaagctacctattgtttctccttaaggctctgggtagccactgcctggaaacatgagtgtctattggtagaaccttgcccagggcagttaggaacccaagtataagwatcattgcaatgagatatccaaaaaaggtagagggaaagttttgctctggctgtaggcaatcacagcctgaattagggatgaattatttatggagatttgacaaac

SEQ ID NO: 175447 - DNA, 582 bp, Homo sapiens
agctccttcaggacctggtatgtaggaartgctctataaatatgtattaaataaaggattaataaatacatggccctcctacatttcgttacttaaacaggccacttaagacaataatataatgtatggagctcctacacagtgctacaactgttaggtgaggcctttattccatacaacactgtatgttaagtccagagtggcccaggggttgcctgagttacggaattggcaggtggcagccctggtgtcaaatctaagtctggttctcaagcctttgttctcaatcccatattcttgccaccatgacctctatggatttgcatgaagttgtccagtgtcaaatagacactaagctacagttggtgcatatgtactaaatcagattcattttaagtatccagaaaataaggctgaacttaatcctaatgacaggctgggtgggccagggtagataggaagggtgagtgggtaatcactatttcctcattgtctgctatgatgaccatctgcttttatttcaccaggcatcacatcttctgcattggcaaaactctcaggtagtttatccaaaaagtgatt

SEQ ID NO: 175448 - DNA, 498 bp, Homo sapiens
gaacccactcaaaaagaatgggtatcaaacatcctgcactcaggttgtgttggaaccacgcccttgaaggcaacacaatgtaccaatgattggacttcctagaagtacattccctctgcgtttccatgtttggcttatcacagaccagttcatcaaggacttgacattcactctgtttgtttctgggagaccatttaagtactctgtgtgtgtgtgtgtgtrtgtgtgtgtgtgtgtgtgtattaagggccagtgctatgcaaactgcaaactgtatgaaaatgttttttttcttatggatgagaagagactataatatctcaaggcctctggcacaggaattctttagagcaggataaacaaatcattattctcatgccactgatggcagtgaagcagtttctctactttctttccatttgcacttctttcttttctctccttctcttttctttacttttctcctattcttagtctccttctgccttctcttccttc

SEQ ID NO: 175449 - DNA, 571 bp, Homo sapiens
atatttattccaaggttctatttcaatcagatgttaagacaactgggacaacacccttactggactagtcacaaaggagacaaacatgccagaacagccatcccacatmtctaatttcaaaggtcatgagaatggtggttgtatacaccctactgcagctttgatttgttggggtggaatttgcaatgctatatgaaatcaacaatgctgacttttgaatttcctttttttaaaatcctctctctttttaaaatctctcgctctctctctctgtgttttctattgagaccatgatgttgcaatctgtttttcatctgagaaatgtttcactgaggaaacatgccaagagataaatggggaagtgctgaggtgtcgtccatctataaaggtggtttttcagttgagtcagggaggagactaagatttctgaagtgttctatgaaccccattcctccggatgtttggtttataagtgaagcttccaaatctctgatttctttacctgaatgccttcaggcctccttcattaatcatgttcttcccattcttccaaaacagcctccttttctta

SEQ ID NO: 175450 - DNA, 571 bp, Homo sapiens
atatttattccaaggttctatttcaatcagatgttaagacaactgggacaacacccttactggactagtcacaaaggagacaaacatgccagaacagccatcccacatctctaatttcaaaggtcatgagaatggtggttgtatacaccctactgcagctttgatttgttggggtggaatttgcaatgctatatgaaatcaacaatgctgacttttgaatttcctttttttaaaatcctctctctttttaaaatctctcgctctctctctctgtgttttctattgagaccatgatgttgcaatctgtttttcatctgagaaatgtttcactgaggaaacatgccaagagataamtggggaagtgctgaggtgtcgtccatctataaaggtggtttttcagttgagtcagggaggagactaagatttctgaagtgttctatgaaccccattcctccggatgtttggtttataagtgaagcttccaaatctctgatttctttacctgaatgccttcaggcctccttcattaatcatgttcttcccattcttccaaaacagcctccttttctta

SEQ ID NO: 175451 - DNA, 571 bp, Homo sapiens
atatttattccaaggttctatttcaatcagatgttaagacaactgggacaacacccttactggactagtcacaaaggagacaaacatgccagaacagccatcccacatctctaatttcaaaggtcatgagaatggtggttgtatacaccctactgcagctttgatttgttggggtggaatttgcaatgctatatgaaatcaacaatgctgacttttgaatttcctttttttaaaatcctctctctttttaaaatctctcgctctctctctctgtgttttctattgagaccatgatgttgcaatctgtttttcatctgagaaatgtttcactgaggaaacatgccaagagataaatggggaagtgctgaggtgtcgtccatctataaaggtggtttttcagttgagtcagggaggagactaagatttctgaagtgttctatgaaccccattcctccggwtgtttggtttataagtgaagcttccaaatctctgatttctttacctgaatgccttcaggcctccttcattaatcatgttcttcccattcttccaaaacagcctccttttctta

SEQ ID NO: 175452 - DNA, 504 bp, Homo sapiens
ccaggccagtttaccagatggatgaggatgaaaggcagggcctggagagagtctatgcacagggakgggttgcagcgttttactgtctccctaaagaggtcttcatacttaatgcaaaaattatggtttaccgtgagagtcaggcatttaaagagaaatttctgcccattctgtcaaatgccctcagacatggaatcaagtgagagaactctgaatattagcctttatctgaattgaccaaaaaaggctctctagggacagaaaactggaagtttgaatagtctgctaactacctctgtcatggcaaatcctgagggtagaatgagcatgcagactgcatggacctgggccattgggacactggagtgatggccccagatggctctgtggacagattggggactatggggagggcatcccagggcagaagaaatgggtcttcaagactatgtttcttcctgttttagtgcatttttcacctcttctgcaaagagtttgtgccat

SEQ ID NO: 175453 - DNA, 537 bp, Homo sapiens
tgattggaatttcctaaggggtttattcaagcttcagataactttttcccctttaaaagagtattatgtcatcctgtcacatgtaccatatgatatgacataaaggtgagatggcatatcatatgattaattaacataatataatacagtatgatataatataraatagtatagtataaaaaagtacatggaacatttttacttatgctggcaccataatatatgttttccctgttgccctgcttcagagcctggaagaaaggaaagctcctaattttctttctgtctggaaggccatccacccacaggtagcatggtgttgctggcacatttgccacggttttgcctgctgttggccaagggcatagtcattccaggcagtcaacaggtgatgcattgccaactccacctcctctatagagaaacacaggttatctgaaaaatagagagagtcaccccttttctatactgggccaggacatctacttgacatcagccctgagctttcactagcaagtgtgcatctctcatttctgg

SEQ ID NO: 175454 - DNA, 537 bp, Homo sapiens
aaggaagtgaaaaacagaaaatcagcagagaaaatctatgaagcaaaaatttggttctttcaaaagacagataaaattagtaagtctctagccaggctaactaagaaaaaagaaaggacacaaattattaatatcagaaatgaaataagagacattggtacagattccatggacattaaaagataatgaacaacactatgaataactgtatgcccacaaatttggtaaccagatgaaacagactaattccttgaaagatgcaatctgccaagactcacagaagcagaaacagaatasgcccatatctattaaagaaattcaatcaataattaataatcttccaatacagaaagcatgagaccagagaggttcactggtgaattctatcaaatgcttaaggaagaaattatagcaattctcttcaatctttttcagcagatagaagtagagggaatccttgctaactcattctatgaggccagcatccccctaataccaaaaccagacaaaaacattacaaaaaaagaaaatcacagg

SEQ ID NO: 175455 - DNA, 573 bp, Homo sapiens
tattctctatctttatgaatttgtctattcctgacattgcataaaagtgtagtaaggcaaaatgtggccttttgtgactggcttctttcacttgcaatactgttttaaaggttcattaatgttttagcatgcatcagtgcttcatttctttttattgcctaatagcagtccattatatgtatataccatatttggtttatcttttcctcagttgatgaatgtttcggttatttccactttttgactattatagttaatgatattatgaagatttgtgtatgagttttgcgaggatatgtgcttttgcttgggtacatacctcagcatgaaatttctgggtcataggataactgcatttaacattttgaaggactggcaaactgctttccawagcagctatgctgtttgcaatcctaccagcaatgtatgaaggtttccatttctcgacattcttgctaacacttgttattgtctgtctttttgattctggttgtcctagtgagtataaggtggtccttcattgtggttttgatttgcatttccttcaacgctaatgatgttgactattttttc

SEQ ID NO: 175456 - DNA, 571 bp, Homo sapiens
caacataacccatcccacacccagagaaagactgattcaggaatgggcatcagacccagtcctgtctactcctgtggctttcgttggtatgaacttgtccactggaattaaaactggaaagataaaaaccatggcgattggggcatggggtggcggtggccatagagaaaataaatatcttattaatgcagataacacagagggaagcagaactaagtgatggggtgaaaccgaatcctgaagacgctcagactccaacttggacaaaaatcatcacaacccttttagttccatgagccaataaacttattttaaggaagagaaggcttaagccagtttaatttgggtttctattacatataaccaaaagactatccattttttttttcagtaccaatggggtctccctatgtggcccaggctggtttcaaacttatggcttcaagtgatcctcctatctcagcctcccaaagtgctcccataaattatttcaggaatttatagtagacttgccagtacccactgcttctctgccactctggcgtygatccttcccaccagtatcttcagt

SEQ ID NO: 175457 - DNA, 569 bp, Homo sapiens
attctcacaaaacaaaggtgataaccatcatctgtgttggtttgtcaacttgaaaacagcaactcttgaccagatagtttaagaaaatgtgtgccccatgccaaatccacagatattacggtgatgtacccagacagtgatttctgagggcggggagctggaaaatctcattcggactcctatggcacgacagcaggacccatgagactgtggtaaccggattggtgccctctccagttcctgtccccatcagcatttgctgcccacctagaacctctctcccactatctaccgaagccattcaggcggcgctggtctgaaccctggttctgggtctagctacagtgattggttcagagtggatgtataatctaagttatgccacacaaaggcagtgatcacccaccctgggacttgtgctgggcctgtctggggagagcagctttctccctgcagtggccaagtcagtagatggatgccgggagctgctagcagggctatcttgcctccaggaaggaaaggcaggcctgagaaagagccrggacagggagacaggatgttaaaaacac

SEQ ID NO: 175458 - DNA, 562 bp, Homo sapiens
cagaatgtttctgcctaaggatggttttcaaagtatttaacaaatggcgtggcgggcacagagctgagagctggttctagatccacctgctgtgctagccactgacacttctgctgatggccttgcagagttgggtgcaggtatcccagaagtggagccccacaaggagacggagatgattggatgacacggcagggcacctggggcagcagctgccacccatcgtccacgtgccataaagaagtgaaactgccagaactcaaagtctgtgcacatggcacttagtacctgattctaaaaatatggcccctgggttatgacagaggcgtctggttactgckgggattccacgggcagcctgaggacccgccccagtgctgtggatgtgtctggagaaccatcagatcgtccacgtgcacttccggggtgtgtcacctgagggaggttattgcatttgagtagaggtgggggacagcccaggatgatttctaggtgttggcagggttgttgtctacatgatgccaaatatgccttccagctatctgctgctcaagtctcaatt

SEQ ID NO: 175459 - DNA, 594 bp, Homo sapiens
tcttaatctatacaacaaactgccatggcatgagtttacctatataacaaacccgcacatgtacccctgaaactaaaagttagtgtttttamaaaagttgccatgtccaagaaaagttctttccagagtcatgagccaaaataggtcccacattatcattctctatatgaagaagctgcagcccacaggcatgaccagcatggctcaggatgacccatctacttatagaataccacatcctgcgagggctgcccagaaggccctcatggccacagacatacagttatcctagatatctctctttctcatgcaaatttccgtgctcagctctgattaattgtgtgctcagctctggcttctctgctgagctgtggatctactgaccaccctgacatttttaggagactgtctcaaaaaagcagcaaacccaaacttcccaaacaaaatcgtgatacccaatccccatcccactggagtttcctctctcagtaactggcatctccatatgttccactgtacaagccagaatcttggggattgtccctaatgcctttatgttctccactgttcacatccaatctagcaccaatatcc

SEQ ID NO: 175460 - DNA, 580 bp, Homo sapiens
attatcatttgtgtggggttgaagagagactggttctgaaaggcatggtagtaaatcataattagaatggccttctaagtctgattataagtgagcaggcatcctcttctgaaatatactcagccttccacatggaataaattcctctccaccacaactataaatttgggtgaagaggaagattaagttttattatattccacacaaatcatttccaaatcctaaaatgattcaggwaattaggttgaattctcagactcttcccaatcacctggggctatgtttgtgagaaaatcaagttttcaacatcagtggatcttagaaggtatgtgtttgagcaggtatctagacctgtgtattagatccttaatttttacaacttttttcaaacatgctttctttgtttttaaaaacttttcttttacattttttaactaaatacgttcctattatagtttttctttctactccatttgtattacccattctccaaatcttaaatgaattatggttgacttacaaggatatagaatatatgacatttttacattgccaatctataaaccagagctaagtcaat

SEQ ID NO: 175461 - DNA, 558 bp, Homo sapiens
attcgtttgatggtttgttcatacacatcatgcctagaatgacgcctggaatgataaaggtcgtctgatatttaaaattaaaaagtttaagtcttatgatttgagatgattttttttttgttttcatgcttctacacagcttgaaatttttataatcggcattatttttaataaaagccgaagttattaccaaaacacatagggccttatatctccaaggagttggcagtggtgttggctgatggaggctaatgcacctttaaggctgcaagcttccatgcgaccatcacatgctggtggacagggagsctcggcaaggagactgaatttattcacaggccgctggtaggctggagaggcggggaaagcggaggggagtaacgatgtaatccagcaggaaatccataagcagggagggtcagatgagccgctgagtgctggggagcagggcagacaccactgcaaggttgacgacagtaagtgtccatcagccagcgagtgaatacataaaatgtgcatcccacaatggaagaggatttatccacgaaaaggaaggaa

SEQ ID NO: 175462 - DNA, 558 bp, Homo sapiens
attcgtttgatggtttgttcatacacatcatgcctagaatgacgcctggaatgataaaggtcgtctgatatttaaaattaaaaagtttaagtcttatgatttgagatgattttttttttgttttcatgcttctacacagcttgaaatttttataatcggcattatttttaataaaagccgaagttattaccaaaacacatagggccttatatctccaaggagttggcagtggtgttggctgatggaggctaatgcacctttaaggctgcaagcttccatgcgaccatcacatgctggtggacagggaggctcggcaaggagactgaatttattcacaggccgctggtaggctggagaggcggggaaagcggaggggagtaacgatgtaatccagcaggaaatccataagcagggagggtcagatgagccgctgagtgctggggagcagggcagacaccactgcaaggttgacgacagtaagtgtccatcagccarcgagtgaatacataaaatgtgcatcccacaatggaagaggatttatccacgaaaaggaaggaa

SEQ ID NO: 175463 - DNA, 330 bp, Homo sapiens
tacactgtaaataattgaaatggaaggatacaacgaaatgacaaagatagctgtagtcagaattccatatttatagaatttgaataaatagaaataacattgaatgtatttactgaagctcagtgaaagcacccaagaaaatagatgttcaatgtatttccagaaaagagacaaagaaaagtaaaataaaaggaagaagaaggaaaagaacagatggtatcaagagaactagagagtgaaataagggaaattaggggagataattctcaaaggtcaaatttatattgtcagwtattgttagggatgtgttaaccaaagaaagaaagcaat

SEQ ID NO: 175464 - DNA, 494 bp, Homo sapiens
gacgatgttaaatattttcctgacttcaaattattttattgaacagagaaattgtcattctgttttcagctataaaaaaatcatgcctcctattatgtcaaagactatatcttttttwatgatgtttcttgggttgctttttaactgagtaccctactgacatctattaaaatttaacagctgctaaatactagagaccccagcaagttgtgattttctttctcttttcttttcttttttctttaaggatcatatgaagtagcaaggctttgaagtgtggatcaagaaggaaattctttgttttgaatttcagactgcacacttattttttggcaaagaactatacaacaaatcatagaacgtgtttggtctacagagtaaaacactggcatgttttaattcaaatagactcctagccaaggtagtaaaaattatatcatggtcatttttctagatacatatgcacttctttagtaggtattctgtctgtattc

SEQ ID NO: 175465 - DNA, 599 bp, Homo sapiens
gttacactttatacaggcagagataaaaaagttccaacaaggtcacatttgccatacaagactagtgcatatgccacagctatttgattgattacagactgctacattacaaggaagattactttattactctgtgaatagaggcaatgatctaaggggatcttatggctgccacttaattatttacaggaaataattaattggtcttaattatttacaggaaaaaggtagaagttgcaaccgcatgctctgtgactcagggcgcatagccatactcttctcaaggctcagaaaatttaaagttccaacaactttaagtttgaattatgtaatttcacaggtgtttgtacaattacttcttgttctgcactctccctgggaccatcactcacaagccttcagaatttcagttatcaaatttaggttgttgactcccagactrttttctctaatccaaatttccctccttacgatatgaaccacatatgaagctaaaatctagaaacagatatttgaaattttagaagtctgaaattaaattcctttcattccctatacctttcctccttctctgtatcttatcttatcttatctaaagg

SEQ ID NO: 175466 - DNA, 541 bp, Homo sapiens
tttactataaaatgtgtaggcacaatgtgtgtttacatttaaataactaccacggcaatttaggaaaagcttatttttaaaactttactaatctttaaaaaaagcatgtggttgactgagttcattaatacacaatacaagtgaccaygaagcagcacacttcattaaaagaagtaattttgggaatatagactgatatatttcaaggggcttattttaatttgaatgcttcagaccttaagacttctattagtttgattctccagcacaggtcctcctttgaacaacccccactctttttaaggaaatctaccttgagttaggttcattttaattagcagtcacgtagcagaaacgtagaagcaaggagagaaagggagaaaaatcaaaggtaaaacatgcgaaagagattaggaaaatttataggagctggaatagatatgacaagctttatttggtagaggcatattaaatgcagtgtcttggggaaaaatgtcttactgttatgataattaaataacattgtgtttggtgaaatgat

SEQ ID NO: 175467 - DNA, 541 bp, Homo sapiens
tttactataaaatgtgtaggcacaatgtgtgtttacatttaaataactaccacggcaatttaggaaaagcttatttttaaaactttactaatctttaaaaaaagcatgtggttgactgagttcattaatacacaatacaagtgaccacgaagcagcacacttcattaaaagaagtaattttgggaatatagactgatatatttcaaggggcttattttaatttgaatgcttcagaccttaagacttctattrgtttgattctccagcacaggtcctcctttgaacaacccccactctttttaaggaaatctaccttgagttaggttcattttaattagcagtcacgtagcagaaacgtagaagcaaggagagaaagggagaaaaatcaaaggtaaaacatgcgaaagagattaggaaaatttataggagctggaatagatatgacaagctttatttggtagaggcatattaaatgcagtgtcttggggaaaaatgtcttactgttatgataattaaataacattgtgtttggtgaaatgat

SEQ ID NO: 175468 - DNA, 541 bp, Homo sapiens
tttactataaaatgtgtaggcacaatgtgtgtttacatttaaataactaccacggcaatttaggaaaagcttatttttaaaactttactaatctttaaaaaaagcatgtggttgactgagttcattaatacacaatacaagtgaccacgaagcagcacacttcattaaaagaagtaattttgggaatatagactgatatatttcaaggggcttattttaatttgaatgcttcagaccttaagacttctattagtttgattctccagcacargtcctcctttgaacaacccccactctttttaaggaaatctaccttgagttaggttcattttaattagcagtcacgtagcagaaacgtagaagcaaggagagaaagggagaaaaatcaaaggtaaaacatgcgaaagagattaggaaaatttataggagctggaatagatatgacaagctttatttggtagaggcatattaaatgcagtgtcttggggaaaaatgtcttactgttatgataattaaataacattgtgtttggtgaaatgat

SEQ ID NO: 175469 - DNA, 541 bp, Homo sapiens
tttactataaaatgtgtaggcacaatgtgtgtttacatttaaataactaccacggcaatttaggaaaagcttatttttaaaactttactaatctttaaaaaaagcatgtggttgactgagttcattaatacacaatacaagtgaccacgaagcagcacacttcattaaaagaagtaattttgggaatatagactgatatatttcaaggggcttattttaatttgaatgcttcagaccttaagacttctattagtttgattctccagcacaggtcctcctttgaacaacccccactctttttaaggaaatctaccttgagttaggttcatttkaattagcagtcacgtagcagaaacgtagaagcaaggagagaaagggagaaaaatcaaaggtaaaacatgcgaaagagattaggaaaatttataggagctggaatagatatgacaagctttatttggtagaggcatattaaatgcagtgtcttggggaaaaatgtcttactgttatgataattaaataacattgtgtttggtgaaatgat

SEQ ID NO: 175470 - DNA, 600 bp, Homo sapiens
gtttcttttgtatgctttatttttgtttttgtttcttgcaatgtaaataaaagaaaatcactcaaattgtgaactatttcttttacacaagaggtcctcagccttacattgactgtcaatttactttatattcagttgtttacatcattaagtaatcagatattttaagacttctgtattagttcattctcacactgctgtaaagaaatacctgagactgggcaatttatttttaaaaagaggtttaactggctcacagttcagcaggctttacaggaagcagggctggggaggcctcagtaaacttacaaccatagtagaaggcaaaagggaagcaggcactccttacatggycagagcaggaggaagagagacaactggaaagtgctgcacacttttaaacaaccaggtcttgtgagaactcactcactgtcaagagagaagagagggggaagttcacacccatgatttaatcacctctcaccacgcccctccaccaacattggggattacaattcgacaagagatttgggcagggacccaaatccaaaccatatcaacttctaaaataatgtttaattgattgtctaatttcccaat

SEQ ID NO: 175471 - DNA, 355 bp, Homo sapiens
actttctggctccatattctacatttatttggcmtactaatgatcaaaatgcaaggtgagcttctttaccctatttagttcaatttgattcaacaaatatttatgggaaaactattattagaggtgcctaatacaaatacaccaaagtaaaacggaagccctttctcaaaaggattgcattctaaggcagaatggtaactgttatagtttggactccccaggcagtaggcatttacatagagatttgtcagcaggaaatttattaaaaagaaaggaaaaagcaggactgtgatgtagtcacaacaaagacatcactgaaatccatgagaaggtctgaagctcagatgaccatcag

SEQ ID NO: 175472 - DNA, 576 bp, Homo sapiens
gtttaagtttcaacaagggttttggaggaaacaaaacattcaaaccatagcagttgggatacgatcataaagggcaaagattttagattgatgctataggtaatggaaatcattaaagattttaggtggtgaagggacatgattttacaagtagactacaaagatcaccttggaagcagagagaagtatagaataaaaaggagaacttttgaagaacataagattactggattgtatgtttgcaaggaatactacttgaagaggctcctgtgggaaactagggtaaaagtcagttgtgctaacacagtggtaagataattataaaagaagggacaatgagataaatgaatgatggagacaggagctgtgggtgactgtcaatggaatttatgcataatatttttctaaacagatctttggtaaaattgtttcaaataccactttcctataagctgtcttctggtgatgttgctttatcttgaaaggtatgcaatttcttcttaacatgcagcagaagccatttgaaaaaaamcagtaacatataattcttttctggaaggttacttgttcttcctc

SEQ ID NO: 175473 - DNA, 502 bp, Homo sapiens
taaaagagaacaaggcccaatactacagaaattctgayatttctccttaagtacaattggattttccagctggggagacatgtcagaaataagggcaaaaggctgggagtgggggctcatgcttgcaatcccggcacttcgggaggctgaagtggggggatctcttgacactaggagttgagaccagcctgggtaacatagtgagaccttgtcgctacaaaaaaaattttttaaaaagttatccaggtatcatggcgcctgcctgtagtcccagctacttggaaggctgaggcaggaggactgcttgagcccaggagactgaggctgcagcgagttacagttgcaccactgcactctagctggggtggcagagtaagaccttgtcttggggaaaaataaataaatatatgagggaaaaggaaaggccacctcactaaaacttatgtggcatacctaacaatttggtcatttttaatataatgaaaaaattcaaaattattat

SEQ ID NO: 175474 - DNA, 502 bp, Homo sapiens
taaaagagaacaaggcccaatactacagaaattctgatatttctccttaagtwcaattggattttccagctggggagacatgtcagaaataagggcaaaaggctgggagtgggggctcatgcttgcaatcccggcacttcgggaggctgaagtggggggatctcttgacactaggagttgagaccagcctgggtaacatagtgagaccttgtcgctacaaaaaaaattttttaaaaagttatccaggtatcatggcgcctgcctgtagtcccagctacttggaaggctgaggcaggaggactgcttgagcccaggagactgaggctgcagcgagttacagttgcaccactgcactctagctggggtggcagagtaagaccttgtcttggggaaaaataaataaatatatgagggaaaaggaaaggccacctcactaaaacttatgtggcatacctaacaatttggtcatttttaatataatgaaaaaattcaaaattattat

SEQ ID NO: 175475 - DNA, 502 bp, Homo sapiens
taaaagagaacaaggcccaatactacagaaattctgatatttctccttaagtacaattggattttccagctggggagacatgtcagaaataagggcamaaggctgggagtgggggctcatgcttgcaatcccggcacttcgggaggctgaagtggggggatctcttgacactaggagttgagaccagcctgggtaacatagtgagaccttgtcgctacaaaaaaaattttttaaaaagttatccaggtatcatggcgcctgcctgtagtcccagctacttggaaggctgaggcaggaggactgcttgagcccaggagactgaggctgcagcgagttacagttgcaccactgcactctagctggggtggcagagtaagaccttgtcttggggaaaaataaataaatatatgagggaaaaggaaaggccacctcactaaaacttatgtggcatacctaacaatttggtcatttttaatataatgaaaaaattcaaaattattat

SEQ ID NO: 175476 - DNA, 441 bp, Homo sapiens
gcttacattttataactcaacaagaaaagccaaagtatctattcctttcagaaaataaacatgtaatttaattatgttcataacaaatcatttagtaaacaatcatatgtgaacacttccaggcggtgccaagtcccagctcctaaaacttagcgttaccctcaaacacccagatgacagcatatggaacagagataytcactatcagaagttctctgttttgaaaaaagaataactgatgtgatgaatttatgtaatttaacaattaatctacctcacgtgcttgtaggtatgtattcatttcctaccaccgtagtggaagagagactatccctatctatacacctggtaacattcccaacagtaagccgtgagattctgcttgaaatcacctctcagacaaataaaaaacagtcctgggaaatgtacaacactcattct

SEQ ID NO: 175477 - DNA, 441 bp, Homo sapiens
gcttacattttataactcaacaagaaaagccaaagtatctattcctttcagaaaataaacatgtaatttaattatgttcataacaaatcatttagtaaacaatcatatgtgaacacttccaggcggtgccaagtcccagctcctaaaacttagcgttaccctcaaacacccagatgacagcatatggaacagagatattcactatcagaagttctctgttttgaaaaaagaataactgatgtgatraatttatgtaatttaacaattaatctacctcacgtgcttgtaggtatgtattcatttcctaccaccgtagtggaagagagactatccctatctatacacctggtaacattcccaacagtaagccgtgagattctgcttgaaatcacctctcagacaaataaaaaacagtcctgggaaatgtacaacactcattct

SEQ ID NO: 175478 - DNA, 441 bp, Homo sapiens
gcttacattttataactcaacaagaaaagccaaagtatctattcctttcagaaaataaacatgtaatttaattatgttcataacaaatcatttagtaaacaatcatatgtgaacacttccaggcggtgccaagtcccagctcctaaaacttagcgttaccctcaaacacccagatgacagcatatggaacagagatattcactatcagaagttctctgttttgaaaaaagaataactgatgtgatgaatttatgtaatttaacaattaatctacctcacgtgcttgtaggtatgtattcatttcctaccaccgtagtggaagagagactatccctatcwatacacctggtaacattcccaacagtaagccgtgagattctgcttgaaatcacctctcagacaaataaaaaacagtcctgggaaatgtacaacactcattct

SEQ ID NO: 175479 - DNA, 408 bp, Homo sapiens
ttttatttcatatatttcctattcactttttacatttaaattatggaccatttcatcatataaaaagckccatttctattttaaaaataagtctttgggtttttttgtcttgtaatttccatattacatagtaatgagataaacgttaatgttttcagggtgttttaaattttaaataattactcattgtatccatgtgaaatttgtttttactgcatgcgtgagttggagaaccgttttcacttctgactcaactttaccgtgatctcctcagaactcatacctcttgtagttgggagattgcagtatataattccaataaatggggcaaattcaataataacataatacaaatgagtttgaaagcaggacatgtcttcaaagcatacacaacatgggcctacatat

SEQ ID NO: 175480 - DNA, 408 bp, Homo sapiens
ttttatttcatatatttcctattcactttttacatttaaattatggaccatttcatcatataaaaagcgccatttctattttaaaaataagtctttgggtttttttgtcttgtaatttccatattacatagtaatgagataaacgttaatgttttcagggtgttttaaattttaaataattactcattrtatccatgtgaaatttgtttttactgcatgcgtgagttggagaaccgttttcacttctgactcaactttaccgtgatctcctcagaactcatacctcttgtagttgggagattgcagtatataattccaataaatggggcaaattcaataataacataatacaaatgagtttgaaagcaggacatgtcttcaaagcatacacaacatgggcctacatat

SEQ ID NO: 175481 - DNA, 408 bp, Homo sapiens
ttttatttcatatatttcctattcactttttacatttaaattatggaccatttcatcatataaaaagcgccatttctattttaaaaataagtctttgggtttttttgtcttgtaatttccatattacatagtaatgagataaacgttaatgttttcagggtgttttaaattttaaataattactcattgtatccatgtgaaatttgtttttactgcatgygtgagttggagaaccgttttcacttctgactcaactttaccgtgatctcctcagaactcatacctcttgtagttgggagattgcagtatataattccaataaatggggcaaattcaataataacataatacaaatgagtttgaaagcaggacatgtcttcaaagcatacacaacatgggcctacatat

SEQ ID NO: 175482 - DNA, 338 bp, Homo sapiens
cccatctaagagtatctctctgtgccaatataattgatctcataaagtgrggagagaaataggcaagagtccagctatgctagaagctgtgtctagggttccttatctgctttatgtctctgatttacctaaatattgacaaatacagattaatctctaggtagtagaaaaacagaaggagaaatcgcagttcacagaagaagaagaaaatgcaatcaataattcctagagtcccgcttaagctcagccacagggtactaagtctcttcaggaaaaagcaatggttgtccatcatctgaaaaactgtggcgttgaaccatgggcaccgagagtgcaca

SEQ ID NO: 175483 - DNA, 338 bp, Homo sapiens
cccatctaagagtatctctctgtgccaatataattgatctcataaagtgagragagaaataggcaagagtccagctatgctagaagctgtgtctagggttccttatctgctttatgtctctgatttacctaaatattgacaaatacagattaatctctaggtagtagaaaaacagaaggagaaatcgcagttcacagaagaagaagaaaatgcaatcaataattcctagagtcccgcttaagctcagccacagggtactaagtctcttcaggaaaaagcaatggttgtccatcatctgaaaaactgtggcgttgaaccatgggcaccgagagtgcaca

SEQ ID NO: 175484 - DNA, 338 bp, Homo sapiens
cccatctaagagtatctctctgtgccaatataattgatctcataaagtgaggagagaaayaggcaagagtccagctatgctagaagctgtgtctagggttccttatctgctttatgtctctgatttacctaaatattgacaaatacagattaatctctaggtagtagaaaaacagaaggagaaatcgcagttcacagaagaagaagaaaatgcaatcaataattcctagagtcccgcttaagctcagccacagggtactaagtctcttcaggaaaaagcaatggttgtccatcatctgaaaaactgtggcgttgaaccatgggcaccgagagtgcaca

SEQ ID NO: 175485 - DNA, 338 bp, Homo sapiens
cccatctaagagtatctctctgtgccaatataattgatctcataaagtgaggagagaaataggcaagagtccagctatgctagaagctgtgtctagggttccttatctgctttatgtctctgatttacctaaatattgacaaatacagattaatctctaggtagtagaaaaacagaaggagaaatcgcagttcacagaagaagaagaaaatgcaatcartaattcctagagtcccgcttaagctcagccacagggtactaagtctcttcaggaaaaagcaatggttgtccatcatctgaaaaactgtggcgttgaaccatgggcaccgagagtgcaca

SEQ ID NO: 175486 - DNA, 527 bp, Homo sapiens
tttcacccaggaattattagcaygaaattccaaatttgtgaaatagattcctagatcccccaaccatttcatccttatcttggaggcaatctggaagagataatccccttttagagaaaagcatacctaatcaacgaattatctaaccaacatgtgtggaaaaggagggaacatcgtagagttggcccattttagtcgatgtggtgaaaaatgccacgaagtcagagctcaattggcctcaaaagcctaaaaggtggcacagattagcttcaagggacacatggtatggctggagtcagatgactgttatgctgaagaagtcaacagtggtgactgatatctcaagaagtgggctaaaagtccacttctggttactctgctaggtatggtctaggaattcttcaaccatgagacagataggtcaactttcaccagcaaccccaagtctggtttgcagtattagactctgggttggacacagatttaggttcaatctgcagcttgattgtggtcactctctggaaaac

SEQ ID NO: 175487 - DNA, 474 bp, Homo sapiens
gcatgaaattccaaatttgtgaaatagattcctagatcccccaamcatttcatccttatcttggaggcaatctggaagagataatccccttttagagaaaagcatacctaatcaacgaattatctaaccaacatgtgtggaaaaggagggaacatcgtagagttggcccattttagtcgatgtggtgaaaaatgccacgaagtcagagctcaattggcctcaaaagcctaaaaggtggcacagattagcttcaagggacacatggtatggctggagtcagatgactgttatgctgaagaagtcaacagtggtgactgatatctcaagaagtgggctaaaagtccacttctggttactctgctaggtatggtctaggaattcttcaaccatgagacagataggtcaactttcaccagcaaccccaagtctggtttgcagtattagactctgggttggacacagatttaggttcaa

SEQ ID NO: 175488 - DNA, 527 bp, Homo sapiens
tttcacccaggaattattagcatgaaattccaaatttgtgaaatagattcctagatcccccaaccatttcatccttatcttggaggcaatctggaagagataatcccctttyagagaaaagcatacctaatcaacgaattatctaaccaacatgtgtggaaaaggagggaacatcgtagagttggcccattttagtcgatgtggtgaaaaatgccacgaagtcagagctcaattggcctcaaaagcctaaaaggtggcacagattagcttcaagggacacatggtatggctggagtcagatgactgttatgctgaagaagtcaacagtggtgactgatatctcaagaagtgggctaaaagtccacttctggttactctgctaggtatggtctaggaattcttcaaccatgagacagataggtcaactttcaccagcaaccccaagtctggtttgcagtattagactctgggttggacacagatttaggttcaatctgcagcttgattgtggtcactctctggaaaac

SEQ ID NO: 175489 - DNA, 486 bp, Homo sapiens
ttgtccctcacacaggattccagaacactgctgctggggtctaaatgtttgtctgtcatataggattccagaacactgctacgagggtctgaatgtttcttcctcacagaggattccagaacatgcctgctgtggtctgaatgtttgtccctcacataggtttccagaacactgctatgagggtctgaatgtttgtccatcacacggaattccagaacacagctacgagggtctgagtgattgtccctcacacaggattccagaacactgctgctgccgtctgaaagtttgtccctcacataggatcccagagcactgctactgatgtctgcatgtatgtctgtcgctaaggattccasaacactgctggtgggttctgagtgtttctccctcacatgtaattcaagaagactgcgacgaggatctgaatgtttgcccgtaacaaaggattccagaacattcccgctgtgattttaatgttcgtcc

SEQ ID NO: 175490 - DNA, 606 bp, Homo sapiens
gttctgaatgtgtgtccataacataggattccagaacacttccactgttgttcgaaggtttgtcgatcacataggattccagaacactgctacaattgtctgcatgtttgtccctcacataggattccaggacactactacgagggtctcaaagtttgtccctcacataggattccacaacactcctgctgtgttctgagtgtttgctcctcacataggattccagaacaatccttctgtgttctgaatatttgtctctctcttaggattccagaacactgcttcgattgtctgaatgtttgtccctcccacaggattccaatacactgctatgatggtctgtatgtttttccctcacgtaggattccagaacactgctgctggggtctaaatgtttgttcatcacataggattccagaacacagctatgagagtggaaatgcttgtacctcacatgagattccagaacactcctgctgtggtcttaaagcaagtccctcacatagattccagaacattcctacaagggtctgaatgtttgtcactaacataggatttcagaacaccgctgctggggtctamatgtttgtccgtcacatagaattc

SEQ ID NO: 175491 - DNA, 510 bp, Homo sapiens
gtcagaatgtttgtccataacataggattcctgaacaatcccgctgttgtttgaatgtttgtccctcacataggattccggaacactgctacaattgtctgaatgtttgtccctcacataatattccagaacaatgctacgactgtctgaacgtttgttcctcacaggggattacagaacactgctacgattgtctgaatgcttgtccctcacataggattccagaacaatgctatgattgtctgaatgtttgtccatcacataccattccagaacactgctatgaaggtctgaatgtttgtccctcacatgggattccagaacactgctacgattgtctgaatgcttgtccctcacataggattccagaacaatcctgctgttgtctgaatgtttgtccctcacgttggattccagaacactgctaccagtgtctgaatgtttgtccctcacacgggattccagaacactgcaatgacagcttgaatayttgtccctcacacagaattc

SEQ ID NO: 175492 - DNA, 524 bp, Homo sapiens
cctcacatatgattccagaacactcytgctgttgtctgaatgcttttccctcacacaggttcccagaacactcctgttgggttgtgagtgtttgtccctctcctaagattccagaaaactgctacgaggttctgaatatttgcccctcacataggactccaggacactgctgctgtgttgtaaatgtttgtttctcacataggatttcagaagactcctgctgttgtcttaaagtttgtcccacacataggattccaaaacagtcccgctgttgtttgaatgtttgtcccttacataggattccaaaacaatgctgctggcgtctgaatgtttgtccctcacgtaggattcaagaacaccgttacgaatgtctgaatgtttgttcctcacataggatttcagaacaatacagctgtgatctgactgtttgtccctcaaatagggttccagaacactgctgctgggttctgagtgtttgtccctcacatcggattcctgaacaccgctgcgagtgtctgaatgat

SEQ ID NO: 175493 - DNA, 525 bp, Homo sapiens
tgatatgagtgtttctccctcacatatgattccagaacactcctgctgttgtctgaatgcttttccctcacacaggttcccagaacactcctgttgggttgtgagtgtttgtccctctcctargattccagaaaactgctacgaggttctgaatatttgcccctcacataggactccaggacactgctgctgtgttgtaaatgtttgtttctcacataggatttcagaagactcctgctgttgtcttaaagtttgtcccacacataggattccaaaacagtcccgctgttgtttgaatgtttgtcccttacataggattccaaaacaatgctgctggcgtctgaatgtttgtccctcacgtaggattcaagaacaccgttacgaatgtctgaatgtttgttcctcacataggatttcagaacaatacagctgtgatctgactgtttgtccctcaaatagggttccagaacactgctgctgggttctgagtgtttgtccctcacatcggattcctgaacaccgctg

SEQ ID NO: 175494 - DNA, 526 bp, Homo sapiens
gtgatatgagtgtttctccctcacatatgattccagaacactcctgctgttgtctgaatgcttttccctcacacaggttcccagaacactcctgttgggttgtgagtgtttgtccctctcctaagattccagaaaactgctaygaggttctgaatatttgcccctcacataggactccaggacactgctgctgtgttgtaaatgtttgtttctcacataggatttcagaagactcctgctgttgtcttaaagtttgtcccacacataggattccaaaacagtcccgctgttgtttgaatgtttgtcccttacataggattccaaaacaatgctgctggcgtctgaatgtttgtccctcacgtaggattcaagaacaccgttacgaatgtctgaatgtttgttcctcacataggatttcagaacaatacagctgtgatctgactgtttgtccctcaaatagggttccagaacactgctgctgggttctgagtgtttgtccctcacatcggattcctgaacaccgctg

SEQ ID NO: 175495 - DNA, 529 bp, Homo sapiens
cctcacatatgattccagaacactcctgctgttgtctgaatgcttttccctcacacaggttcccagaacactcctgttgggttgtgagtgtttgtccctctcctaagattccagaaaactgctacgaggttctgaatatttgcccctcacataggactccaggacactgctgctgtgttgtaaatgtttgtttctcacataggatttcagaagactcctgctgttgtcttaaagtttgtcccacacataggattccaaaacastcccgctgttgtttgaatgtttgtcccttacataggattccaaaacaatgctgctggcgtctgaatgtttgtccctcacgtaggattcaagaacaccgttacgaatgtctgaatgtttgttcctcacataggatttcagaacaatacagctgtgatctgactgtttgtccctcaaatagggttccagaacactgctgctgggttctgagtgtttgtccctcacatcggattcctgaacaccgctgcgagtgtctgaatgattgctc

SEQ ID NO: 175496 - DNA, 525 bp, Homo sapiens
tgatatgagtgtttctccctcacatatgattccagaacactcctgctgttgtctgaatgcttttccctcacacaggttcccagaacactcctgttgggttgtgagtgtttgtccctctcctaagattccagaaaactgctacgaggttctgaatatttgcccctcacataggactccaggacactgctgctgtgttgtaaatgtttgtttctcacataggatttcagaagactcctgctgttgtcttaaagtttgtcccacacataggattccaaaacagtcccgctgttgtttgaatgyttgtcccttacataggattccaaaacaatgctgctggcgtctgaatgtttgtccctcacgtaggattcaagaacaccgttacgaatgtctgaatgtttgttcctcacataggatttcagaacaatacagctgtgatctgactgtttgtccctcaaatagggttccagaacactgctgctgggttctgagtgtttgtccctcacatcggattcctgaacaccgctg

SEQ ID NO: 175497 - DNA, 589 bp, Homo sapiens
agaattccagaacactgcaacgggggtctgaatgtatgatcctaacttaggattccagaccactcccgctcttgtttgagtgtttgtctgtcacatgggattccagaacacttctgctagggtctgaatgtttgtccataacataggactccagaacactcccgctgttgtttgaacgtttgtccctcatataggattctagaacactgcttctaggttctgaatgtttgtccctcacgtaggattccagarcactgctacaattgtctgaacctttgtccctcatataatattccagaacacttctgtgaggatcgaaatgtttgtcacatattattacagaacacccccactctggtctgaatgtttctcccgcacataggatgacagaatactgctgagagggtctgaatgattgtccctcaaataggattccagatcaatgctgctggggtctaaaggtttgtccgtcacatcggattccaggttactgctacagggttctgaatgtttattcctcacaggggattccagatcactacttctgtgttctgaaagtttgaccctcacgtaggattctggaacactg

SEQ ID NO: 175498 - DNA, 589 bp, Homo sapiens
agaattccagaacactgcaacgggggtctgaatgtatgatcctaacttaggattccagaccactcccgctcttgtttgagtgtttgtctgtcacatgggattccagaacacttctgctagggtctgaatgtttgtccataacataggactccagaacactcccgctgttgtttgaacgtttgtccctcatataggattctagaacactgcttctaggttctgaatgtttgtccctcacgtaggattccagaacactgctacaattgtctgaacctttgtccctcatataatattccagaacacttytgtgaggatcgaaatgtttgtcacatattattacagaacacccccactctggtctgaatgtttctcccgcacataggatgacagaatactgctgagagggtctgaatgattgtccctcaaataggattccagatcaatgctgctggggtctaaaggtttgtccgtcacatcggattccaggttactgctacagggttctgaatgtttattcctcacaggggattccagatcactacttctgtgttctgaaagtttgaccctcacgtaggattctggaacactg

SEQ ID NO: 175499 - DNA, 410 bp, Homo sapiens
gctgttggttgaatgtttctcccttacataggattccagaacactgctcctggggtctgaatgtttgtccctcacataggattctggaacactgctatgattatcttaatacatgtccctcacaaaggattccagaacattcctacgagggtctgaatgtrtgtcccacacataggattccagaacactgctgctggggtctgaatgtttgtccctcacatagaataccagaaaactgctacgattgtctgaatgtttgttcctcactggggattccagaacactgctactgggtctaaatgtttatccatcacttaggattccagaacactgctacgagggtcggaatgtttgttcctcacggtggattccagaacactcctgctgtggtctgaatgtttgtccctcac

SEQ ID NO: 175500 - DNA, 554 bp, Homo sapiens
gttctagaatcctttctgagggacaaacactcagaacccagctgctgtgttctggaatccaatctgaggtaccaatattcagaagagagcattagtgttacggaatcctttgtgatttacaatcattcagacattcgcagcagttttctggaatcctatgtgagggagaagccatcagaacccagcagcagggttctggaatcctatgtgagagaaaatcattcagagcacagctagggtgctctggaattctacgtgtgggactagcattcagaacttcgtagcattgttccggaatcctaggttagggaaacacattcagaacacagcaggtgtgttctggagtcctatgtacgggacmaacattcagacccttgtagcagtgttctggaatcctatgtgagggacaagcacttaaacccaagtagcagtgctctgcaattgtacttgagggacaagcactctgaatccaacagcagtgttctgtaatcctgagtgagggacaaacattcagaccacagcaggagtgttccggaatcgtaagtgaggaacaa

SEQ ID NO: 175501 - DNA, 576 bp, Homo sapiens
gaattctagaacactactgctgtggtctgaatggttgaccttcacatagcattctagaacactcctgctgttgtctgagcgtttgtgcctcacatgggattccagaaaaatcctgtggtcatctgaatgtttctccctaacataggattccaaaacatccctgtagtgttctgagtgtttgtccctcaaataggattccagaatgctgctactgggttctaaatgtttgtccctcacataggattccagagcaatgctatgaccatctgaattattctccctcacataggattccagaacactactgctgtggtctgaatgtttgaccctcatatagggttccagaacactcttgtgttctccgtgtttgtgccttacattggtttstggaacaatcctgctgtggtctgaatgtttctccctaacatgggattctaaaatattcctgctgtggtctgagggtttgtccctcaaataggattccagaaaactgtaacttgagtctgaatgtttctccctcacataggattccagatcactgctacgagggtctgcattattctccctcacaaagga

SEQ ID NO: 175502 - DNA, 630 bp, Homo sapiens
catttgtttcattgccattcgggcaactaggtagtaagaccattttctgctaagcaagagtaggtatacaagtaacaaatccctctggcctcctcctgaatagttcagagaacagattctagttcagccagctggctgctaacacccctcccttcctcagaaatgcttatgttttyaacaggattataagccacggcctcccagcatcgggtcccatcaatatatttggtggaatcatcagcaaaccaagcatgtctctgatcgtctgggcttggttctttaaaggatttgccccattgggcaggggaggtttccttccctatctgcaggacttgctcagtggtttgctgagctggcaagttttgcacatcctcatttaaaaatgatacctgttttggttccggcttagcctggtcttgtatgtgccatttccatttactttcttgagtgtaccctatccaatgaggtttgagggagctcatgacccaagtcatattgggaatttggggcctcataaaaacatcatgattaagacaaaggtgttctgtttcctgtaaagcccagtagcaggtcaacagctgcttctcaaagagtataagctttgctagcctctgacagcttctgggtcta

SEQ ID NO: 175503 - DNA, 559 bp, Homo sapiens
aatgttctgcgcaggaaatgctcaaggagagaaggaaacacacacacacacacacacacacacacacacacacacacacaatacctttaagggtaaacaaactgtatcccacrtaaatggcaatgcagatataataagcaaatgatataataagcaagttgcaatgggacggagagaagggaaaagagatatatatatttacactcatcagactatggaggattcaccaccagactgcgaagcaacagactgggctccagagttggccacttgtccgtgaacagatgagaagagatctcatgaagttttggcacagtctggaaccctagctctttttgtaatgagttatctggcatgacgtccagtcaggagggcccttcatttctgggctcaaggaaaagaaaaaggtcaagttgttttttgtgattgtctgttgtttttcagtaactaacatataggaataaattgaaatagagatttatctgaaacagcgctggatgaaagcctcaaggggctcacacaacctgttccaggacttggtgaccattgtttgagtcca

SEQ ID NO: 175504 - DNA, 559 bp, Homo sapiens
aatgttctgcgcaggaaatgctcaaggagagaaggaaacacacacacacacacacacacacacacacacacacacacacaatacctttaagggtaaacaaactgtatcccacataaatggcaatgcagatataataagcaaatgatataataagcaagttgcaatgggacggagagaagggaaaagagatatatatatttacactcatcagactatggaggattcaccaccagactgcgaagcaacagactgggctccagagttggccacttgtccgtgaacagatgagaagagatctcatgaagttttggcacagtctggaaccctagctctttttgtaatgagttatctggcatgacgtccagtcaggagggcccttcatttctgggctcaaggaaaagaaaaaggtcaasttgttttttgtgattgtctgttgtttttcagtaactaacatataggaataaattgaaatagagatttatctgaaacagcgctggatgaaagcctcaaggggctcacacaacctgttccaggacttggtgaccattgtttgagtcca

SEQ ID NO: 175505 - DNA, 559 bp, Homo sapiens
aatgttctgcgcaggaaatgctcaaggagagaaggaaacacacacacacacacacacacacacacacacacacacacacaatacctttaagggtaaacaaactgtatcccacataaatggcaatgcagatataataagcaaatgatataataagcaagttgcaatgggacggagagaagggaaaagagatatatatatttacactcatcagactatggaggattcaccaccagactgcgaagcaacagactgggctccagagttggccacttgtccgtgaacagatgagaagagatctcatgaagttttggcacagtctggaaccctagctctttttgtaatgagttatctggcatgacgtccagtcaggagggcccttcatttctgggctcaaggaaaagaaaaaggtcaagttgttttttgtgattgtctgttgtttttcagtaactaacatataggaataaattgaaatagagatttatcygaaacagcgctggatgaaagcctcaaggggctcacacaacctgttccaggacttggtgaccattgtttgagtcca

SEQ ID NO: 175506 - DNA, 550 bp, Homo sapiens
ctatatttcctggttgcttttatgtactgtggttttgttaaggttttgatcaattaagaaaccactacctattttatcctttatgaaaaagctttgtacatgggaaaattgacaatattcagccacactagtcattccrggagcttctccaatctgttgtcaaaatgtgtcttctttggactactgtatgtattttcttgttaataaggtttacctctctttcctcttaggagcctttagtctcttctctttgtcactgttgcaggcactacagtctctttgttgtaagaaacatttatctttattctcagtcgacccaagctgtcatttaaactctatctctattctggtcaacactaaatgttaaaggtataaatcaataagtcagaagtttgcatacacgtttcactctgttttctttcccgagggagaatcatggaatggacagaattttatctaactgcactgttctgtaatgcagaaatgtaaccaaattttctttcttctaaatgtggttatggttggcttttttctcatgaggggtgctaca

SEQ ID NO: 175507 - DNA, 550 bp, Homo sapiens
ctatatttcctggttgcttttatgtactgtggttttgttaaggttttgatcaattaagaaaccactacctattttatcctttatgaaaaagctttgtacatgggaaaattgacaatattcagccacactagtcattccaggagcttctccaatctgttgtcaaaatgtgtcttctttggactactgtatgtattttcttgttaataaggtttacctctctttcctcttaggagcctttagtctcttctctttgtcactgttgcaggcactacagtctctttgttgtaagaaayatttatctttattctcagtcgacccaagctgtcatttaaactctatctctattctggtcaacactaaatgttaaaggtataaatcaataagtcagaagtttgcatacacgtttcactctgttttctttcccgagggagaatcatggaatggacagaattttatctaactgcactgttctgtaatgcagaaatgtaaccaaattttctttcttctaaatgtggttatggttggcttttttctcatgaggggtgctaca

SEQ ID NO: 175508 - DNA, 550 bp, Homo sapiens
ctatatttcctggttgcttttatgtactgtggttttgttaaggttttgatcaattaagaaaccactacctattttatcctttatgaaaaagctttgtacatgggaaaattgacaatattcagccacactagtcattccaggagcttctccaatctgttgtcaaaatgtgtcttctttggactactgtatgtattttcttgttaataaggtttacctctctttcctcttaggagcctttagtctcttctctttgtcactgttgcaggcactacagtctctttgttgtaagaaacatttatctttattctcagtcgacccaagctgtcatttaaactctatctctattctggtcaacactaaatgttaaaggtataaatcaataagtcagaagtttgcatacacgtttcactctgttttctttcccgagggagaatcatggaatggacagaattttatctaactgcactgttctgtartgcagaaatgtaaccaaattttctttcttctaaatgtggttatggttggcttttttctcatgaggggtgctaca

SEQ ID NO: 175509 - DNA, 542 bp, Homo sapiens
agtgtttgtccctcacataggattccagaacactgttacgatggtctgaatgtttgtccctcaaataggattccagaacactgctatgagggtataaattattctccctcacataggattccagaacactcctgctgttgtctgaatatttkttccccactaagtattcaagagcactcctgctgcagtctgagtgtttgtccctcacttaggattccagaacactactgttgggttctgagtgtttgtccctcaggtacaattccacaacactgccacgtgggtctatatgtttgtctgttacgtaggattccagaacagtgctacgagggtctgaatgtttttctcgcacataggactccagaacactcttgctgtgttctgaatgtattttcctatgataggattccagaagaatgttatgagtgtctgaatgcttgtcgcacatgtaggattccagaaaaccccagctgtggtctgaatgattgtccctcacataggattccagaacactgctgctgggttttcagagtttgtcccta

SEQ ID NO: 175510 - DNA, 542 bp, Homo sapiens
agtgtttgtccctcacataggattccagaacactgttacgatggtctgaatgtttgtccctcaaataggattccagaacactgctatgagggtataaattattctccctcacataggattccagaacactcctgctgttgtctgaatatttgttccccwctaagtattcaagagcactcctgctgcagtctgagtgtttgtccctcacttaggattccagaacactactgttgggttctgagtgtttgtccctcaggtacaattccacaacactgccacgtgggtctatatgtttgtctgttacgtaggattccagaacagtgctacgagggtctgaatgtttttctcgcacataggactccagaacactcttgctgtgttctgaatgtattttcctatgataggattccagaagaatgttatgagtgtctgaatgcttgtcgcacatgtaggattccagaaaaccccagctgtggtctgaatgattgtccctcacataggattccagaacactgctgctgggttttcagagtttgtcccta

SEQ ID NO: 175511 - DNA, 542 bp, Homo sapiens
agtgtttgtccctcacataggattccagaacactgttacgatggtctgaatgtttgtccctcaaataggattccagaacactgctatgagggtataaattattctccctcacataggattccagaacactcctgctgttgtctgaatatttgttccccactaagtattcaagagcactcctgctgcrgtctgagtgtttgtccctcacttaggattccagaacactactgttgggttctgagtgtttgtccctcaggtacaattccacaacactgccacgtgggtctatatgtttgtctgttacgtaggattccagaacagtgctacgagggtctgaatgtttttctcgcacataggactccagaacactcttgctgtgttctgaatgtattttcctatgataggattccagaagaatgttatgagtgtctgaatgcttgtcgcacatgtaggattccagaaaaccccagctgtggtctgaatgattgtccctcacataggattccagaacactgctgctgggttttcagagtttgtcccta

SEQ ID NO: 175512 - DNA, 466 bp, Homo sapiens
gcattttgattttatctgtcttcaagctgaacctttgctcattttaacaagtaaaaacacattcctgggtgaaatgtcattgcatgctaatragacatgaaacatatgcaaaaatatgtacagctactgcacatgtgcacccagaagaccactcaaagcatgccttctataacacttctttccaccttcttatgaataatcatgtaaaactcccagaaggagggtttctccagcaacaattaatgctgtctcactcttatgagcaggctgccctggaatctctttctcagactgtaccgtctattctgcacttgattttcaacgtattcttttcttttttgtgtgcaataaattactctatgctgtacttcttttgctgcatgtttcctgtttaaattcttttaagctaagaagataagaaccaaggtattacatcagccatcaacatttcttttgccatggcccg

SEQ ID NO: 175513 - DNA, 571 bp, Homo sapiens
tgctcattttaacaagtaaaaacacattcctgggtgaaatgtcattgcatgctaataagacatgaaacatatgcaaaaatatgtacagctactgcacatgtgcacccagaagaccastcaaagcatgccttctataacacttctttccaccttcttatgaataatcatgtaaaactcccagaaggagggtttctccagcaacaattaatgctgtctcactcttatgagcaggctgccctggaatctctttctcagactgtaccgtctattctgcacttgattttcaacgtattcttttcttttttgtgtgcaataaattactctatgctgtacttcttttgctgcatgtttcctgtttaaattcttttaagctaagaagataagaaccaaggtattacatcagccatcaacatttcttttgccatggcccggagagaggtttgtctgcttcattaatttcagtttcccttttcttgcagtgaatactatggcacttccagactacctggttaactatcgctggttgttccagcgctgtttcactaaagttctgggggaaacgtgtttaaat

SEQ ID NO: 175514 - DNA, 400 bp, Homo sapiens
tatatctaaaagaagaatgctgtttttgagatcaatcagtctggtttagtcgaagaaaatattaataatatcatcacccaggcagacaaaattgaatctctaggaacttccatgggaacatgaaagctatgtccattgtctgccttgctctctttaatagtaccagtcattattatattttcaacttttacttttgttccaattttgtttaaaatgttaactgatttcttgctctcttgcttacggcaactccatgtttgcatgatggttttgcaaggctttcaacctttggttgccagcatcttcccactggttccaygaacgacatggtttacaccctgttagatcacacaggaagaaactttaaggcccaggctaggcagaagtaacacccgctcag

SEQ ID NO: 175515 - DNA, 648 bp, Homo sapiens
gtgcttgctgcagaggtaagtaacaatctctcttatgggcaaaactcgggtaagacaggagagtcaaatctccaaggtgattcatgtagaaatttgtcacaagaaactttttaggggggcccatgttggatcttcttatcttccagaagttaggtccagggatacgtcagaatacccaaaatacacagggctcagtcaataaaggagagtcacatcacccaggtgcttkgtctagacatatgtcacatctcttttatggggaaagctcaggtaaaaaaggaaggtcacatcaaatagttgatatacccagagatatgtcactttgccttctgcttgaagtgtctaggccaaagactcacatcacctcggtgttaggcccgtgttcatatataaacattcaaccagagttgaaatggtggcccacatctaaactcagctcataggcaagggaggactctcctatcctgacctagttaattgtaatgatgttgactctcacaccgggcttaatgctacaagtacgatcatgggtccctaccattaggaaggtctcaaagttgattacgactctcatgcatagtgtatagggccattgggtagtacacagagcgtgctaactgggccgagcacacaggtgagattgtgaca

SEQ ID NO: 175516 - DNA, 648 bp, Homo sapiens
gtgcttgctgcagaggtaagtaacaatctctcttatgggcaaaactcgggtaagacaggagagtcaaatctccaaggtgattcatgtagaaatttgtcacaagaaactttttaggggggcccatgttggatcttcttatcttccagaagttaggtccagggatacgtcagaatacccaaaatacacagggctcagtcaataaaggagagtcacatcacccaggtgcttggtctagacatatgtcacatctcttttatggggaaagctcaggtaaaaaaggaaggtcacatcaaatagttgatakacccagagatatgtcactttgccttctgcttgaagtgtctaggccaaagactcacatcacctcggtgttaggcccgtgttcatatataaacattcaaccagagttgaaatggtggcccacatctaaactcagctcataggcaagggaggactctcctatcctgacctagttaattgtaatgatgttgactctcacaccgggcttaatgctacaagtacgatcatgggtccctaccattaggaaggtctcaaagttgattacgactctcatgcatagtgtatagggccattgggtagtacacagagcgtgctaactgggccgagcacacaggtgagattgtgaca

SEQ ID NO: 175517 - DNA, 648 bp, Homo sapiens
gtgcttgctgcagaggtaagtaacaatctctcttatgggcaaaactcgggtaagacaggagagtcaaatctccaaggtgattcatgtagaaatttgtcacaagaaactttttaggggggcccatgttggatcttcttatcttccagaagttaggtccagggatacgtcagaatacccaaaatacacagggctcagtcaataaaggagagtcacatcacccaggtgcttggtctagacatatgtcacatctcttttatggggaaagctcaggtaaaaaaggaaggtcacatcaaatagttgatatacccagagatatgtcactttgcctyctgcttgaagtgtctaggccaaagactcacatcacctcggtgttaggcccgtgttcatatataaacattcaaccagagttgaaatggtggcccacatctaaactcagctcataggcaagggaggactctcctatcctgacctagttaattgtaatgatgttgactctcacaccgggcttaatgctacaagtacgatcatgggtccctaccattaggaaggtctcaaagttgattacgactctcatgcatagtgtatagggccattgggtagtacacagagcgtgctaactgggccgagcacacaggtgagattgtgaca

SEQ ID NO: 175518 - DNA, 648 bp, Homo sapiens
gtgcttgctgcagaggtaagtaacaatctctcttatgggcaaaactcgggtaagacaggagagtcaaatctccaaggtgattcatgtagaaatttgtcacaagaaactttttaggggggcccatgttggatcttcttatcttccagaagttaggtccagggatacgtcagaatacccaaaatacacagggctcagtcaataaaggagagtcacatcacccaggtgcttggtctagacatatgtcacatctcttttatggggaaagctcaggtaaaaaaggaaggtcacatcaaatagttgatatacccagagatatgtcactttgccttctgcttgaagtgtctaggccaaagactcacatcacctcggtgttaggcccgtgttcatatataaacattcaaccagagttgaaatggtggcccacatctaaactcagctcataggcaagggaggactctcctatcctgacctagttaattgtaatgatgttgactctcayaccgggcttaatgctacaagtacgatcatgggtccctaccattaggaaggtctcaaagttgattacgactctcatgcatagtgtatagggccattgggtagtacacagagcgtgctaactgggccgagcacacaggtgagattgtgaca

SEQ ID NO: 175519 - DNA, 434 bp, Homo sapiens
tgtggcccatgctaccttctacatattctcctaatgcttccatctctaagtgtgtgcattatctacaggtaacaccacatgatttttacgttttatcttatatacatctaatacaatccctaggaagtagatgttagcatcatccccastgtgcacgctaggaggctggggaagcctcaaatacacagtgacttttattgggtcccagagatggtaagaaaaacaaggttatgttccagctgtctcttatatcctggaacccaggctgcatttagttctttccagggaattaaggggaagttgtgtttgcatatttgtgtacaaatgaagagttgacatggaagaggagactgagtaattagtagcatagtggggcttttgggtaggtcttacagaaagaagggacccagtagatggaaccttgaagagtttaa

SEQ ID NO: 175520 - DNA, 434 bp, Homo sapiens
tgtggcccatgctaccttctacatattctcctaatgcttccatctctaagtgtgtgcattatctacaggtaacaccacatgatttttacgttttatcttatatacatctaatacaatccctaggaagtagatgttagcatcatccccagtgtgcacgctwggaggctggggaagcctcaaatacacagtgacttttattgggtcccagagatggtaagaaaaacaaggttatgttccagctgtctcttatatcctggaacccaggctgcatttagttctttccagggaattaaggggaagttgtgtttgcatatttgtgtacaaatgaagagttgacatggaagaggagactgagtaattagtagcatagtggggcttttgggtaggtcttacagaaagaagggacccagtagatggaaccttgaagagtttaa

SEQ ID NO: 175521 - DNA, 434 bp, Homo sapiens
tgtggcccatgctaccttctacatattctcctaatgcttccatctctaagtgtgtgcattatctacaggtaacaccacatgatttttacgttttatcttatatacatctaatacaatccctaggaagtagatgttagcatcatccccagtgtgcacgctaggaggctggggaagcctcaaatacacagtgacttttattgggtcccagagatggtaagaaaaacaaggttatgttccagctgtctcttatatcctggaacccaggctgcatttagttctttccagggaattaaggggaagttgtgtttgcatayttgtgtacaaatgaagagttgacatggaagaggagactgagtaattagtagcatagtggggcttttgggtaggtcttacagaaagaagggacccagtagatggaaccttgaagagtttaa

SEQ ID NO: 175522 - DNA, 519 bp, Homo sapiens
aatggcgcagttacttgcctctgtggtgggcaccaggctaaggatgaatccagtagcagaaccaagagaatcccagaggaggactgcagctggttcttggtgacatcatttgaatggctggatcaagcctcacctgcagccagcaagatgacctctggacttgtcaggaacaggagcccatcaattccctttagaggtgaagccagtttacgtggatttctgttgcttacaatgcagatgcatagtggacgctgctgcctcacctcggcttgagcatggcacacgtgcagtcagtggcacctattccaggaagctcgccttgcggtcataaggcagatgtcttctttgcccacccctgtcccatstgcatccttgaattctcaagaaagagactattttcaggcacccttgcatactcagaacgttggtgttgtatgcccaacacacaccaatgcccaaacgcacaccaatgcccagcacacaccaatgcccaacgcacaccaatgcccaacacacacc

SEQ ID NO: 175523 - DNA, 490 bp, Homo sapiens
gtaagctcacagcgtaggcctggggctgcgtatgtgaagagccaatctgagaaggaagtctctgcagaagagagccaagtcctaggaggaggagagacgctgagccttggcagcctcgtgtgggccagcggtgcctgctgtcttgctcgcgtgtgccagcaaatctccttttcttggcttaattggatttggatctctaattataccttgaatgaccctgacatatccagtgtcttctaccttccttattgctgtggccctttaaaaaaagattaggaatmatctgccatgagaattccacttctggaatggtggtgagaggagccccatggacacattcccctcagaacaaccataactggtgaaaagtattgaaaagtcaccatcaacaacaatttaaagtctctagaaattatcctaagagcacacaacaaactaagcaacatcatctattcaagaaaatcaaccaaatcttgggaagaaaaatccc

SEQ ID NO: 175524 - DNA, 490 bp, Homo sapiens
gtaagctcacagcgtaggcctggggctgcgtatgtgaagagccaatctgagaaggaagtctctgcagaagagagccaagtcctaggaggaggagagacgctgagccttggcagcctcgtgtgggccagcggtgcctgctgtcttgctcgcgtgtgccagcaaatctccttttcttggcttaattggatttggatctctaattataccttgaatgaccctgacatatccagtgtcttctaccttccttattgctgtggccctttaaaaaaagattaggaatcatctgscatgagaattccacttctggaatggtggtgagaggagccccatggacacattcccctcagaacaaccataactggtgaaaagtattgaaaagtcaccatcaacaacaatttaaagtctctagaaattatcctaagagcacacaacaaactaagcaacatcatctattcaagaaaatcaaccaaatcttgggaagaaaaatccc

SEQ ID NO: 175525 - DNA, 441 bp, Homo sapiens
ggacaaacatccaaactgtatcaaccaccctacatgaaccagtgcctgcctttctgacctccccactcactctgctcccccttccccacactccccctccttgtgcttaaacaggccatgcagttcccacccagatgggaacgcagaagtgctgagaagcctctggctgctgagaaggaccggagrcgctcaggcagggcttcactgaggagggacatcttcagctgggaacaactcttccacacagcatccatggtgtttgtctacactccagtttctctactgtcaaataatgtcctggtctggccaagagggcactgtcttctcatcaagctatgagggtcccaaggaagaggagcccagccagggaatgggagaagggggaggagtccagctgggggagagaagaaaagggggaggagctcagcgggggaggggaat

SEQ ID NO: 175526 - DNA, 450 bp, Homo sapiens
atgtggctggcaagggcctggatctttggtggagcaccgtgggcaggtgacaagcstgacccggaggatggtggccttggccctggcttggctgcagccccaactagagtgcaggggacagttctggaagaccggccagtggttctgaggagctgcattagggctgctcccacagatgcttccagcactaggtgggtgagtggggtgggcagcgggcagtttggtgcagggttcagtgtgctcagccccacccggcatgctgctgttggtgcaggggtcagtgtgctcagccccgcccggcatgctgctgttggtgcaggggtcagcgctggtgcaggggtcagcgcgctcagctccgcccagcatgctgctgttggtgcaggggtcagtgtgctcagctccacccgacatgctgttgttctggctcactaaggggcccagagcagctca

SEQ ID NO: 175527 - DNA, 450 bp, Homo sapiens
atgtggctggcaagggcctggatctttggtggagcaccgtgggcaggtgacaagcctgacccggaggatggtggccttggccctggcttggctgcagccccaactmgagtgcaggggacagttctggaagaccggccagtggttctgaggagctgcattagggctgctcccacagatgcttccagcactaggtgggtgagtggggtgggcagcgggcagtttggtgcagggttcagtgtgctcagccccacccggcatgctgctgttggtgcaggggtcagtgtgctcagccccgcccggcatgctgctgttggtgcaggggtcagcgctggtgcaggggtcagcgcgctcagctccgcccagcatgctgctgttggtgcaggggtcagtgtgctcagctccacccgacatgctgttgttctggctcactaaggggcccagagcagctca

SEQ ID NO: 175528 - DNA, 450 bp, Homo sapiens
atgtggctggcaagggcctggatctttggtggagcaccgtgggcaggtgacaagcctgacccggaggatggtggccttggccctggcttggctgcagccccaactagagtgcaggggacagttctggaagaccggccagtggttctgaggagctgcattagggctgctcccacagatgcttccagcactaggtgggtgagtggggtgggcagcgggcagtttggtgcagggttcagtgtgctcagccccacccggcatgctgctgttggtgcaggggtcagtgtgctcagccccgcccggcatgctgctgttggtgcaggggtcagcgctggtgcaggggtcagygcgctcagctccgcccagcatgctgctgttggtgcaggggtcagtgtgctcagctccacccgacatgctgttgttctggctcactaaggggcccagagcagctca

SEQ ID NO: 175529 - DNA, 450 bp, Homo sapiens
atgtggctggcaagggcctggatctttggtggagcaccgtgggcaggtgacaagcctgacccggaggatggtggccttggccctggcttggctgcagccccaactagagtgcaggggacagttctggaagaccggccagtggttctgaggagctgcattagggctgctcccacagatgcttccagcactaggtgggtgagtggggtgggcagcgggcagtttggtgcagggttcagtgtgctcagccccacccggcatgctgctgttggtgcaggggtcagtgtgctcagccccgcccggcatgctgctgttggtgcaggggtcagcgctggtgcaggggtcagcgcgctcagctccgcccrgcatgctgctgttggtgcaggggtcagtgtgctcagctccacccgacatgctgttgttctggctcactaaggggcccagagcagctca

SEQ ID NO: 175530 - DNA, 493 bp, Homo sapiens
aacaaaaataatgaccttctccatagcatttaaacaagatccaaagtctcatagggtaatatcaaastgtccaggatacagtccaaaattacttggcataccaagaaccaggaaaatctcaactcctccaggcaaatacaaccaacagataacaagactgagatagcacatatgttggaattaactgacaatgatcttaaagcagctattataaaaatactccataaagtaagggcaaaaactctggcaactaatggaaagatagtctcagcaagaaacggaagacatatttttaaaaaggaccaaacggaaattttagaactgaaaaatacaataacagaaactttaagaactcactggataggctcaagagcagaatggatatgacagaggaatgagtcagtgaacttgaggatagagcaatagaagttacccaattcaaactgcagcgagtaaaaatattttataatgccaagagccttagagactgtgg

SEQ ID NO: 175531 - DNA, 409 bp, Homo sapiens
agagaaagaatgtattactaaacaaatatttggataaataatggctgaaaacttctcaaattctgtgaaatgcataaacctaccaattcaacagatcggcaaacctcaaatgagagaaatccaaggaaacacaatcccacacgttataaacacactctgaaaactayagacaaaaaaaagtcttgaaagcagtcagagaaaaacagtgcattacttataggggaaaaatggttcagataactgcagatttcttatcaaaactgtgaagtccaaaggaagtgcaaaacattgttaaaatgctgaaaaaaaaaaaaaaagaactgtcaacccagaattttatctccagcaaaaatacacttcaagaattaaggagaaataaagacattctcagatgaagcaaaacttatag

SEQ ID NO: 175532 - DNA, 409 bp, Homo sapiens
agagaaagaatgtattactaaacaaatatttggataaataatggctgaaaacttctcaaattctgtgaaatgcataaacctaccaattcaacagatcggcaaacctcaaatgagagaaatccaaggaaacacaatcccacacgttataaacacactctgaaaactacagacaaaaaaaagtcttgaaagcagtcaragaaaaacagtgcattacttataggggaaaaatggttcagataactgcagatttcttatcaaaactgtgaagtccaaaggaagtgcaaaacattgttaaaatgctgaaaaaaaaaaaaaaagaactgtcaacccagaattttatctccagcaaaaatacacttcaagaattaaggagaaataaagacattctcagatgaagcaaaacttatag

SEQ ID NO: 175533 - DNA, 432 bp, Homo sapiens
aaggagaagagaaagaatgtattactaaacaaatatttggataaataatggctgaaaacttctcaaattctgtgaaatgcataaacctaccaattcaacagatcggcaaacctcaaatgagagaaatccaaggaaacacaatcccacacgttataaacacactctgaaaactacagacaaaaaaaagtcttgaaagcagtcagagaaaaacagtgcattacttataggggaaaaatggttcagataactgcagatttcttatcaaaactgtgaagtccaaaggaagtgcaaaacattgttaaaatgctgaaaaaaaaaaaaaaagaactgtcaacccagaattytatctccagcaaaaatacacttcaagaattaaggagaaataaagacattctcagatgaagcaaaacttatagaatgtgtggccagcag

SEQ ID NO: 175534 - DNA, 609 bp, Homo sapiens
cttgtgcagggcaactcccgtttttaaaaccctcagatctcgtgagacccactcaccatcatgagaacagcatgggaaagacccacccccatgattcaatcatctctcactgggtccctcccataacacatgggaattatgggagctacaagatgagattcaggtggagacacagagacaaaccatatcaatgttcctagtgtttcaagctccgtgaggactccctcctcaacagtcccacacaggatgagatgcacacacaccagagaggacaatgccacagggtgccctgtccstgtaccccagcacagtgtccctggacacagagctggccttgggaagggcagagaacagggattggagatgcctgtcagaatgcctggggggacacctcaaccactgctccccaaaaggccacccagcctcagagctcggcctccggtcctggccaggttcccaggccagcagcactgagcaggacccttctgccaaggccagcatggccagggaggagagaaaaggaccctccccgctccctcaccccttgcccctcctaataacatcctctcccgggtgttgcctaagctgcccagtgcacacactcatccc

SEQ ID NO: 175535 - DNA, 602 bp, Homo sapiens
gaatgaaggatgcctccggcaggaggtgacatctacccaaacccacccaatccctttgtgctggccacgcaaagagtcagagagaggaccactgctccatatgggggaaaccgcacatgccatggccggggaggtggacggagcacagctggtgggaagagctgaccacgtgggtggacaggagcatcaagggcacggtgcccggtggcccatcactcakggggctggtgagggagattgtaggcagcccagggcttctggggggagccttgatctgattccagttcacaagcatggtggctgcggcagggggaatgggctgcggaacaaaaatgggtctggggtcctggggagaaggtgttacaggcacctgggagaggggtaatggtccacacgggagcatgagagacaaggacgagtggcaggtatgaaggaggtgaggagcgaaatggacaggacgtggtagggtagagccggctgagatgggagggaggaggaagcacctggtgggcttccaggtctgtggctgaagaaccggcccccaaagttacccaggcccccatccctggcagctgtgagggtagtggacatggtggaaagag

SEQ ID NO: 175536 - DNA, 583 bp, Homo sapiens
tccgcagcccatggaagagctattagaaatttattaagaaccaatttctgcttctttgtcagggacaatcatttgttttagagctgattttctgccttaattaaatgaaaatgtcactctgtcaaatgaattcatttatatttattaatccagttctccaggcttgaattttctagtagggacttgggctcatcatatttgctcatagaataaactgaaaaatgtctcttacatcartttaaaagactcacaaattattgctccaccctgtataagtactatataaacaaagctgtgattaacaaatgtgtgaatgattttcttgtgtagatgctatctaggtgcatataaatatacatatttggttatgttgttgcacacacgtgcgtctgtgtgtgttagggcaggaaagtgatgaatatccattactgcggtgccttagtactttaagaaagtgtcaaaggtaacattttagccacctgtgtgtttttatttgccttttcaaaatgctaattgatgatgcaaagtttaagtgctactcagtctttccctccaaaaatattaaaggattacttattgagta

SEQ ID NO: 175537 - DNA, 396 bp, Homo sapiens
atttacaaaattattcattcaagagagatatcttctgagcctttttaggtcttgtctgtttctatgatcaaacagaagggtttgggtgtgcacttttcacactaaaagactcaaataaggaagattcaatgacttgtaagcttgcaaaggatcagctaagtaaaaattataaccttatataacagcactgcacataagaccaaaaataaaaaatgccctatttgatattaagaaaatgtaatgaaaaatccagagaggaaaatgrgttaccacagtgctatttctatggtctttcaaatgcagtcacacttccaaaatcttgcaattaatggcattaaaaactctccagcctcacaagtttattaagtagcagtgtagttaaacaaaaagggtgct

SEQ ID NO: 175538 - DNA, 493 bp, Homo sapiens
tcccaggagagagtgagagatccatcaccttatcctttgtaaggcatctgtggggtgaagaagtttctctgagccaagagagagccatggattctgtcatgaattaggcactgggaatgggatcatgggaagtgagagtgatgaaacatagacttgttactcatatgtggttccttgagggctcgggataagtgtcttaaaatagttattttggaataaacctcacagcattttagaygccatcagaaggttagaaaaaaaaacttccagaagcctcccattagggacagtggagggaacccaaagctgaactacccacctaggaaggggctgaggaaggaaaaactgctgcaggctgaagaagcgtccaccactgtgggactgttagaaacttctagggggtgctggttggtgggggcagcatctgctgaatggagttattaccaggtttccccctgagagctgcagtcccaacatcagaatgaagagatct

SEQ ID NO: 175539 - DNA, 493 bp, Homo sapiens
tcccaggagagagtgagagatccatcaccttatcctttgtaaggcatctgtggggtgaagaagtttctctgagccaagagagagccatggattctgtcatgaattaggcactgggaatgggatcatgggaagtgagagtgatgaaacatagacttgttactcatatgtggttccttgagggctcgggataagtgtcttaaaatagttattttggaataaacctcacagcattttagatgccatcagaaggttagaaaaaaaamcttccagaagcctcccattagggacagtggagggaacccaaagctgaactacccacctaggaaggggctgaggaaggaaaaactgctgcaggctgaagaagcgtccaccactgtgggactgttagaaacttctagggggtgctggttggtgggggcagcatctgctgaatggagttattaccaggtttccccctgagagctgcagtcccaacatcagaatgaagagatct

SEQ ID NO: 175540 - DNA, 520 bp, Homo sapiens
cggtggttttgtgaaacaggtacaaagtggggagtaaggacatctctttttcactggaaacatcatttagccttctgtttctcagctctcctagtacagtaaaattgaactctctccctcagctatctcctgaggtaatcatgaaaatcaaatgagatcaaagggaccttgacaggtgaaaagtgctggacagataggatgcagagatgcctcctccttcagcaacaatagaaactgagaggggccacataagcgaayttttcaaatgattaaattgtgttccactaaaccagggtttctcagtctcatcactgtgcgcacttagggtcagagacttctttgttatgaggacctgacctgtgcactgtaggatgtcttgcagcatccctagcctccacccacaagatgccattggcactaccccactgccattcccagttgtgataagcaaaaatgtctccaggcattaccagatgtcccttggagggcaaaattgtcaaaccactgcattaagcattct

SEQ ID NO: 175541 - DNA, 508 bp, Homo sapiens
ctctgactttcacacaatgtttttgtgccactttttgtgcccacccattgctgttccccctgggtagcagaagccagagttgtaatacatgtatcttaacatctagtcttgatttttaaaattcagatctatagcatctcacaatcacagcatcgtaaagctgagaaggaccttgaagctcatccattttattctgagacagggtctcactctgttacccaggctggagcacagtggtgtgattgcaactcactgcagcctccacctcctgggcccaagcgatcctataacttcggcctttagagtagctgggaccacaggcatgtgccaccacgctcgggtaatttttaaatttttggtagagatggggtctctctctattgcccacaggttgttattgaactcctgagctcaagccatctttccgcctcagactcccaragtgctgggattacaggccagtgcgcccacctcattttaatctcccttatttacagttggggaaact

SEQ ID NO: 175542 - DNA, 607 bp, Homo sapiens
gaattcttccaatgggtgatctcccctggtccagtccactatttgctsaactacaagatggagaagtttcactttgcagcagcatgtgtgaaaacagcttggaaatttttgtagagaataagctcaagaagagtcaacagagaaatgttgtttctacaaaacacgttttatctcagattgtgaatgcaagtctggtgttgagttgagggaggtgatttctcactctgatcttattgacagggatagtcatggagttttctgtcaacctgggagccaccaggaacagcctatagcacattcacaaaagagatcagtatggctgaagaaaatcaaagaaaagagaaatgaggaaacaagggtcaacctttgactatagcattgcaaaggcagtcattctaggaaggaggaaagatgcaggtgaaccaactagtaaatggtagaacagaatctgaatccagcatatgacctgtggagtgactcagatctggattccaattccatttttgccactttttagccatttgactctgggcaaataaactcttatcagtaacctcacctgcaaaatggggcttatttattctcatggaactgcatttcagagtaa

SEQ ID NO: 175543 - DNA, 607 bp, Homo sapiens
gaattcttccaatgggtgatctcccctggtccagtccactatttgctgaactacaagatggagaagtttcactttgcagcagcatgtgtgaaaacagcttggaaatttttgtagagaataagctcaagawgagtcaacagagaaatgttgtttctacaaaacacgttttatctcagattgtgaatgcaagtctggtgttgagttgagggaggtgatttctcactctgatcttattgacagggatagtcatggagttttctgtcaacctgggagccaccaggaacagcctatagcacattcacaaaagagatcagtatggctgaagaaaatcaaagaaaagagaaatgaggaaacaagggtcaacctttgactatagcattgcaaaggcagtcattctaggaaggaggaaagatgcaggtgaaccaactagtaaatggtagaacagaatctgaatccagcatatgacctgtggagtgactcagatctggattccaattccatttttgccactttttagccatttgactctgggcaaataaactcttatcagtaacctcacctgcaaaatggggcttatttattctcatggaactgcatttcagagtaa

SEQ ID NO: 175544 - DNA, 582 bp, Homo sapiens
cccttcactgggcactcattcttctccttgctgcccccatgtgaagaaggatatgtttgcttccccttctgccatgattgtaagtttcctgaggcctccctagccaggtggaactgtgagtcaattaaacctctttcctttataaatcacccagtctcaggtatgtctttattagcagtgtgagaacagactaatacatctactctcttctcattaaatagctttaagaatttaaagctgttatgtcactgaaaaccaatcagaagccaaaagataatacagaatatttgtacaagattgatctcaatttgttagaagtccattctctctaatgggcccctcttgcagaagagcttactrtcataaggttgaatagcagggggtgcaggggcagtgggcttagaacttttactaggctgtgttcaactgtaccagagtgttgatagtagtatcacacttggatgttggaatcgggcagacctcctcattccacgttcctcggccttagtttcttcatctataaattaatgatgataataatttggattatatctatcatgcagttttatgataaataattga

SEQ ID NO: 175545 - DNA, 557 bp, Homo sapiens
actcattcttctccttgctgcccccatgtgaagaaggatatgtttgcttccccttctgccatgattgtaagtttcctgaggcctccctagccaggtggaactgtgagtcaattaaacctctttcctttataaatcacccagtctcaggtatgtctttattagcagtgtgagaacagactaatacatctactctcttctcattaaatagctttaagaatttaaagctgttatgtcactgaaaaccaatcagaagccaaaagataatacagaatatttgtacaagattgatctcaatttgttagaagtccattctctctaatgggcccctcttgcagaagagcttactgtcataaggttgaatagcagggggtgcaggggcagtgggcttagaacttttactaggctgtgttcaactgtaccagagtgttgatagtagtatcacacttggatgttggaatcgggcagacctmctcattccacgttcctcggccttagtttcttcatctataaattaatgatgataataatttggattatatctatcatgcagttttatg

SEQ ID NO: 175546 - DNA, 570 bp, Homo sapiens
cccttcactgggcactcattcttctccttgctgcccccatgtgaagaaggatatgtttgcttccccttctgccatgattgtaagtttcctgaggcctccctagccaggtggaactgtgagtcaattaaacctctttcctttataaatcacccagtctcaggtatgtctttattagcagtgtgagaacagactaatacatctactctcttctcattaaatagctttaagaatttaaagctgttatgtcactgaaaaccaatcagaagccaaaagataatacagaatatttgtacaagattgatctcaatttgttagaagtccattctctctaatgggcccctcttgcagaagagcttactgtcataaggttgaatagcagggggtgcaggggcagtgggcttagaacttttactaggctgtgttcaactgtaccagagtgttgatagtagtatcacacttggatgttggaatcgggcagacctcctcattccacrttcctcggccttagtttcttcatctataaattaatgatgataataatttggattatatctatcatgcagttttatg

SEQ ID NO: 175547 - DNA, 574 bp, Homo sapiens
ttgcttgacaatagcacctctgtaaagcttaggttggaactggggaaatggattaacaaaagtgtttcagcactgttaagactccaccttgatttattcctttttattgttktaacttacaatggtaatatttgcttactctaaataaattcaaagactacaaaagaatgtaaagcaaaaaatcagagtaatcttttcttcctactcctgattccattttccagaggttacccctctgaacctttcagtattatcctttctgagacttatgaatccttatacaacattatgtatgtacgtatagaggatcatattttgttaaaaaaagtgatattgctataaaaagtgtgattttttccccacttaatatgtggtggtcatctttcttgtcaatacataaacgtgccagttatcacagaagagaataccaaagggtgaatttgatgctgaggcaatagcttaatagcactatagcagagcatggccttgttattattagcagctccctaaattttgtctgaggatgatttgagctggggttggcaaacaagagcctgcaggctaaatttggccc

SEQ ID NO: 175548 - DNA, 333 bp, Homo sapiens
aataattgggtaggatatgctggtatctcaatcaggatatgaatgattagccaatagttccttgaacagaaccttattactaatgaggagcagtagattgagttgagttttaagsaacttcaggatcactctgttttccttggtgggagaggagggagtgtgatacagagaagtaagtggatcaggctgcatggggttgtggtgacaaggctttgaagacacccatttatactgttggtcaagtaaacagtaaaatagcacccttggatttagggagtggtctgatcttaaattttaatatgcagaaccaccccccaaaacgtatataaaatg

SEQ ID NO: 175549 - DNA, 447 bp, Homo sapiens
catcaatataaagaatgccatccctcatcactccatcgcttctgattaagatcatttggtctaatgtacattamgttctattccaataatgcctgtgcggtactgcatgcttttcatgcctctttctggacactgtgttattagatactcagcctggagaaacatttccatacaaagaggaagataaaactgagaatgaatggttaaaggcaaagagaaaattgggaatctcacccttggaaagaatggtagatgggaacatccaatgacctggctttgaatctggttctctatttactaaccattgctacttaaagaaaaatagtaataataacagtaagaacagaaactactatctattaacaaattcttggtaagtaccaagccctgaaataagcctttcaggctacaatatcatatggttagtagatgccactgggatttgaa

SEQ ID NO: 175550 - DNA, 452 bp, Homo sapiens
gctcccatcaatataaagaatgccatccctcatcactccatcgcttctgattaagatcatttggtctaatgtacattaagttctattccaataatgcctgtgcggtactgcatgcttttcatgcctctttctggacactgtgttattagatactcagcctggagaaacatttccatacaaagaggaagataaaactgagaatgaatggttaaaggcaaagagaaaattgggaatctcacccttggaaagaatggtagrtgggaacatccaatgacctggctttgaatctggttctctatttactaaccattgctacttaaagaaaaatagtaataataacagtaagaacagaaactactatctattaacaaattcttggtaagtaccaagccctgaaataagcctttcaggctacaatatcatatggttagtagatgccactgggatttgaa

SEQ ID NO: 175551 - DNA, 435 bp, Homo sapiens
ccagtggtagcactgtaggttttcttctatggagattctgggccatatctccatgcaaatatttactgtcctggtaaatgacaggatagaaatcacaaggacacttggtttctgctggttttcatttgaaaaagaaaatcattataattaattagtcatgggttcccacgatggccattcttgactccttggcctctattgccactttccaagtctggctaaatagaattccatttcagaccatatctagggtaatacttgattcattaggttgatgtcatcccaccgacagtccccgtgatcaaacaataagatcagagagaacagacccacctcctcatagatgctgtcattcctgtgaaagtctccagccttcctgggaagaacrtggacgtgaacgtgctgaaaatgtacaagaaagaaaaaaaatgtgat

SEQ ID NO: 175552 - DNA, 534 bp, Homo sapiens
tatgtcccttctacaagaagaacatctgcattgagttgggtgtcttcatagggagtcattctcagggaacgtgaagcttcctccccatcaccctgacctcccttcccctgtaaatttccacattgattgattgtaaacaaattgtgttcatctgcccagattccattatatcaaaaagacatactcctctccacaaatatcggagatagacagacagataaagaggattactttccagtagcaggggttcctccccactcttcctccacagagaactttatttctagtacawagtagaagaaagagtcaagagacggatgagaagacaaactcagcaaagccttatttttatgctgctgttgtttttaacctttagtgggaagtaataggagacctcatactttatgaagcctttttgtatctggtggtagtttttaaaaagaccatcagctaaaatataaatataaatttaaccatggatgattgtaatttcctgcattatatttttatgtattttcgaaaagtatctgtaat

SEQ ID NO: 175553 - DNA, 425 bp, Homo sapiens
agacttaccctagctgtatcccaaataaccaactctcataactgtattggacaattcatcaaatgcttatgggtgacattgaatggttgtgactgtgcactgtatataaaacccattactgatgaaggaagtgactattactaaagcaagtgggaatagcaatcagcaattggacaaattcaaccatgaatttcatagacaaagcaactgtgggttcaagcatgtcatgggaaacaattgcttggcttaacacaattcatgagcaaaatcaacttgctaaaatgcaggccatttggccctgagggctggagagaaccattatattgctgatgatatttrttgttgaacttggatctctttcacacggcatttgacaatgggctcagagtccatgggtccctagttgacttttcaaaaaggaagga

SEQ ID NO: 175554 - DNA, 548 bp, Homo sapiens
gtgtatagccaatgtgggggaggaaacacccatggcctaatgtcatatcatttcattaactcagtaagacttaccctagctgtatcccaaataaccaactctcataactgtattggacaattcatcaaatgcttatgggtgacattgaatggttgtgactgtgcactgtatataaaacccattactgatgaaggaagtgactattactaaagcaagtgggaatagcaatcagcaattggacaaattcaaccatgaatttcatagacaaagcaactgtgggttcaagcatgtcatgggaaacaattgcttggcttaacacaattcatgagcaaaatcaacttgctaaaatgcaggccatttggccctgagggctggagagaaccattatattgctgatgatatttgttgttgaacttggatctctttcacacgscatttgacaatgggctcagagtccatgggtccctagttgacttttcaaaaaggaaggaatgtttcagtgagacagttaattagctttttgtcttctgggtttactgatgtcctcc

SEQ ID NO: 175555 - DNA, 568 bp, Homo sapiens
agaaatagctggtatacctgtgtagctctaaattctctccaccttgagtcaacatagtgrtttattgcaaactgtttaatgtttaacttgctatttaaatctcagtatcttatgtttcccatatttaaaatgggggaaaaatacccaatcatactgggcttctagtgtaaggttagtggtcataaacaactatagttcgcagtctttgctcctagggagagcactaatgaaaaataataatataatacaattattattgtcattgagaatacactgagactagtaatacatctattttaaataaatgtaatatttgagaataataatcaaattattactgtcaatgagaatacacattgggctggactgtctgctaggtgccaagcatatcattcataccattgaattgaaactaaatttgcagagagtaaatatctatgtcaaaacctcataaccagctcatggcaaagcttgtttatatcaaagtctgtttgactacaaagccgtccctgtttctatcaccctttgctttagcctaaggaaaatattatccttcaattttatggaa

SEQ ID NO: 175556 - DNA, 568 bp, Homo sapiens
agaaatagctggtatacctgtgtagctctaaattctctccaccttgagtcaacatagtggtttattgcaaactgtttaatgtttaacttgctatttaaatctcagtatcttatgtttcccatatttaaaatgggggaaaaatacccaatcatactgggcttctagtgtaaggttagtggtcataaacaactatagttcgcagtctttgctcctagggagagcactaatgaaaaataataatataatacaattattattgtcattgagaatacactgagactagtaatacatctattttaaataaatgtaatatttgagaataataatcaaattattactgtcaatgagaatacacattgggctggactgtctgctaggtgccaagcatatcattcataccaytgaattgaaactaaatttgcagagagtaaatatctatgtcaaaacctcataaccagctcatggcaaagcttgtttatatcaaagtctgtttgactacaaagccgtccctgtttctatcaccctttgctttagcctaaggaaaatattatccttcaattttatggaa

SEQ ID NO: 175557 - DNA, 229 bp, Homo sapiens
aacataaataatttaatagcaccctcaccatatacacagtttcatttcaccagtatgtgaatgaggggagtgccctgagcacatacctccatagggtggctagagtgaaacctggggcccaaactcccacatagacaggattcttccagtgcaagctctatcaggttttgaarttatggattccaaatttaggtttgcttatgtcatttaagagactaaaaattccagt

SEQ ID NO: 175558 - DNA, 465 bp, Homo sapiens
atctcatatgtgtagttctgtaacagtgaccaagcagtggacattcctatccattcaaggctgaacatgtgatggagcaaggcatgtctgcacagggcctagcatgaaggggttgaacccttataacttggaaactaactgaatgggagaaatgagatggaataargcactgacgttggtgcaatttctgattatattttgttgccatttaacttgtttttactgtatgccacaccctgtggtaactcgtttcatctgcacagtgacccttgaaatgcccacagtatagacgagaaaactgaactccttagaattgacgtatcttgcccaaggtcatacaatgagtgaatggggcaacctggacatggacttcagtcttcctgagctcagagctgaccaaagactctgtctaaacttccaagacccttttctcccattggttgatgcacatggtattgaaaaatg

SEQ ID NO: 175559 - DNA, 591 bp, Homo sapiens
aatccattccctctgtgtgtctcttaagagctgtagccaagagaaacttaaagaaataaggcagaaatattgtacactgaacccctgccctgccaaacctgactcaggaagccctatgtatggaaactgcataatgctcttggcatttgcagagctgtgctctcagataccttccaaaaaaatgacagtgtgtgaagggggcaggtcatgactattttttaaaggacgtaaatgagacttggttgtgcctgaagcacttccacaacttaaagctggtatttcacgtgtctggacattatccaaaatattcatcttggccagctgacaggaatgtttactgagtccttaggagccacttgtttggtaccttcgaagctgcctaraaagagtttgtgttgcgtgggagtggggagtgagtgtaagctgcagcatcagctccgagttagccttcccgttcctctaagtgctagttgtgtgactgttggcaagtcatttaacctctctgagctaaagtttgcatccctataaaatggtgaaaaatctggcccttcaacatgttggtttccaggattgaatggaatcaaaaagctt

SEQ ID NO: 175560 - DNA, 600 bp, Homo sapiens
gttttcaaaagcataatgatgtaaacaaatagaagaagaacataatttgtagtgaaatatcatttaaataagttgagcataaaaccccagtattttatttttcataaaaacacagctatgcgttaaagtacaggaaaatattagggaaaagtaagcctatgtctatagggtgaggtagcaagggatcaggaaaggcaggtcagaaggaaaatccaagtgacatcttggagagttctaggctgctggtgtgctgtgggttaaggagcttgcccaactcagttctagacactcagggttaaaacaaaaagcagcaagagttaactctgttgaaaaactgttaatactggactcagtgcaaaattatggtttcacaatcatgttttcaaatcttccatttttaagttccttctaaaacagcaactgaatgatgctggttactaccacagttaatgtcatcggagggcatcacggtgaaaaagatcaaaggacgtttacctgaaagcctttcactcttctgatgaacrtggtttccaagtatcacattctcagaacttgttgaatgtggaaagatccaaaataaggccctatacaattaagccc

SEQ ID NO: 175561 - DNA, 385 bp, Homo sapiens
gatgtccagatcttggtttctaaataccattttccaaaaaataaaaataaaaaaggaaccagacctccttggagaagtggttggctccattaatgggacaggacaggaacaagatgagattagaatatcctgtggtgccacaaagttacaaatggctaaaaaaaaacaaagaaaaaccaaaattgtggggacaggtcaaaagaacacatgaaccagaatgaagggattcccctggctaaatagggacataaaataaaataaaaactgataatatcccagagactacagaattaaaaaaaatctacgattytactttacacacacacacacacacacacacacacacacacacacacacatatatagaggggggggggaggataca

SEQ ID NO: 175562 - DNA, 385 bp, Homo sapiens
gatgtccagatcttggtttctaaataccattttccaaaaaataaaaataaaaaaggaaccagacctccttggagaagtggttggctccattaatgggacaggacaggaacaagatgagattagaatatcctgtggtgccacaaagttacaaatggctaaaaaaaaacaaagaaaaaccaaaattgtggggacaggtcaaaagaacacatgaaccagaatgaagggattcccctggctaaatagggacataaaataaaataaaaactgataatatcccagagactacagaattaaaaaaaatctacgattttacttyacacacacacacacacacacacacacacacacacacacacacatatatagaggggggggggaggataca

SEQ ID NO: 175563 - DNA, 385 bp, Homo sapiens
gatgtccagatcttggtttctaaataccattttccaaaaaataaaaataaaaaaggaaccagacctccttggagaagtggttggctccattaatgggacaggacaggaacaagatgagattagaatatcctgtggtgccacaaagttacaaatggctaaaaaaaaacaaagaaaaaccaaaattgtggggacaggtcaaaagaacacatgaaccagaatgaagggattcccctggctaaatagggacataaaataaaataaaaactgataatatcccagagactacagaattaaaaaaaatctacgattttactttacacacmcacacacacacacacacacacacacacacacacacatatatagaggggggggggaggataca

SEQ ID NO: 175564 - DNA, 606 bp, Homo sapiens
aattttccaatggagaaacctggtagacaccacaccaaccaagtgatcaaagttaataccaagaatgggagaaaggagcatcagtgtctcctgatataatgcactaagaaggatataatactacctctgtaggattctggccaatatgcaaaatctgattctaaccatgaagaaatgccacatcagacaaactcaaattaagaaacattctgaaaagcaataggctgtgcttttcaaaaatgtgaaggtcatgaaagacaaagtctggggaattgtttgagattaaagaacactaaaagacaagacaactaaacacaatgtgtgatcctggaatgggtcctggacccaaataaaagacaactggcagcatttccataaggtgtgcagaccacaaatagctttatatcaaggtgaatttcctggktcagtaattacactatgtttttctaaaaaaatgtgttgtttaaatacactaaaggagcaaagaggcatcatgtaacttgctttcaaatatttcactaaaaattatatatacatttatacacatataacatatatggtgcacacactcatatatatgtgagagagagaaaatataatggaagt

SEQ ID NO: 175565 - DNA, 606 bp, Homo sapiens
aattttccaatggagaaacctggtagacaccacaccaaccaagtgatcaaagttaataccaagaatgggagaaaggagcatcagtgtctcctgatataatgcactaagaaggatataatactacctctgtaggattctggccaatatgcaaaatctgattctaaccatgaagaaatgccacatcagacaaactcaaattaagaaacattctgaaaagcaataggctgtgcttttcaaaaatgtgaaggtcatgaaagacaaagtctggggaattgtttgagattaaagaacactaaaagacaagacaactaaacacaatgtgtgatcctggaatgggtcctggacccaaataaaagacaactggcagcatttccataaggtgtgcagaccacaaatagctttatatcaaggtgaatttcctgggtcagtaattacactatgtttttctaaaaaaatgtsttgtttaaatacactaaaggagcaaagaggcatcatgtaacttgctttcaaatatttcactaaaaattatatatacatttatacacatataacatatatggtgcacacactcatatatatgtgagagagagaaaatataatggaagt

SEQ ID NO: 175566 - DNA, 411 bp, Homo sapiens
caacatgaagactgcaggtaaaactgtactgtatttgggattcctgccaaatgagtatactttagttgcccttgtcacaaaaacaaacacccaaaaaagtgagtaactatgtgagatgatgaatatgtgaatttgcttcattatagtaactattttactattgttgtatatatgtcttaacaccatgttgtatacctcaaatacacacaataaaatttatttaaaaaccaacgaaaaagcacattcccttcataaatgagattcttttcaaaataagtttgagaatatacattgtgaaatatactactaaaaaccaccccctaactaatctccccacaacccasgagctctgatttgatagcttaagacaggataaatgactcccattatgacactgagccccacttttat

SEQ ID NO: 175567 - DNA, 474 bp, Homo sapiens
gctgctgggtcatctttaaaatagcagactgcctgtcaggagaaccaatggaataatcaatcactcaatttaaagtggggagctcctttaaaatgctagggtgatggggtatgggcacaaagtgaatagctgtgacagtacagttcctcagccaagatccacgaatgtaagcaccagtgggaagagcactagaccaagaggctcaaaaatatactgtgaccttcaactagtcacttaacaagtgctcattgtatcatttaaaaaataatacaatagaactccatgaatccaattaaatttaattccatattattcgagtgtttgtttaaaatgatatttctcaaagcaatggtcaaatgastttggaaatcagtagattaaagaaggttaagcaggtttctgttccatgcaacttctcagtaactttaatagtctactgtgcaccgtgaagctctcagacctggtggatgtggt

SEQ ID NO: 175568 - DNA, 474 bp, Homo sapiens
gctgctgggtcatctttaaaatagcagactgcctgtcaggagaaccaatggaataatcaatcactcaatttaaagtggggagctcctttaaaatgctagggtgatggggtatgggcacaaagtgaatagctgtgacagtacagttcctcagccaagatccacgaatgtaagcaccagtgggaagagcactagaccaagaggctcaaaaatatactgtgaccttcaactagtcacttaacaagtgctcattgtatcatttaaaaaataatacaatagaactccatgaatccaattaaatttaattccatattattcgagtgtttgtttaaaatgatatttctcaaagcaatggtcaaatgagtttggraatcagtagattaaagaaggttaagcaggtttctgttccatgcaacttctcagtaactttaatagtctactgtgcaccgtgaagctctcagacctggtggatgtggt

SEQ ID NO: 175569 - DNA, 474 bp, Homo sapiens
gctgctgggtcatctttaaaatagcagactgcctgtcaggagaaccaatggaataatcaatcactcaatttaaagtggggagctcctttaaaatgctagggtgatggggtatgggcacaaagtgaatagctgtgacagtacagttcctcagccaagatccacgaatgtaagcaccagtgggaagagcactagaccaagaggctcaaaaatatactgtgaccttcaactagtcacttaacaagtgctcattgtatcatttaaaaaataatacaatagaactccatgaatccaattaaatttaattccatattattcgagtgtttgtttaaaatgatatttctcaaagcaatggtcaaatgagtttggaaatcagtagattaaagaaggttaagcaggtttctgttccatgsaacttctcagtaactttaatagtctactgtgcaccgtgaagctctcagacctggtggatgtggt

SEQ ID NO: 175570 - DNA, 517 bp, Homo sapiens
gaagccagtcttgcagtagccagcccctctaggggacaaagcagcatctttaatattcagctgtccagttgtgaatactacaattcaagmctctgagcatttcatattttggaattcacacagttgcacattttaaggcagcatttgacaacctgccatggaaagcacagtgactgttctcttcatctttgcctctgtgtctcattcttgagattctgcctgatccctgggttctaaaccatttttgtctcatgctgagtggtaatagcaataagcccagtaatggtcttttcccctggagcacctgttgttatcgttaatgaaggtgcaccactgagttagcctcttgaacatgataccactgtagggtttttttgtttcaggggctttaaattctgctttgcaaagaacaagcgtggccttgcttactcagtaaggcacttgtagtcaggaaagggaaatatcaaagtaaaaaagtgacctcttatttcacaattgattattaactctccttttt

SEQ ID NO: 175571 - DNA, 528 bp, Homo sapiens
gaggacgggagggcagtaggaagaggagaaggggcgggaggggaaggaaggaagctcagcgaggcagcacagagggaaggaccacagtggccgagcttagggcacagacagaggtccactccaggccaggtcaggggctggattggcctcagcacaggtccaggtggggctccagggagatgtccccacccaggttgcttgggcagggtccgagatccagatggccgtggctgctgtggcaggccccttggcaagcagaagccacactgtggcatgcttgtgagggtcccccattctactgagtcagagctggccttgagcctgaggggcccgtgctaccacagcaactgggtacagcccagtgttttctgcrtccaacctggcttcgcggggccagagggtgagaagaaaacagacatcactctaggtccccagaagaagccgtttcggtctttggcagttgttgctatcatcctcagactggcatcttcaaatccatcttggagatgatgtaccctccggagcctt

SEQ ID NO: 175572 - DNA, 539 bp, Homo sapiens
gtggttgttgtttttctatctccaaatactgagtatttccctaaagacattcaaggagggtggatcacacatctttccccaatcagagtgacacactgtgatccagcacacatgaagatcaagggcaaagctggggaggctgccatggggggaaggcagagtctggagtgacactgggttccagtcccagctgcagggcacaaacacagacctggcctgaggcgtccccatcacatctcctgtctgtgaagttgagatggtaataatggtacctaggtgtagagctccaatctgtaaacttaccattgataaattgcttggaacaggccctggcccagagcagcatgcaggaagtgcacctgttactacgtgcatactcataactgaagctgcagtaatgaccagaactgctctcatttgatggtccctgacagagcagtgggctgcaaggaacctgcaasgaagcctctgcccctccctttctcattgtacaagggtaggggacagacttcgaggtcccaccagttggtggcagtttt

SEQ ID NO: 175573 - DNA, 470 bp, Homo sapiens
gaattctccaactgccgtcggcctggcctgagagtcacctgcacatttttggagatagagataagacagccccactctcaagaggccccagaattaacggggccagattagagcctgcacttaccaggccacagcggcccgacgtagtcgccacatcccgccggcggggaggtcacgcasgcgccgagacggccacgcgggagcccccgtgtgagccccagcccggctcccggtccaggaatgacccaggaagtggccctcagcagcaagggcacagagccgcggccgaggccctcccaatggcgcatggacttccgcaagagcctgacaggcacccgtactcagtccgtcacggaaacaaccacttcaccctttctaggcgggcagcacgaacggtccgcggaggaccagcgcatgcgcacagtgcgtcgggaacggactggagcaatccatcgcctctcacggggccc

SEQ ID NO: 175574 - DNA, 472 bp, Homo sapiens
gggaattctccaactgccgtcggcctggcctgagagtcacctgcacatttttggagatagagataagacagccccactctcaagaggccccagaattaacggggccagattagagcctgcacttaccaggccacagcggcccgacgtagtcgccacatcccgccggcggggaggtcacgcaggcgccgagacggccacgcgggagcccccgtgtgagccccagcccggctcccggtccaggartgacccaggaagtggccctcagcagcaagggcacagagccgcggccgaggccctcccaatggcgcatggacttccgcaagagcctgacaggcacccgtactcagtccgtcacggaaacaaccacttcaccctttctaggcgggcagcacgaacggtccgcggaggaccagcgcatgcgcacagtgcgtcgggaacggactggagcaatccatcgcctctcacggggccc

SEQ ID NO: 175575 - DNA, 450 bp, Homo sapiens
gaccctttctccaaaaaaaactaacatgaaaaagatacatatttctaagtatatgtatattttttaagaatagaatttttaaatcaatggaataatcttgttttgccatgatgcaaacaaacggatgatatccaaaaacaatattcatgttgtttttcaacatgtagcggggaaaagggaaattatgaggcaacaatatgttcagtgatgtgctggtaagtatttaacaaatggccttcaggcggggcagggtggaagtcccgttgtagtatccacagatttctgtggcataaatagcaccaacattatttatttcaagctaccaatgtgatgtcactgaattaggagttsggaagaaatacaattgcaccatgctgtgtaataccactacctagtatttccatgatacagataaattaggtgcaaataatctcaaaagcacagataagt

SEQ ID NO: 175576 - DNA, 399 bp, Homo sapiens
gaattccctgtcaaaacaccactagccaggtctggggcctacatgggtctttcctcagatttgttctcccaagtatggattgtacagccagcgtgtgtacccctaggcccaggatatgctgccagtgcgtgcacctcaaagcctagggaccaccaagggatatataaccagcatgtgcacccacccctaagcccgggggccaccgagggatacacagccagtgtgtgcacccctaggtccaggggcaacacaggatatttgcattcaagggatttggaagargacctgggcttctgagctgggtgccctgctgtgtccagatggggatgcataatggtccttgtgggcaaggacattgctggggaagggaagggaagggggttgggcatgggctagggg

SEQ ID NO: 175577 - DNA, 458 bp, Homo sapiens
aaagtgcctgcagaagtttcttccaatattccttttacagagggtggatagcttagctggggcgcattcctggtcctgaatgttggccagggggtggctggttagggtgacggtgatggtggatcaaatttggacatattggtggcgtgtccacatgargacccttgaagtgtgggtagagcctgggatgggaagagaatgaagtcaggttttatagcccccacaaatgctagaaataggcctggccatcacagcattcaccgtacaatattgctttgattcctgtgccattagactgtaaacaaattggtgacaggtattccttcaagttcttggctgggtgagttgccaggtgccttgttaactgcttcagtatagagcatcaccgggaaagggagacgcactatagctctcaagccttaccatctgcagaaatatttttgtaaaggaaaaggttc

SEQ ID NO: 175578 - DNA, 458 bp, Homo sapiens
aaagtgcctgcagaagtttcttccaatattccttttacagagggtggatagcttagctggggcgcattcctggtcctgaatgttggccagggggtggctggttagggtgacggtgatggtggatcaaatttggacatattggtggcgtgtccacatgaggacccttgaagtgtgggtagagcctgggatgggaaragaatgaagtcaggttttatagcccccacaaatgctagaaataggcctggccatcacagcattcaccgtacaatattgctttgattcctgtgccattagactgtaaacaaattggtgacaggtattccttcaagttcttggctgggtgagttgccaggtgccttgttaactgcttcagtatagagcatcaccgggaaagggagacgcactatagctctcaagccttaccatctgcagaaatatttttgtaaaggaaaaggttc

SEQ ID NO: 175579 - DNA, 458 bp, Homo sapiens
aaagtgcctgcagaagtttcttccaatattccttttacagagggtggatagcttagctggggcgcattcctggtcctgaatgttggccagggggtggctggttagggtgacggtgatggtggatcaaatttggacatattggtggcgtgtccacatgaggacccttgaagtgtgggtagagcctgggatgggaagaraatgaagtcaggttttatagcccccacaaatgctagaaataggcctggccatcacagcattcaccgtacaatattgctttgattcctgtgccattagactgtaaacaaattggtgacaggtattccttcaagttcttggctgggtgagttgccaggtgccttgttaactgcttcagtatagagcatcaccgggaaagggagacgcactatagctctcaagccttaccatctgcagaaatatttttgtaaaggaaaaggttc

SEQ ID NO: 175580 - DNA, 490 bp, Homo sapiens
caaatgctttaaaaaaaatcccacacttcccaaagcaatctacagatttaattcaattctcattaaaataccatcatcattcttcacagaactagaaaaaacaatcctaaaattcrtatggaatcaaaaaagagcccatgtagccaaagcaatactaagcaaaaagaacaaatctggaggcatcacattacccgacttcaaattatactacaagggtatagataccaaaacagcacggtactggtataaaaataggcatgtagaccaatgggacagaatagagaacctagaaataaagctgaatatttatagccaaatgatctttgacaaagcatacaaaaacataaattggggaaaggacaccctattcaataagtggtgctcggaaaactggtaagccacacgtagaagaatcaaactgaatcattatctcttaccttatataaaaatcaattcaagatgggatcagacttaagtctaagacctgaaa

SEQ ID NO: 175581 - DNA, 550 bp, Homo sapiens
tatacatccagggctaacatagtcctggcacattgtgggcactcaatgcatttcaattcttgctttcaaaattagtatttgcagggtaaactaacagtattaatgtgtttgatatggtttggctgtgtccccacccaaatctcaccttgaatggtaagaatcccatgtgtcaagtgtagggccaggtggagataattgaatgatgcgggtggtttcccccatactgttctggtggtagtgaataagtcttaggagatctgatggttttataaatgggagttcccctgcacaagctctcttgcctgccaccrtgtaagatgtgcatttacttctttgccttccgccatgattgtggggcctccacagccatgtggaactgtgagtccattaaacctctttcctttataaattacccaggcttgagtatgtctttattagcagtgtgagaacagactaatacagggttccttgtgtcctaaaagtaaaaatttgattcaaaatcctgttatatacctccaaaatgctcccaagagtgattagaatcaatctt

SEQ ID NO: 175582 - DNA, 563 bp, Homo sapiens
aaaaatgtattattttagttgaggttatttgttgcctcaataaaattaggattgtgttttcatagaataaaggaaaaatcagtcaatcattttcacaagaatgcttcacaagaaaccatgccaaaactcagtgaattacaacagcaagcatttctttctcatttgtgtgttttagatcaatcarggatcacagattgaggatggtgtcagctaggctgacttttttttttttttgataaggggtacaagtgcaattttgttacatggatacattgtgtagtggtgaagtttgttttcagtgtatctatcacctgaataatatacgttgtacccattaagtaatttctcatcatccacccctctccgaccccttcacccttctgagtctccagtgtctaccactctacactctatgtccatgggtacacattatttagctcccacttacaagtgagaacatgcagtctttgtctttctgtttctgagttgtttcacttaagataatggcctccagttctactcatggctgcaaaatacacgatttcattcttttttatgtagac

SEQ ID NO: 175583 - DNA, 506 bp, Homo sapiens
gagcatcagctgagatgggcaaataaagtgcttaggataagacctcaataatggaagctatcatcaatatttgtaatttatatgatatatggttgtaataataatacaacatgataaatataagaaaattgtgtaccccaaacaaaacatggatagaacaaggaaacaaaaaagctaccaaaggaagctctgcaaataactactgcttttggtatcactacacaaatatccagtattaatcctatttcatctgtgtgtagtttttcataaataatgagatgggtgtttaacccaggatcattctttgtacatgaaaggagctgactaaaatgcacatgtagcataaagcacaggttgatatccttcaatctaactgtgatggcaaactgcatttgggaatattttggatttgttctcaamaaagtcactccagcaaattcttggtatatggaagttgctaaagcaccattcagaagtaagaatacagagtatcactcatgtggctt

SEQ ID NO: 175584 - DNA, 463 bp, Homo sapiens
tgtgtatctatttctgggctctccactctgttccattgaactatgagtctgccctttcaccaatactacactgtcttgatcactgtagctttacagtaagccttgaagtcatgtggtgtcagtccgtcaagtttgttcttcttcagtactatattagttgttcggaattttctccttttccatattttagaatcagtttgttcatgwccacaaaataaccttctgggattttgattaggattgcactgaatctatatataaaattgggaataactgacattttaaaaatattgagtcttctaatgaacatggactatctctccatttattttgatattttaaagatttcttgcatcaatacatgcttttatcaaaaggtcttcttttgctttttctttactgaacatctatttctccttctcccttctagccttgtctatctccctcaaggccatgttgataa

SEQ ID NO: 175585 - DNA, 520 bp, Homo sapiens
ctctcctctccgtaagatgagactgtttaaatgtttctactttccctgtatctaggtttatgaggccagtttgatacttgtagatcattatccagagagtaggcctctttttctgcagaatattcgttttagcacctacattatatatttccattcattccaacattgtccattgcttaccatgctggggactattcagagtcttttctcagttatttgactcacatgatacatggagagtcatgtacatactttctctgacttattacaaattcacaaatctcattctttcaccctgtcaggtgaatcgtctcttggctgcatataagattcttcagcttctcttggaagcttaaagaaacattattccactgtcttctaattttcagtgttgctgaaacaaagttcaaatggcaatcattcttttttttttttctacgtaagtaactttttttgctatcttgaagtttataggattttcactttacyctttaagttcagcaattttcccagggtatac

SEQ ID NO: 175586 - DNA, 513 bp, Homo sapiens
tattttcattatgtagacaggagggacagtgagctaacagttagaagcagagatacctctgctgcagttgataagctctgggttggaagtgttgggtctgggattgccaaagtacaggactctaagttaaatttaaatttcagattttaaaaacatcaatttttagtataagtatgccctaaatattgcgtgagaagttcttattgaatgactacttttttattcttttttttttctttccgctcttcttttaggttcaggaggtacatgtgcaggtttgttacatgagtataatgtggggtgctggggtttggtgtrcaaatgatgtcattgcccaggtagtgagcatagtaaccaataggaagttttttttcctcccaccctcttttctcaagtaagccccagtgtctattttttccctctttgtgtccatgtgtactcaatgtttagcccccatttataagtaagaacatgtatttggttttctgttcctgtgttaattttattagaaca

SEQ ID NO: 175587 - DNA, 557 bp, Homo sapiens
ttataatcaggcaactcagagagttatattctagagaaaagaaggcagcccctttacagtgcctctgacaaggaagccaatcagctcactgccttctgtataagccaggtatcttcgtttgcattctccagaggcagagcctgaagcaggggttcttgtgcatgtgacttaatgagagtgtgctctcagataaaactcgtaggggagtaagggaagcagggtaaggcatactaaaaaaaaaaaaaaaaggcaaggtaaaaatgttttgcatggaacctagtctcacccatcctagggtaagctctggagttgtcctgcccagaagcaagggagtttgggctcttgtacccttggtaacagtcagtcattggccacaggctgcctggtggaggtaggtaggatgggacgtgtaaccacctaatgtcactgggtatggcagtgttagccaaagagagagcctctctggagaagggagtagytgctggcaaccaacacccacagtagctgggggtgagcacaccagcctagtaaagagatggtggggggagtgttccata

SEQ ID NO: 175588 - DNA, 557 bp, Homo sapiens
ttataatcaggcaactcagagagttatattctagagaaaagaaggcagcccctttacagtgcctctgacaaggaagccaatcagctcactgccttctgtataagccaggtatcttcgtttgcattctccagaggcagagcctgaagcaggggttcttgtgcatgtgacttaatgagagtgtgctctcagataaaactcgtaggggagtaagggaagcagggtaaggcatactaaaaaaaaaaaaaaaaggcaaggtaaaaatgttttgcatggaacctagtctcacccatcctagggtaagctctggagttgtcctgcccagaagcaagggagtttgggctcttgtacccttggtaacagtcagtcattggccacaggctgcctggtggaggtaggtaggatgggacgtgtaaccacctaatgtcactgggtatggcagtgttagccaaagagagagcctctctggagaagggagtagctgctggcaaccaacacccacagtagctgggggtgagcacamcagcctagtaaagagatggtggggggagtgttccata

SEQ ID NO: 175589 - DNA, 557 bp, Homo sapiens
ttataatcaggcaactcagagagttatattctagagaaaagaaggcagcccctttacagtgcctctgacaaggaagccaatcagctcactgccttctgtataagccaggtatcttcgtttgcattctccagaggcagagcctgaagcaggggttcttgtgcatgtgacttaatgagagtgtgctctcagataaaactcgtaggggagtaagggaagcagggtaaggcatactaaaaaaaaaaaaaaaaggcaaggtaaaaatgttttgcatggaacctagtctcacccatcctagggtaagctctggagttgtcctgcccagaagcaagggagtttgggctcttgtacccttggtaacagtcagtcattggccacaggctgcctggtggaggtaggtaggatgggacgtgtaaccacctaatgtcactgggtatggcagtgttagccaaagagagagcctctctggagaagggagtagctgctggcaaccaacacccacagtagctgggggtgagcacaccagcctmgtaaagagatggtggggggagtgttccata

SEQ ID NO: 175590 - DNA, 570 bp, Homo sapiens
tgttcatctgtgattatatcggggttgacaattttttttctgtaaaaacccagatgccaaatattgtaggctttgcaggtcatcagtctctgtggcaactactgagctctgcaattgttgcagagaagcagccatagataataaggaaaccaaggggtatgactgggttccagtaaaactttgtttacaaaaatgggcatcagatctgtttggtcctacagactgtaatttgccaactctcatattatgtcaccaatttgatacacaattaggtatatttgttttattcgtttttgacatttggagaacaaacttttgattttcctttattcatgtatttactcatttatctttacttttttgtcatgtaagggtgaagttatataagtttcatgggaaattttgatttaggtgacctacagactaattttgagaaatactgccctaaaatgaaggcagagccccagacctggagaacaattataaacctggagtcaattgtcagctaaatactgtcatttgaargatattagagaggtgctcatacctcgaacctagtcttaatattct

SEQ ID NO: 175591 - DNA, 582 bp, Homo sapiens
tgcaataacttaagatagtataactagttgtgctctatcagaaatagtacctgggtctccagacctttaagccaatgctctttcctgaatgccttattccttcacggccatttaacatttttttgactcactttctccaagcccttttgtgtagccctgaccacagaaaawtctaaatgaggtggcccttattttccctttactcccaacaaatgtatgacacagaaagtaggtacaatatgaattatcaaagagtactatgatcggtctgtggcctattccttttatttttaccatataacttaccgtcttctgtctcacagtcccactattatccacatgtgttgctttcttcagagatggtagaggcaagatttataaagttgatgaggagcattgaaatcttcagtttcaataagcaataattggtagtgacatgcaagtacttcttttgtgcattgactcaatttctctacagctcttatatgtggtaatttgcattatcagcacaaacatttgaccccttccagaatccacaccctttttgtgggtggcagctttgctttgtcagcttaaactgga

SEQ ID NO: 175592 - DNA, 582 bp, Homo sapiens
tgcaataacttaagatagtataactagttgtgctctatcagaaatagtacctgggtctccagacctttaagccaatgctctttcctgaatgccttattccttcacggccatttaacatttttttgactcactttctccaagcccttttgtgtagccctgaccacagaaaattctaaatgaggtggcccttattttccctttactcccaacaaatgtatgacacagaaagtaggtacaatatgaattatcaaagagtactatgatcggtctgtggcctattccttttatttttaccatataacttaccgtcttctgtctcacagtcccactattatccacatgtgttgctttcttcagagatggtagaggcaagatttataaagttgatgaggagcattgaaatcttcagtttcaataagcaataattggtagtgacaygcaagtacttcttttgtgcattgactcaatttctctacagctcttatatgtggtaatttgcattatcagcacaaacatttgaccccttccagaatccacaccctttttgtgggtggcagctttgctttgtcagcttaaactgga

SEQ ID NO: 175593 - DNA, 417 bp, Homo sapiens
aatgggaaacatgttcttctagtttaagatacaatcggtcgggcgtggtggctcacgcctataatcccagcactttgggaggctgaggcaggcagatcacctgaggttgggagttcgggactagcctgaccaacatggagaaaccccatctgtgctaaaaaaaaaaatacaaaatgagccggacgtggtggtacatgactgtaatcccagctacttgggaggctgaggcaggagaatcacatgaacccaggggrcggaggttgcagtgagccaagatcgcgccattgcactccagcctgggcaacaagagcaaaactctgtctcaaaaaaaaaaaaaaaaaaaaaaagatacaatcgttctatgagcctgggagtgctagaaggaaggagccagcaagtctagacacattccagagg

SEQ ID NO: 175594 - DNA, 417 bp, Homo sapiens
aatgggaaacatgttcttctagtttaagatacaatcggtcgggcgtggtggctcacgcctataatcccagcactttgggaggctgaggcaggcagatcacctgaggttgggagttcgggactagcctgaccaacatggagaaaccccatctgtgctaaaaaaaaaaatacaaaatgagccggacgtggtggtacatgactgtaatcccagctacttgggaggctgaggcaggagaatcacatgaacccagggggyggaggttgcagtgagccaagatcgcgccattgcactccagcctgggcaacaagagcaaaactctgtctcaaaaaaaaaaaaaaaaaaaaaaagatacaatcgttctatgagcctgggagtgctagaaggaaggagccagcaagtctagacacattccagagg

SEQ ID NO: 175595 - DNA, 417 bp, Homo sapiens
aatgggaaacatgttcttctagtttaagatacaatcggtcgggcgtggtggctcacgcctataatcccagcactttgggaggctgaggcaggcagatcacctgaggttgggagttcgggactagcctgaccaacatggagaaaccccatctgtgctaaaaaaaaaaatacaaaatgagccggacgtggtggtacatgactgtaatcccagctacttgggaggctgaggcaggagaatcacatgaacccagggggcggaggttgcagtgagccaagatcgcgccattgcactccagcctgggcaacaagagcraaactctgtctcaaaaaaaaaaaaaaaaaaaaaaagatacaatcgttctatgagcctgggagtgctagaaggaaggagccagcaagtctagacacattccagagg

SEQ ID NO: 175596 - DNA, 444 bp, Homo sapiens
tcttgctgaattaaggtagaggaaaaatcaataaaattatttaaaaataaagtttaggtttcaaaggcctttaaatcctatactacacattgaaatcacctggcaatctttacaaaccatagatgcttaattctcacctatgttacttggtatggcatgcaaccaaggcatcagtatttttaaaagcttcctaggtcattataatgtgcaagaatgcttggaaaccactatcctaaggaattacagactagaaaatatctggggccattatactacagggttatcagagattttcttagaaatagaaaaatacagagagaggagtcagggcttgggagcattgaaaattccaggctattaatttcattaaaagcrttgcctattataaattcggtgaacactgttaataaaacagagtagatgctatgtactttgaaagggcct

SEQ ID NO: 175597 - DNA, 587 bp, Homo sapiens
tacaactgtcagaagataattttttcttaatgtgagtctaatatgaactctgaaaagtatctgtaggctgactggcatccttgaaaagctaaaaccaatctttcatattttctaggttattctctttttccaccagataatactagactcctactattttctttttttttttcttggaatagcaatatgaatctgagaaacattatttggcttgagataaattctgtcatgctctattgactcatatcctctggaaaaaggaaaacataagaacatcagtwttgggttaattcacctgtaaataaaatgctgatggggtacagccatgttgggggaacatggcccaggaggaagctactattagaccactgctagctgcacctgattgggatctttttggctgaaacggaaataaataaaagagtggggagataatttttcttattttagtttagaaagggaaggggtctttatttcttggattttagtttgtcacaggcattgaataaaggatgaggcattctctataatacattttgtctcgtcttttaaatttaattagtttctatatatttatggacaattgt

SEQ ID NO: 175598 - DNA, 587 bp, Homo sapiens
tacaactgtcagaagataattttttcttaatgtgagtctaatatgaactctgaaaagtatctgtaggctgactggcatccttgaaaagctaaaaccaatctttcatattttctaggttattctctttttccaccagataatactagactcctactattttctttttttttttcttggaatagcaatatgaatctgagaaacattatttggcttgagataaattctgtcatgctctattgactcatatcctctggaaaaaggaaaacataagaacatcagtattgggttaattcacctgtaaataaaatgctgatggggtacagccatgttgggggaacatggcccaggaggaagctactattagaccactgctagctgcacctgattgggatctttttggctgaaacggaaataaataaaagagtggggagataatttttcttattttagtttagaaagggaaggggtctttatttcttggattttagtttgycacaggcattgaataaaggatgaggcattctctataatacattttgtctcgtcttttaaatttaattagtttctatatatttatggacaattgt

SEQ ID NO: 175599 - DNA, 587 bp, Homo sapiens
tacaactgtcagaagataattttttcttaatgtgagtctaatatgaactctgaaaagtatctgtaggctgactggcatccttgaaaagctaaaaccaatctttcatattttctaggttattctctttttccaccagataatactagactcctactattttctttttttttttcttggaatagcaatatgaatctgagaaacattatttggcttgagataaattctgtcatgctctattgactcatatcctctggaaaaaggaaaacataagaacatcagtattgggttaattcacctgtaaataaaatgctgatggggtacagccatgttgggggaacatggcccaggaggaagctactattagaccactgctagctgcacctgattgggatctttttggctgaaacggaaataaataaaagagtggggagataatttttcttattttagtttagaaagggaaggggtctttatttcttggattttagtttgtcacaggcattgaataaaggatgaggcattctctataatayattttgtctcgtcttttaaatttaattagtttctatatatttatggacaattgt

SEQ ID NO: 175600 - DNA, 587 bp, Homo sapiens
tacaactgtcagaagataattttttcttaatgtgagtctaatatgaactctgaaaagtatctgtaggctgactggcatccttgaaaagctaaaaccaatctttcatattttctaggttattctctttttccaccagataatactagactcctactattttctttttttttttcttggaatagcaatatgaatctgagaaacattatttggcttgagataaattctgtcatgctctattgactcatatcctctggaaaaaggaaaacataagaacatcagtattgggttaattcacctgtaaataaaatgctgatggggtacagccatgttgggggaacatggcccaggaggaagctactattagaccactgctagctgcacctgattgggatctttttggctgaaacggaaataaataaaagagtggggagataatttttcttattttagtttagaaagggaaggggtctttatttcttggattttagtttgtcacaggcattgaataaaggatgaggcattctctataatacattttgtctcrtcttttaaatttaattagtttctatatatttatggacaattgt

SEQ ID NO: 175601 - DNA, 570 bp, Homo sapiens
atgcccctacctatttgcaaaattagtaatacttataaactggagatcaaactatattctcttttatttttgtatgaatttattctttgatgttattttttaaactttctttgtgtgcctgcacacaaacacgtgtactaattataaatacattcagacttgtttcacatttatcttccacatctgatgcaagggccatattactttctttttctgctgtgattatatttatctatttatttcactcataaaatgattgttgcatcctgtctttcattatttgataaaattgttctcaaaatatttacatggagttcattcttgatgtctccttcgatggcaacaaattctttgtgaaatttacaccacacttatgatgtttctatcatgctttaaccagaaaaagcttctataaaggtgtgacttactaaaaaatgtagatagataggtaggtagcaggaaggtaggtaggtagatagatgattgatwgatagatagatagatagatagatagatagatagatagatagacagacagacaggcttctcttttttctgggttagctgata

SEQ ID NO: 175602 - DNA, 394 bp, Homo sapiens
aaaataattgtaaatgttattcaagaacaatagtgtcttggtggataggaatagtaaaaatgggtaaaggagacctttaaaatgctaacatttaccctaataaaaatgcatgtagaaaatgagtttgggtacacatgccacccttggcatggatgttgttgtagaatagagtactagaaagagtcratttgtgatgaagggagaaaaggattagtgaaatatttaagggtaaaagacagaaaccacaaatacatcgtgagggcaaacaaaagttatatctacatacaaagagagtggccattggagataacataagaaaacaaaaatgcaataaatacttgggaggaagacagaattgggtgattactgaaggaatactttctgaagttgcact

SEQ ID NO: 175603 - DNA, 394 bp, Homo sapiens
aaaataattgtaaatgttattcaagaacaatagtgtcttggtggataggaatagtaaaaatgggtaaaggagacctttaaaatgctaacatttaccctaataaaaatgcatgtagaaaatgagtttgggtacacatgccacccttggcatggatgttgttgtagaatagagtactagaaagagtcaatttgtgatgaagggagaaaaggattagtgaaatatttaagggtaaaagacagaaaccacaaatacatygtgagggcaaacaaaagttatatctacatacaaagagagtggccattggagataacataagaaaacaaaaatgcaataaatacttgggaggaagacagaattgggtgattactgaaggaatactttctgaagttgcact

SEQ ID NO: 175604 - DNA, 394 bp, Homo sapiens
gaattcccagaattttccttttgcttcgtacatcctagacttgaagatgaagaaactggcaacatggcaacatcagcaggtacagacaaaaatcaaagtcccaacaaaagcctaatttctctagcaaatctaatattccctagaggttaggaaaggggaagcctagcaagacagaaaagctttagacaactgctctactccagcccaacaccacaggaagaaatgcaatcccmcttaagacagcaaagcccaaatggggagcccagacttccagtcttaccaggtggtattgaggtaccatcacacctaactcaagatagtgtcaggaaaggacaaataatgaactggattttcatgccccaccatcctatagtgagcttcatacctcacagag

SEQ ID NO: 175605 - DNA, 455 bp, Homo sapiens
ggtgggtaaaacttctagtgctttaacacaaataaaggggctggcaccaaactgtgctaggagttactgtatttttactgccatatcttgcagcaaaaacaatcccatttttatttatgaatgtctttgatccttcatgaaacagtaaatatcttacagtaaaaacaatgccacttttatttcggaatgttcttgatctttgatgaagcattaacaatkattaattttagtaaatttggaccctatgtaagtaccttttaatattctgtgtgtcaaaatgggaagtctgcacaaaatactcagctgcaggctgtaatatgattctttcaaggaaaatcactggtgtgtttgagttgcaagctgaactagcttggggttttcgtgaaatactattttttatgtgaaaaaaatgggtggaaactggttactgtgcctaggtatttggcagaccattt

SEQ ID NO: 175606 - DNA, 472 bp, Homo sapiens
tgttagtattttcatttacattgcattgaaattatggctcaattctgagagmataacattttcacaataatgtatttaaataacctcaggaatggacaatttagataaatggttcaaaacagagtccaaaatcagacctatgtgtggaaatttaaggtaaaaatgacactttttgttgtgtagtttttgtttgttattattgtatttatttattcagttttaaattttaggtttgagggtacatttgaaagtttgttacatacgtaaacacatgtcacagggctttgctgtacatattatttcatcacctaggtattaagtccagtatccaatagttgtcttttctgggcctctcccttctcttcctctcccacctcaagtagatgccagtgtctgttgttcccttctttgtgttcataggttcttatcatttggttcccacttataagtgagaacatgaggtatttgtttt

SEQ ID NO: 175607 - DNA, 544 bp, Homo sapiens
ttaccttccaaattttgattttattggtagctgaacgtttttattaagtttgttatccaacagcacactctaggctagagtcagagcaaattccctgtttatttttcattaaaaaaaaaaaaaaaaaacaggcggggaagtaccttgtgcatgctgtctgtgtgtgtgtctgtgtctgtgtgagtgcatgcatctctstgtgtgtgtgtgtgtgttatgtgtgtggtgaatgaacacaactagaataaaacagtttcaaaaacaaactgtaaagatgaattgtctagaatcaggcttagggaggaagtctttttgcatatgaaaagaatgagagagaaaagaaagactatcccttcccagaaggaagctaggagcaacaatacctatgagaaacattttatagcttgagatttattttaagaaatcaactgctatttcacggatttgacaaaggaaagtaatattgacaaactatttccctgaaatgctgctacagggatttagaatgtaactggcatttttttaaagcttgtgtatgaagctg

SEQ ID NO: 175608 - DNA, 546 bp, Homo sapiens
acctctgtgttcttaaatgtaccataaaaccttgtaaaaacttatgctaagtggaagaagccagatgcaaaaggtcacgtatagtgtgattctatttatttaaaatatccagagtaggtaaatctatggggacgggaagcagatgagtgsttgccagagactagaggaggaggaaaggagatcactaactggatacaggatttccttgtggggtgaaaaaaatgttgtgaaactaggtggtggtggtgatggctgcgtaatactgtaatactgcataatactgttaatgtataaaatgtctctgatgataaatgttacgtatatttgatcacgattttttaaatttttaaatttttaaaattttaaatttaaatttatcatctttgatgataaatgttatgtatatttgaccacaattttttaaattttaaaaacacacattaataaaatagaatacagtttatatcagacatttaaggaaacacagtagttagaatgtcttcaaaatcattatgattctatgacactcttatccacctcaaaatt

SEQ ID NO: 175609 - DNA, 546 bp, Homo sapiens
acctctgtgttcttaaatgtaccataaaaccttgtaaaaacttatgctaagtggaagaagccagatgcaaaaggtcacgtatagtgtgattctatttatttaaaatatccagagtaggtaaatctatggggacgggaagcagatgagtgcttgccagagactagaggaggaggaaaggagatcactaactggatacaggatttccttgtggggtgaaaaaaatgttgtgaaactaggtggtggtggtgatggctgcgtaatactgtaatactgcataatactgttaatgtataaaatgtctctgatgataaatgttaygtatatttgatcacgattttttaaatttttaaatttttaaaattttaaatttaaatttatcatctttgatgataaatgttatgtatatttgaccacaattttttaaattttaaaaacacacattaataaaatagaatacagtttatatcagacatttaaggaaacacagtagttagaatgtcttcaaaatcattatgattctatgacactcttatccacctcaaaatt

SEQ ID NO: 175610 - DNA, 546 bp, Homo sapiens
acctctgtgttcttaaatgtaccataaaaccttgtaaaaacttatgctaagtggaagaagccagatgcaaaaggtcacgtatagtgtgattctatttatttaaaatatccagagtaggtaaatctatggggacgggaagcagatgagtgcttgccagagactagaggaggaggaaaggagatcactaactggatacaggatttccttgtggggtgaaaaaaatgttgtgaaactaggtggtggtggtgatggctgcgtaatactgtaatactgcataatactgttaatgtataaaatgtctctgatgataaatgttacgtatatttgatcacgattttttaaatttttaaatttttaaaattttaaatttaaatttatcatctttgatgataaatgttatgtatatttgaccacaattttttaaattttaaaaacacacattaataaaatagaatacagtttatatcagacatttaaggaaacacagtagttrgaatgtcttcaaaatcattatgattctatgacactcttatccacctcaaaatt

SEQ ID NO: 175611 - DNA, 479 bp, Homo sapiens
tacctagaattggaattgttggatcctgtggcatgcttactttcaactttacaagatattgccaaattattttccaaagtggttgcaccatctaggcacagtggttcacacctgtaatcccagtgctttgggaggacaaggtgggatgatcacttgaggctgggagtttgagacttgcctgggatacatagcaagatcccatctcaattttaaaaataataaaaatataaaatatatataaataaacaaagtggatgtattaatttacacttgtacccactccccaaagactattctatgactttttttacttttgcccttayaatgcatatgaagtgctatcttgttttagtttgcattttccagattactaatgaggttgtgcatcttttcatatacattttccatctgtgacttgtctatttataccctttgcccatttttctgctttattttttgtctgttccatattgatttgt

SEQ ID NO: 175612 - DNA, 572 bp, Homo sapiens
ccctgaaagaaataaaagagaggatgatcatttatcagcctggaaagcaggacactttctttgccattttaaactctgaggcataggagtgcttatcttctcactgctgtttaataaaatctaggagataaagaggggagagtcycaatcttagctttctcttccataataacatctctattacaattatttgtatttggcagcctgaaagcacaaccaccaatctgccttaggttcatctttccttttgtaaacctaaattcccttccacattgcacgtggatcatacagatagaagctggtggctggcaagcttcctcactccaaggctttcaactctaacttggataaaatgcccctttttgagagaagacaggtggtttagtcccagttggggtcctctcctgagcaaagaccacgtcagttgtgatgaatgagatgtcatgattttgtaatgtgaactggtctcccctaggaaatgagctgggatctcaaaactcatttcacttgattagacttcatgtctccatggtggaaggcaagtctttcatctaattcagccacataggacc

SEQ ID NO: 175613 - DNA, 572 bp, Homo sapiens
ccctgaaagaaataaaagagaggatgatcatttatcagcctggaaagcaggacactttctttgccattttaaactctgaggcataggagtgcttatcttctcactgctgtttaataaaatctaggagataaagaggggagagtcccaatcttagctttctcttccataataacatctctattacaattatttgtatttggcagcctgaaagcacaaccaccaatctgccttaggttcatctttccttttgtaaacctaaattcccttccacattgcacgtggatcatacagatagaagctggtggctggcaagcttcctcactccaaggctttcaactctaacttggataaaatgcccctttttgagagaagacaggtggtttagtcccagttggggtcctctcctgagcaaagaccacgtcagttgtgatgaatgagatgtcatgattttgtaatgtgaactggkctcccctaggaaatgagctgggatctcaaaactcatttcacttgattagacttcatgtctccatggtggaaggcaagtctttcatctaattcagccacataggacc

SEQ ID NO: 175614 - DNA, 392 bp, Homo sapiens
tgactgttctaatactcaattgtgagaagcagattatctgctttgcagattatctgatcttctatcatcagccttcccattgggctttgagttgccaagsatggggctaaaatgtgaagtacaggaagttaggcacagtggactctgtgtgcaatcccattacaaaaccaaatataaataattcaagaaccactttgttaaatgactttagttttatttggtttggcctttttctctatcttaatctatattctccagagttgactaagcctcatttattttattctcattttctagaaatctttagactagaaaatagacatgtcgtaaaatctattcaagttggaatgacacaaacacctttccttcttttatgtactctataatgtaga

SEQ ID NO: 175615 - DNA, 421 bp, Homo sapiens
gaattcaatgtgatctacttttcaagggggtcaggagcggkggcaccataagaaatgctaacagagtagttttcatcctataaattcaaagtgcatgtgggtctctcatgagtgtatctagcaacaatgcctgacacatccttacaagggtacaccctgtgactgcctgttgggaaggatcgcttttccttttgtttattgaagcctaaccaggtcctgtagattttagaaacggacagtctcactgacttttaaaagccttgggagcaaacttcggtatttctgcccgctcctgtccactagagatccagaatcctggtttcactggcctgggaggcatctgggaacagctctcccaataatcattttcagttttcacaccaaatccagaagatagacccactttttcatttctcctcat

SEQ ID NO: 175616 - DNA, 407 bp, Homo sapiens
gaattcaatgtgatctacttttcaagggggtcaggagcggtggcaccataagaaatgctaacwgagtagttttcatcctataaattcaaagtgcatgtgggtctctcatgagtgtatctagcaacaatgcctgacacatccttacaagggtacaccctgtgactgcctgttgggaaggatcgcttttccttttgtttattgaagcctaaccaggtcctgtagattttagaaacggacagtctcactgacttttaaaagccttgggagcaaacttcggtatttctgcccgctcctgtccactagagatccagaatcctggtttcactggcctgggaggcatctgggaacagctctcccaataatcattttcagttttcacaccaaatccagaagatagacccactttt

SEQ ID NO: 175617 - DNA, 421 bp, Homo sapiens
gaattcaatgtgatctacttttcaagggggtcaggagcggtggcaccataagaaatgctaacagagtagttttcatcctataaattcaaagtgcatgtgggtctctcatgagtgtatctrgcaacaatgcctgacacatccttacaagggtacaccctgtgactgcctgttgggaaggatcgcttttccttttgtttattgaagcctaaccaggtcctgtagattttagaaacggacagtctcactgacttttaaaagccttgggagcaaacttcggtatttctgcccgctcctgtccactagagatccagaatcctggtttcactggcctgggaggcatctgggaacagctctcccaataatcattttcagttttcacaccaaatccagaagatagacccactttttcatttctcctcat

SEQ ID NO: 175618 - DNA, 421 bp, Homo sapiens
gaattcaatgtgatctacttttcaagggggtcaggagcggtggcaccataagaaatgctaacagagtagttttcatcctataaattcaaagtgcatgtgggtctctcatgagtgtatctagcaacaatgcctgacacatccttacaagggtacaccctgtgactgcctgttgggaaggatcgcttttccttttgtttattgaagcctaamcaggtcctgtagattttagaaacggacagtctcactgacttttaaaagccttgggagcaaacttcggtatttctgcccgctcctgtccactagagatccagaatcctggtttcactggcctgggaggcatctgggaacagctctcccaataatcattttcagttttcacaccaaatccagaagatagacccactttttcatttctcctcat

SEQ ID NO: 175619 - DNA, 425 bp, Homo sapiens
ctgcaggaattcaatgtgatctacttttcaagggggtcaggagcggtggcaccataagaaatgctaacagagtagttttcatcctataaattcaaagtgcatgtgggtctctcatgagtgtatctagcaacaatgcctgacacatccttacaagggtacaccctgtgactgcctgttgggaaggatcgcttttccttttgtttattgaagcctaaccaggtcctrtagattttagaaacggacagtctcactgacttttaaaagccttgggagcaaacttcggtatttctgcccgctcctgtccactagagatccagaatcctggtttcactggcctgggaggcatctgggaacagctctcccaataatcattttcagttttcacaccaaatccagaagatagacccactttttcatttctcctc

SEQ ID NO: 175620 - DNA, 408 bp, Homo sapiens
aattcaatgtgatctacttttcaagggggtcaggagcggtggcaccataagaaatgctaacagagtagttttcatcctataaattcaaagtgcatgtgggtctctcatgagtgtatctagcaacaatgcctgacacatccttacaagggtacaccctgtgactgcctgttgggaaggatcgcttttccttttgtttattgaagcctaaccaggtcctgtagattttagaaacggacagtctcactgacttttaaaagccttgggagcaaacttcggtatttctgcccgctcctgtccactagagatccagaatcctggtttcactgrcctgggaggcatctgggaacagctctcccaataatcattttcagttttcacaccaaatccagaagatagacccactttttc

SEQ ID NO: 175621 - DNA, 566 bp, Homo sapiens
atcatttcctaggaatggcattagttgttgagcaagattgtacttctcactggcctggagggtatgtgctcactgcacaaccctctcagtttcacctccattgcattattccattaaaagcttgaatatttcctgccagcatatggtgtccttttgaatgctttgagaatcctccaaccctcccttcctctaaaaaaccaagaaaataaatacttaagccactcaatataaatgagagcaggacattgagtgggtttttccacgtttcagtgaacttccttgaaactttgctgtggttgtcaccttcggccatcgtttcacaacagtgccctcagacagtgacagtcgcgaccttcctgattctcctgggggccctctgcattgatgcctgtttcctatttaaccgtaataaaggtgytcctatggttacccagcacgccttgtgtaaatgctgatatgtcgccatgtgcctgttcctttctctcccttcaaataagccagtcagcctcacacttgagtatgaattggcatcacctagagcttgttaaagcacagcgtgctggccc

SEQ ID NO: 175622 - DNA, 441 bp, Homo sapiens
tggtgggaacactagtacttttaactagtattcacctggktttcatctgccactaacctacacccacaacatggggtgatctcatttaatcctgaaaagcgccattattttcttcatttgactcggcttcaggacaagaaaggatgtccctatcacattaattttacacacacatacgcatatgcagacagcagggacacatagtagagcaagacaatatttttaggcacttattatatgtcaggtgctagtctaagtattctacattcagtaacccacttcatcctcttgaaaacgtgcctgaaatgggaagtaccattttatctccatttacagatgtggagcttgcagcacagagaggaaagtgtcaaatgagtagacttttttagtctacagagggcatctcctcctgaatctctgctcccctgtctcagccgccaa

SEQ ID NO: 175623 - DNA, 441 bp, Homo sapiens
tggtgggaacactagtacttttaactagtattcacctgggtttcatctgccactaacctacacccacaacatggggtgatctcatttaatcctgaaaagcgccattattttcttcatttgactcggcttcaggacaagaaaggatgtccctawcacattaattttacacacacatacgcatatgcagacagcagggacacatagtagagcaagacaatatttttaggcacttattatatgtcaggtgctagtctaagtattctacattcagtaacccacttcatcctcttgaaaacgtgcctgaaatgggaagtaccattttatctccatttacagatgtggagcttgcagcacagagaggaaagtgtcaaatgagtagacttttttagtctacagagggcatctcctcctgaatctctgctcccctgtctcagccgccaa

SEQ ID NO: 175624 - DNA, 395 bp, Homo sapiens
caagcgtacacagcataaattcaaagaatgtgggaggttttagaaagggaggatgaggctctgtccttcrgtacacgcagccaactgtaagcacagctgccttagactgatcaaggaccacagcctggtgggaaatggtagatggaaaagagacctgactctgacctggctgggtgaccttgagcaagaaacacacctctctgtccactcagcatcaggaagcatccgagtgtcagtttctccataggtaaaacaaggtggccaggatgagaactacaccatcccatgaggcccatccaacctgacatcccaaggctctgtgactcatggcctctgtggcctcctccctcctgggaggtcagtgtcatttgaaactaccccactctcaagcccca

SEQ ID NO: 175625 - DNA, 389 bp, Homo sapiens
acgcgcaatgatcattgtcaaggtagctccagtacttgtgagaaaggaggcaaggagaatttattgagcrcctactgtgtgctggaaccgtactgagtaggaacctcatgactataaggaaaggccaggtctcccctggcagggtggttcatggcaggaggtggattgggctctttaaactgattggctttggatcaccccagccacatctctatcctcagctgcaccatcatactcagcactgctcagcagttctccatgtctgtgttaacttcctcctccagttcccactgtggccattccaaacctccagcacggtgacctcattcctagcagatggcctccctcctgtgttcctgttctaggcccgcttttctcccctgctgccc

SEQ ID NO: 175626 - DNA, 545 bp, Homo sapiens
acgcgcaatgatcattgtcaaggtagctccagtacttgtgagaaaggaggcaaggagaatttattgagcacctactgtgtgctggaaccgtactgagtaggaacctcakgactataaggaaaggccaggtctcccctggcagggtggttcatggcaggaggtggattgggctctttaaactgattggctttggatcaccccagccacatctctatcctcagctgcaccatcatactcagcactgctcagcagttctccatgtctgtgttaacttcctcctccagttcccactgtggccattccaaacctccagcacggtgacctcattcctagcagatggcctccctcctgtgttcctgttctaggcccgcttttctcccctgctgccccagcacccattccttcctcgtgtctcatgccagatcacagcttatgcctcctttccaattccaatccctctggcttacttccttcctttctacctgccccatcactgagtcttcctgctcctcccctcatgccagccctccagccctgttgctgcc

SEQ ID NO: 175627 - DNA, 545 bp, Homo sapiens
acgcgcaatgatcattgtcaaggtagctccagtacttgtgagaaaggaggcaaggagaatttattgagcacctactgtgtgctggaaccgtactgagtaggaacctcatgactataaggaaaggccaggtctcccctggcagggtggttcatggcaggaggtggattgggctctttaarctgattggctttggatcaccccagccacatctctatcctcagctgcaccatcatactcagcactgctcagcagttctccatgtctgtgttaacttcctcctccagttcccactgtggccattccaaacctccagcacggtgacctcattcctagcagatggcctccctcctgtgttcctgttctaggcccgcttttctcccctgctgccccagcacccattccttcctcgtgtctcatgccagatcacagcttatgcctcctttccaattccaatccctctggcttacttccttcctttctacctgccccatcactgagtcttcctgctcctcccctcatgccagccctccagccctgttgctgcc

SEQ ID NO: 175628 - DNA, 539 bp, Homo sapiens
gtgagaaaggaggcaaggagaatttattgagcacctactgtgtgctggaaccgtactgagtaggaacctcatgactataaggaaaggccaggtctcccctggcagggtggttcatggcaggaggtggattgggctctttaaactgattggctttggatcaccccagccacatctctakcctcagctgcaccatcatactcagcactgctcagcagttctccatgtctgtgttaacttcctcctccagttcccactgtggccattccaaacctccagcacggtgacctcattcctagcagatggcctccctcctgtgttcctgttctaggcccgcttttctcccctgctgccccagcacccattccttcctcgtgtctcatgccagatcacagcttatgcctcctttccaattccaatccctctggcttacttccttcctttctacctgccccatcactgagtcttcctgctcctcccctcatgccagccctccagccctgttgctgccctgccacttttccttgccataaggtatttat

SEQ ID NO: 175629 - DNA, 518 bp, Homo sapiens
gtgagaaaggaggcaaggagaatttattgagcacctactgtgtgctggaaccgtactgagtaggaacctcatgactataaggaaaggccaggtctcccctggcagggtggttcatggcaggaggtggattgggctctttaaactgattggctttggatcaccccagccacatctctatcctcagctgcaccatcatactcagcactgctcagcagttctccatgtctgtgttaacttcctcctccagttcccactrtggccattccaaacctccagcacggtgacctcattcctagcagatggcctccctcctgtgttcctgttctaggcccgcttttctcccctgctgccccagcacccattccttcctcgtgtctcatgccagatcacagcttatgcctcctttccaattccaatccctctggcttacttccttcctttctacctgccccatcactgagtcttcctgctcctcccctcatgccagccctccagccctgttgctgccctgccacttt

SEQ ID NO: 175630 - DNA, 425 bp, Homo sapiens
gaagataagcgcagcttggatatgtagcccagcagcctgtaccaggctcagacttgccaccctggacctaaacacccrtctcaccctttacaactggctttccaagttaggtcacagaccttaaaaatgactctaacacccatggcgggtagctttcctcgtgggattaacatcagaatatttagagtcagggtaacctgaatgtgaatctgctctcaacacttgctagttttgtgaccctaggcaagttacctcatccatcttggcctcagttttctcatgcgtgaaatagggataatacaggcttccctcagtaaccatgggagattgatttcaggatcccatgcagataccaaaatctgtagatgctcaagtcccttatataaaatgatgccatgtttgcatataacttacacacattctct

SEQ ID NO: 175631 - DNA, 425 bp, Homo sapiens
caggagaagataagcgcagcttggatatgtagcccagcagcctgtaccaggctcagacttgccaccctggacctaaacacccatctcaccctttacaactggctttccaasttaggtcacagaccttaaaaatgactctaacacccatggcgggtagctttcctcgtgggattaacatcagaatatttagagtcagggtaacctgaatgtgaatctgctctcaacacttgctagttttgtgaccctaggcaagttacctcatccatcttggcctcagttttctcatgcgtgaaatagggataatacaggcttccctcagtaaccatgggagattgatttcaggatcccatgcagataccaaaatctgtagatgctcaagtcccttatataaaatgatgccatgtttgcatataacttacacacat

SEQ ID NO: 175632 - DNA, 456 bp, Homo sapiens
acaggagaagataagcgcagcttggatatgtagcccagcagcctgtaccaggctcagacttgccaccctggacctaaacacccatctcaccctttacaactggctttccaagttaggtcacagaccttaaaaatgactctaacacccatggcgggtagctttcctcgtgggattaacatcagaatatttagagtcagggtaacctgaatgtgaatctgctctcaacacttgctagttttgtgaccctaggcaagttacctcatccatcttggcctcagttttctcatgcrtgaaatagggataatacaggcttccctcagtaaccatgggagattgatttcaggatcccatgcagataccaaaatctgtagatgctcaagtcccttatataaaatgatgccatgtttgcatataacttacacacattctctcgtatactttaaatcatctctagat

SEQ ID NO: 175633 - DNA, 563 bp, Homo sapiens
gccaacagctaacatttattgtgtgccagccactgttatgagggctatacatgctttaatatgatttagatcctcacaaaaatggcaatagtaccattatcatccccattaggcagtagtaaagtgagccatgcatgttgtccctcccgtcccttggtcttgggacactttgtgccctttctgttttgggacagaatgcttgggttccaattccttcattaagccaagactctgaattccatgacttttaaatcaggtgtattctaagatattttttatgttttataagcaatggcttgataattasagctcttcccacttctttcttgcagccttgtccatttccaccccactgcactcctaacttaggcataattcccttctcctgccaactgggaggcagcaagacaccatctatttgtccagcctgtctccagccccacatttcattttaatctattcagtcctacattggctcatgaccgttttccttctaccctccctttcattggcttaggactttttaaaaataagggaattaaagtgtttaagaatactttgct

SEQ ID NO: 175634 - DNA, 563 bp, Homo sapiens
gccaacagctaacatttattgtgtgccagccactgttatgagggctatacatgctttaatatgatttagatcctcacaaaaatggcaatagtaccattatcatccccattaggcagtagtaaagtgagccatgcatgttgtccctcccgtcccttggtcttgggacactttgtgccctttctgttttgggacagaatgcttgggttccaattccttcattaagccaagactctgaattccatgacttttaaatcaggtgtattctaagatattttttatgttttataagcaatggcttgataattacagctcttcccacttctttcttgcagccttgtccatttccaccccactgcactcctaacttaggcataattcccttctcctgccaactgggaggcagcaagacaccatctatttgtccagcctgtctccagccccacatttcattttaatctattcagtcctacaytggctcatgaccgttttccttctaccctccctttcattggcttaggactttttaaaaataagggaattaaagtgtttaagaatactttgct

SEQ ID NO: 175635 - DNA, 513 bp, Homo sapiens
cttatgggaccaccatcctatatatagtctttcattgatggaaacattgttatgtggtgtatttaacacctttaaggtcttaaaataaattactcattgtttcatacatacatttgtattatccaaattattcttgttatttgaaaattatttattgagcacttactgtgtgccaggcactattctagccagtgaataaaacagggraaaagtactcttataaagcctgcagtctagaaaagaaagataaacaatacaaatcaatatacaaaacatataaggtatatgcttttatatcatttcctgccataatcacttggatgctctactgaagccatacttgcttttttactgtggggggaaaaatgcaaattgaaaatgacttgccacccatgaagcacacttcctagcaagggtacagaaaatcaacatgtatgatagtggtaacatccgctattctcacttttactcaactccaacccccaatttcgtatgagtgtttaccttgttagc

SEQ ID NO: 175636 - DNA, 583 bp, Homo sapiens
aggccctacatttacatttcctctgacagcgatggtgggggaagaaatggcaatgggaatggtgggggaagtaatggccaggaaaggaagctgctggctctgttacgcaattctctgagtttcaactaaaatgcctcaatcatagtctgctatgccagtgatccaatggaagcataactacttgggaccactcaccasggccatacatgagggtatttcccttattcagcagcccactagtgaggtaagaaagtcagcgttggcctgtgtgggagacttctatttccaccacatcaccacacagttcctggctttacagaaaacttgtgtgtatgtggtgatggtgtgggtgggggtggcattgattgattctggccttgtcccaatcctctatgctatactgccatattcctactgcccttatgccttgccccaagagtgatgataatcctatgtgttctgtcattcatgaacttgaggtccaaaatgtatactggtcctcatgttcagaaaaaactacaatctgctgtgagagatgagtctctctagcaataaagtggcacacatacaccgtggaatacta

SEQ ID NO: 175637 - DNA, 602 bp, Homo sapiens
tctcaacctctttgttattccagttataatacagacagatggggaattcagtggccaatcacagacttctccaatagctgctgctatytgaatctggaagccctaagtaaatttagcatgcagtgcactcttgatgttcttagatgcaggagacattgaattccccagtgctgaatgcctctagcaaaatgtgagaggatacacttcagtttccccacagatgtaatccacatggcagaaaagcctatcttaagactacaagggaattcactcactaattaacaaatagttttattggagtgcattctataagcatgatcttacaaattgccacgatgtagaaactcagtgacaacatgtttttaaaattcttatctttgattggtaccacagtgtaagaaagacaactcactcctggggttttggagaaataattcagcagaataattgaagttccatcagcttagttaccctctatttcctataatgataatcgtccttttaactaattacctttaatgtatacaccttgtggttatacaggctcagttattaattttcatgctttaaaaaccctgtgttacctaggtatttaataattc

SEQ ID NO: 175638 - DNA, 602 bp, Homo sapiens
tctcaacctctttgttattccagttataatacagacagatggggaattcagtggccaatcacagacttctccaatagctgctgctatttgaatctggaagccctaagtaaatytagcatgcagtgcactcttgatgttcttagatgcaggagacattgaattccccagtgctgaatgcctctagcaaaatgtgagaggatacacttcagtttccccacagatgtaatccacatggcagaaaagcctatcttaagactacaagggaattcactcactaattaacaaatagttttattggagtgcattctataagcatgatcttacaaattgccacgatgtagaaactcagtgacaacatgtttttaaaattcttatctttgattggtaccacagtgtaagaaagacaactcactcctggggttttggagaaataattcagcagaataattgaagttccatcagcttagttaccctctatttcctataatgataatcgtccttttaactaattacctttaatgtatacaccttgtggttatacaggctcagttattaattttcatgctttaaaaaccctgtgttacctaggtatttaataattc

SEQ ID NO: 175639 - DNA, 474 bp, Homo sapiens
tgtagtcacttttagcaatcatactgacttttcagaaattgccttttcagagattccctagagagatcctgacttataacagtagtatagtaaaattcaaaaacaacaaatttgaaaatcaaactgatacataatcagtgcattttactgacttagcctgtgtttggacagtggtgctgagtagtttagattagatttcttgatttaacktcattgtttttaatttatatgatatccatttagtgcacagttactgatacaattatgagaaagaatgatttaatatttttggatttctcagtacgggtgctatacataaacatttggtgctaagatcatcctcgatttttccccctcacccaaagtaagctgttataaaaaaaaattactttcttacagattatgctagagtcaacatgtgactatagattgataaattcagagggtattttctacttcatctttaaagaaatt

SEQ ID NO: 175640 - DNA, 409 bp, Homo sapiens
caattagtctatgaatctgtcatatgactctgaagtaaaactactttcaaggtttgttacagcttttatctcctctctagcctatatgactcataaatgaaataaatgaatctaatacaacttgtttctcataggctgcmttggccattacccagtatcttgtcatctgataaggatttgcaaattgattttcaatgataacagtttactcctgcaaataatatgtcatgcactgaaacagataatatgaagaaaaataatttgatgattacttcttatgcatttttctaagtgctaaactggttgccttatacttattgatagtgttcttttacaaagtttaattattaaacactgcatttgcatcttctttcatgttaagtcacttgaggaatttgggttttattaa

SEQ ID NO: 175641 - DNA, 645 bp, Homo sapiens
caaagcaagagaagagaatgatattattcatgtctgctgcttcctacagcaatagaaccttgggaaattgaaaatgttgcagaagtaggttcttcaaatcttcatagattaatcaaaatctttccatatttttctggatagctataccaaaaaaaagtttcatataaaactgaaagtgtatacttaatattttctggaacataaactgaatgtcatctgtcaacggaatataattatatggcagctattagcaacctactttttacctgctgtaactgaaaattcttggaactattatgcaccagtaattatattctggatttattctcaagaaggagaatgggaatgaagaaggacccctattaataaggaattaactcctcataagctaaagaaataaaagtggaatgcaggataaattgcaaagtatattcctgattttaacrtatcctaaaacttcacttttgaatttcataaatgtccaaatagctaatttaatattccatatggttgggaaacagaggtgcatatattaaaataatgcatagaaaatatttttaaaatcttaccttagaccaattatttcaatatttgtcattataatccctttaggatcatgtagaatgaagtgggttaataatgggc

SEQ ID NO: 175642 - DNA, 645 bp, Homo sapiens
caaagcaagagaagagaatgatattattcatgtctgctgcttcctacagcaatagaaccttgggaaattgaaaatgttgcagaagtaggttcttcaaatcttcatagattaatcaaaatctttccatatttttctggatagctataccaaaaaaaagtttcatataaaactgaaagtgtatacttaatattttctggaacataaactgaatgtcatctgtcaacggaatataattatatggcagctattagcaacctactttttacctgctgtaactgaaaattcttggaactattatgcaccagtaattatattctggatttattctcaagaaggagaatgggaatgaagaaggacccctattaataaggaattaactcctcataagctaaagaaataaaagtggaatgcaggataaattgcaaagtatattcctgattttaacgtatcctaaaacttcacttttgaatttcataaatgtccaaatagctaatttaatattccatatggttgggaaacagaggtgcatatattaaaataatgcatagaaaatatttttaaaatcttaccttagaccrattatttcaatatttgtcattataatccctttaggatcatgtagaatgaagtgggttaataatgggc

SEQ ID NO: 175643 - DNA, 563 bp, Homo sapiens
aaggccttaggctgcttggatgtgtgaaaatgccacgtctgctacggaatttttctgtgataaatgtcctctgcctaattcttgctctctgatacatggaatatgtactgctttagctcactctcattaggcaacccaccttgaactatgtgtttgtcccaaccctcaggccaggagggcaaaggagcagagaaactctctccctgtgcttcttttctgttcctgggtctgacttttatctcaagattgacaacaactggtgaagaaagacctgagccatcttgacaacagatatcaacaatctttccaaggtcttagttgccaaagcaaccaggctattaccaggtactcaagccaagttaaattttacctaattttacctcttctgaccatttgtattttacttctttacttcaagcagctactttcaacctgattttttgtccaacagaacttttaaaggatatgatattktttttcttcccttagctttaaaatgtgtgatgtgagaagagcaaaaatcacttggtgatcattgaacatgcctcagatacaaaaactcc

SEQ ID NO: 175644 - DNA, 319 bp, Homo sapiens
ccaatgcaggaggattacttgaggccagaagttcaggaacagcctgaacaacagagcaagacccaatttctacaaaaaaaaaattttttaattatctgggcatggtggtgtgcacctatagtcccagctactcagaagattgaggcaagaggatggatcacttgagcccaagagttcaagcctgcagtgagctatgatcactccactgtactccagcccgggcaacagagcaagatcctgtctccaataaataaataaataaataaakaagaaaaagaatagaaattgcaggaagagtttataataaagtaccctagtt

SEQ ID NO: 175645 - DNA, 531 bp, Homo sapiens
aaaagcctcacatgcccaacacttccactagcatttgataccatatgccaaggatagctcatacaatatttagtattctcatctacctgagcatttagcattccacctgaaatacatgtgatcrtaagaagcaacaatagttaatgtttgacttttgttacacaacctgataatactgtgtagaggaaagaatgtgcaactgaatctccaaaggcaacctttgtgtcatgggcctgctgggactgactgtggcttctctgccaccacccagctttgctcttgtcatgtgtagtctggcacgatgagctcacaggctcctttcacctccagctttttaaatttttattccaaactccaagggatgaacactactaaagaacccatggattgtttttctagaaagtgccagtggcattcataacattgaatacttacatgaaaacccaaaaacttttggctttaagcagtttcagaaagtaattacagtctattaattaaatagcttacatttcaagtgcacttatgcaactg

SEQ ID NO: 175646 - DNA, 531 bp, Homo sapiens
aaaagcctcacatgcccaacacttccactagcatttgataccatatgccaaggatagctcatacaatatttagtattctcatctacctgagcatttagcattccacctgaaatacatgtgatcgtaagaagcaacaatagttaatgtttgacttttgttacacaacctgataatactgtgtagaggaaagaatgtgcaactgaatctccaaaggcaacctttgtgtcatgggcctgctgggactgactgtggcttctctgccaccacccagctttgctcttgtcatgtgtagtctggcacgatgagctcacaggctcctttcacctccagctttytaaatttttattccaaactccaagggatgaacactactaaagaacccatggattgtttttctagaaagtgccagtggcattcataacattgaatacttacatgaaaacccaaaaacttttggctttaagcagtttcagaaagtaattacagtctattaattaaatagcttacatttcaagtgcacttatgcaactg

SEQ ID NO: 175647 - DNA, 531 bp, Homo sapiens
aaaagcctcacatgcccaacacttccactagcatttgataccatatgccaaggatagctcatacaatatttagtattctcatctacctgagcatttagcattccacctgaaatacatgtgatcgtaagaagcaacaatagttaatgtttgacttttgttacacaacctgataatactgtgtagaggaaagaatgtgcaactgaatctccaaaggcaacctttgtgtcatgggcctgctgggactgactgtggcttctctgccaccacccagctttgctcttgtcatgtgtagtctggcacgatgagctcacaggctcctttcacctccagctttttaaatttttattccaaactccaagggatgaacactactaaagaacccatggattgtttttctagaaagtgccagtggcattcataacattgaatacttacatgaaaacccaaaaacttttggctttaagcagtttcagaaagtaattacagtctattaaktaaatagcttacatttcaagtgcacttatgcaactg

SEQ ID NO: 175648 - DNA, 529 bp, Homo sapiens
acaagaaactttccttgggttggggatggggagagtaggaaatgagagagagagaaagagactgacaaagactaaaagtagttaaagcaattgtatgaagccagtggttccaaaggaaggaatacttactggttataaactagcatgtctgtgaggtaaactagaatgttcttttaaagacgcttgaaaggayatgccctcaccttccccaaattctgaaatttggggccttcatcaaaatttcaagtttaatttggaaggtctaatttgaaactatgctatgaaaccaaagaaaagtgttcccagatgaatgaagacctggtcccaaaaggtcatggaagatagcactccctgcacaaagtgatgttactaatgccatcctttatacaaaggattagccagtcaactgcaagacaggaaagataacactagaatgagaatatgcaacatttgaatgaaagtgagaaatatgagtccaaaaatgcttcaatgagtatttcctttgagtcccatgtcagtcctcaaaaag

SEQ ID NO: 175649 - DNA, 421 bp, Homo sapiens
tgtggatacaaaggcaaagcaaatgaaagttgacacacattgtggtaagaagtaaatgtttgactattccatagatagaaccatttactacaaggcaaaaagggagatgcttttttttgttgctttttaccattgcacacactagtgtcttttctcgaaaaaaatgggaaaaggaaactatataaaccaaaatagactcataaaacacagagagggttgggatgacacaatgtgcttgcgtgtgtgtgtgtaactaaatataaacgtgttttttctgctgcttctgctatcttatatttttttaaaaaaattctaaatgctataaggacaraggcttcacaataaaattgatactaacaacaatctcagcaatttctgcaacatgaactctgtattagttcttccacagcaagctgtgaga

SEQ ID NO: 175650 - DNA, 376 bp, Homo sapiens
ttaataactgaaacacaccatgaaaatgctctgtggtcaaacagatttgggcaatgctggttaagtaaagttaaagagttggttttgcaatatgacttctcagagctgttaatatgttagtatatatttgaatactcaagagggagctataagcagtaagcaaaawtttttttagaatatatttgatgaagaaattatttttagatggaaatctataaggctgttgttttatataaaaaaaggaaggcattaatctttctcttctgaaatgccaaacttcaatgatgagtcctgcaaactggttccttatggcacgatgctatccaggaataggatagcattgatataggattggctatgtgttcgtatctgagtg

SEQ ID NO: 175651 - DNA, 580 bp, Homo sapiens
gtaggggtaggaaaatacacaactgcaatttcccttaccgttttggtctcacctaaggggaataaaagctaagtacttgtgaaagtccacagcacagggatacagactcactaaaagactgagaactaatcataggattacataatgcttccacttcccccacaccttaccaacacattagtagggttcttttgtattaacaagggactgtagcttaaaaataactgraactcagaccatattaaccagattctaggaaaacccaaagacagcagaggaaaaaaatacaaagatactagagaaaaattttagcttctgacaccacagctagaacatacaataaacagccgagctaccaatcagctaaacataaaaccccacattaaaaaaccaatttaccttagttccttatttcgatatatcatagctggtttttaacaaaaaattacaaggtatattaaaaggcaaaaaacacaacctgagatacaaaataagcatcacaagcagactcagatatgacagagaatttggtattatcaaatcaggaattgaaaataattataatgaatatgccaagggc

SEQ ID NO: 175652 - DNA, 580 bp, Homo sapiens
gtaggggtaggaaaatacacaactgcaatttcccttaccgttttggtctcacctaaggggaataaaagctaagtacttgtgaaagtccacagcacagggatacagactcactaaaagactgagaactaatcataggattacataatgcttccacttcccccacaccttaccaacacattagtagggttcttttgtattaacaagggactgtagcttaaaaataactgaaactcagaccatattaaccagattctaggaaaacccaaagacagcagaggaraaaaatacaaagatactagagaaaaattttagcttctgacaccacagctagaacatacaataaacagccgagctaccaatcagctaaacataaaaccccacattaaaaaaccaatttaccttagttccttatttcgatatatcatagctggtttttaacaaaaaattacaaggtatattaaaaggcaaaaaacacaacctgagatacaaaataagcatcacaagcagactcagatatgacagagaatttggtattatcaaatcaggaattgaaaataattataatgaatatgccaagggc

SEQ ID NO: 175653 - DNA, 655 bp, Homo sapiens
ggctggcatgtcagtagtgccccaagagtgcacacccagcagggctgtgacagcgcccaggttcagcaccatccctgctctgagatccgagcaagtgcccttgagaagccaggcagtgagagctttgtacccattgatcaatctctccccatcctcctgcctcactatgatgactataattaacaataatgtattgcatatttcaaaacagctaggagagaggcttttgaatgttctcatcaaaaataaatcatacaagtttaggatgatagatatgctaattatcttgatttaatcattaaacaatgtatatagacatatattgaaatatgttgtaccacatatatatgtataaattattatgtcaatcataaaaaaaggaaaaccaaaataaactacatatgcatttaatcttgttagtaaagttatccccaagagaatacaggttaaaagtttggatattgctatatatacattctagaatygcataattttgtaaatgggataactgataatggaagctagatttctcactgttgggaaggtatcagataagcaaaagaagaaggtaaaatgattcgtgtggtaatgtattggagttggacatcattatgagctcatgtttagctaaatagggctatagattattgtatac

SEQ ID NO: 175654 - DNA, 587 bp, Homo sapiens
tccaatatttattaggtgtgtgatctgaggcatgttatttaatatctcaacacatcaattttttcatctgtaaaatggaaagaatagtagtagttgtttaaaaagttattatgtggattaaattagtaaaccttgtaaaggatctggtacactatatgaatatacaataatagttaactagacatttatttacagcagtcatttgtgcatgtatctaccccacaagaatatatctcactatttcaccaagggaaaacaacgcaatacyaaaatttatataaactgtgtcatgctctctggcaccactttttattgctttatacctaacacagtgaccacagaatgaagcctaagaatttcacatatgctacctaatcaagataaagtctataaacagtccaaagctaaagaaatataaccaaagttaaaaccatcaaacttaaaagctaaattgaaccaatcaaaatgagtattatggcatttaatgattttgtttagctagtggtaattcaatattgaagaaatcaaaattaattgccaaaactttatatcaccagccaaagtaaatgaataatttatttaatttt

SEQ ID NO: 175655 - DNA, 600 bp, Homo sapiens
ttgaattgtatctcccagaattcccaggtgttgtgagaggaaaccagggggaggtaattgaataatggggggccagtctttcctgtgctattcttgtgatagttaataagtctcatgagatctgatgggtttatcagggtacttgtaagaagtacctttcacctcccaccatgattctgaggcttccccagccatgtggaactgcakatccaactaaacctctttttttttttcccagtctcaggaatgtccttatcagcagcaggaaaatgggctaacacaccataaatatacacacctactgagtacccacaaaaatgaaaataaaataaaataattaaaaaagatatcaaaagggaaattcgaagataatcttgagagaaagaaaatggaaacacaacctacccaaacctatgggatgcaacaaagtcgttattgaggtaagctcatagtgataaatgcctacttaaaaaagaagaaagatctcgtatgatagaaatttgcacctcaaacaaagaaggagaagacaaactatgtccaaagctagcagaaggatgagaataatgaagattagaattaaaagcagtgaaatagaaatta

SEQ ID NO: 175656 - DNA, 331 bp, Homo sapiens
tgtaagaagtacctttcacctcccaccatgattctgaggcttccccagccatgtggaactgcagatccaactaaacctctttttttttttcccagtctcaggaatgtccttatcagcagcaggaaaatgggctaacacaccataaatatacacacctactgagtacccacaaaaatgaaaataaaataaaataattaaaaaagatatcaaaagggaaattcgaagataatcttgagagaaagaaaatggaaacacaacctacccaaacctatgggatgcaacaaagtcgttattgaggtaagctyatagtgataaatgcctacttaaaaaa

SEQ ID NO: 175657 - DNA, 424 bp, Homo sapiens
tatttaatttttctgaaaacctctttaaatataaaaatattggtacatacaatagactgtttctctttttgactcttctaaactattcatattagttagaaacagaaacaatactggatgttcttaaaatggtgaaatattaaacaaatgatggtatgtccataccatagaatactattaatattcagccataaaaaggagcaaattatttwtacatgtgacaatctggctggctcacaagaaaattatgctcctgcattaaaaaagaaagccagtgtcaaaatgttacatactgcatgatttcatttatataacattcttgaaatgacacaatcattaaatgaagaacagattagtgtctgtaaggagtgagggaggaagaaataaaaacaaggtcagaaaataaaaattacacgtttgctct

SEQ ID NO: 175658 - DNA, 517 bp, Homo sapiens
gtcaatgaattaaatttgactgaagatgttagaaaaaagtaggcaaatcagagattaaggtggctttatatagaatatagaataagaaatataaagaaaagacagcattgactgtggcataattgggggagagccatatttgatcaagacaaaagattgaaaatgaaataaactgagaaagaatgaaaagaaatttccagtaataaaacagagtgcacatagttctaagaaatggagagaaatgagatgagtttgacttgagggtgtggggatggattatgggaatatgagtgtttgggtaaaggaaatggagaaaaacatgtgtgctaggcatttcaaaggcccactcaaaaattactctatattaaggtgagaaaaccttggattatttatttttttgaaagatattatccgtatattaaaatattatacattttattaaatgattaagttatatttatagtaatrtctttctttttaagcccctactatgtgtcagatccactgtcaagcaatt

SEQ ID NO: 175659 - DNA, 611 bp, Homo sapiens
ggtatacatacacaatggaatattattcagtcacataaaagaataaaatcttgtcatttgcagcaacatagatggaactggaggccatatgttaagtgaaataaaccaagcacaagaagtcaaataccacatattctcactcatatgtggcagcttaaagtggattcataaagatagagagcagcatgatgattaccagagactgggaagagtagtggggagagggagatatagggaagaaaaaaatataaatgtatttatcaccactgaaatataaactgaaaattataaagatggtcaatttcatatgtatattttacctcaatgaaaaataaaatttaaaaatgtataccatccctccacaaaaagcaaaagtatttgccagatgttaaaaaaaaaatgtatcaacctacaacagaccaataaaaacacaaagataaggcaaaatcgcccttggaagkatatcatatatttctttcatgtgttaattctgcacaattttaatagtccaagattactttctatttaaaatgtcacagatgcatatataaaatgaaatattttgtgattcattctgtccaaaacaaaacagcataaaaagtaaaatgtgt

SEQ ID NO: 175660 - DNA, 602 bp, Homo sapiens
cctgccatatgttttccattattccctaccccataagggagctgttcctgtagttacatttctattttaccatggtatgttggatgaaaagtaagtggagagaaaataattttttttgcaataaaatgttttaaattgacaaaattttatatactcatgttatacaatgtgatgttttgatrtatgcacacattatagaataattaaatcaaattaattaacatatcagtcacctcacatccttgacattttctgtgatgagtacatttaaaatttgtcagcatttttccagtatacagtacattattattaattatattcaccatgctgtagaactttgtacactccaacatttcttcatcctggcttcccccaaacctggcccctgctagccatcattctaccctctgtttctatgagtttgatttttgttttttagtttttatgtgtcaaaccacaaagagctatgtccatccttgcagttggtcagataaaaaacttgaatcatttgtgacatcctattgcctcttccttcaaaatatatggagtcctgattttctttcatataccctgatcctcttccgctagcctagaccaattta

SEQ ID NO: 175661 - DNA, 570 bp, Homo sapiens
ctccacaaagtagtaagtgacaggagtaaaatttaaaggaaaagagaataaaattggagtaatgtatctgtatcaaagttggcagctgcataaagttctgagagaagtacatttttgcatatatgaaatagtaattaaataatgggtaaaatatgtaaaggaacgtatgcatataagttgtaaaaggcatgattgtgaaatgatgtaaataagcaggaatgagcaagttctgttcatgaagatattgcaattctgggagccagatagaaagcgtttcaaataacattggaatttcaactacttcaataaaataggagtatagctagattcayagtattgttatgagccaagggttatatgtatataaagacattaacacagtaacttgcataagatagaacctgcttagtaaataaaatctccctttcctttttcctgggtttgctatagtagaacatatctcatggtgtgaatattgagtattttcccaagagaaaaaatgtaaaaaataaaaattaaatttccgactcctctttcttaataccttaaacatcataaataaattagaag

SEQ ID NO: 175662 - DNA, 424 bp, Homo sapiens
tagacatttctgggtgtgtctgtgagagtgtttctggatgagattagtatttgaactggtggactcaataaagtctatttacttcccaattatgagaggacatcatctaatttttgagggcttgagtaaaatagtcagaggaaaaatgcatacttgcctgcatgcttgagctgaaacatatctcctcttctcttgcccttggacttggatttacatcagctcccctgattctcacacctttggtctcagactgaattgcaccasttgcttttctgagtttccagcttgcagatggcagactgtgggacttctcactctccataattgcataagccaatttctcataataaatatctctcattttctctgtctctttcctttctctcattttgatgttgcttattacatgtcctgtttatttgtt

SEQ ID NO: 175663 - DNA, 437 bp, Homo sapiens
agatcttgctttgttcagggattttaaaaaggaagcaaaccagtaaaccaaccaaccaacaaacaaacrtccagaaaacaaacaacaaacaaataaacaaacaaaaaaccaccaataaggggcaaaacaggagaaacagaacagtatctaaaagatgaggatcacagtctgaaaatgttctattgcagaatcccccacacccaaataaagatcaagagactgattgggttaaatcctatgaaattgccatttttataagtctaaaacagctcaatataggcaatttcatagggttcaacttaatgtatattcaacataagatatagtttggctctgtgtccccacccaaatctcatctcaaattgtaatccccacatgtcaagggagggacctggtggaaggtgattggatcatcggggtgttttccccatgttgtt

SEQ ID NO: 175664 - DNA, 589 bp, Homo sapiens
gtgctcactttgtatatccgtgtcacattttggaaattatcgtgatatttgaaacttatcatggcctgtaagtgttcaggcgaaaggaagagttgtgtacctctcactttaaatcaaagtttagaaatgataaaacttggaggggaaggcaggttgaaagctgagctaggcagaaaacgaggcctcttacaccagttagccaagttgtgaatgcaaaggagaagttcttgaaggaaattaaaagtgcttctgcagtggacacatgaatgataagaaagtggaccagccttattgctgatctggagaatgtttgagtgttctggatagatcaaaccaggcacaacattcccttaagccaaagcctaacccaaggcaagaccctaactctcttcaattcttctttttttwaatttaatttattttaatttattatcattattttttgagatagagtctggctctgttacccaggctggagtaacagtggcaacacagtggcttgatcttgactcactgcaacctctgcctcccagactcaagtgatcctcccacctcagcctcccaggagtggtggcagccttgtgccacc

SEQ ID NO: 175665 - DNA, 233 bp, Homo sapiens
actatatactctctaactacacctaaaaatcagcctcaacaagagtaccacatatagctggaaggcaaaacttggaggatgagttaaatcaacttagtggggcttgggamacactagatcctagtctatgcaaattcaagttatctgtcagaatcaaactgcctgctagaatagaaatcaacggtactcagaagcaaatagcagaatcctagatttctagggtctgttatcgg

SEQ ID NO: 175666 - DNA, 490 bp, Homo sapiens
cggcgcggcctcgcgcggttcccgagccacggcccagggtccggcggcgcgcgctctcgcctcctcccctcacctctcccagccgcaccccggccctggccctgccrcccagaactcgctgggcaagtcgtgccccgcgtgaacacacagaaggggcttggggaccgagcgcggcccatcagtccctcagaccctgaggacccagaattccctaaggggtccgaatccgagtcctgcccccagcccttaaggcacgggctccagggaccccaggggaagggcgcggggcattaggtacgcaacccgtttccccgcacctggaaaaaaactccctttccctcccctcccctgcttgttgagtgtgcggataaccagaactctaaggcgccccgtaataacgaccccgctgtccctccacccacccccaagtgccaaagcgagggatggaagcgctttcaagcgttccaagggcattgaggagcgagctgga

SEQ ID NO: 175667 - DNA, 596 bp, Homo sapiens
atttgggggttcatattgctcagggtaccagccgatgcgttttgaggggcgggagtcgaggaattagaatcgcctttaaccctcaagagttgcgccttcagcctcgggatcccagatgcgtcgttggagccagggccgcccccctacctgttgggtttgcgttttaactccagcgcacaccttgccggcagccytcggagctaggggaggggtctcgtttccccgcagcccgccggacagacgactggggcacgggaggggcggtggcagggtggtctgtgtgtggctgaaactaattgatctggagcggaaacgcacgtctgcggttggggcgatggggggggggtgcggctgtccatgtgccgagcgtgtggctgtctctggtgggcactggggccggagttcgccccggcccacctcgcagttttggggcgcctgggatcggcgctacgtaagcgaagcagagctgtcatagcacgtgggccgccacgcgcaccccaaaagcaaacagtgtgggggaaaggagagctagagcgccttcggagcacaggggccggctttcgaaagcgttttcccgggcgacttaagggcttaac

SEQ ID NO: 175668 - DNA, 596 bp, Homo sapiens
atttgggggttcatattgctcagggtaccagccgatgcgttttgaggggcgggagtcgaggaattagaatcgcctttaaccctcaagagttgcgccttcagcctcgggatcccagatgcgtcgttggagccagggccgcccccctacctgttgggtttgcgttttaactccagcgcacaccttgccggcagccttcggagctaggggaggggtctcgtttccccgcagcccgccggacagacgactggggcacgggaggggcggtggcagggtggtctgtgtgtggctgaaactaattgatctggagcggaaacgcacgtctgcggttggggcgatggggggggggtgcggctgtccatgtgccgagcgtgtggctgtctckggtgggcactggggccggagttcgccccggcccacctcgcagttttggggcgcctgggatcggcgctacgtaagcgaagcagagctgtcatagcacgtgggccgccacgcgcaccccaaaagcaaacagtgtgggggaaaggagagctagagcgccttcggagcacaggggccggctttcgaaagcgttttcccgggcgacttaagggcttaac

SEQ ID NO: 175669 - DNA, 596 bp, Homo sapiens
atttgggggttcatattgctcagggtaccagccgatgcgttttgaggggcgggagtcgaggaattagaatcgcctttaaccctcaagagttgcgccttcagcctcgggatcccagatgcgtcgttggagccagggccgcccccctacctgttgggtttgcgttttaactccagcgcacaccttgccggcagccttcggagctaggggaggggtctcgtttccccgcagcccgccggacagacgactggggcacgggaggggcggtggcagggtggtctgtgtgtggctgaaactaattgatctggagcggaaacgcacgtctgcggttggggcgatggggggggggtgcggctgtccatgtgccgagcgtgtggctgtctctggtgggcactggggccggagttcgccccggcccacctcgcagttttggggcgcctgggatcggcgctacgtaagcgaagcagagctgtcatagcacgtgggccgccacgcgcaccccaaaagcaarcagtgtgggggaaaggagagctagagcgccttcggagcacaggggccggctttcgaaagcgttttcccgggcgacttaagggcttaac

SEQ ID NO: 175670 - DNA, 549 bp, Homo sapiens
ggtgaggcagctggaaacaattgtgatgcccgttcatatcattctagaaaaatcctgaattcagactgtgtcacatgtctgtaagcttccacttcaccttaaagaaattgaaactgagaatgagcgtggtctgtgcttaggagaagacgtggaactccagtgggcagtttcatcaaatcaatgtacagctgaccctcaaacagcccgggtttgaactggagggtctttccacttctccctgggttttcttctgcctctgtcacccaggagatggcaagaccaaccccccacccctcctcttcctcctcctcttcctcagcctacacaacatgaagaccacaaagatrgagacctttaccatgatccacttccacttaatagtaaatacatttctcttccttatgattttcttagtaacatgttcttttctctagcttgctttatggcatgaatagtctataccatacaaagtatgtgttaattgactttgtatgttatagacaaggcttccactcaacagtaggctattagtagttaagtttcggggga

SEQ ID NO: 175671 - DNA, 549 bp, Homo sapiens
ggtgaggcagctggaaacaattgtgatgcccgttcatatcattctagaaaaatcctgaattcagactgtgtcacatgtctgtaagcttccacttcaccttaaagaaattgaaactgagaatgagcgtggtctgtgcttaggagaagacgtggaactccagtgggcagtttcatcaaatcaatgtacagctgaccctcaaacagcccgggtttgaactggagggtctttccacttctccctgggttttcttctgcctctgtcacccaggagatggcaagaccaaccccccacccctcctcttcctcctcctcttcctcagcctacacaacatgaagaccacaaagatagagacctttaccatgatccacttccacttaatagtaaatacatttctcttccttatgattttcttagtaacatgttcttttctctagcttgctttatggcatgaatagtctataccatacaaartatgtgttaattgactttgtatgttatagacaaggcttccactcaacagtaggctattagtagttaagtttcggggga

SEQ ID NO: 175672 - DNA, 545 bp, Homo sapiens
aatttggatgatcaacagatttccaagaaaatgtaagaaacagaaaccagcaaactagcaatgaccttgtgccagacaatgtgcattcactgccaccacccactacctaggaagtgtcctaggaggatggagggtggcgggacacagaaggaagggcaagagctccttggatgggcccctctaccaaggccatagcttccactgtgcggccgctcctacagcttttctctacagaggtrtggccatgccttccctttgcccctcatattggggtggtgagagctcccactgttagcctcagggtactgtatcacccttgatggttttccttagccctgctcatacactaattcactgtcctcatcgaattctcctccaatagcccctaggagtgtgccacatgtttcctgctggaaccccagcacacaaaggctcctaccaatgctgtgatatcaactctacccacttccgtccatcccagcttcacctcctgggtatccaaagtcctgggagggtgtctgataccggctcacctcctgactgtc

SEQ ID NO: 175673 - DNA, 549 bp, Homo sapiens
atcaacagatttccaagaaaatgtaagaaacagaaaccagcaaactagcaatgaccttgtgccagacaatgtgcattcactgccaccacccactacctaggaagtgtcctaggaggatggagggtggcgggacacagaaggaagggcaagagctccttggatgggcccctctaccaaggccatagcttccactgtgcggccgctcctacagcttttctctacagaggtgtggccatgccttccctttgcccctcatattggggtggtgagagctcccactgttagcctcagggtactgtatcacccttgatggttttccttagccctgctcatacactaattcactgtcctcatcgaattctcctccaatagcccctaggagtgtgccacatgtttcctgctggaaccccagcacacaaaggctcctaccaatgctgtgatatcaactctacccacttccgtccatcccagcttcacctcctgggtatccaaagtcctgggagggtgtctgataccgrctcacctcctgactgtccctagggtgggaag

SEQ ID NO: 175674 - DNA, 537 bp, Homo sapiens
atcttggcatcactcaggcaacaaggattgtagaaaagcacaccaggtaattattcacctcattccaggtaacatatataccttctgctcacatcccatttgctggagtgagtcatgtgaccaacctaagagcaagggaggctgagaagtataaagaaactctcagatgtgagtgaacaccaacagccttaccatggtactcattgtactggtcaagcagccatcaatcattacatctttccttctactaattcttatcaaaggccatctgtgagctaggccagtgcctactacatgaacaagagtgtctcagagcttgctcctcctatgggtatagcatgtggggtattaggtrttgacaattcagagtgatgactgccaagatggggaagtacagagtatcatggaagcatggatgaggagcacaaaactcaggagttaggggaggcttcctggagaaagcgagacctgaaggatgaaaggagtcagccaggtgcaaggtggcaggtggagggcatcagaagaggattccaggca

SEQ ID NO: 175675 - DNA, 572 bp, Homo sapiens
gcaggaggaggaagagcctgagactgagagccaagagtcaaagatgctcctttctctgctgtgtgagctcgggcaactgattttcccttcctggggaaatctcagttttcccatctttaaaaaaaggagttggtctagaatctaagatcatctccaagccctttgatcactgataagaggttcaacagggcaaacgctgggattccgagaatgtgccagtatatttgagggaaggtaagtgctctgagccctctttcccagaggacctgaggccatcaagcacatggcttcagtttgtcagacacagtcagrtccgttagcaaacacagctctcccctctaaaccatttggaacttctggttactagccatggctttaggggctctgccaagcagtgggcagtgggcagagtggataccaaggcctgtcctggtgaattggctgataataggcctagagaggagagaattttcttcccaagaatttttttctagactatcaggatgtggttctgcctgcttagctgagatgaggagtccctcatctcatgatgcccatctttgcatgatgcc

SEQ ID NO: 175676 - DNA, 608 bp, Homo sapiens
gcccccgcccccacaaacaccccgtagaaagcaagggcctgggactcaaaacatgcccctgttttaagcagtcatttcccatgagacttgcccaacaccccaaactgcaacagccatcctttgactcccacactgtccctaattttctggaagcagagcaaagggagccccctgcggaatgggctgctggatcctcagatcgatttgggatctctcartagggcctcacccaggacttcacctctcactcacctgcccacctgaggatgccggaaactctcccatcagccacgggctccttcaggctaaggctcctagttaaagggcagacgctgtgcaagggcaggtcaacctagggagcccaggcctagcaaagccaactggccactccaccaagaccctgcctctcagggccagactcactcaagacctgccttctcccagcaaccatgcagggtcatctctgttctgcagcttccttgagggaggagccctgggcctgcatcctggacgggcacccaggtcaccccctcgccttcagtgctggtgaatgatgaagccgtggtcattcctttccctccccagccccacccatcaacaaataggca

SEQ ID NO: 175677 - DNA, 575 bp, Homo sapiens
ggcaacattagggatgaggaaggcttgagaagaagggagtgggaaaaaatgaattctgcccaggaagaagcagaatgtaaagtacaaaacaaacagaaaccttgaggcaagaaagaagatgcatgttggtatgatggaagcaagaaatgtgaagagaacagagacatgataaaactggagagttagatttaaaaaaggcaaggataagacagcttccacatgccatgctaacaggattggaccttttctgcctacaatgagagtcactaaaaggttttaatcagtgaatgtcccagtcagatttccattatctaatcattcataaagtctacagggcttaggaaagactggaggtaatagagacctaamgacagaactctgaagtaattaaagaaaaaaattacagtaatatgggtggtgggaagaagaaaagcaaacatagtaaagaagtttgaagttaatataatcaatattttaaaaaataaagtaaatgttatggagtgaggaaggaggattattcgagaatgattttaagagttttgaaatgaaaaacaagatggaacattctgacgttg

SEQ ID NO: 175678 - DNA, 575 bp, Homo sapiens
ggcaacattagggatgaggaaggcttgagaagaagggagtgggaaaaaatgaattctgcccaggaagaagcagaatgtaaagtacaaaacaaacagaaaccttgaggcaagaaagaagatgcatgttggtatgatggaagcaagaaatgtgaagagaacagagacatgataaaactggagagttagatttaaaaaaggcaaggataagacagcttccacatgccatgctaacaggattggaccttttctgcctacaatgagagtcactaaaaggttttaatcagtgaatgtcccagtcagatttccattatctaatcattcataaagtctacagggcttaggaaagactggaggtaatagagacctaaagacagaactctgaagtaattaaagaaaaaaattacagtaatatgggtggtgggaagaagaaaagcaaacatagtaaagaagtttgaagttaatataatcaatattttaaaaaataaagtaaatgttatggagtgaggaaggaggattattcgagaatgattttaagakttttgaaatgaaaaacaagatggaacattctgacgttg

SEQ ID NO: 175679 - DNA, 398 bp, Homo sapiens
ttcaagatcgagagctccttttagcagttcttgtagtgctggcttggtagtggtgaattctctcagcatttgtttgtctggaaatattgttatctttccttcatttatgaagcttagtttggctggatacaaaattctttyctgataattgtttttgtttaaggagactaaaaataggaccccaatcccttctagcttatagggtttctgctgagaaatctgctgttaatctgataggttttcctttacaggttacctgatgcttttgcatcacagttcttaagattcattttgccttgactttagataacctggtgactatgtgcctaggcaatgatctttttgtgatgaatttcccagatgttcttagagcttcttgcatgtggatatccagatct

SEQ ID NO: 175680 - DNA, 540 bp, Homo sapiens
ctgactttttaaatacactggaagctgcttcagcccaagaagaaatgacttacaacaataaggggtgttgtgtgtgtgtgtgtgtgtgtgtgtgtgtgtgcaacaatagctgctggccaatgtgtctgcactttgtgatcagaagcagcaatcatcaatcaaaacacagatccataacatttggaaaacttggttcttattgcccatcctagttcctgcaagatgactgcaagctgctccaggaacatgtgcagagtggcctcctatgagggttgtgggtgggtatgagtatctgcaactgggttaagagctgaaattgaccaaaattaactgcaacttatcatctaagacttcccctgaattttgcaaggattcaatagatttcagagtttcaaaatagatacgttagacagattctgccagtgcattttttgtctaggtaggaagacawattcctgttcatcctactctgccatcttccagaaccctcttcaaattgactttatcacattttctgaatgaagttaccacttgggcact

SEQ ID NO: 175681 - DNA, 586 bp, Homo sapiens
tttgtcatgtggaatatgtccaatgcatttagctggtaaatttagaataaatcgcaagaacaatcgcytggggccctcaaaaaggccacatacatctacagaatattatttaggaaagtataacttaagggtgaaaacagctggtgaaactgctctgtagctgaaagctgagaagcttctccattttagtactctcatttagattttaagcatctttttggggactgttaaaaaggtagtctgtggaaagcacacggtgcaactgtgactttgcacatgtcacatatgtttcaagtttaaaatggggttattatttttttcttatcttcaggtgctaatgcatccaaatgggtgatagatacggagagaatctattttttgaaagttggttgaatttagaaattactatgtgaatcaagtattaatgtattcaatatccatttgcactcctgagtttatttagatactttacgtaaaagtgaaggggcaggaatataggcagggtatttaatgtgaagctctctcccgttaataaagatcaattaccccaagatttgcaaaaaaaaaaaaagagagagaaaaagaa

SEQ ID NO: 175682 - DNA, 586 bp, Homo sapiens
tttgtcatgtggaatatgtccaatgcatttagctggtaaatttagaataaatcgcaagaacaatcgcctggggccytcaaaaaggccacatacatctacagaatattatttaggaaagtataacttaagggtgaaaacagctggtgaaactgctctgtagctgaaagctgagaagcttctccattttagtactctcatttagattttaagcatctttttggggactgttaaaaaggtagtctgtggaaagcacacggtgcaactgtgactttgcacatgtcacatatgtttcaagtttaaaatggggttattatttttttcttatcttcaggtgctaatgcatccaaatgggtgatagatacggagagaatctattttttgaaagttggttgaatttagaaattactatgtgaatcaagtattaatgtattcaatatccatttgcactcctgagtttatttagatactttacgtaaaagtgaaggggcaggaatataggcagggtatttaatgtgaagctctctcccgttaataaagatcaattaccccaagatttgcaaaaaaaaaaaaagagagagaaaaagaa

SEQ ID NO: 175683 - DNA, 465 bp, Homo sapiens
caggctgaggcccaaatgtcttccctttcacaactgggccactttggaacacagtggccagaatccctcttttctggggtctgcaactggtgaataatgtcttagcctcctctcacctgccacgtaagagggaggcataaaaccttaggatacttgttactcttttgctggactttttactctgccaagaggtttgacagctacctaaaaatagtatagctgaatgccagtggctaattatacraagggaaaccctcaactctgaaaatcaattctgagcctgatgttggaatcacagttgcatggatttctgatttcatatttattttttccacatctgatcttagatcctttatagcagcaggtgggttaaaccgtgattgttcaggtagtttctgatgagttgtggatgtgggagatgaaagcaaagatgagtgagatgctagattactctctatccctcag

SEQ ID NO: 175684 - DNA, 467 bp, Homo sapiens
ctgtttaatgttaccactgtcccttccctagtagatttcaagtgatcggtatatatccattcatgcttcaagtacatcgtgggaaaactactaagtgccagrcaatggggtaaggagaaattaaagccctagcaattagaagatcattgcagaggcaatgacatttcttttcagagcctagaaagatccaataaaatgctttatcagcaccctatcccaccagcttgtcagttccttgacacacggacagatccagtaaggaaaaaaggctttgatggaccccagtgattcttggcatgagtggtttagacaaaaagtcagttctgggaacccaccagcagtgcaaggtacaactgctgcacttaaacttcaaaacctgtgggacatctgagctgctgcccatttggggaaaatgaaagactttgaagggaagcagaacaagcccaggagctctccaatcactttgc

SEQ ID NO: 175685 - DNA, 402 bp, Homo sapiens
atccagtgtaactcagagagatgtagttaaataaatcagtgatggacgttttgtggtgtgtattgtccgcatggawggtaaggaggcaagacctagaggtcatttgtgagtagggcccccataggctcagctgccacttgagcagagcaggaaaagatctgccaagatcacaccctttccttccctgtcctttccgtagggtctcttctctacagcaagatggaattatttgaaattcctttcatggtccttgcttctacttatctttagctcttcagaggtctgctctgtctagaatgcctttcctacttttttattacatctcaaccctggcaatacttgtccaagaagccttctcaaggctgaatatggggcttccaagttcatgaatttcaagaattc

SEQ ID NO: 175686 - DNA, 398 bp, Homo sapiens
gaatacttgcctttactacttactagatgtgtgaccttgggtaagttacttacccttgttctttatcaaataatattaatagtaattacttcataggacttttgtgaacattgagttaatatttrtaactacttagaacaatgaatggcacttaataaacatttagtaagttttagttactgctggttgtactttgtaattaatcataatacttattgtttcagtattatcagtgggatggtggtggtaccgctaactagaataggtaaatgaagaggaaaagaaagttggaaagctaaggtagtagtacttcaattttagatttactgagtctgagggccactcgtgtatctaagtagcagtatacagcaagctataactggagctctagtgcgaca

SEQ ID NO: 175687 - DNA, 483 bp, Homo sapiens
aactagaataggtaaatgaagaggaaaagaaagttggaaagctaaggtagtagtacttcaattttagatttactgagtctgagggccactcgtgtatctaagtagcagtatacagcaagctataactggagctctagtgcgacactggctagaagaaagtgagaatgcaagattgccttctaaaaggctggggtactaagtagaaaccagtgcattcaggaatacatgaagtgagactayggggataggatgtttagcctattctatcaagaaattgtagaatgagatggcaaataggtatgacaatagccagataaaaggagattacttaaaaataatttttaaaaatttaaataaaatgggatagatttaatatctacagactgaatttatacaaagccagaagaggggtaggagaggcataaacaaaaatcacaatgaaaactaataaatactaatgatttactaatagaaaaacatgtt

SEQ ID NO: 175688 - DNA, 483 bp, Homo sapiens
aactagaataggtaaatgaagaggaaaagaaagttggaaagctaaggtagtagtacttcaattttagatttactgagtctgagggccactcgtgtatctaagtagcagtatacagcaagctataactggagctctagtgcgacactggctagaagaaagtgagaatgcaagattgccttctaaaaggctggggtactaagtagaaaccagtgcattcaggaatacatgaagtgagactatggggataggatgtttagcctattctatcaagaaattgtagaatgagatggcaaataggtatgacaatagccagataaaaggagattacttaaaaataatttttaaaaatttaaataaaatgggatagatttaatatctacagactgaatttatacaaagccagaagaggggtaggagaggcataaacaaaaatcacaatgaaaactaataaatactaatkatttactaatagaaaaacatgtt

SEQ ID NO: 175689 - DNA, 510 bp, Homo sapiens
taggggcaagcaaaaccaaccaaattctaaatggctggkgtgcaaatcaattcctgcagtcctgacaaaggtggcttaggaattccagaggtcattctcctaaaaaggcacagatcaacacaaacttgaggttaactcttgactcagaatagttaaaataactccaccaaataaaagcgtcaggcagagatgatttcataggaattgaacaaattttaaatattttataatcccagatgcgacttagactatttcagagcattggaaaaaaaaaaggaaaacttctaaattcattttttgaagtgtgtagaacatagattaaaaaaccttataaagattatatctaaaaaggtatctgcagactgacctcacttatgaatataatagagaaataagtaaaatagaacactgcatttaaaaataatatctcatgagtaagtgaggtttactctaaaagtacaagagtaattcagtagaagacaagaaacggtataatacatcatataaata

SEQ ID NO: 175690 - DNA, 579 bp, Homo sapiens
tgtacccagctccagacctgcaggtgttaaaagctaatggttcccacctgtaccctccttgaaaggactgtccttagctgacaggagccacttctccatctcccacctctgtgacagctgatgattaattgatggagagaggaatggggaaggaaatgtatacaagcaaattcaccttgccgcaggcaggaacaatctctcatattccagagctctctgtgagatcagactaagactagatttcaactgaaaccacatctctgcctagcttcttcctmtagagtatcatgcttccatcatgccacaacaggttttagatgagagaactttctcaataaatcgcttgcactaaaattggcatcctatgctctgcttttagggaacctgacctaacataacacatggtatttatgctttattgaacatccataatgcagtagcctgcactttgggaggcccaggcaagaggataacttgagcccaggtgttcaagactagcctgggcaaaatagggaaaccctgtccctacaaataataaaaaaattagctgggtgtggtgacacatgctggtagtttcag

SEQ ID NO: 175691 - DNA, 579 bp, Homo sapiens
tgtacccagctccagacctgcaggtgttaaaagctaatggttcccacctgtaccctccttgaaaggactgtccttagctgacaggagccacttctccatctcccacctctgtgacagctgatgattaattgatggagagaggaatggggaaggaaatgtatacaagcaaattcaccttgccgcaggcaggaacaatctctcatattccagagctctctgtgagatcagactaagactagatttcaactgaaaccacatctctgcctagcttcttcctatakagtatcatgcttccatcatgccacaacaggttttagatgagagaactttctcaataaatcgcttgcactaaaattggcatcctatgctctgcttttagggaacctgacctaacataacacatggtatttatgctttattgaacatccataatgcagtagcctgcactttgggaggcccaggcaagaggataacttgagcccaggtgttcaagactagcctgggcaaaatagggaaaccctgtccctacaaataataaaaaaattagctgggtgtggtgacacatgctggtagtttcag

SEQ ID NO: 175692 - DNA, 577 bp, Homo sapiens
ctcttcgctattccttatacctttgctacagaaaggcaggcaggcacatgtttgattcattttctccagtttatttaatgtattattattgttttccaattagtataaagttgggttttgttatttggaactgtagtttgtgagcacctgctttgtctgttaaggacacttccagttttgtattccccttttcatttctgtatacataacaagtcacctattttcaagtgatatttactccaacagaatgttgtcagtttgcactgaaataatgctatttttttctatcctaatggaaacagttttgattaaaattaacgrctacttagaatattttaagtcttcaaggagtgattcaaaacaaatagaaaatatgttcctgaaagtgtcctaagaggtgaatttgtgtgactaataatgaccttgatccccatagctgtatatttaatggagatgacaaacagtccatactagtggtgaggcactaactttaaactaaggcacttctattgaaaaggagctcttgatctaataggcatcacaaatactgtcgttagagaagatggctcggatttga

SEQ ID NO: 175693 - DNA, 586 bp, Homo sapiens
ttaaatattctttagatattcaatactgttgaagggctgaatacagaatacagtgtttgctgtcatctccaaacacagtgcagtcaatgactaggtatttactaagcagttacaactctcttgtgatttccaggcacctatactggctgtgacagcttatttcatttacctgtttaaaatatgctttcacacatatattttattaatagacatataatatattgtgtctaataaagtgatcatgtattatctcttaattataatgagataaactgggattgagagaatttgtcacagtggattttgactgtttattttcccctgtgaaaatgatgaaataatcttcaaaattatcattttccaatttctatagaaacatattgttatattaatgaaaaataccatcaataatcataagcattgagagactaaaatgatgtagaattgtggaaacaatttttaaatatatgatataaagcacaaggcattattttgtctttgttcttgttcttagactgaatgctaaatattttcatgagttraatgtatggaaagtgatgtgaaaataatccatccatcagcacac

SEQ ID NO: 175694 - DNA, 520 bp, Homo sapiens
tgccaatacattggaaaacctagcagaaatgagtaaattcctggacacataaaacctaccgagattgaatcatgaagaagtagaaaacatcaacaaaccaataatgagtaatcaaattgaagctataataaaaaagtctttcctcagagaaaagcccagaatctgatagctttgtagttgagtttgccaaaaatttaaagaactaacaccaatcctaccaaacttttcaaaaaaattgaagaggagggaatacytctaaacttattctaccaggccagcattatcctgatatcaaaaccagaaaaggatataacaaaaataaaactacaggccattatcattgataaatatagatacaaaatcctcaacaaaataatagcagactgaattcaaaaatacaacatgttaaaaagatcattcactatgatttagtgcaattcatcctagaaatgcaaggatggttcaaaatatgaaaattgagatgtgatacatcacactaacagaaccaaggacaaaaaca

SEQ ID NO: 175695 - DNA, 520 bp, Homo sapiens
tgccaatacattggaaaacctagcagaaatgagtaaattcctggacacataaaacctaccgagattgaatcatgaagaagtagaaaacatcaacaaaccaataatgagtaatcaaattgaagctataataaaaaagtctttcctcagagaaaagcccagaatctgatagctttgtagttgagtttgccaaaaatttaaagaactaacaccaatcctaccaaacttttcaaaaaaattgaagaggagggaatacctctaaacttattctaccaggccagcattatcctgatatcaaaaccagaaaaggatataacaaaaataaaactacaggccattatcattgataaatatagatacaaaatcctcaacaaaataatagcagactgaattcaaaaatacaacatgttaaaaagatcattcactatgatttagtgcaattcatyctagaaatgcaaggatggttcaaaatatgaaaattgagatgtgatacatcacactaacagaaccaaggacaaaaaca

SEQ ID NO: 175696 - DNA, 454 bp, Homo sapiens
tctttgtgatatatgtgaatagtttcagaaaatgaagttggcagcttcccagttttcctcctggggccccatgtttataattccagtagctaacattcacataattacaattgcaatttcactttgagaatattgttgggcttcttttgtgcctaatcgtctgaacagctgtgtcttcaagttgaagtgtctactyactgtttcaaatattttaagaaaatagaatgggaatcctatctggtaccattattaaaatgaaaaaaagaaacatattcccatacccttgaaaaatgagggggtttctcttttatttgctcttcaagaacaacacatgcaaagcatttgtggagccaacacagctgcaggacccacttaccataccaattctgtgtacccattctagcttttacagacttgagtttaagatatataaaatacatttcctgtcatgatt

SEQ ID NO: 175697 - DNA, 468 bp, Homo sapiens
tcatatctgtggaatcatacagtctttgatttttttggtgactggattatttcccttagcataatgtcctcaagtttcatccatgttatagcatgtcagaattttcttctttttaraggctgcataagagtccatcgtatgtacataccacatgtagtttatccattcgtcaatggacatttgtgttgctcctaccttttggctactgcaattagtacagcttatgggcatagatataaaaatatatttccaagatcccacttttaattattttgggtatatacacagaagtggaattgctggatcatatggtagtcctatttttaattttttgaggaatcttcatactgtttttttaatagcagctgaaccatttaccttcctaccaacagtgtataaggtttctaatttcttcatatcatcacagcacttattttgtttatctgtttgctttttgatagcagccat

SEQ ID NO: 175698 - DNA, 468 bp, Homo sapiens
tcatatctgtggaatcatacagtctttgatttttttggtgactggattatttcccttagcataatgtcctcaagtttcatccatgttatagcatgtcagaattttcttctttttaaaggctgcataagagtccatcgtatgtacataccacatgtagtttatccattcgtcaatggacatttgtgttgctcctaccttttggctactgcaattagtacagcttatgggcatagatataaaaatatatttccaagatcccacttttaattattttgggtatatacrcagaagtggaattgctggatcatatggtagtcctatttttaattttttgaggaatcttcatactgtttttttaatagcagctgaaccatttaccttcctaccaacagtgtataaggtttctaatttcttcatatcatcacagcacttattttgtttatctgtttgctttttgatagcagccat

SEQ ID NO: 175699 - DNA, 468 bp, Homo sapiens
tcatatctgtggaatcatacagtctttgatttttttggtgactggattatttcccttagcataatgtcctcaagtttcatccatgttatagcatgtcagaattttcttctttttaaaggctgcataagagtccatcgtatgtacataccacatgtagtttatccattcgtcaatggacatttgtgttgctcctaccttttggctactgcaattagtacagcttatgggcatagatataaaaatatatttccaagatcccacttttaattattttgggtatatacacagaagtggrattgctggatcatatggtagtcctatttttaattttttgaggaatcttcatactgtttttttaatagcagctgaaccatttaccttcctaccaacagtgtataaggtttctaatttcttcatatcatcacagcacttattttgtttatctgtttgctttttgatagcagccat

SEQ ID NO: 175700 - DNA, 517 bp, Homo sapiens
actgcaaaaagtttacatgtgattttcaaactatgtgatattatgggaaaagcttagatttttatagtttggggagttcaaaagctcaggtcttttctgagttctaccatcaactgattcatggttgtgctagaatatacatctctggggctcagtttcccccatctgtcaaataaggccatcattggactcttctttaatatcccttctagggctaatgtttaaggccttctagggctaatgactygataagactaagaatttccttttttggatagacctatataaatgacagtaaaaccgagtaagaataaaaccaaaaaagcttctgccatttttaacatgataagaattattgaattggagaaagagaactaatgaaacttaacaggaactcttgattctgagtgggtttgctgcatcattttttttggtctctgacatttatctctaatgaccatgaaaaggacaggatgaatctgtgatgacacagagccagctatgtaaagacttagcc

SEQ ID NO: 175701 - DNA, 396 bp, Homo sapiens
acttcctggacaacgtctaatcatgaaatcttgctrttttatacaataggagtaggcagttgatttaaaaaaaaacttgatgaaaaaaatagcatagtttttgatgaattttcaagaaagcaagttaggtatttttattaatattgtttcatgttggtgaaattaggaagcatagtttttcttatttccacacagatgattctagctactttaaagagatgagttttatttctataacctgtgactagttgcataaaaagcaggttattttaattctacactctctctttacagtgactttaggggaaatgaaggctgaaacccaggtgtctgctggctcctccctgctacaaagggtgaggcatgaagggcctttgccagagcattttaatgaat

SEQ ID NO: 175702 - DNA, 414 bp, Homo sapiens
tattttcataggaaaaaggagacttcctggacaacgtctaatcatgaaatcttgctgttttatacaataggagtaggcagttgatttwaaaaaaaacttgatgaaaaaaatagcatagtttttgatgaattttcaagaaagcaagttaggtatttttattaatattgtttcatgttggtgaaattaggaagcatagtttttcttatttccacacagatgattctagctactttaaagagatgagttttatttctataacctgtgactagttgcataaaaagcaggttattttaattctacactctctctttacagtgactttaggggaaatgaaggctgaaacccaggtgtctgctggctcctccctgctacaaagggtgaggcatgaagggcctttgccagagcattttaatg

SEQ ID NO: 175703 - DNA, 560 bp, Homo sapiens
ggtgggatgtaaattgttctgcataataaactgagaaaatggagcttctggaagggaagagaaaaaccagggggcgggtggggggcagtgggagatgtgagaagactctgtaggctcattgctttagcccacaaatatttattgaattattaaaatggggtaggcayggttctaggtactggagattcactgatgcataataaaaatccttgccctattggagttaatattctagtaggcaggaagcttgagccagtgagatttttggggagattgggggcactagaggactttaagagaagagatgtctactattcaatgttgttttactcactgctgtaatgtaactccatgttgccctcaggtttacagcaaaggtacaatattcacaaatgctggatgtagaggattagggctgacagcttagctgtacaccttcacagagtgtgacccctctttgttcttatcatcagcagtacctcctgctgcaccctaccctctcctgctgcagtgatgtgctgagccctccaggagccaaagctgcatgggctttggaaaaa

SEQ ID NO: 175704 - DNA, 444 bp, Homo sapiens
accactgaccccacagaaatacaaaaatcccgcagagatgactatgaacaccgctatacacacaaactagaaaacctagaagagatgaaacatamaacttcctggaaacatacaactttccaagattgaaccaggaagaaattgaatccctgaacagaccaataacaagttctaaaattgaatcagtaataaaatcttaccaacccaaagagttcaggaccaaatggattcatagccaaattctactagatatataaagagtggatactgttactactataactattccaaaacacaggagaaaggattcctccctaactcattataagaggccaacatcatcctgataccaacacttggcagagacacaacaaaaaagaaaaacttcaggccaatttccttgatgaacaggaatgcaaaaatcttcaacaaaatattagcaaa

SEQ ID NO: 175705 - DNA, 553 bp, Homo sapiens
ttgttctgcataataaactgagaaaatggagcttctggaagggaagagaaaaaccagggggcgggtggggggcagtgggagatgtgagaagactctgtaggctcattgctttagcccacaaatatttattgaattattaaaatggggtaggcacggttctaggtactggagattcactgatgcataataaaaatccttgccctattggagttaatattctagtaggcaggaagcttgagccagtgagatttttggggagattgggggcactagaggactttaagagaagrgatgtctactattcaatgttgttttactcactgctgtaatgtaactccatgttgccctcaggtttacagcaaaggtacaatattcacaaatgctggatgtagaggattagggctgacagcttagctgtacaccttcacagagtgtgacccctctttgttcttatcatcagcagtacctcctgctgcaccctaccctctcctgctgcagtgatgtgctgagccctccaggagccaaagctgcatgggctttggaaaaagacagc

SEQ ID NO: 175706 - DNA, 618 bp, Homo sapiens
acatctggtgcatgttcctggagctccctttccacactcccatacacccttcaccaacctcccctcaccatttgtgggtagtatttagtggaaactacctcaggccctgagtagtgagcagttcatcagaaatgaggagttctaaggaagaaacactgtggcaggagtaccagaatgggaaaaaaggcaaaagacatctaaaggaaggtgaagatgtgcaggcagtccaccaaaggcaagcttcaagcacaatgcacacaaagtacacaaggcgacaaygttaaaaccctattttacttattaaatatttattatttctgtgcatcaagcattgtgctaagccctaggaatggaggtgaacaagaggtaagacctagccttcatgaagtttatagtctgtcaggaggagtagacattaaacaaaccataattgaaactcacaagattcctacagaaagaataccaaggggatctattttagattgaagtgtgaggaaggacttctctaaagttatatcttccagaattctaaaagatgagtaggaattaggtagtctctgcagaaatgtattcattggggagggagctcagtctgtaccagggcccaagggcccaagg

SEQ ID NO: 175707 - DNA, 615 bp, Homo sapiens
gtgcctggcacatagtgttacataagtgtgagctatatagatgtacacaacaatacatactccttaagactctacagtcctttttgagttacagagagtcatttcttccaaatctaaattttatggcataaatatattctatggtttaaatgtctcccaaaattcaagttttgaaactttatcaccaatgtgatggtattaagaggtgtgacctttataaggggcagagataactagcataggcccttttgctcttctgctcttctgccatatgaggacacattgttctctctgaaggatgcarcaatgaggcaccattttggaggcagaaaccaggccctcaccagatactgagcctgttggcatttgatcttaggcttccaagcctctagaaaatgagaaataaatttctgttcttataaattacccagcctcaggtactgttattgcagaacatggactagaacagtgtaacaaaaaggatgcacaaaaagtcctcatgttttgcatatattcacctttcattgaaatcttctgctagtgcaactaaacacccttccatttctgtgtcattctcctgagataaatcaaaagaagaaaaaggtgtaaatgtag

SEQ ID NO: 175708 - DNA, 549 bp, Homo sapiens
tggacacagtatcagaagacacaatgtgaactccaacagtgccacctttcagctaagcaactcttagcttggtgcatttgaccttcaatttccttagctgcaaaaccaaataattctctccggtgatactttacatgtaagtaaaaagtaagacaatatacgtaaccatctttttgtgaaactttaaagcaatacataaatatgaggcatgcctcttatgagtcttcaggaaaatctctccttagcaaaaccaggtcctttaggtcacatttctgttcctgcttcctatttgggacaaagttcacacctcagggaaactgacgtttctcaggttgaaagacatctgattccaagtgtctctgtatgcaactaaaaastacactttgattgactaacagctacctaactttgaagaaaactgagctaaaatgggacttaggtaatattaaggtgagcctgagaaatatttaatcgagaagtactgctaggttttagcttgaagatacagaaatatgatataaaaaataaatatatttctcacaaaacccc

SEQ ID NO: 175709 - DNA, 354 bp, Homo sapiens
tctgtacccattcatactgtgtctaatgaatatttactatttactgggcaccatactggggatatatttaatgttcacaagaatctatgagagagataaaaatattgttttcattttacatgtggggaaacagaagctcagaaagactagataacttatgtgaggtcatatgatcagtacatgatagagcttagattgactgagagagttgggttcaagagactctgctctcagctatctagtagtgggagarattcatacccctgacggtcagtatctcaccagttctgggttttgggcattctttaatccagttgtgatggtgtcattcctttaacataagttattgagtga

SEQ ID NO: 175710 - DNA, 588 bp, Homo sapiens
gcatctgtgtaataatctcaaagtctacttcaaaatttttaatacttkagttataattcatctgtgtttatttcctagaacgaaagtatttttaattaaaataaaaatgattaatgatattttacctttactacacagactcaataagcctatcaaaagagtaatcattagtactactgttgagtacctactatgtgcaagataatttttatcacattccaccacaatgagtaagaaattattatccccattttatagcagcaaaactaaggtttcaggactttaacttatctaaagtttcacaacaagtagagtccaagttgggattagaactctgactccaaagctcattcttttagccactatattttattgcattttgtgcatgcatggttcttatatactcaggcacacacaaatgtttcttttcaccagcttaaaatcttcataactgtttgctgagctaaccatagaattattgacatgtccataggtcatttatattgatggcctttgagagtttttgctaaaccgagttgttcattttagtgcacccatcaactaaatatttggtgtcacaattgccac

SEQ ID NO: 175711 - DNA, 588 bp, Homo sapiens
gcatctgtgtaataatctcaaagtctacttcaaaatttttaatacttgagttataattcatctgygtttatttcctagaacgaaagtatttttaattaaaataaaaatgattaatgatattttacctttactacacagactcaataagcctatcaaaagagtaatcattagtactactgttgagtacctactatgtgcaagataatttttatcacattccaccacaatgagtaagaaattattatccccattttatagcagcaaaactaaggtttcaggactttaacttatctaaagtttcacaacaagtagagtccaagttgggattagaactctgactccaaagctcattcttttagccactatattttattgcattttgtgcatgcatggttcttatatactcaggcacacacaaatgtttcttttcaccagcttaaaatcttcataactgtttgctgagctaaccatagaattattgacatgtccataggtcatttatattgatggcctttgagagtttttgctaaaccgagttgttcattttagtgcacccatcaactaaatatttggtgtcacaattgccac

SEQ ID NO: 175712 - DNA, 588 bp, Homo sapiens
gcatctgtgtaataatctcaaagtctacttcaaaatttttaatacttgagttataattcatctgtgtttatttcctagaacgaaagtatttttaattaaaataaaaatgattaatgatattttacctttactacacagactcaataagcctatcaaaagagtaatcattagtactactgttgagtacctactatgtgcaagataatttttatcacattccaccacaatgagtaagaaattattatccccattttatagcagcaaaactaaggtttcaggactttaacttatctaaagtttcasaacaagtagagtccaagttgggattagaactctgactccaaagctcattcttttagccactatattttattgcattttgtgcatgcatggttcttatatactcaggcacacacaaatgtttcttttcaccagcttaaaatcttcataactgtttgctgagctaaccatagaattattgacatgtccataggtcatttatattgatggcctttgagagtttttgctaaaccgagttgttcattttagtgcacccatcaactaaatatttggtgtcacaattgccac

SEQ ID NO: 175713 - DNA, 536 bp, Homo sapiens
gcatgtttggtagaatttactagtgaagtcagctagtctgggcttttcttttttgggagggttttcattactgattccatcttcttattagtaataggcctgttcagattttctatttcttcaagatttagtcttggtaaattgtatatgtctaggaatttatccctttcttctaggttatccaatttattggtatataattgttcataatagtctcttatgatctkttttatttctgtggcgttagttgtaatgtctccttttttatttctgactttatttacctgagtcttgtcttgttttattagttagtctagctaaaggtttgtcaaccttgtttatattttcaaaaactaaactcaattttttttattttttctattgtttttctgtactctatttcatttgtttctactctgatctttattctttccttctgccaactttaggcttagtttttcttcttctagttcctttaagtggaacactaatttatatatttgagatctttcttttttgatgtaggagcaactttc

SEQ ID NO: 175714 - DNA, 578 bp, Homo sapiens
catatggcaaaccctgccttttggaaagatcacactcaaactatagcaaggcttatttttgaaaataagtaaacatttatatcaattcaaaacataataaatcaggccacatataacaataaagatttcatagatggagaagacagaccataacaggtaaaacttgggatgtttctgatgttttgaaagacctgtggcttccacaagccatggtgttattagttcaagtcaagtttatatatcttgagggtgggaggcctgaactgaaaattagcttataaaaaatttataaataataaatgttaagccaaaatattgcaaaggaaaactaaatcttgtaaaagatcattcttttaacctcatccttaacatttaatgactggagagatgaagagttttcctgtttcagttcccacattctaaggcatcctatctctaggatatatgtgtcatggtcccagttctccttctcyagaaattctaagtgctttgcattgacccttccagaattcatcttccctcaacctcatacttttgttgtcagccactggtttagagaaagaggttgaggatagtca

SEQ ID NO: 175715 - DNA, 578 bp, Homo sapiens
catatggcaaaccctgccttttggaaagatcacactcaaactatagcaaggcttatttttgaaaataagtaaacatttatatcaattcaaaacataataaatcaggccacatataacaataaagatttcatagatggagaagacagaccataacaggtaaaacttgggatgtttctgatgttttgaaagacctgtggcttccacaagccatggtgttattagttcaagtcaagtttatatatcttgagggtgggaggcctgaactgaaaattagcttataaaaaatttataaataataaatgttaagccaaaatattgcaaaggaaaactaaatcttgtaaaagatcattcttttaacctcatccttaacatttaatgactggagagatgaagagttttcctgtttcagttcccacattctaaggcatcctatctctaggatatatgtgtcatggtcccagttctccttctctagaaattctaagtgctttgcattgrcccttccagaattcatcttccctcaacctcatacttttgttgtcagccactggtttagagaaagaggttgaggatagtca

SEQ ID NO: 175716 - DNA, 578 bp, Homo sapiens
catatggcaaaccctgccttttggaaagatcacactcaaactatagcaaggcttatttttgaaaataagtaaacatttatatcaattcaaaacataataaatcaggccacatataacaataaagatttcatagatggagaagacagaccataacaggtaaaacttgggatgtttctgatgttttgaaagacctgtggcttccacaagccatggtgttattagttcaagtcaagtttatatatcttgagggtgggaggcctgaactgaaaattagcttataaaaaatttataaataataaatgttaagccaaaatattgcaaaggaaaactaaatcttgtaaaagatcattcttttaacctcatccttaacatttaatgactggagagatgaagagttttcctgtttcagttcccacattctaaggcatcctatctctaggatatatgtgtcatggtcccagttctccttctctagaaattctaagtgctttgcattgacccttccagaattcatcttccctcaacctcatacytttgttgtcagccactggtttagagaaagaggttgaggatagtca

SEQ ID NO: 175717 - DNA, 548 bp, Homo sapiens
tttcatgctacttattcaattttatgattcagcttctggcatgattgttatcaacaatgccatttttactaacctgtgcagatgcttctgctcacaacataccattcaccaagcaccatcatcccagagcaacctcacacctgctctgatgtggtcactgaataccacttctaatttgcgttgttacttctactggttccactgctcctaaaactggctttgccatygctggatgttaccaccatgttttaggggcactactgtcatttcttccagtggtcaccagttccatggctgcaattcttctcttacaagcccttgttaaactttttgaacatctctaccaatcttgggcatctctgacttaaacttaccacattcattgcaccagactcacaatgtaccatacctgtacaatgttctgtggccaaatgtggggaaatgtttctctctcttttttttaatatcactctctattggaaacttggtttttgttttactcatattcttatatctattttatatctttactatttaataactgttat

SEQ ID NO: 175718 - DNA, 345 bp, Homo sapiens
aagtcaatgtacttgaaaaattcaattcctagtttaccctgagctctctgcacctgaagaattggtccactccttgttagagggtaatggtcccttttgctggaatatgatgcagaacctctcccttaaaagacatcatgtgaatgacctcgggatttgctgccctctctcatcttgaataccaaaacaataagtacagtcacgttacaacagaaattagctggaaaaatactggcattgtgaaaggttaaaagggaatttgcagaagttgctgcagaacctagccacatacatacaccaacaagaggcacaggagtatgtrgaattgaattctgatggtaccag

SEQ ID NO: 175719 - DNA, 585 bp, Homo sapiens
tatcactttttaaaatatttgctggaatgtaacctaaatcatttgattatttgtaacattttttgaccaaagtactcacaataatttctcatgtaacatttcgaatattgttaggaaataacgaaggaaagcattataaaataagcacaagaaaaactttgtagttaggttaaattcatgcaatgaaaggcaatcttgttggagctcaggctgaattctcatttaggtcaccaacttgcttgatgattctgcataagctaaaatacctttcttaaccttagtatttacagctgaagatttacattagtggttctcaaactttagtctgcactagaataaccagactttttaagaaacagattactctttcagtaaatctggagtgatatccaataatatctcaaatgatgttgctgctgatcttgagaccacactttttaagaagcactaatgtataagatgacacacwaacacacacaaatttccaggggtcaaatttctctattagataatttaaatttaaacttaatccttttgacttgacatcatatatgttggatgtacttttctaattttgaaacgtaa

SEQ ID NO: 175720 - DNA, 631 bp, Homo sapiens
ctttacatgagaaaatacattaatatttacacattttgcacctatcttcctattatccttataccctaaaatttttatgtgattttcatgcggtagctatagtttaaccaaaacattagatgtgaatctaataatagaagcatgcaacttcttatctacagagaaagtatgcaagaattgctaagtcatgcaccaakgcctaacaacatggctctctcaacttttgaaggattagagtcatcctttggtcttaggaaccaaaaacactgatgcaactccaaataaaagtaacaaacatgtatttttccactactgtaatagccctaattcccttaatcttaccgactattactaccttagccaatccctgcaaaaaaaggttcatacccattttacctaaaaatatctattgcatgcgccttcatcattagcctcatcactacaatgtttatatgtacagatcaagaagttattatctcaaactgacattgaatgacaatccaaactcttaaactttcactaagcttaaaactatactacttctccacaatatttatcgcagtaacattattcattacctgatctattgaagacttttcaatatgatatataaattcagatcctaacatta

SEQ ID NO: 175721 - DNA, 514 bp, Homo sapiens
ctttcaaatttgtctgtaattttagattcaaaggttcaaaacaatatactgtaatttacatgttacgtaagaagttaattagatactaggcactccttatttattaaaatgttcatttgtaagttttatagtagccagaaatacatcaagattttcattttctcaacctatatcgaaattattatataatttattccaaaatttttattttatatatcagtgactcatgttttcaacatacacatttttactttatttagaagtctaaggctttttttttttttttgcttctaaagactggattgcagacttttaattttgtgtaaagatagcatcagtwtattaatagtaagaaattatctttactgtctttaaatgcttattaaaattttcttattagagcattttcttattgactgtagtgcattttctgtaaaattttactgccaaagcaggatttagactatgatatagctgttaagtgctgttgtcatttcctgtgctcaaaataaag

SEQ ID NO: 175722 - DNA, 590 bp, Homo sapiens
tacaccacttatccctcatttcccagcagtaaatatgtggcacaaagagagaatttgtgtgcttaggggaaggacagcaagggattgttgaactttgcattgraactcagtgctgccctgttttagtaggaagtaatccaaggcagaatttggccattgcccatggcgggagcactttgatcagccccagacagaagaaaattatttatcccagcacttggtacctgagttgtggctagcccctcaggctaaagtgctctggaattttaagtaaatataaaaggcagtctaggcggggcacggtggctcaagcctgtaatcccagcagtttaggaggccaaggcgggtggatcacgagttcaggagttcgagaccagcctgaccaacatggtgaaaccccatctctactaaaaatacaaaagtgagccggacgtgctggcacatgcctgtaattccagctactcaggaggttgaggcaggagaattacttgaacccaggaggcggaggttgcagtgagctgagatcacgccactgcactccagcctgggtgacagagtaagactccgtctcaaaaaaaaaaaaaaaaaat

SEQ ID NO: 175723 - DNA, 586 bp, Homo sapiens
tcccagcagtaaatatgtggcacaaagagagaatttgtgtgcttaggggaaggacagcaagggattgttgaactttgcattggaactcagtgctgccctgttttagtaggaagtaatccaaggcagaatttggccattgcccatggcgggagcactttgatcagccccagacagaagaaaattatttatcccagcacttggtacctgagttgtggctagcccctcaggctaaagtgctctggaattttaagtaaatataaaaggcagtctaggcggggcacggtggctcaagcctgtaatcccagcagtttaggaggccaaggcgggtggatcacgagttcaggagttcgagaccagcctgaccaacatggtgaaaccccatctctactaaaaatacaaaagtgagccggacgtgctggcacatgcctgtaattccagctactcaggaggttgaggcaggagaattrcttgaacccaggaggcggaggttgcagtgagctgagatcacgccactgcactccagcctgggtgacagagtaagactccgtctcaaaaaaaaaaaaaaaaaatcacaaaaaaccccggc

SEQ ID NO: 175724 - DNA, 518 bp, Homo sapiens
ttgctgctatgcgctgtgtgctgtttcacaacattcccaaaactcatgccattatgtttcagcaggtgctgctgctaaaagcctgaggccaatagtatttccaagagcaaatgaacctctgccactccaatcccatgttcactgccccctaacagtgacccccctcagcaggaagtagccagaatgatcatgacgtcccacatccctgcagtccctccagcttaggcatgatagaaatcatgcgcaaattgacagtggggattgtggcaggccaattcttcctaacagtcacacagacaggcctccatagcactccagttatacattcaaactaccacagcatctgccttaacattaaggtagcagttaaacctggggaaattgatgccccaacagcaaarccagaaatgaaacatatgtttggtaagaatcttgcccaggcttctgaaacttgaggcaagtcaagataataaagaaagaaagccctacattcctcgtaccaagacccatcttgggtc

SEQ ID NO: 175725 - DNA, 383 bp, Homo sapiens
cgacagagtgagactccatctaaaaaaaattaacaaaaataaaatcatgtcttctttaacataaatattatcaggattatgtgctatatktgttcactttgtaatctgaactatgccagatttgcctgtaattctagatttaaaagttctgaaataaaattgttgattttacatgcttttttaaaaaattattttactttaagttctgggatacatgtgcagaatgtgcagatttgttacataggtatacatataccatagttgtttgctgcacttatcaacccatcatctaggttttcagcccaacgtgcattaggtatttgtcctaatgctgtccttccccttgcctcccatcccctgacaggccccggtgtgtgatgttt

SEQ ID NO: 175726 - DNA, 383 bp, Homo sapiens
cgacagagtgagactccatctaaaaaaaattaacaaaaataaaatcatgtcttctttaacataaatattatcaggattatgtgctatatttgttcactttgtaatctgaamtatgccagatttgcctgtaattctagatttaaaagttctgaaataaaattgttgattttacatgcttttttaaaaaattattttactttaagttctgggatacatgtgcagaatgtgcagatttgttacataggtatacatataccatagttgtttgctgcacttatcaacccatcatctaggttttcagcccaacgtgcattaggtatttgtcctaatgctgtccttccccttgcctcccatcccctgacaggccccggtgtgtgatgttt

SEQ ID NO: 175727 - DNA, 383 bp, Homo sapiens
cgacagagtgagactccatctaaaaaaaattaacaaaaataaaatcatgtcttctttaacataaatattatcaggattatgtgctatatttgttcactttgtaatctgaactatgccagatttgcctgtaattctagatttaaaagttctgaaataaaattgttgattttacatgcttttttaaaaaattattttactttaagttctgggatacatgtgcagaatgtgcagatttgttacataggtatacatataccatagttgtttgctgcacttatcaacccatcatctaggttttmagcccaacgtgcattaggtatttgtcctaatgctgtccttccccttgcctcccatcccctgacaggccccggtgtgtgatgttt

SEQ ID NO: 175728 - DNA, 500 bp, Homo sapiens
tagtggttgcactaatttacattcccaccagcagtgtaaaagtgttccctttgcaccatacccatgccaacatctattttttttattatggccattcttgcagaagtaagttagtatcccattgtggttttgaattgtatttccctgatcattagtgatgttgagcctttttttcatatgtctgttggccrtttctgtatcttcttgtgagaattgtctattcatttccttaacccactttttaatgggattgttttttttcttgatgacttgtttgatttccttgtagattctggatattagtccgatgttgaatgcataatttgtgaagctctcccactctgtgagttgtttattctgctgattatttctattgctttgcagaagctttttagttttattaagtcccatctatttatctttgtttttgttgcatttgcttttggattcttggtcatgaagtctttacctaagccaatgtctagaagaatttttccagt

SEQ ID NO: 175729 - DNA, 500 bp, Homo sapiens
tagtggttgcactaatttacattcccaccagcagtgtaaaagtgttccctttgcaccatacccatgccaacatctattttttttattatggccattcttgcagaagtaagttagtatcccattgtggttttgaattgtatttccctgatcattagtgatgttgagcctttttttcatatgtctgttggccgtttctgtatcttcttgtgagaattgtctattcatttccttaacccactttttaatgggattgttttttttcttgatgacttgtttgatttccttgtagattctggatattagtccgatgttgaatgcataatttgtgaagctctcccactctgtgagttgtttattctgctgattatttctattgctttgcagaagctttttagttttattaagtcccatctatttawctttgtttttgttgcatttgcttttggattcttggtcatgaagtctttacctaagccaatgtctagaagaatttttccagt

SEQ ID NO: 175730 - DNA, 427 bp, Homo sapiens
aatgtctccgaaaacatttcagggttctttttgggggtacttaatagcttgcagtgtacatgcagatgcaatccccagctatgaagctttttgtgaaaacatatatcatcacctgcatctgataaatgatgatttttcaaatttattagacaattccactcccccaaaattgcaaaagatgggttcggtcagagttttccaaccctctagacatttagactcattttactagggactggggatgagcatgaagctactgcctgtccagtaagagaacatgacactcttcagtgtttgaaatgatatgcactcagatatgtaaagacatacatggkcatgcacattatatatctacaatgatggtgacaatgacgatattatagacttcttatttatcagattcttttttcttcctccaccactcttt

SEQ ID NO: 175731 - DNA, 520 bp, Homo sapiens
tgttggattccagggcccaaaggcattttcctggaataatttgacaaggctttgtcactatcaaccctgacgaagcactttctatagcatttgaaagttcatatagttgtccacctgctaatttctctccccaattattaatagcaacttggataaaatagttcttagtttatcatcattctcaagaacagtgtcacagggttctatctgaaatagagaaatacccaccaagttagtcaagccaccaggaaactctgtcagcttgttttgaggatgagttttctatctcttgaacttttttactraaagttcaatcaagatctttggaactagtgctctggaaagttgacaaacttctacataggacaaacaaacttcatattctctttctattctcttggcatacttcttaaaaaggcagtgattcaagaccctggctctgataaagttgacaactttcgggacagtagacaaaaattctctcaggattactggcagtgtctttattgccattatatga

SEQ ID NO: 175732 - DNA, 611 bp, Homo sapiens
aagaaagcataatttacgggagattataatagaccttaggaatcagatatcttgacctccttaggaatctggagaggtattcaaagccccagaactggatgcaagaagaacaatgaaccgagcctcctaattctgcccatgttgctcttttctataatactttaaacccctctaagttaggtattaattttaatccaagtttgtcacaggtaaacaatttctaacttttttttttaactttagacttttacttcctcctacttaaaacacaacgctacttaatagattctaatattaaagtcttctcctggctgcagtgagtcaataacttcccgggtaagcaagtgacattatcacacaaggttatcaagygtagaaaacaggtgtaattctattaccttaatctcatttccacataaacacattttcagctaaacaaagtataaaattatttaatgatctagttatgtagacaaatttctcaatatgacagtagcaagcctagaatatcaagcttatagaaaagtagaggtgatattaaactttaaaactgtgttaaatattaaaatacagctccaagaatataaagaaaaaatatattatttgctatt

SEQ ID NO: 175733 - DNA, 493 bp, Homo sapiens
cctacttaaaattttattagggctgttgaagttgttcccaagctcatttatactttttcattattttaaattatttcttctctgtatatttcattttgggtggtttctattactgtgtcttcaagacattgatcctttttacttaaaactgcaatcgactgctaatcttattttgtgcatttttcagcttttacattctaatataataattgtatatcctctatatcttttcacttattggacatctgaaatacaacaataataactgcttaatacatgtgctttctcatcctaacattttatttcagagtcaattttgattratatattttccttcattacggtttttattgcttttttttctatgtaatgtgtttattgaatgaatgttagacagtgtgaattttatgttgttgtttgcctgacatttttaatcctataacatttttgtgctttcttattagaagtactttagttacttggaaattgtttc

SEQ ID NO: 175734 - DNA, 559 bp, Homo sapiens
ctctggggagggggaataaatccagtggtgcctggacaaatatgctacagtaataccatggaatttgggacaacctgtccacttacacacactatggccctagcattgctaatatttcaggaatcttcctctgtttaccagtcccccagagccagacatwtattccgcaatggaaaataaatatctctttttggtttgtaggcagaatgcgtctgggggtggacacctgctagtttaacattctttatataggccagactgtaagcagagggatgttcacttgcctcaaggtatttttgatcctcaagtgccacctgctctagaaactgcagccaaatgttatttaagagaagtggtgaaaagtatggcaaagaaattctgtgattagagaggactatctaaacactgcagctactcactctagaaagtcatctgcatcactttgctggggatgaaatggaaggaagtcatcaaacactgctggaattctctttgggcaagaaactactgtgttccttctacttctcaaagctagatataatttttgaggacaagagat

SEQ ID NO: 175735 - DNA, 298 bp, Homo sapiens
tacattctggtgtccctcagagactgctttcccaacaaaataaataattctggtttgcgaatagcaataacactaaattcttttaaaaatctaccaagactgttagggatagtttaccatgtgacgtgattcccttatgagtcattakagaaaagtatgtgtgtgtgtgtgtgtgtgtgtgtgtgtgtgtgtgtgtgaaagacagagaaagagagaggaacggagagagggagagagaacgcattttatgaagagacagtgttggaaatggcaatttttctattactatttctatatt

SEQ ID NO: 175736 - DNA, 477 bp, Homo sapiens
aaaaatagatttttgaattggacagaccctcttaaattattgaaagtaattaatattctttttcccaccagaacaaagtaagaaacagtaagcttaagagattttacagtggtcatatggctagtgacacaggaaagaacagaagccaggtgtccagactctcagtctagaatttttattacattctggtgtccctcagagactgctttcccaacaaaataaataattctggtttgcgaatagcaataacactaaattcttttaaaaatctaccaagactgttagggatagtttaccatgtgacgtgattcccttatgagtcattagagaaaagtrtgtgtgtgtgtgtgtgtgtgtgtgtgtgtgtgtgtgtgtgaaagacagagaaagagagaggaacggagagagggagagagaacgcattttatgaagagacagtgttggaaatggcaatttttctattactatttctatatt

SEQ ID NO: 175737 - DNA, 438 bp, Homo sapiens
ttcttctctttttaagcacaagttctgaaaaatacatatatgaaagaattaaaaaaaaaaaaaaggaagacattttctcctttcttttttaacctgaccaattttctgggtcaagctcagtgtgagctcacttgrttggcagcaggggaagccagggtgcccctgaagaaggtcatttctgacttttctccgccactgctatgccacattactcactgtcttatggccactagttaaaaaacacatgtaagcaatcaagtactggaaagagtacgaagaaaagagaaagccagaattaaaaataaatcctaaatttaaaagtgaactagttaaaaaaaatcatttactataatttcttctgctcaaatactacagaagtatgaagttgttagcctagagtaaacccaatttaatttttcacaatttactctaaagata

SEQ ID NO: 175738 - DNA, 530 bp, Homo sapiens
ctcactagccatgttaactaaaacaaagcataaaaacttctaggcctcagttttttcatctataatatactccttcatttattcattcattcaattaatattcacctcttgagtgctgggcactgtgcttatttcataggatacaatgatgtgcagaaaagaacacattacttacactcatgatgctcatagtctagtagacagagatagagattaataaattacacagamacatataactttaaaatgtggcaagtgcaaagaaggaaaattacagggagctgtaactgaaagtcatctgtaatttggggttatataacttatgaagcttctttcagatgtaaaattttgtggaataataactgtagaatctttgattcagagggagagatatttatacagtaagtgggagtgggaaaactttatcaagctcctcttattccattctttagacaaccctcattagatagggcaagacttgaggagggcatgtcctatccatttactctgtagttttatttgatttctct

SEQ ID NO: 175739 - DNA, 273 bp, Homo sapiens
aaaaaactttattctggttagctagctgactgtcatgttcgtgaacaaagtttttcaaacattcgctaccctgacatttgacatttagtacttaattaaaaaaaaaaaagttgaaaacctaagcaatatgaattttgcatgcagtatgattaataggtaggtgtttacctaagaaatcatttaagaaagtgtgtgggaagaatacaagtcccaagagatgctctgtgaaaaataaaaaawaaaaaaaaaaaaaaaaaaaggggggggggagga

SEQ ID NO: 175740 - DNA, 530 bp, Homo sapiens
ctcactagccatgttaactaaaacaaagcataaaaacttctaggcctcagttttttcatctataatatactccttcatttattcattcattcaattaatattcacctcttgagtgctgggcactgtgcttatttcataggatacaatgatgtgcagaaaagaacacattacttacactcatgatgctcatagtctagtagacagagatagagattaataaattacacagacacatataactttaaaatgtggcaagtgcaaagaaggaaaattacagggagctgtaactgaaagtcatctgtaatttggggttatataacttatgaagcttctttcagatgtaaaattttgtggaataataactgtagaatctttgattcagagggagagatatttatacagtaagtgggagtgggaaaactttatcargctcctcttattccattctttagacaaccctcattagatagggcaagacttgaggagggcatgtcctatccatttactctgtagttttatttgatttctct

SEQ ID NO: 175741 - DNA, 404 bp, Homo sapiens
ttgtcatagtcttccccctaatcccgcatcgtaacttaaaggtgctagagaacaatacaagccagataaacaattgttacattagaggaaagaaaattctgtgttgaatctgcaatagaaatagacaagagcatcacagtagcttggagtcacatagaawgaaccattctacagtattattccctatgaggactgcattcacagagcacagaagccagcacttaagcacctcttaaataaaaacaccttcttgaatgaattggcaacaatagaccttgagtataaaatggaaatggaatagatgctgattattacgaagttgtcagcctgctaaccctcggcagttaaattggcaagcacagtaagagcactgaccacaaaaaaaaaaaaaaaaaaaaaaaaaa

SEQ ID NO: 175742 - DNA, 600 bp, Homo sapiens
agtccaccatattacacactgagtctcttcttaaaatgcctctttcctttcccttttctcatataccattcttaatctactatgctccccaacactttgtacatttttcggttttaggatttactacattatatcatatcatgttagtgtacacaatgtcagggtttacatctctaatctttacattcatatcattcagcaaattatctaacacatattaggtaatgctatataaattttctagaaaaaatgagtaactttaactcccttttcatatctaaatataaattccctttggaaagtaatcctgaatgagtgaatgagtaaataggtgaaaaagttcttccttaattaaatataataattatgaataatatatcaagtccaattattaatgtctaaaaattacatacgtataattttgagtatattcttcmctaacatttaacaaaatatattttagtttacatgaaagaaaatattttatttcgattgaaaaacaactgactaaagaaaaaatttttatattgctcatactactttgcatggtttgaatatttgtcccctccaaaactcatgttgacatttatttgtcactgt

SEQ ID NO: 175743 - DNA, 596 bp, Homo sapiens
cttcttaaaatgcctctttcctttcccttttctcatataccattcttaatctactatgctccccaacactttgtacatttttcggttttaggatttactacattatatcatatcatgttagtgtacacaatgtcagggtttacatctctaatctttacattcatatcattcagcaaattatctaacacatattaggtaatgctatataaattttctagaaaaaatgagtaactttaactcccttttcatatctaaatataaattccctttggaaagtaatcctgaatgagtgaatgagtaaataggtgaaaaagttcttccttaattaaatataataattatgaataatatatcaagtccaattattaatgtctaaaaattacatacgtataattttgagtatattcttccctaacatttaacaaaatatattttagtttacatgwaagaaaatattttatttcgattgaaaaacaactgactaaagaaaaaatttttatattgctcatactactttgcatggtttgaatatttgtcccctccaaaactcatgttgacatttatttgtcactgtgacagcgttaagaagtgagacc

SEQ ID NO: 175744 - DNA, 596 bp, Homo sapiens
cttcttaaaatgcctctttcctttcccttttctcatataccattcttaatctactatgctccccaacactttgtacatttttcggttttaggatttactacattatatcatatcatgttagtgtacacaatgtcagggtttacatctctaatctttacattcatatcattcagcaaattatctaacacatattaggtaatgctatataaattttctagaaaaaatgagtaactttaactcccttttcatatctaaatataaattccctttggaaagtaatcctgaatgagtgaatgagtaaataggtgaaaaagttcttccttaattaaatataataattatgaataatatatcaagtccaattattaatgtctaaaaattacatacgtataattttgagtatattcttccctaacatttaacaaaatatattttagtttacatgaaagaaaatattttatttcgattgaaaaacaactgactaaagaaaaaatttttatattgctcatactactttgcatggtttgaatrtttgtcccctccaaaactcatgttgacatttatttgtcactgtgacagcgttaagaagtgagacc

SEQ ID NO: 175745 - DNA, 576 bp, Homo sapiens
taaagttaatggtaaacactttaaaagaataaggacactttactctcattattactatgcaaaatttactggaagtttcagtcaatgcaataagagaagtcaaygggaaatataataattgtaaaagacaaacaaaattgccattttctctgagaatataaaaatacttctatgatctaagaaaaaaattgatttcttcaaaagacaaaaatcaagcaaatcataaaaattttataaatgtttccacatcatgagtgtctttatataataaaaggatcaattcattcataatatatagtaatcccaaagatgtagacacctaatagaatagccaaaattgtatacataaaattaacagaacaaggtgaatttgacatagtaatattaaagtagaatatttggatttgtttctcttaatatggatgctctattaaaataatagatacagaatttttgtagaacaattaatagaatagatttgatgaacacatatggaatactgcatacaacagacaaggattacacatcctacgcaagcttatatgaagcaattttaaaatgattacatattagaac

SEQ ID NO: 175746 - DNA, 529 bp, Homo sapiens
tcccacattcagccaacccagaaaaatgtctggcacacagcaaacactccatgaacaattatgaggaattcacgctgtgtagatgagtttctcatagcctttcctaagaacctagattttaatgggtttggaagtagggtggggtggggagaggtcagaggtaataggtgccaaggaaggaaagaagaaataaacaagagtgaaaaggatagcctaggggatggggaaaacttgtctttttaatcttgtttagggaccatggtgtgcaatgtactgtatatctagagatacggagatataagactagtatacttaaaatacctgcaagctcagagattagaaatcccaactctaattctgatcgatttgggatttggggcaagtcacttcactatacctgggctacagatattccatctgttaaggatatagactagataatctctaagatcaatttctgttacataggattctgttattctagctatatgagaatatcggagcatytgaaacaggaagtagacgagtt

SEQ ID NO: 175747 - DNA, 551 bp, Homo sapiens
ctctgctgctagaagtcagaatagtggctactcgtagggtaggaattttgatgagaagagagcattacttcattgtaccttcccaataactctataagacgtgtaatctccactaccaatgaagaaagtaatacatggaaagattaagctatttgcgcaaaggtagagatactgaattagaactttgcattagaggtgggactgattcatgcrcttacccactagactttttgtcttgaatcaggtcccagaagtgtttggattgatgaagtctgacccaacttgcatggcttgcaggactcctgaactttggtttgctttttgcccacatgtctgcctgcatactgcccatctagtactgatgctctgccttttcctgatctccaatgacagcacagctctagactcctggctggaaaaccaggatgactgtgtgctgaatattctgctcctgctattcatctagtgggccctgttcatggatctggcattgacaagatgccaagaagaaaatgaagaaaatgaataaagagaaaaggtcaccccctgaa

SEQ ID NO: 175748 - DNA, 369 bp, Homo sapiens
  misc_feature (1)...(369): n = A,T,C or G
ngaattcactaaggcatctccccgctctcttttttgaactcacaayaacatctcattagtaaaggcaagattcagctcaccataatctttccccagctgaggcaaagctgcacaatttacaatagatctttggaaaactgcttttaaccgagtgctgctgcacctatagatctctctcaattacccacagtaaatttaggcattgtacaagagcaaattttacagtccatgaagagatgaagtgaaatctatatgaaattcatagtgacagattcccagttagtgctgtgatgtgtctgtattacagaagatagacattctattagcatggaagctcccgtaatggactgtgaatcatctcaggtaata

SEQ ID NO: 175749 - DNA, 547 bp, Homo sapiens
attcactgcatgacatatgcataaagtgtgaagagaggaatgtaaatatgtttacctctttatctgcaaatgttggttttaaccccctcctagctggagagctggccagggtactccaggcatcggcctgctatagcaagaggcagctaaagtttggtaactggaggctaatttacagggatgacgaaaatcccctgactcctcatgagcatggtggaaagcaaatgggaatggctcttccaggggccacattttagagactttcatttctatagtcaagatgtccttgcccctcatgcaaatggttggcaaaagcctctgcactcccagrcagcatgctgacccaagagaagcaagactgaccttgcccttgagggcaggagtgtggatgaccaggaaggtcttgcatgccaatatggctaccatctgtgaagcaccaacctatgtcaggccccatacttgcacaattcttgcccttaacaatcctgagagataggtactattatctccactttccagtaaggaaactgagactcaaaaaagttaa

SEQ ID NO: 175750 - DNA, 522 bp, Homo sapiens
atttaacattaaattctatacatagtcaaattatcaatcatttataagaataaaggctttttaggcattcgaggactcaaaactgattctttaacatatgctttcttagaatactgctgaaggatgtgctccactaaaagcaatagagtaataggaggatacagaattcaggaaacatgaactccatccagcaaaggagagtagtgaaggatgacagcagagcaattggtccasattgaggcaggagatggggcagagagaggttctcaaagaccaaaaaaaaaaaaaaggaactgataaattatctgatacatttaaccatatggaaatagcattgtgaggcatttttaaaatatatggagtataagaaacaaaattgttaaaaaatggaggcaattttttactccaaaaaagcaaaaagttgtacaggaaggaaacataatcaaggtacattacctaatggggcaataaacagtatctatattatgattataacataagcattgaatattaatttacctt

SEQ ID NO: 175751 - DNA, 505 bp, Homo sapiens
gtgtgaatttagcatcttcctgtgattaaaaaatttcttaaaaatctgtcactgccgttatactatgaactctttgaaaagcaaataatttttttttcttgtttccttcttattgctagggtatacactatctatctggccastatttcttaactctggtgtctaaaatatagatttccagcacctccccattcttagagaatcaaaatctctatggatgagtcctatgcacttgcatttttttgaatggccccacaggagatttctatgcacagccattagtgaaaaccattatagtgggcactcgatacactttaaatgagtaaagatgcatatacatgattggtcgattaattgaaaaagatattaaagcagagagcacttactacttatatatgccttaaacattttattttaattgaaaacatctaaatatacaatttacaaatcatttgataaatgactacgcttttctgttgaatgttggttctgtgattggagttct

SEQ ID NO: 175752 - DNA, 505 bp, Homo sapiens
gtgtgaatttagcatcttcctgtgattaaaaaatttcttaaaaatctgtcactgccgttatactatgaactctttgaaaagcaaataatttttttttcttgtttccttcttattgctagggtatacactatctatctggccactatttcttaactctggtgtctaaaatakagatttccagcacctccccattcttagagaatcaaaatctctatggatgagtcctatgcacttgcatttttttgaatggccccacaggagatttctatgcacagccattagtgaaaaccattatagtgggcactcgatacactttaaatgagtaaagatgcatatacatgattggtcgattaattgaaaaagatattaaagcagagagcacttactacttatatatgccttaaacattttattttaattgaaaacatctaaatatacaatttacaaatcatttgataaatgactacgcttttctgttgaatgttggttctgtgattggagttct

SEQ ID NO: 175753 - DNA, 505 bp, Homo sapiens
gtgtgaatttagcatcttcctgtgattaaaaaatttcttaaaaatctgtcactgccgttatactatgaactctttgaaaagcaaataatttttttttcttgtttccttcttattgctagggtatacactatctatctggccactatttcttaactctggtgtctaaaatatagatttccagcacctccccattcttagagaatcaaaatctctatggatgagtcctakgcacttgcatttttttgaatggccccacaggagatttctatgcacagccattagtgaaaaccattatagtgggcactcgatacactttaaatgagtaaagatgcatatacatgattggtcgattaattgaaaaagatattaaagcagagagcacttactacttatatatgccttaaacattttattttaattgaaaacatctaaatatacaatttacaaatcatttgataaatgactacgcttttctgttgaatgttggttctgtgattggagttct

SEQ ID NO: 175754 - DNA, 505 bp, Homo sapiens
gtgtgaatttagcatcttcctgtgattaaaaaatttcttaaaaatctgtcactgccgttatactatgaactctttgaaaagcaaataatttttttttcttgtttccttcttattgctagggtatacactatctatctggccactatttcttaactctggtgtctaaaatatagatttccagcacctccccattcttagagaatcaaaatctctatggatgagtcctatgcacttgcatttttttgaatggccccacaggagatttctatgcacagccattagtgaaaaccattatagtgggcactcgatacactttaaatgagtaaagatgcatatacatgattggtcgattaattgaaaaagatattaaagcagagagcamttactacttatatatgccttaaacattttattttaattgaaaacatctaaatatacaatttacaaatcatttgataaatgactacgcttttctgttgaatgttggttctgtgattggagttct

SEQ ID NO: 175755 - DNA, 567 bp, Homo sapiens
cactccagttaaaatggcttttataaaagagacaggtaataatgaatgctggcaaggatgtggagagaggggaactcacacattgttggtgtgaatgtaaattagtacagccactaaggaaaactgtatggaggttcctcaaaactaaaaatagaacaaccagcaattscactactcggtatatgttcaaaagaaaggaaatcaatatatcaaagagatattggcactgttacatttattgcagcactactcacaatagccaaaatataaaatcaacccaagtgcccatcaatgaatgaatggataaagaaaatatggtatatatacacaagggaatattattcagtcataaaaaagaatgaaatcttgtcacttgcagtaacatgaatgtaatgagaagtcatgttaaatgaaataaaccaagcacagaaaaacaaatatcacaggttctcactcaggtaggagctaaaaagtacatctcatgaagacagagagtatattgtttgccagaggcctggaaggagggtgggaaaatgaagacaagttgattaatgggtacaaatatat

SEQ ID NO: 175756 - DNA, 307 bp, Homo sapiens
gtatcagctggcattatcaggtaaatgaagagacatataatttaattgttaaaaagaaaggttcagagttttttakaatgcatcccagagagataaaaggaaaacaagattccttaagaaattttgattcagtgagaataccaataacatatttttagaaagtttgtgatagaacatcttaagaagggtagatcaaggacaaagacttgttctgaaatagctatcttgaaatattttcagttatcaaagtagagatataacaattctctctgtgtgtacttgtgtgcatgtatgtgtgtctgtgtgt

SEQ ID NO: 175757 - DNA, 523 bp, Homo sapiens
catgtaattccatttatataaaactgtagaataggtaaaactaatcaatggtgataaaaatgagattagtgatcacttctgaggataggcgggcaggaataggaggaaactttctaaagtgatagaaatagtccatttattgttatttactcatcaaaacttaatgaaaggcaaacttactatctgaacactctactatggataaattatatctcaatacaaaataatcaaaaacataccaatatttgctgtaagcaaaatttaattatcattcctaatcaaatcacctatggtaaattttaagtagattgtctggcatcatcttaaaatatagatgtgccttttgggtgcaggccctgggaatackcctgcttaacctcaacgaaattacaatacagaaaatatctcataggatgatcaaccataatatatggtaacaaaaagttcagtgaaaatccaatggggcagataaattgaaaacagactcttattgagtatttgctactgcgaaggaatctttcct

SEQ ID NO: 175758 - DNA, 557 bp, Homo sapiens
tggtctttcctctgtgcattttttctgtgtactaatcttctcttcttataagaacaccagttatatttgattagggcctacccacatgacctcattttaccttaattacatctcaaaaggccctaatatggtcacatactgaggggctaggggttagaacttcaacaaatgaattttgagggacaccactcagcccataataggtatcttcaygcctctcagagattatttgtaatccccataagaacacatgatgctgcaaataactttaaatcacaacacatttataagcagaaacaagaagttgtatgtgtattagccattagcattgtgctcaatgaccaccattctttaaagcacaagaaaagctagcacatatgcaagtctactagaaattgtattacatcagcttcacatttccagggcaagcagacatttggggaatcatcaataaatttcatttcacccccaacccaaataacaacacatatgacaaagcgaagccatgccaggcaaagggaaacacatgatcaatcagtatattatatataataact

SEQ ID NO: 175759 - DNA, 557 bp, Homo sapiens
tggtctttcctctgtgcattttttctgtgtactaatcttctcttcttataagaacaccagttatatttgattagggcctacccacatgacctcattttaccttaattacatctcaaaaggccctaatatggtcacatactgaggggctaggggttagaacttcaacaaatgaattttgagggacaccactcagcccataataggtatcttcacgcctctcagagattatttgtaatccccataagaacacatgatgctgcaaataactttaaatyacaacacatttataagcagaaacaagaagttgtatgtgtattagccattagcattgtgctcaatgaccaccattctttaaagcacaagaaaagctagcacatatgcaagtctactagaaattgtattacatcagcttcacatttccagggcaagcagacatttggggaatcatcaataaatttcatttcacccccaacccaaataacaacacatatgacaaagcgaagccatgccaggcaaagggaaacacatgatcaatcagtatattatatataataact

SEQ ID NO: 175760 - DNA, 557 bp, Homo sapiens
tggtctttcctctgtgcattttttctgtgtactaatcttctcttcttataagaacaccagttatatttgattagggcctacccacatgacctcattttaccttaattacatctcaaaaggccctaatatggtcacatactgaggggctaggggttagaacttcaacaaatgaattttgagggacaccactcagcccataataggtatcttcacgcctctcagagattatttgtaatccccataagaacacatgatgctgcaaataactttaaatcacaamacatttataagcagaaacaagaagttgtatgtgtattagccattagcattgtgctcaatgaccaccattctttaaagcacaagaaaagctagcacatatgcaagtctactagaaattgtattacatcagcttcacatttccagggcaagcagacatttggggaatcatcaataaatttcatttcacccccaacccaaataacaacacatatgacaaagcgaagccatgccaggcaaagggaaacacatgatcaatcagtatattatatataataact

SEQ ID NO: 175761 - DNA, 557 bp, Homo sapiens
tggtctttcctctgtgcattttttctgtgtactaatcttctcttcttataagaacaccagttatatttgattagggcctacccacatgacctcattttaccttaattacatctcaaaaggccctaatatggtcacatactgaggggctaggggttagaacttcaacaaatgaattttgagggacaccactcagcccataataggtatcttcacgcctctcagagattatttgtaatccccataagaacacatgatgctgcaaataactttaaatcacaacacatttataagcagaaacaagaagttgtatstgtattagccattagcattgtgctcaatgaccaccattctttaaagcacaagaaaagctagcacatatgcaagtctactagaaattgtattacatcagcttcacatttccagggcaagcagacatttggggaatcatcaataaatttcatttcacccccaacccaaataacaacacatatgacaaagcgaagccatgccaggcaaagggaaacacatgatcaatcagtatattatatataataact

SEQ ID NO: 175762 - DNA, 463 bp, Homo sapiens
tctttaattgcccaaatagagttaaataaccttattttaacttctaggtagaaattgatttgtggtctcaatttgtggccattaattctattcttcttgataagtctaaatcattcaaatccttttacattataactttattttaaattactgcattgccttaaatgttttaaagcctctcatggagtcttggaaagaacacaagtttttcagatagggagatgaaatatgtaaatttgattaagttacttaatcttcatagagtctcagattctttataaaatgaaacaataatcatttccttacagttttgctttcacaatttgaaataatacaataagagggggagatctctatttttttatctgtggcacactgtagattctctgatatcaaatgaacactcagtaggtggtaccggtataaattaatrcaattttggagaaagggtcactagaagaaa

SEQ ID NO: 175763 - DNA, 551 bp, Homo sapiens
ataaggtaattgttatccccatttcacagatgacagtagtttgctcaacaaatagagccaagattcaaaaccaggacttgytgacatcaatgcggatgtttcttccattattcaacacttctagctcttaatttcattcagcactcctcgatttcaggacgttctatgactcccccacagaatatgtcaacctcagtggagaaaatttgtctatgtaaaacctaaatgcatttatttacacatttcctattgctacttttccatgcctttttctcctatgccagatatgtactaagcatctgttgaataaataaatgactaaatgaatgaaatgtttttttcttgacttttttcaaacccttttcaaaattcacatacccagaatagctacacccacatctgactactctgttactttatattcccaccttgtgaaaggtctcccctgttatgtccccactatcctataaatgaacctcatattaccacaatccatacatttctaagaatgaagtgattaaaattacttaggacacttcatatgcaaatga

SEQ ID NO: 175764 - DNA, 649 bp, Homo sapiens
atggtaatacatgcctgtggtgccagctacttaggtggctgaggtggaagaatcgcttgagcccaggaggtcaaggctgcaatgagctactgcactccagcctgggtgacagggtgtgaccccaactcaaaaaaaatatatataagtgtagaatttgccttagggacatgatatggtttggctctgtgtccccagccaaatctcgtctctaatgataatccccataatcttcacctgtmtagggagagacctggtgggaggtgattggatcatttaccccatgacgttcttgtgatagtgagtgagttctgatgagatctgatggttttataaggggctctttcccgtttgctcctcactcttctctctcctgctgccatgtgaagaagatccttgcttcccctttgccttcctccatgattgtaagtttcctgaggcctcccccagccatggggaactggcttaattaaacctctttcctttataaattattcagtcttgggtatttctttatagcagtgtgaaaatgaactaatacagggcaattcaaagtgggaactcacacacaatcatgattttagacattatttacatgtagtgacatgtaaggatattaattttacagttctacataacacattcctattaa

SEQ ID NO: 175765 - DNA, 404 bp, Homo sapiens
catacacatgtatccagaggatgctgaaaagcatttccgtctcttctttgagtgatttatgagtcacacccaatcctcctttctgggtccttcattttttccttcctccctagggtgccttggccctgcatccccatcatcaccatctatggggtttcctttcttcctctcaacctctggctctgacaatccatcatttggttacatcggagtttccctcagtatttaagggcasgtggtagcgggtggtgaactggagggttgggcgtgcttaagaccccaaaagcaggatacacaaaagcatttgctcccagtccagccagagaggaacatctgaaagaccaaaaaattgctcttttggtaatactggccacttcttatagtagaacccctatgaaaataat

SEQ ID NO: 175766 - DNA, 404 bp, Homo sapiens
catacacatgtatccagaggatgctgaaaagcatttccgtctcttctttgagtgatttatgagtcacacccaatcctcctttctgggtccttcattttttccttcctccctagggtgccttggccctgcatccccatcatcaccatctatggggtttcctttcttcctctcaacctctggctctgacaatccatcatttggttacatcggagtttccctcagtatttaagggcacgtggtagcgggtggtgaactggagggttgggcgtgcttaagaccccaaaagcaggatacasaaaagcatttgctcccagtccagccagagaggaacatctgaaagaccaaaaaattgctcttttggtaatactggccacttcttatagtagaacccctatgaaaataat

SEQ ID NO: 175767 - DNA, 630 bp, Homo sapiens
attaactcagcttttattggacacccgctaaagtttgtcattgtttgtaaatacagcagaatatattaaaattattttgtgattagccatatatttgtaacttgtataagaaacttgtttacttggaatggacttaccctgatccatgtagtttaggtgatagaaccatgaatccctacagtgatgttctatttctgcatttaatgccatatttccctgaagttctcataacttataagtgaatctctgcttggggataccactaaactatactggcctcaaaatgagaatttccagatgaatgaatttctttttgaaagatttgttgagaaggttgctgtccaaacaacaaacatgttttttattctgtgagagcaaaaaacacatcagagcttcacagccattttgctgtgaatgaggtactatggaacatagatattgatttcctcaaccccagggctgctcaccagctctgagctggttgcctgtcctgggctgattgcttttgattatttgcccaatgtgttatactaatgtggaaacatttatgatgcaccagaamacattgtagcaaactttatattatacaaacacaaggattaacattgagttaaaattcctgcatgcata

SEQ ID NO: 175768 - DNA, 548 bp, Homo sapiens
acaaagttactctcctggatttcattctagaagctttgtattcttagctcttatgtttatatctatgacccatctcaaattaatttttgtatatggtgtgaagtaggagttaagatcgtttgattacatttgttgaaagtacttttcctttcctcattaaatttcattggcatctttgtccaaattaatccattgtatattataaaacttatttctagtctctcaattctagcctattaagttgaatatccttacatcaaaaccatatagtcttgattattgtagctttttattaattcttgaaagcaggtaacctaagtcatccaactttattcatttcttttttttttttttttttttgctaactctggkaatttgcattttcaaataattttagactcagattgttagttactacacacaaaaaaaagatgggcaagatgttcattagtattacattgattcattagataaatttggagaaaatggatatctttaaaatattgaatcttccaatattccatatattttctcatttatgtagatct

SEQ ID NO: 175769 - DNA, 548 bp, Homo sapiens
acaaagttactctcctggatttcattctagaagctttgtattcttagctcttatgtttatatctatgacccatctcaaattaatttttgtatatggtgtgaagtaggagttaagatcgtttgattacatttgttgaaagtacttttcctttcctcattaaatttcattggcatctttgtccaaattaatccattgtatattataaaacttatttctagtctctcaattctagcctattaagttgaatatccttacatcaaaaccatatagtcttgattattgtagctttttattaattcttgaaagcaggtaacctaagtcatccaactttattcatttcttttttttttttttttttttgctaactctgggaatttgcattttcaaataattttagactcagattgttagttactacacacaaaaaaaagatggscaagatgttcattagtattacattgattcattagataaatttggagaaaatggatatctttaaaatattgaatcttccaatattccatatattttctcatttatgtagatct

SEQ ID NO: 175770 - DNA, 562 bp, Homo sapiens
tatgcatgttctagaacaacaaaaactatgtaacatagaacattagttccatggaacataataaaataggtgttaaatgtttaaagaatgatccactggaaattctgcttcatcgtagcatgtattttgcatagaattcaccttttcagttaaaaactacaaattctgaacaagttgtctctaaaaagcaataatttaaaggccctaagagtgattaaacacagacaaagttaaataaattcaactcttaaaagatcaaaaccaaagtcagttccatgtttatgcatctatcccatgcagggcactttccatcaaaacacctgaaactcaagcaaaatgatgcagtctttctgaattaaattgtgagagaaaaacttcagaactttcagagaggcttgaaaatgaggagggaaatcctgaaaaagagaatggcacagagtggggagccccaaaaatmtacatattgggttggtgcaaaattaaatgcagttttttgttattacttttaatggcaaaaaccacaattagtttttcaccaacctaaaacaaattttaattctca

SEQ ID NO: 175771 - DNA, 599 bp, Homo sapiens
acggccactcatgctcagattttctcttactcctcagaataattactcttaagtatatttcctcaactctataagatcttcaaatatctttctttgcttaccactccacgcttttgctattgataagagtaagactatcactctgggtagggcaaaattaaccagaatataccccaacggtagtagtaaaagttctaaagtgacctccatgacccttacctccttgtgttccttggatggacccctccccttgattgtaggcagcacctgtgacttatttctggcaaaatgaatatggcaagtgtaacagcgtgtcacctccatgattatgttatgtaggattctaacacttgtcctgtttgaactgtctctctctcccatgctggcttttaaaaarcaagctgtcatgttgtgggctgtctatggagaggactacacagtgagtaactgaaagtgatgtctgcttaacatctatcaaaaatctgaggtcctcatcctgcagcctgcaaggaattgaatcctgccaatgacttcatgaatttggaagcacatcctttggtcacgataagactttagtcctggctaacatcttgattgca

SEQ ID NO: 175772 - DNA, 548 bp, Homo sapiens
aaacattttagatttaactaatttttttcaatccctgtcttttcctttagccaggagctccatttaaatagtagtgatgataaggggcattcttatcttgttaatggatgaataatttttctgcactaagtctgataatggttgaagattttggtrtgtgtgtgtgtgtgtgtgtgcatatatatacatatgtatgtatggggtcttcaaaagttcattgaaaatgtatattataaacaaactatgcatggatttcaaagatttttgcatgcagataaactcatactaacttgtcatactgaacaagatctagtttgaggcactaagaggaataagacatgaatttgaaaagagctcttatcaaagcaacatgaatgctgctaaaattgaagcaaaaaaacgtcaaatttatggtgaaactggaagaatggtgaaattatttatgccttacaaaaagtttatggggacagcatctcccccaatcatcagtttactaatggataatttgtttcaagaaagaaagagatgttgttgagggtgaagcccgc

SEQ ID NO: 175773 - DNA, 638 bp, Homo sapiens
gagataacaataatactcatattatcatgagaaatggtatgatccttagattttgagtcaagagaccctggtttgaattctcattataccactttccagctcaatggcctttgatgcgtttcttaatctcacaatctttacttaccagtctatacaaatgatttataatttttatggcattgtattagagtactattcatgtatcattttaaatgttcaaagtgtttttacaaagggatacatatgtaagattaactagggaactcatacatcagaagaatttcatggaaatcttgaaatactaaatatattgtcaagccacagtactctaaatatcctactgctgcaagcaaagattacttacagaaagagattagagtacagaaaaaaagacaaagaaggatttagtgtatgataaaggtgacatgacaaatacatcaactgcactatttaacacacttagtgtttaatagtgtgttaaataggtgttttaactagaaagcatcatctacaaaccagaaggtggcccctcagacaccasatctgctggtgcattaatctttgacttctcctgtgagaaataaatttttgtcgtgcatatgccacccagtctatggtattttgttgcagccgctcaa

SEQ ID NO: 175774 - DNA, 565 bp, Homo sapiens
tgtattctctccaggatgtcaaggaacttgaggtgtattggaagccctgtagaagtggaagtggcaacaacaccgtacaaaatgctatcatggagccaarcacaagctgctaactttgtctggtgttgggggatcggggaaggaagggttctaagtgaagtgtcatcgcgggtaggcttcactgaagaatgagaagggattatctcaagaagtagggaggaaaggacatgctcaagcacttctctgcccctaaaaatatcaaagacacattgactcagcagagcatgccacacacaaaaatcgtgaggggtctcaagggagtaaagtgtgtctgttgagaataggatatgtgagaacagcacacttgagtgtgatggctcagaggctggattctgaagtcagaccacctgattggaattccagttctgtcacttattagctgtatgattgcaaaaatttacatggctctgtgaggctcaatttccttctctgcgaaatgggatttctcatgacaacttccttaaaggaatcctgtaagaattaaataaaataaatattttgcaga

SEQ ID NO: 175775 - DNA, 576 bp, Homo sapiens
gttcatgtttattctgggtttttataaagttggggcactttttttttcccttctgttttcttccactgaaagctgaaatcactgtgctctagaagcaaataactaaaatgagagagggagcagacacctgagggacgtcacacagttctagtctcaaagttatttaggggttgatgagtatgagaatcacagcgtggtgtgtcacagctgacatgtggtgtctgaactacttttgtcagtttgtgtactattttaatcccaggaataaacaaagaaaaaaaaacttgcctgatactaaaactttgttggatataaagtcaacttagagcctgaattcagacaccagttctagacaataagagggtacattttttcccctctccttaagtaaagaattttttcagggtcagcaaaagtccagatgaagtaaatgttaaaagatgtgcctycataatagtttatttttctgtctgaattcttaatcaggtccatatttagattgtttgcattcatcttaatcacttatcagaactgtttctttcctatattaactaatatcaagggatggatgagagc

SEQ ID NO: 175776 - DNA, 636 bp, Homo sapiens
tcactgtcccatctttcctccattgaaatccaaggtagggagtgcttctctttccttctaggtggattaaagaaatatttcctaaagtgtctccactgatcactgataccttactgactgaataggatagatctgccttgctcctacttctcatgttacctccacagacaccatggcggtgtgagaggcagggtgggagtgtgtggaagggagcctcactaccactgaggggtrgtgaaggtccagaaggtctattaggccttctcttccatgattctagcaaggaagggaaggggcgcctcattactgctggattaggaaggaagttcagaccccccaacatggtctccatctactccttgtgggtctaggctagtgaccactgagcagtaatgaacgtcctgcctccctacctggccttctctgacaccatcccagaaaatgactggagcctcttgttatagtcagctgaggcatttgacattgttgccatcaaaggagctggcacaaccatctttctgcagtttggctggagtatagaggttataatctaaaagttttatgttttgccaggcttcccttttcctgatctcttggctgaggaaagcattttgttttcagcctttcatccatgcc

SEQ ID NO: 175777 - DNA, 450 bp, Homo sapiens
agaattcaaggttgcaagtttattttcttttgttttgttcaagtgttaaatattctactccactcccttcttgtttgcatggttttygacaagaagtttgatgtaattcttatcttttttcatatatctgttaggtgtttttactctctctggctgctttcaagattttctctttgtcttttgttttctacagtttaattgtgatattcctaggtgtatttacctacacttatttatcatgttttatattctctgaaattcctggaactgtgtctgtcattaattttggaaaatttgcacccactatttctttaaatataccttctgcttctttttctctcatctcttgatatttcaataacacatgctaaaccttttgaaattgtcctgcagctcttgggtgttgtgttcttttttagtttgtcttttggttttcattctttgaattta

SEQ ID NO: 175778 - DNA, 450 bp, Homo sapiens
agaattcaaggttgcaagtttattttcttttgttttgttcaagtgttaaatattctactccactcccttcttgtttgcatggttttcgacaagaagtttgatgtaattcttatcttttttcatatatctgttaggtgtttttactctctctggctgctttcaagattttctctttgtcttttgttttctacagtttaattgtgatattcctaggtgtatttacctacacttatttatcatgttttatattctctgaaattcctggaactgtgtctgtcattaattttggaaaatttgcmcccactatttctttaaatataccttctgcttctttttctctcatctcttgatatttcaataacacatgctaaaccttttgaaattgtcctgcagctcttgggtgttgtgttcttttttagtttgtcttttggttttcattctttgaattta

SEQ ID NO: 175779 - DNA, 489 bp, Homo sapiens
ctaacttctgaatcaagaatctcttttgcaaactgaaattaygatgaaactccctattgctttcaagggaccagaacatttttaaagcttgcaagagtgtctatacaccagcttggggaaagcttctcacactgaaagaaatttaaaatgtagatgaaatataaaaataaaagtgaagattgacagcattttatgttattcaacttattgctcacagtcccatctatattattataataagtgtaaatccagaaaatcatgtgtttaatacatgccagtgatgtcacacaaggaatagtgcctcgattcacatttcccatttctagtcctggcctcgaaaacgtctttctgtagtaacaggcaagatccctctagacagcatgctctgccatggcctatgctatgtgcaattattgcttttacgtttgctgacagtgtgggtggactgtaatggttgatttttttgtgtcaacttgggtaggtcatggt

SEQ ID NO: 175780 - DNA, 489 bp, Homo sapiens
ctaacttctgaatcaagaatctcttttgcaaactgaaattacgatgaaactccctattgctttcaagggaccagaacatttttaaagcttgcaagagtgtctatacaccagcttggggaaagcttctcacactgaaagaaatttaaaaygtagatgaaatataaaaataaaagtgaagattgacagcattttatgttattcaacttattgctcacagtcccatctatattattataataagtgtaaatccagaaaatcatgtgtttaatacatgccagtgatgtcacacaaggaatagtgcctcgattcacatttcccatttctagtcctggcctcgaaaacgtctttctgtagtaacaggcaagatccctctagacagcatgctctgccatggcctatgctatgtgcaattattgcttttacgtttgctgacagtgtgggtggactgtaatggttgatttttttgtgtcaacttgggtaggtcatggt

SEQ ID NO: 175781 - DNA, 489 bp, Homo sapiens
ctaacttctgaatcaagaatctcttttgcaaactgaaattacgatgaaactccctattgctttcaagggaccagaacatttttaaagcttgcaagagtgtctatacaccagcttggggaaagcttctcacactgaaagaaatttaaaatgtagatgaaatataaaaataaaagtgaagattgacagcattttatgttattcaacttattgctcacagtcccatctatattattataataagtgtaaatccagaaaatcatgtgtttaatacatgccagtgatgtcacacaaggaatagtgcctcgattcacatttcccatttckagtcctggcctcgaaaacgtctttctgtagtaacaggcaagatccctctagacagcatgctctgccatggcctatgctatgtgcaattattgcttttacgtttgctgacagtgtgggtggactgtaatggttgatttttttgtgtcaacttgggtaggtcatggt

SEQ ID NO: 175782 - DNA, 551 bp, Homo sapiens
catcgtaacagggagaacatacatcactgaagagtctggtgtcttaaaggggcaggtagacaggttgagagtgagaatatgtgggctggtaggtagatttctccatcttcatgcttctggggatacagggctcaggtgaagctcagcaatgtctgtctctccttatctttcatgaccctgcatttttgaagagtactggtcaagtatcttgtaggatgttcccaatttgggyttgtctggtgtttgctcattattagactagggttagagattttggagaggagcgacatgcacatgaaatgccctacacatcatatcattagcagtacatggtaccaataggtcttattcctggtgatgatgatcctggtcacctgattaaggtggtgtctgctaggttttcttcactctgatgttactatggtttccttccttaggcacttttttaaaatatcaattgtgttgcaggtaccaggcaggctctgaagcttcagattataacaacatcagcttgttgcatccaaataattcatacagccccacagggaaac

SEQ ID NO: 175783 - DNA, 551 bp, Homo sapiens
ctgcagtgaccatttaactatgtatttctttatcaaaatatcatgttatacaccttaattatataacattaaaaagaagaatttccaatagattgctatatcttttttttattattattttgagatgtcacccagctagggtgcagtggcgcaatcttggctcactgcaacttccacttcccatattcaagcaattctcctgcctcagcccccagagtagctgggattacaggtgcctgtcactatgccctgctaatttttattattattattttttagtagagatggggtttcaccatgttggctaggctggtctcaaactcctgacctcgtgattcacctacytcggcctcccaaagtgttaggattacaggtgtaagccaccgtgcccagccaattgctatatcattttttatgacagccttaaaactccatctgataattccagcagctctttaatcttggtgtgggcatcatttcattgtcttttctcattcaagtcatgattttattaattcctggtaatgtttgctgcatcctacacatttacc

SEQ ID NO: 175784 - DNA, 554 bp, Homo sapiens
gtgtttgttgttgttgccatacttccctaaacagcttacagcacatagagaaaagtggctggcacaagacatggcttggcatactaccggccctstgctgctctctgatctattttgttctcccgtcaactgtccccactcccaatgcacttaccaggctttgaggaaagtagaatccaatttaatacagtgacttgtccacaattactcagtaaaatgaaaatcaagtcctctggtctgaggcttagatgtaaaacctaaaactataaaacttctagaagtaaacataggagaaaatctttgtgaccttgggttaggcagaagtcttttagatataacaacaaaagcgtaattcataaaagaaatgatagattggatcttatcaacattaaaaatttagctctttttttgaatgtgctaaaatattaaagagtaaaatgagctcaaattacaaatttgaaaatgagatgatatttataaataatatgtctgataaaaagcttgaatccacgatgtataaagaaattttaatactcaataataagaggaaaaaa

SEQ ID NO: 175785 - DNA, 607 bp, Homo sapiens
gattttcatggccttctggaaagagctgtaggtacctgaaacagatgagtgatcatcaggggttggactataaaggggctgcatagggaattttagggtgatggaacttttccatatggcaccatataactgacacatgacaatgtttttttcaaaattcataagctctataccacaaaactttaaatgtatacaaatttaaaacaatcaactagtatgtcatggggaaccaaggttgtatggcataactgcactaaatgggttgggagaaagtttggattatgmtatttggcaatgtactataagtctatagacaaaaaaaattatattcaaacactttaggtggtaaatttgtttcacactgaaatatttgttagcaattctgaaacaactttacatgtagactagattgaaaatattagcaaatatattgtaggtaatgagagtgatgctttttactgtcagaccaagaagttataattaaccaggagggaatttagaatgaagctgcggtaacatactgggtttaggtttatcagtatgaactcatatgcacacacacacagataaatagatacagatttgtgtgcatgtgtgagttaacaaa

SEQ ID NO: 175786 - DNA, 463 bp, Homo sapiens
tggaaaaaaattactgaaattagaataaagcctgcaatgcaattattaacgttttaccaataatcatttcttgattttgataaatattgcgtggcaaccatggtaatgtgagatgttaactatagaggaagctggatgacaggtatgtggagactttccatactttctttgcaacttttctgtacatctaaaatgatctcagaataaaaatattttgaagtattttgcaaattttgtaggtaaaataaggaaagtattgttcttaaaattgttatatatttggaaagtttttatatgtttgctgttgaattcctacttttgtaaaacatttgctcctaccagcatttttcttatctatccacttactacttgtgattgagatgaggttmtgttaaggatgagagaacacagacccaggaatgagaagattccagtcctagctctgtcacttaaatgactgtaa

SEQ ID NO: 175787 - DNA, 561 bp, Homo sapiens
taagcagattctctcaagtgtaacatcttgcaaaactataataaaatgtaacaacgatgttgatgacactgatacaacacttgtaccaccacaagtatccctcatgttgcccttttattgccacactcacttccctcccagcccattccctcctgaatccctaacaaccactaaatttgttcacyatttttataattttgtcatttccagactattatacaaatggaatttgataacatgtaaacttttggggttggctttttcattcagcatatgcttggagttccttccaagttgttgggcctttcaatagttcattcacttacactgctgagcagtattccatgtaatggacacactgcagtttgtttaatcatccaccaactgaaggacatctgagttattttcaatttttggctattaccaataaagacgctataagcatttataaatgggtttttgtgtgaacataagttttgttatcctgggataaatacccaagaatacccaagagccaatttatatggtagttgcgtgtttcattttataataaagtgccaa

SEQ ID NO: 175788 - DNA, 618 bp, Homo sapiens
tacaccacataaacagaattaaaaacaaaaaccacatgatcatcttaatagatgaaccacatgatcatctcaatagatgcagaaaaagcattcaacaaaatccagcatctctttatgatgaaaactctcagcaaaatcagcatacagggaacatacctcaatgtaataaaagaaaatttaaattatcattaaaggaaggagagctcacctgagcagactttagaagaaagagtaaccactggagcatctccacagtgctgatggaaaatgactgccaagccatctcccaagaatgagagcaaatagtcttttagacaaacaaatattgagaaggtttgacttgcagaytctcattaaagaaaattttaaaggatggacctaaggcagagcaaggtaaccctaaataggaggcttggggcacaagagaaagtaaggaacaaataaagtagccaacatatgaaacaatccaggtgaatttgaacctgtatgaggcaacagtaatagtactagtttgtgtgaggttaaaaacatggtatcatttaaatttgtgtaaatggcaacagtggcgaagaagtgactagaaagagttcagaagttcagatactgtaaggcgcttgc

SEQ ID NO: 175789 - DNA, 378 bp, Homo sapiens
taccatgtttatgcattggaaggctcagtattaagatttcagtcctttactaattgatctggagattcaaaataatccaaagtaaaatccccggaatctttttgttgttgttcttgttgagaaactgacaatttratcctaaaattagatggaaatgtaaagggtataaaataaccaaaataattttgaaaaattagaacaaagttgcacagattatatgttttcaagactgttgggaatataaaatggtaccacattgtgaaagacaattttgctgtctgttataaagttaaacatttacttaatatacaatccagaaactttattcctaggtatttacccaagagaaatgaaaacatatatccacataaaatttgc

SEQ ID NO: 175790 - DNA, 588 bp, Homo sapiens
actcctcagcatggtccccgggacttctgacgacccccttccttgtcatcctcccatgggactgtccatcttggagcattctactctctgcatcagttcccttaggaaagccactccttctcatatacatttggtgaactctcactagacttggggatcactccaagatggagccactgcagcagttgccaaccctgcctggtgctctgcaggagcaggtatctgtgcttactgtggccagagccctgagctcccctcatgcagcctctccccgcccctgccctgcctgggagctgagacctcagagtttcaggactccatctcattcatttctagaagtaaagttgtcactaggaagtcatgtgagtcatgtgagctttcctcagtgaaggtttaagggggaaaaaaccaaagagggasagaaaaggggagtatggagggatagagagagaaggagagaagaaagattgattaaatgtgaatctttgaatataaatcttagcaacaaatagtattttatctgcataatatttaaaattaaaaatgatctatgtaagaaacatgcagatgccaatcaaataccaggat

SEQ ID NO: 175791 - DNA, 308 bp, Homo sapiens
gggagctacaattcaagatgagatttgggtrgggacacagccaaaccatatcactaacttcatggaaagtggccaagatagtacaaagggatcacaggtacccttcacccagttccccccattgatgacatcttacataactggattacagtatcaaaaccagtagatgacactggagcaatccatagagtttattcagattccaccagtttcgtgtgcactcatgtctgtgtgcactgatagttctataaagtttcatcacatatgtagatttatgtaaccactgctgccatcaaggtacagaactg

SEQ ID NO: 175792 - DNA, 608 bp, Homo sapiens
gtgtattaaaaataagttttgaactttcctagaaaatttttatggtggtctaccgttgacatttttttgtgtgtgtctacacaattcaatattactcagcaataaaaygaaagccactactgatacacacatgaatgtgggtgggtctctaaaacaaggctgagggaaagaagccgtgaagtcttttctacatgtatgcattggttgggtcgttggttggttggttggttggttggttctgacaggaagcatgttgttctggatccaagacagacctgatgattcacagagcatcttgtgtcagttccccatgcagcccctccccatgggacgatgcaagaagagcagtgggcacctacacatgtgatttggtttgtgccacaagaaggagctccaaatcataaatcttgcagcttatgtgggtggctggtacagctgcctggctccccctctggaggaaagagagaaacctggtttttttgtttttttttttttttgacataaacagatcctctcaggtgggaaggagaagccttcaggtccattgccctttggaatgtaagctaatggctgcagagcagatgaaccatagtgtttctggaataact

SEQ ID NO: 175793 - DNA, 608 bp, Homo sapiens
gtgtattaaaaataagttttgaactttcctagaaaatttttatggtggtctaccgttgacatttttttgtgtgtgtctacacaattcaatattactcagcaataaaacgaaagccactactgatacacacatgaatgtgggtgggtctctaaaacaaggctgagggaaagaagccgtgaagtcttttctacatgtatgcattggttgggtcgttggttggttggttggttggttggttctgacaggaagcatgttgttctggatccaagacagacctgatgattcacagagcatcttgtgtcagttccccatgcagcccctccccatgggacgatgcaagaagagcagtgggcacctacacatgtgatttggtttgtgccacaagaaggagctccaaatcataaatcttgcagcttatgtgggtggctggtacagctgcctggctccccctctggaggaaagagagaaacctggtttttttgtttttttttttttttgacataaacagatcctctcaggtgggaaggagaagccttcaggtccattgccctttggaatgtaagctaatggctgcagagcagatgaaccwtagtgtttctggaataact

SEQ ID NO: 175794 - DNA, 542 bp, Homo sapiens
acaacataagaatgagtcaggtttagggagctaaggttctgcatcatggtgttacatagctaaggcttcattgagctcttcctttatattggtgtgtagaacactcaaaagtaatacaacttctcttttcctttttttctttttgccatatgatattaaaattgatagaaaaagtgcagcttctctacaattgcaacatggagttacagaagaatgtttaagcactttttttgtcttcccaatagccactgttgctaaagaatggaaattaagccatatcctytagcaacagagtgatacagctgagcaaaatatttttaaaataaatgtttttcttacattataaagatgacatgttgttgtttgggaacatttagaagatacagaaaaagtagaagggaaaaatatcaatctacactcaaactcttgaaaattggtttctgccaaaaggcccataattcttttaaatgccttttcctcaccccagtgatttcttcatttctctgctttttagactcctctatctcatgagcccagaaaaa

SEQ ID NO: 175795 - DNA, 540 bp, Homo sapiens
ccctctggctgtctagagaaaaggatgatgcaagtgaattggcccaaagcaaggtgcagaggacaacacacaggaatggcaaagtgatcagtgattgatcgccacctgtgctggttttatagttcttcatgagggcatcagtgacaactaagagaaatggcaaagcaatcagtgactgataaccacaggctctggttttttaccccttcatgaggatctcagtgacaactgaaagaaatgacagagtgatcaatgattgatarccatgcgcatgggctttttatctcttcatcaggacgtgagtgacaactatgcgaactggcaaagtgatcaatgattgataacgatgtgcgctggtttttttaatctcttcatgaggatctcagtgacaactaagagaaatggcagagtgatcattgattgataaccacatgcgctggctttatagctcttcatggggacctcagggaaaacatgaggattaatgggtgttatagacggatgataacccatcctgaaacgcctaggatgaaaccctac

SEQ ID NO: 175796 - DNA, 591 bp, Homo sapiens
atggcctcagcaggtacacagttccacaggttgtgcactgcaycacatcaccatggatatggttagtataccatgtacgtcatcctttaggagacagagaaaattaatgacctaactaaggagaggtggacagctgggtaccattagcagcagcctggaactttagagtcaagttcgcagagctctgagccccatttgataccaaacccatacgtatttgctgtcatgcacatatttcctagatagtataaaggctttacagccagcgaggtgatataggcccaggatccacataaatgtcactgctcacccttgaagagatctccctaacatcagctcactctgtctacatcctcctttctgatctcaggaactttaagggaggggaagataaacttggtgcttgggaatacctggtgagggtatcatcgaagtacaatggagaaagtagacaaaaatacttaccaggcagccaaaaggcatgaaagagcttcaagacattatacctctttagcaaaaacgtgcttccttccacctcagataaatggggcaggcatcatccacgtttttaaaactacacctatttcagaa

SEQ ID NO: 175797 - DNA, 591 bp, Homo sapiens
atggcctcagcaggtacacagttccacaggttgtgcactgcaccacatcaccatggatatggttagtataccatgtacgtcatcctttaggagacagagaaaattaatgacctaactaaggagargtggacagctgggtaccattagcagcagcctggaactttagagtcaagttcgcagagctctgagccccatttgataccaaacccatacgtatttgctgtcatgcacatatttcctagatagtataaaggctttacagccagcgaggtgatataggcccaggatccacataaatgtcactgctcacccttgaagagatctccctaacatcagctcactctgtctacatcctcctttctgatctcaggaactttaagggaggggaagataaacttggtgcttgggaatacctggtgagggtatcatcgaagtacaatggagaaagtagacaaaaatacttaccaggcagccaaaaggcatgaaagagcttcaagacattatacctctttagcaaaaacgtgcttccttccacctcagataaatggggcaggcatcatccacgtttttaaaactacacctatttcagaa

SEQ ID NO: 175798 - DNA, 591 bp, Homo sapiens
atggcctcagcaggtacacagttccacaggttgtgcactgcaccacatcaccatggatatggttagtataccatgtacgtcatcctttaggagacagagaaaattaatgacctaactaaggagaggtggacagctgggtaccattagcagcagcctggaactttagagtcaagttcgcagagctctgagccccatttgataccaaacccataygtatttgctgtcatgcacatatttcctagatagtataaaggctttacagccagcgaggtgatataggcccaggatccacataaatgtcactgctcacccttgaagagatctccctaacatcagctcactctgtctacatcctcctttctgatctcaggaactttaagggaggggaagataaacttggtgcttgggaatacctggtgagggtatcatcgaagtacaatggagaaagtagacaaaaatacttaccaggcagccaaaaggcatgaaagagcttcaagacattatacctctttagcaaaaacgtgcttccttccacctcagataaatggggcaggcatcatccacgtttttaaaactacacctatttcagaa

SEQ ID NO: 175799 - DNA, 591 bp, Homo sapiens
atggcctcagcaggtacacagttccacaggttgtgcactgcaccacatcaccatggatatggttagtataccatgtacgtcatcctttaggagacagagaaaattaatgacctaactaaggagaggtggacagctgggtaccattagcagcagcctggaactttagagtcaagttcgcagagctctgagccccatttgataccaaacccatacgtatttgctgtcatgcacatatttcctagatagtataaaggctttacagccagcgaggtgatataggcccaggatccacataaatgtcactgctcacccttgaagagatctccctaacatcagctcactctgtctacatcctcctttctgatctcaggaactttaagggaggggaagataaacttggtgcttgggaatacctggtgagggtatcatcgaagtacaatggagaaagtagacaaaaatacttaccaggcagccaaaaggcatgaaagagcttcaagacattatacctctttagcaaaaacgtgcttccttccacctcagataaatggggcakgcatcatccacgtttttaaaactacacctatttcagaa

SEQ ID NO: 175800 - DNA, 424 bp, Homo sapiens
tcatagcaatttttggcttcccagtacatataaatgttatgtttactctcaactgtagtctattaagtatgcaatagcattacctctaaaaacagtatactccaattgaaaataccttattgctaaaaaatgcagatacagagacaggaagtggggcacgtgctgttggaaaaaatgatgccgagagtctggcttgccacagggttgctgcagrccttccgtttgtaaaacacacagtatttgcaaagcaccttaagacaaagtgcagtgaaggaggtccgcctgtatgtgtccacctgccttattataaaaactagactcatagatgacgaggaaaagcaagatgcccttgttaagataaatgaaccaccctggtggaataattcacagtcctgtgatggtcagaggccgagcaaaaacttgc

SEQ ID NO: 175801 - DNA, 525 bp, Homo sapiens
aagctttctgactccaaggagtggctgtaaaccctgctgagtgagtagaactccttaacctctgcagccccctggcctccagcaaggagcagatgatggtgggcattttcagtagtaggtgtttaataaacctttgctgaaccaatactgggctattcctggagcttctgggctatctgaagccaatggccctttctctttgatgtactgtacatacatcatccttcaatatttcatccttagggtagggaaaagagatggcctcactcctgggaaacactgccctggaactcaactcctgagagtgtgcctggctacttcagggcaggcccccattctgaccccaactttcccaccaccaggaaagcctaggcaataagaaggcagatagaagctgggcttggtggtgtgcgcctatagtccctgccacttkggaggctgagctgggaggattaattgagcccatcaagtctagatggggcaacatagcaagatcccctctttatttaaaagaaaaagaagaaa

SEQ ID NO: 175802 - DNA, 459 bp, Homo sapiens
ataagcctgactcctttggggagaagggcctgtgtgttcttgagctctctcccgccagccagtgctagacctagagtgcctgggagctacctatttttatttttaattaaaaattaaacttttatttttattttatttttattttttgagatggggcgtcactytgtggcctgggctggtctcgaactcttgggctcaagtgatcttcctgccccagcctcccaaagcactggaattataggtgtgagccacctcacccatcctgagccacctcttgacctctccccacctccccgggaggcccctcagtctcactcccagctccagcatcgtaactcagccctggggtcctggggaaggggagcacagcacctgggtggcacaggaagtagagccccccatcctcagccttgtttctggaggcccctggaatggggaatcccctcctagtacgaatag

SEQ ID NO: 175803 - DNA, 561 bp, Homo sapiens
ttccccaagagcttccagaagaaacacagcattgccaacccaatttagagttctgacctctagtattgtaaaataataaatttatgctgttttatgccatgaagcttatagtaatttgttatagcagcaataggaaactaatacgccattgtaagcctgtgtatttgattaattttttttcctgtataatttttttttgcatttaagtaaatattctgagaaggggtctataggcttcaccagatgtaaaagggttgtggcacataagaggtctgtcccatgccattgttaggatcctgttggcagtggtgggagtgcctgaaagcatttgggttggaaaatccatcccagagaaccatgmccctatgtggtgggtcacaagatctgaactggagtgtgggagggaggggccagcaggagggcaccctgtgaatacacccaggttcaagctcagggttctgctgtctggtcctgccagcctggcctggcttggccttggaagggctcagtggccctggggaatccagtgctgtcttgatggagtatactataaacagagtt

SEQ ID NO: 175804 - DNA, 534 bp, Homo sapiens
cagcattgccaacccaatttagagttctgacctctagtattgtaaaataataaatttatgctgttttatgccatgaagcttatagtaatttgttatagcagcaataggaaactaatacgccattgtaagcctgtgtatttgattaattttttttcctgtataatttttttttgcatttaagtaaatattctgagaaggggtctataggcttcaccagatgtaaaagggttgtggcacataagaggtctgtcccatgccattgttaggatcctgttggcagtggtgggagtgcctgaaagcatttgggttggaaaatccatcccagagaaccatgaccctatgtggtgggtcacaagatctgaactggagtgtgggagggaggggccagcaggagggcaccctgtgaatacacccaggttcaagctcagggttctgctstctggtcctgccagcctggcctggcttggccttggaagggctcagtggccctggggaatccagtgctgtcttgatggagtatactataaacagagt

SEQ ID NO: 175805 - DNA, 601 bp, Homo sapiens
gagcctcggtgaatgcccctttgtatagtgcagctgccattcagttcatcaggccaagccctgtcctatttggatttggcttgctttccttctcagactgcccataatgctctcattttagaatgccttgtgctcaatcccatctgtatccaaatatatctcccaaacaagccttgactggctatatgacattttcacatgactaactactttgtttgggattaccaaaactacctgtcaacatgaaaatgtcatcaaagaatatcacccattaagccacttactgcaactaaaatatgaactcaggtaaaattattggtgtaacaggccaggccttacctagggagaatggaactttcaacagtattttctctgtaagcatctggtcaacctagaagcagtctcagaagactatatttttaaaattagggttggcacaamgtctaaaaggtgactagaaagaatcatcagatgacagatgtcccatgtcttctaagagctcaaaagcactgtgagaaatcacagaccttgggattaaacctgagctttaatcttaatttgcagtgtgaccttggacagtttaactgtttgtactttattt

SEQ ID NO: 175806 - DNA, 429 bp, Homo sapiens
acctataggcactcccaagcctctctgcatgaggctagggactggtcctttaatggcagcccagacttgaggggtgaggtccagccatgaatcttccccaaaaaggcaaatctttrggaggctgtgttccatcctagggaggctgagtccaactctcagcctctcctctgcctttggactgccctgaaatggtagaaaatgaaactttccaggaagcagctggatgggaacaggcaggaaaagacaggctgcgtctcccgtagtgtctccctgccctttgggacatagcaggtggcagagacttcagaaagaagcccagctggtccgcagcttctcagagttccctgggatgcaatggaagcctcaggatagaggaagaacctatgtgatcacccaagcctctcctctcaagagaatgccaagggcagg

SEQ ID NO: 175807 - DNA, 561 bp, Homo sapiens
ataatgctcggtggagaaaacacagaataaagttcagggccaccgaggcaggtggaatgtgaggaacaggttataaaacaagaagtgtagagacagaagaggagctycagaaatctgtatagaagttatcttgagcctgtggccaaatactaagttgtacatgctcagattccctaaagctctgcagaaaatagctactagaagctacatgggattggggctgcacaactctggcaaacactggaggtgtgacaagccatagtaaacaccataggcatccagctgagactcaggcaaggccagagcatttaagaaagcttaaaagtaagaattaatagattgaagctgatcagctagtaaatacatagaacaaaactcaacatccttccaatgaagttaccacaaattagaacctgcagcataatatctacaattttcagaaagccatcaaaatgactattccaagatatgctggacttaccagataaggactataaaatagctattgatattataaatttgttcaaagatttaagaaaaaataaaacaaaaaatatgaca

SEQ ID NO: 175808 - DNA, 547 bp, Homo sapiens
gaagccacatcccaagtcagtagcctgccacgctggtttctagtcagatatgtctacatattmtttatttttatatctttatgcctcttctagtctctctgtcttgaattcctatacattcttgggcatgtagaaaaactcaagtagtctggagtccaaagtcactttctctatgtagaattccttagtataccctaaaaggaattgattgccacctgcctatcccacacttcctttagaagttgttcatactgctgggcatgctactgtatgtgctctggagttaggcctggattcccatctctgtgtgatcacttgctagatgtttaatattgagccagttacacagtctttctagatctctgtttcctcatttgtgaaatggggaagataaagctgcttaccttatagtattgttgtatataagataatgtatagagactgcctattctagttctggacatataatatgtacacggcattagtgctgttgttgttgtaattattattattacagtgggatgtagtattcctttagcacccattg

SEQ ID NO: 175809 - DNA, 547 bp, Homo sapiens
gaagccacatcccaagtcagtagcctgccacgctggtttctagtcagatatgtctacatattatttatttttatatctttatgcctcttctagtctctctgtcttgaattcctatacattcttgggcatgtagaaaaactcaagtagtctggagtccaaagtcactttctctatgtagaattccttagtataccctaaaaggaattgattgccacctgcctatcccacacttcctttagaagttgttcatactgctgggcatgctactgtatgtgctctggagttaggcctggattcccatctctgtgtgatcacttgctagatgtttaatattgagccagttacacagtctttctagatctctgtttcctcatttgtgaaatggggaagataaagctgcttaccttatagtattgttgtatataagataatgtatagagactgcctattctagttctggacatataatatgtacacggcrttagtgctgttgttgttgtaattattattattacagtgggatgtagtattcctttagcacccattg

SEQ ID NO: 175810 - DNA, 511 bp, Homo sapiens
tttccttctgtttgttcatgaaggatcttcatgaagactatactaatattttagaattgctatagaacatgaaagtaattactcatgttgatttttgtaaatagttgaaaagacttaaatgagaaacaaaactcacaagtgattataatttcacttagaaagtgaacagtgagaatatatccactcagcagttaatagagagaacgagagttttatataactatttaaatgaatgggaaataaaatatctttttttaaagagagttatggggaaaacacagaccatgaccccagcttctgcagcamcactgtgggtgattctctggagaagcactggaagccaagggatgccactgccagtgctatgtgctgtcttccttctcttctgctttcctaatgcagcatgtgtagttcttattggcaaattgtaagggccaaggagttctggaaaatgaatttccagttttcaatcttgaaatgaagaagctaacttgcatcagacagtccacat

SEQ ID NO: 175811 - DNA, 420 bp, Homo sapiens
ttaggaataaaatttaactctgatgaattttccaaaatctcacagttagaatgtaagtaaatgaaataatatctatacaaaactacctaggatgtgtttctattgtgtttatggcaaaatttatctggcttttaatctaatacaaagcaaagaagagggagtcttagggttgacataaaaagattttcctacataggaattttgagtacatttaaatgaaaagtttatatacaaaatcctggagacaaatacrtatttagcaatcactcccacctttgctgtagcttttaccctcagtgttaacaaataacaaaaataacaaatggcattatttgttttcttattctaagccctgctgaaatttttaaaatggcttttttttttcactgtgtgtgtaaccatgagctgaagaaatgaatt

SEQ ID NO: 175812 - DNA, 473 bp, Homo sapiens
gcaccaaagtagtacacttgttccagttgctgaatctgtattgacacattatcactcraagtccatagtttagcttaagatatgcttccagttttgcacattctttggcttgtgacaaaagtagaatgagatatattcacctgcctagtatcatacagggtagttccactaccctaaaaatcctctgtgctctgcctattctttcctctccttccctaacctctggcaaccactggtctttttaccgtctgcgtaatttccccttttccacaatgtgatatgcttggagtcattctccatctctttacatttaatatatatgtgtctttatatttcaagtaaatttcttatagacaattgataattaagtcttatttttaaatccactttgacaatctctgccttttaattactgtatttacatggttgaattttaaagtgattattgatataattggattaatatctacaat

SEQ ID NO: 175813 - DNA, 528 bp, Homo sapiens
caatttgaaacttcctctgcattttcctatgcaaaataatgtcactaaggtttcaggataagcaaaggtataagtttgtaaccaaaggaaagattatgactccagacaggcmtgaaatagcaattgtgatagtgatgtcttgaggagatgtatatttatttaccagtagatgtccttaatccagatttgagataagaaacagaaagtctagttactggcaactgatacttgtttgtaataatgatttcccaagtgttatttggcaattagttaatttttaacatatcattgcttctaacagaagtcattcatttctggaggcaaagaaactgatgaaaattatgaagtcaggaaccattttataggaatatttgaatgaagtaggtcaaagtctgaaagttgagaccaactgtgcctgtctgtcctacacagagggcaaggaaggataatgactaggcctgcgggcacgtgcatatggacaaggccacattctgatttagaaaacagtggtgatcgagcaatatgtta

SEQ ID NO: 175814 - DNA, 446 bp, Homo sapiens
taatgcagtcagcaaaatcagacataggcctgcctgcatgtgactttccttgcggacaaatatatgaatgtaaaagagtaactgtgataaataccataaaagagagataatattttaagtgcattaaagggaaacttagccttccttggaatagagaaagtttccctgaggttaaaatttgagctgcaggataatgggatttagttacataactaggagagaaaaaaatttccagacatatgccaaatcatacagtgaagaaagtgtgggggacatgaaaaattagtaaaacaaacagtataactggagttaattgacaaagggaccttatggtaagaacattcaaacaacagcatcaaattctttaaaaaagtatagaaaacataaattattatttttagtaaatgtkggctagattacacagaattatcttcctgttagacaac

SEQ ID NO: 175815 - DNA, 581 bp, Homo sapiens
agatttgcaaacagggaagcatgattcatgtacagaagtggaaagtgtgaagtgaattcaaactgtgttttaagagcttaaatgatagacttactagacaaagactttaaattgcctattaaaaatatagctaacgaactaaaaggaatcatgtctgaaacattaaagaaaaaaagtatgagaatgagatcttaccaaatgaasagcatcaataaacagatagaaataataaaagaaaccaatggaaattctatggataaaaaaatacaaaaacttgaataaaaatttttctaaaggacttcaacacatgtgaattgacagaagtaagacttagtcagcctgaagatagttcaaatgacaaaatctagcctgaggaacagaaacaaaaaagcacaaagaaaaataaacagacctcaataacctatgagacagcatcaagcttatgaatatacaaatagtagtagactcataggaagagtagagagataaaaggtagaaagaatctttgaagaaataaattgttgaaaattgtccagattaaaaaaaatattctatgcatcccagaatttcaacataaacca

SEQ ID NO: 175816 - DNA, 541 bp, Homo sapiens
taactcttggacatagcagtaaaagatcaagaactacttaccaaacagtatgagggaagataattacatgtaaatattaaactggatgaacatatcaccatctcattagaaatatttttcttgagcatattgttgtcttataataaggagcaagaactctgctagtaagtttgtgtggagagtcaggtttaaataaaaatcattcctctactgaaagtattcccattctgagataattgtttgtttatttttgctgctggaatatttttgtgagtccagagacatgccagatcaacwattagaattctgataaagacatcaatgaattctcattttgtttcaaattctatactcagaaggattaattatttctattttcagtgctgcctgtattatcaatgtgaaggtatttcaactggaaaagaagcaatatggtttacactctatttttaccttgttgacattagatttctgccatgggaataattatattttagtcatatggctataaaattagaatgaattagaagttttaaagtta

SEQ ID NO: 175817 - DNA, 587 bp, Homo sapiens
aacataaaatacacaattttattgaacacagtataattgaagttataggtcataactttaattagttaaggcatatttttgtttttttcgtggcatataaaatacaaaatctataatcagtctttagtcataccatagaataattgatctaatcctaaaaaatttggatttcatgagtttttttgattttctgttgttgtttttgcatatacttattagttttaaagtcctgtaaatggttacaatgtgtcatcttaaactagcatctttgaacgtcatgtattgtcatattgcaacaagtgcaatgaattcacaactaagactcactgagggctagaaaattgttacatgctctttgccttccaaaaaagacaaaatccaaaactcagtgaaataaaacaaagagaatgcacattattgcttctggattctaaccatagatagagttcagactactggtcagctaccctcaccttccaaagaaaagaaaaaaagaaacaaaagaaaggaacactgtcacattttattaagtacatsgtaggtgcttaattagtaactttatagatgaaacaaatcaaagaataata

SEQ ID NO: 175818 - DNA, 604 bp, Homo sapiens
agtgtcccttggcaaaatactagtgtgattctgggtttctgtttgtgagttttcgttttctcaaggattactactctttgctgcctcttgttcagtgccttatacaggtttttaggcatttttggcaggagggaaagtctgctggttactctgccatatttagaactaaaagtcaattattggctttttaatgaaaatcacagaagtacaaataagttctcactgatggaattagagtatatgtatatttcaatttgccagaatattgaagagaattttcctaccctttgcaacatcccatcacaataccataataatatgaacagggagtaaatatctagcaatccctgtaatctgttcccttaaagaaagtaatctagtctcaatccctaaatagcccygtgtctctgctggtaattggaaacttggctagagtctttctgcctctaatatatttaaattcttctcagaacactataaagaaccaggatctaggactccaccaaccttacatgtgcaaatattaactaggatctaggattccaccaaccttatatgtgcaaatattgtataactttatctaaaacttcttattatttcatta

SEQ ID NO: 175819 - DNA, 519 bp, Homo sapiens
ttattttccatttgttttaattttcttttaagttcatagtccttgtttaaaaaaatatatctgtatgtttattatgctttcattcagtaagttagggatttcatgtaggtaaaataattggtacttagaatttacagttctaggtcattttagcagacataacttatgtgaaaacttctttgaaaggtttagccctgttctctagacttctatattgagacttgaaattcctagctaaaaatgaaatatgactttgcttgtcattatcttgtgtacatgtttctttcaagagccttatgtagagggttatttgttatttatttgaggttacatttataatgtatatagaaatggcaccgagtctaataagaaaaggaacctgctaaggagtgagggaaacatgttttagtcattttygtttcaaaacttagtctactttgagaatatacacagtttttcaggtaatgctcaatcttttggaaaataattgttcaacctctttcatattttattctatcc

SEQ ID NO: 175820 - DNA, 543 bp, Homo sapiens
ggtcacatgggggagcagtaatgaggcactcctgtttttctcaagtggtagggtatcagtgtaagtcttgaattgagctgaaactctgatccccaccgataatgaggacccaaccctgggttcaagacagcaagtagagagccagacattccacctggagctgayagaaatcaggaaaattcctcaccctttccctgtaggagtggtgtcaaaaagtttaggatccagggttgggttgtgaaccttacccgatcttccttcttctccccacctttctttctttcttcctatgtctcttttatatataatatccaggatttggggttatacttagttaaaggaatagggaaaagatatctaattgatctttctataatcagatgccccaatattttaaaaattaatttctaataaacttataggaatatgtttctagaagagacaagtaagtcaaaagtcaaatattatacagcatcttcttattcaactcataatgttactccacatgactgaaaacctgaataggatttcaatagctttttc

SEQ ID NO: 175821 - DNA, 568 bp, Homo sapiens
actcacttccaaattcgtatgttgaagccctaacccgcaatgtgactgtatttggagataggacctttacgagaggtaataatggttaaatgaggtcatagggtggggcaatgatcctataggactggtttccttataagaaaaggaagcaatcctagagagccttcgctcagaactatgttttataactcaatggaaaaaaatacttttataaaaagtcaatgctattttataattrtttgctttttaatgctagatacttgcatatttattaatttttgttttatacttttcagatatatctatgtggtatcatcatgaataatggctgattctgaatggtttttagtaattttgaaggaagtatatttttgagggagaaagttttgcaatcactgagaatatgtaacacagtatttattttctctgaaaataaatccaaatgagaatttccaaatatgttgggccaacatcatgttaaaaaatgattaaaatccatgacttggagattagcccatattgatatttgagcaatgcataggagttggagaaaggaatctgtaaagcc

SEQ ID NO: 175822 - DNA, 509 bp, Homo sapiens
actgagaaacaaatctacgcacccagagtgaactcatttttgacaaagttgtcaaaatcatacattggggaagagaaagtctcttcaagaaatggtgctgggaatactggatatccatatgcagaagaattaaaatatatccatgtctcttgccacatacaaaagtcaaatcaaattaaaatatattaaagacttaaacytcagacctcaaagtatgaaactactacaagaaaacattgggaaaacttttcaggacattggtctgggcaaaaatttcttgagtaatatcccataagcacaggcaaccgaagcaaaaaattgacaaatgggatcacctcaagttaaaaagcttctgcacggcaaaggaaataataaaaaaaaaaagtgaagcgataacccacagaattggagaaaatatttacaaactacccatctgacaagggattaataaccagaatatataaggagctcaaacaatcctaaaggaaaaaaaaagcctaataatccaa

SEQ ID NO: 175823 - DNA, 509 bp, Homo sapiens
actgagaaacaaatctacgcacccagagtgaactcatttttgacaaagttgtcaaaatcatacattggggaagagaaagtctcttcaagaaatggtgctgggaatactggatatccatatgcagaagaattaaaatatatccatgtctcttgccacatacaaaagtcaaatcaaattaaaatatattaaagacttaaacttcagacctcaaagtatgaaactactacaagaaaacattgggaaaacttttcaggacattggtctgggcaaaaatttcttgagtaatatcccataagcacaggcaaccraagcaaaaaattgacaaatgggatcacctcaagttaaaaagcttctgcacggcaaaggaaataataaaaaaaaaaagtgaagcgataacccacagaattggagaaaatatttacaaactacccatctgacaagggattaataaccagaatatataaggagctcaaacaatcctaaaggaaaaaaaaagcctaataatccaa

SEQ ID NO: 175824 - DNA, 530 bp, Homo sapiens
ccacaattaaacccttgaataaacaaagtcacttagataaataccttattttcctctggtttttacttttygtacattacctaaaaggaaaccaactttctcaagccattctcattaactgtccctagatgtcaccttaatgaaaatatccaccagggccttcggagttttcagggcataaccattaagtgaaataatgagtgacattctttacgagggcaatgtaatgatactaatactacatcctgcatgaaattaacacatctaatgtggcacacattgtccaatactaactctgcagattgcaatgccccagtatcaaaattctatataacaacaacatcaaaagatgtttacatctttttcggaaactgaaatcactaattctctgcattatatcagatatcccaattttccagtaggcagaaaaatgaatatagaaccggttttatttcaccatatcagtttcattttaacttttggctcagtcagctttatgtcagaaatatctattcctactccatttgact

SEQ ID NO: 175825 - DNA, 340 bp, Homo sapiens
taccaccttgattctgagcaaaaacatggaaataaacataaaaggaacgactaaagagagcaaaagataggtgttcttcctaagtgactgcataaagcatggtcacaataatcttgaggaccttctattggattttccctgaaaaaaaatatggttttctgaactctaagttattccaagagtgataagaaagataatgagattgtttgcacccttcctctgacatcctagcaatcttatttatgagaagtctgattacaaaaacaaagcaaaccatgacagttaatcccaagrggaaaatgaatggataagtgtatataaggcatctagtgaagttttt

SEQ ID NO: 175826 - DNA, 741 bp, Homo sapiens
aggctagtctctgggagtgttagtcctcagcccattccagaggtccagaagaaaatacagatacacgcaaagtttgcagcatgcctctacctccaccaactctttcagccagagggcagctggcagtggaatgcgcaccattgccagggctaagcgggatccagaccttgcatccttgccctaggcttgagcacctgtcctccaccatggcccagccctcagtccagcaacaccctctgatacgtggtgagggtgccctttttcctgctaggctgccctccaactctagtcaataggatgagtccagagccctgaattcctgcattgcatggccctttgctgtattaacccccatgtctgcctggaactagagggtatccctccccycagttcagtcttaccagagtcattattttcagcttctattttggtctatgtggaaatattctttgggcaatgccttaggtttgtttgccctccacatttcaggggtctctgcagaccaaatttggagcatggcttctggctctgccatttactaaccccatgatcttggccatggttgcttcagctaataaaagaggggggctccaattgtacctgcttcagataggttaaatgagacaatgcatgtaaagcaccagtgcctggcgcatggagagaactccacatatgcaggtgactcttagtattgccactgtctccagtagcagcagccacagcttgtttaccaccccacag

SEQ ID NO: 175827 - DNA, 484 bp, Homo sapiens
tccacctcactgccttgcgtccagcctcctgggccttcagtgggcctgggccatgtgtggtcaggggaagggrgtatgtgatcatgggaacttggtgtgtcttcttgaaaggagaagtgcagaagagacagtctgacaagcggattcggtggttcctgtttctgtctgggctctgcatcagttgtcctcccttgctctctccctctgtccctcctctatgcaggcattaacacccacagcatgcagacacagggctgcaagatgcttatttattcattgagagcacatcagctgattccttctctatctgcctggaggaggcaggtcaagatgtgccgacctgtgccctgtcactcctgggagctggatttgctggccatacagatatccacaaaaagaaagcagaaagaagattttccttaggtaggagagtaccccggagatatgcataaatgaatgcaatgtaatttgcaaagaaaatgca

SEQ ID NO: 175828 - DNA, 621 bp, Homo sapiens
aatgctcccatgaagcaagaataagacaataagaaagaaaagcaatgtacatacatgcaggaactctcaggtaacagaaatgatcactggaaattaaaaatttgattggagaaatgaaaaagacaaagagaaaggaagtttagagataaagatgaagaaattttttagaagataaaatatagtgataaaggaatagaaaacttgggggaggggaaaacaggtgaacattagaggtctaatccatgaaaggtccaatatctaaataagaggagttaatacacagacgaaaaggagtagaggaaatcaaagaaagaactaaaaaaaaaaaaatcctaaaattaaagaacttcrtttttgagatggataaaatgtaagaatatgggttcaaaaaaagcttctataaacgttgatagagagacaaacaacctaaaataaacaacacacataatgaacaggtcatctgtaaagaaccaagaatcatattcatatcctcttcatactcatgctcacaccaatacccacacaataatttcaaaagttaataaccccccctctccgaaatacagaattaaaggtataattaaaatcagaattaaaggtacaattagcatatacaaagga

SEQ ID NO: 175829 - DNA, 474 bp, Homo sapiens
cggaattcctccatctgtaactccagttaattttatatacagtacaagaatgcttttatagataaatggatgaaccttaccaaaggtaagttagggttactgtggccacagtggggaagttttaattcagataaagtttttcaattttgaggcacattagaaaagcaaaggttaatttcaaaaggtacagaaaaagcattaaataaaattcaacatcccaaggccatatatgacaaagccacagatagcatcatacttaatgggaaaaagctaaaagccttttctctaagatctggaacaagacaaggatgcccacttycaccacttttattctttatagtactagaaatcctagttacagctattagacaagaataagaaataaagggcatttgtattggagaggaagaagtcaaatagtccttgtttccagattatatactcttttatttagaagaaactaaagaccaccaa

SEQ ID NO: 175830 - DNA, 442 bp, Homo sapiens
ctctgtgaatatactaaaaacttgatgccttctctgatgaattctacccaacatttaaaaaagagttaataccaatccttcacaaactcttccaaaaaatgaataaggtgggaacatttcccaactcatcccatgaggctagtattaccctgatgccaaaaccagaccaagacatcacaagaaaaaaaaaaaactgcagaacaatatcgcttttgaatatggaggcaaaaatcctcaacaaaatactaggaaactaaattcagcaacctttaagaaggattatataccatgactaactgaggtttattctaggaatgcgaggttgttcaaaattcaaaagcaatcaatgtaataaaccawatcagtagaacaaaagacaaaaacagcatgatcatctaaatacatgtagaaaaagcatttgacaaaatctagcaccctttca

SEQ ID NO: 175831 - DNA, 524 bp, Homo sapiens
aaaaacctgaacaagacataaatgcctatttccaccacttttattcaacatagtamtgaaagtcctagccagagcaattaggcaagataataaaataaagtgcatccaaattggaaaagaataagtcaaatggttcctctttgcagacaacataatcttacatatagaaatacctaaagactctaccaaaaaaaaaaacaacaacaacacctttcagaactgataaatgaactgagaaaaattgtgggatacgaaatcaacatacaaaaatagtatttctatatactaataacaaattggctaaaaaagatttcaaaaaggcaatctcatttataataattatcaaaaaaagacttaggaataaatttaaccaaggaggtgaaagatctctataatgaaaattacaaatcactgatgaatgaaattaaaaaggatgcaacaaactaatacatgaacagaaaaccaaataccacgttctcattcataactgggagttgaacaatgagaacacatggacacagcga

SEQ ID NO: 175832 - DNA, 642 bp, Homo sapiens
acactgtaaaactactggaagaaaacatagggaaaatgtgtcacggcatttatctaggcaaatattttatgtgtaagacttcaaaagcacagacaacaaaaactaaaatagacaaatgggaccatatcaaactagcaagcttctgcacagcaaaggaatcaacagagtaaagacacaatctgtagaatggaaaaaagtatttgcaaagtagacatctgacaagggactaatattcaaaatatataagaaaatcaaacaactcaattgcaaataaaattcaaattgaaaaatgggcgaaggatctgaataaacatttctctaaaaaagacatacaaatggccaagtatacaaaaaacacttctaaacrtatcatcagggaaatacaaatcaaaaccacaatgagatattatcttaccccagttagaatggcttttatcaaaaagacaaaaaaaaatgctggtgaagatatggagaaaagggacatcttctacattgttggtggaagtgtaaattcattacagacattgtggaaaacagtatgaagttttctcaaaaaaatatatagaactaccatatgatctagcaatctcaccactggtatttatccaaaggaaaagaaatagatatactaaaggaatacct

SEQ ID NO: 175833 - DNA, 481 bp, Homo sapiens
atgccaagtcattttgcagtctggttctgaagttaagtgatgctgaatagaagctccttatgtgtttttggttcttgagctyttgcctaaaataagcaagtttgatttcctcttgaaaagtatcaggcagatgaattctaagagtataaaacaggtgaataccacggtgtatatttcattctgctgtgggggaaaccactcttacacttgcacaatgggggtggttggggatgaggaaagtctaatccataataaactgaggatgaagaatacattagtggaaaaaatggcagaatggagattgggtcttggaggtgactgtgttcacactcaatgggattgatatcatattcttggccattaactgctagatgccttacacactctactggatctgaattaatcctgatttagcctccttcctccttgacaagaagagagagatatggacatttctaatgcaaaaatgtgttatgatctt

SEQ ID NO: 175834 - DNA, 654 bp, Homo sapiens
ttcataactgtgtgtgggatcctgacctttttgggtctttagtatgcataatgtaataatcaagcttactcagaaacactgaagttttgtaggcatttcttattttattaaatgtacagtgttttctaattttaaaaccccagtgtaaattcataaaggtgcatcaggctgccattccattcctgtttgtgactcctgagaacatagcaggattctaaaactccagccttgttgatggaacaaaaaatgctttttcctaaaaagtaaatatggcttcaagctctgaaataatttctctagtgttgcccaggaatttatgagggaaaaaatagattcaaaaatataatggtatcttatactatacagtgttcttttaggtatatagaacatacatgcatatatataaaacatatatatattttatatatatatattttatatatatataaaatatatatatgttatatatatattcacttttacaaaatttgaaagcacgcctgagtttggcagggcttacyctaaggtgggcagacactgcttccccattaatgttcccatcctgatagccagagtagtttctaagacaagaatttcttttactggtgatgaacagttttggtacatttcaagaggaagatttttttcttcact

SEQ ID NO: 175835 - DNA, 629 bp, Homo sapiens
atgaagggaagcctaggctcccccagtccccagaatttttccatcccggtctttgcagataaggctgattagagccgttaacctttcaataacgtaacctgatattttacatcactaaatttttacaccccacttatcacatcttggtaatgttttgtaacactgatatcttacttaaggctcaacacacttgtaagacattctcacatgttaactcagaaaaaccccacaatgttggtatgattattattcctaatttgtcaatgagccacaaaatggtggcaagcccaaggtcacccagaagagtcaagatttaaaaccaagttatctggcttttacatccagctcttaacccaatactattattgcctccaaacatatgatacatgaaaagatgctcaatctgactagtaatcagggaaatacaaaattgcagaattcaatttcacgccatatacagaacgacagaacatttaaaagtctaacaatgaatactatgaggatgtagagcaatggcaatccatacgcttctagasggcttataaattggtacaaacactatcaggaggcattcggaagatatgtattcttaatgacagagcagtttcacttctaggtatacggttgag

SEQ ID NO: 175836 - DNA, 581 bp, Homo sapiens
ttctatgataggacacaaaacttctattatattgaaagtaactttatcaagaaaagattgagaatctctaggatcaaatccaagttaatgtaatcataatcctgcctggatataggagaaataacataaatttatctgaagaacttaattttgtataggaagatttaagagatagtcttatgttatttgaatatgtatactagctcctttgcatccacttagggtgtagaatatagaaagtcacaaggaaacattgctyctaccctaataagaatgaaaggggataacaaattcataggtttgattcagcaaaagagctgaggatgcaagaaaagactaatgaactaaatcaaagtgagagaagaaatcctcagctactccatccttgtagaaaagctggaggaggaggaagctgccacaaaagcaaataagaagaaaatggctgagctttttaacatatttttaaaagccaaataaaggctggtatgatgattcagaaaccctaagtggcccatatacaaagacagtttgctcgtttcagatgttttccaaaggcctccactgagtcattgctggcaaga

SEQ ID NO: 175837 - DNA, 378 bp, Homo sapiens
ttaatgcaagacatattactgttctctgctattccttattttctcattcattttttaaaaattctcctcctcacatactcttcccattacacattctcatggcttcagatcctatctttacactgatgatacccccagatgtatctccacccataacctctctctgtgtttaaggaccaatttcttctctttaatacctaatcagatcctgctcagcggtgtccccatctcatccragatgactcctgaagtcacattgatccctctttcctctattatgattgcagattcaaggtaactaggcctaaagttatggacaagtggatgttggttcttatttccccagtaagactttaagtttctcaagaccgtatctta

SEQ ID NO: 175838 - DNA, 548 bp, Homo sapiens
acaaaccacacacatatcacacacactccacacctatacacccccgcacataccacacacaccccacacgcaaaccacacatcacatgtaccacagaccacaaacacataaagcacatatacacacacatcacactcacctcccatcccgctcaccttaaaccctcccacacaaatacagccattcatttattcagccaacatttattaagtgcctattttatacaaaacacaatcttagatgctgaggatacaaagatgaataaaacatagtttttatactcaaggagcttgaaaactagcaagggaggaaaatgtatacctttccaaagaatttattgtagtttattgtaatttcttgttttctcctctgtatttctcattggattgtttggtcccctgagacatctccttgaccgtgttcactgttttctccctggcrtcttgccctctgcctacctattctgtaacaatatactgaaatgagtgagtcaataagtaaaaccatatatatgtcataaaactatataaataattaaaccaataata

SEQ ID NO: 175839 - DNA, 585 bp, Homo sapiens
ccacttggcctgaagacacaacacaggtcatcagccccctgcttggagacatgcctagcttcttattttgcaaaattctcactgtccttttctgttaaggtgtgggcaaagggagctaaaagacagcattcattacccactttgctctgtacttggtgtaaatttcctgcacttaaatgcccaacagccagtggtttggtctgtaaaagacacaggaagcaaagtgcttgctcagcctatagggatgccataaaccctgtttctagaaggagcttagaagcccagcagtctatgaattatgtgagaatcactcagcaaatggtygctgcggcatattaatagagaatgggtattgattcacctaaaattagaacacacctcaatatacttctattgccacaagtctttgactttcaaggcattgtcagcagagtccagaatctgtataatgtgagaatgtaagagtggaggtgaaaatctcctatgttcatcagacctatcagaggacagagtagaggcaacattttagaagagtttctaaagctgtggctatctgggataatttcaattttcagaaaagtctgc

SEQ ID NO: 175840 - DNA, 534 bp, Homo sapiens
ggtgaagcaggatatttccctgacctcttcacaggactcacaacaggggtgcctcgtttacccagcccacagctttcaactcctcttgggagggagcatgtaagcaaatgaggtgggaactagagtgcatgcatgctggaaccagctgattgctttggtgaggcaggggcaaactccactcactcagacccgctgcattccaccccttgtaagggggagcacacacatgaacaggtgcaggagccagggcgagaacttctgggtgctggtaggagcaaactccgtgtgggccttgcggcagcaacttggggggtgcccatgatccctgaagtgccatagggcatgttaaagtactcttttagctcggccatctgaakatggcttaaatattaacaactcagtgggccttctaccttttcatgtgcagcgagcggttgccttctgccagcaagggcaaaaggcaagtgtgacagccttttgcatctgtactcgtggctcccaagctcttgtctggcatccaggagaaacgagttc

SEQ ID NO: 175841 - DNA, 518 bp, Homo sapiens
tactaggtatatctctatatactagatagagatactagatatactagatatatatcgaaccttctcaacttttctattaaaaaatmttataaaattaaaagtttctaaaaaggatacttaatgaattcattacttataaggaaaaacacaggaatcttttaacatataaaaattagaatcgtattaaacataggatatgaacaatttttaattgaatttggtttatccacatggttgaatgttatacagctattatgaataactttaaaatgcttatgtaaaaaatagaaaatagttatattaaaatatctaacaaagcaataagaaaattttttaaaagtatgattgtatctgtatcaaatatccaatatccaccataagcccagctcctccctaagttaaaaagaaaaacaaaaaccagaggataggagacaagcagtatgtagaagctatatccctactagtatatacatatttaactaaatatttaattatagaaaagtataattctcttttta

SEQ ID NO: 175842 - DNA, 518 bp, Homo sapiens
tactaggtatatctctatatactagatagagatactagatatactagatatatatcgaaccttctcaacttttctattaaaaaatcttataaaattaaaagtttctaaaaaggatacttaatgaattcattacttataaggaaaaacacaggaatmttttaacatataaaaattagaatcgtattaaacataggatatgaacaatttttaattgaatttggtttatccacatggttgaatgttatacagctattatgaataactttaaaatgcttatgtaaaaaatagaaaatagttatattaaaatatctaacaaagcaataagaaaattttttaaaagtatgattgtatctgtatcaaatatccaatatccaccataagcccagctcctccctaagttaaaaagaaaaacaaaaaccagaggataggagacaagcagtatgtagaagctatatccctactagtatatacatatttaactaaatatttaattatagaaaagtataattctcttttta

SEQ ID NO: 175843 - DNA, 532 bp, Homo sapiens
aacccatgctgtgcatccaattacaatagtaggcgcaccatgacaagcttcacagccattttcagataaggcccaaatatgagcgcagagtgaaattagcaaacaacaacacaaaggaagtaaagagaacagagaagaattgtgtgaggaaaaggagaagagaggcccatcagtagcgaggcaagagtttgacagacggaaggtgaggaaggcaggtgaacctgtcactgatgcactcagaaaacaggggtcgcccatcactccttcacctccatactgccgcaggtcacaatcagcattaaggggacacataggctcttacatttttcttttttttttttttttgagacaaagtctcactctttcrcccaggctggagtgcagtggcatgatcttggctcactgcaacctctgcctcccaggttcaagcatcacctgcctcagcctcccaaagtgctaggattacaggtgtgagccactgcgccaagccggctcttcaagaatacatccttgtccacttcatgcacaggtg

SEQ ID NO: 175844 - DNA, 559 bp, Homo sapiens
aacagagaatccaagatactgatattgtactctttctcaatctaggtaataggacamtgatgctaatcttgttattgaaacaccagggatttggtctaggtcctgctgcttgctgcacagaaagccaatcactgagacaacaagtattgccgaagaagaaggctttcattgagtgccgcagccaaggagatggaacctcagtctcaagttcatctccctgacttctaattagaggcttatatagcagggacaaaatgtaataatgtgtaaacaaaacaggaactaggaggggcagggaagcaacatgatgaatgagaaattcagagccccattgtcaggatgtggtaatctggtgagtttcagtttttccatatattttttgagagcctgaaagtccttttctgaggaaggaactcagataaaacaaatataagtttcatgccttaagaccagaaaggtcaatttctatgttcatccaaaagaacgatctatgggattactgggttggtttcagttccccctttctgttttgtttataaattccttaatcatgaaaggc

SEQ ID NO: 175845 - DNA, 549 bp, Homo sapiens
gagccactggagaagaaccagataaatccccagtgaaaggatgttccaatggaaaaaaaacataccagtgagagtcctgtgcttggaagaagtagccatatgtgaggaacacagataaagaccgtggcatggggaagatagtgaagggatggaaaaaatggatggatgaatttagagaggaaaaaaaagaccagattgttgggggggtgattcatcctgatcataataaggagttctcttttgcacttgcttcatttgattggctcattaaatactcacataaaaatacccagtgtgctatgggtgctgagtctaaatccggagacaggggccagcttgcacttgggtgcctaatgcaaatgtagggtcatctgacaaggcttacccaattagcatctctgacaaagktatgtgcatgctgaacaaattacccaggtgctccttatgcaattagagtttagaaacatgagtttagaggttagagtcaaaaacatggaaatagttgaacttctccaagaagagaatgactacagagaaaagggaccagag

SEQ ID NO: 175846 - DNA, 625 bp, Homo sapiens
  misc_feature (1)...(625): n = A,T,C or G
ntgtgtcatttcaaagccgggcccatgtgaagtcacaagcatatatgtatcctgcatttaatggaaaacccaagatatatgaaataaatcatttaaatcagtctcattttattcattcccagtaagtcaagtggtatatatattttcaatttagggaaattatttcactcccattaaaatgaatgagcaatggtgtgatgatatgaagccgtaaaatatagagaaaatcccccccctttatttgttgaagtaaacaaaggaatttgaaacaacagtaactaatttcttccttttccccctccmcctccccaaaaaaaaaaaaaaaaaaaaaaagagaggcctgtgtccttggatatgtcaggtaaatagtcacccagttcagaaacatcagaattcctcttaaatattctgagtatacctacggggatgtttttagtaagaatttttttttaatctaccatttaagagagtttatcaaaatttaagataactgcattggtatttgtcaggtgcacctagtgaatttgtcattctttagaaaatgactatactggtgattctttagggtatatgattttttttcatccatatgtgttagtaatcctatcatacattcagattttgt

SEQ ID NO: 175847 - DNA, 625 bp, Homo sapiens
  misc_feature (1)...(625): n = A,T,C or G
ntgtgtcatttcaaagccgggcccatgtgaagtcacaagcatatatgtatcctgcatttaatggaaaacccaagatatatgaaataaatcatttaaatcagtctcattttattcattcccagtaagtcaagtggtatatatattttcaatttagggaaattatttcactcccattaaaatgaatgagcaatggtgtgatgatatgaagccgtaaaatatagagaaaatcccccccctttatttgttgaagtaaacaaaggaatttgaaacaacagtaactaatttcttccttttccccctccccctcmccaaaaaaaaaaaaaaaaaaaaaaagagaggcctgtgtccttggatatgtcaggtaaatagtcacccagttcagaaacatcagaattcctcttaaatattctgagtatacctacggggatgtttttagtaagaatttttttttaatctaccatttaagagagtttatcaaaatttaagataactgcattggtatttgtcaggtgcacctagtgaatttgtcattctttagaaaatgactatactggtgattctttagggtatatgattttttttcatccatatgtgttagtaatcctatcatacattcagattttgt

SEQ ID NO: 175848 - DNA, 625 bp, Homo sapiens
  misc_feature (1)...(625): n = A,T,C or G
ntgtgtcatttcaaagccgggcccatgtgaagtcacaagcatatatgtatcctgcatttaatggaaaacccaagatatatgaaataaatcatttaaatcagtctcattttattcattcccagtaagtcaagtggtatatatattttcaatttagggaaattatttcactcccattaaaatgaatgagcaatggtgtgatgatatgaagccgtaaaatatagagaaaatcccccccctttatttgttgaagtaaacaaaggaatttgaaacaacagtaactaatttcttccttttccccctccccctccccaaaaaaaaaaaaaaaaaaaaaaagagaggcctgtgtccttggatatgtcaggtaaatagtcacccagttcagaaacatcaraattcctcttaaatattctgagtatacctacggggatgtttttagtaagaatttttttttaatctaccatttaagagagtttatcaaaatttaagataactgcattggtatttgtcaggtgcacctagtgaatttgtcattctttagaaaatgactatactggtgattctttagggtatatgattttttttcatccatatgtgttagtaatcctatcatacattcagattttgt

SEQ ID NO: 175849 - DNA, 596 bp, Homo sapiens
ggagattcttggcaaattattctttttcrgggtatgaatgatccacttcagagcgttagaggaataacacttgcgtaattgcaacctcacttcttaaaatctagatcttgctgcaagtgagcatatcaaagaactgtgttccctatgaaaattttgatctatataaaaatcatgccatcgttaaaattgagatggagcagtgttatcattcatctcttgagatttaaatataacaaaagtcacctttaccttttttggaattacgacctatagggacacatcacatagttattgcattgtttctgtctaactcaatattaactgtgaattttgtggaaattaaaattagaacagggtgaactagttgaagtcctaaaagactatattgacagtttggcttccatagaatgtgcacatttaccttccagaaaacagcaggatgctcctctactacatttcctcttctttactttgctcagctttccaggaagttgaaggttcaaagtggatctaaaggtagacaaagatgtatgtgaaagtagcaaatagagtgagacagttgagtgagatggagcagacgtcagcagccagacaca

SEQ ID NO: 175850 - DNA, 596 bp, Homo sapiens
ggagattcttggcaaattattctttttcagggtatgaatgatccacttcagagcgttagaggaataacacttgcgtaattgcaacctcacttcttaaaatctagatcttgctgcaagtgagcatatcaaagaactgtgttccctatgaaaattttgatctatataaaaatcatgccatcgttaaaattgagatggagcagtgttatcattcatctcttgagatttaaatataacaaaagtcacctttaccttttttggaattacgacctatagggacacatcacatagttattgcattgtttctgtctaactcaatattaactgtgaattttgtggaaattaaaattagaacagggtgaactagttgaagtcctaaaagactatattgayagtttggcttccatagaatgtgcacatttaccttccagaaaacagcaggatgctcctctactacatttcctcttctttactttgctcagctttccaggaagttgaaggttcaaagtggatctaaaggtagacaaagatgtatgtgaaagtagcaaatagagtgagacagttgagtgagatggagcagacgtcagcagccagacaca

SEQ ID NO: 175851 - DNA, 596 bp, Homo sapiens
ggagattcttggcaaattattctttttcagggtatgaatgatccacttcagagcgttagaggaataacacttgcgtaattgcaacctcacttcttaaaatctagatcttgctgcaagtgagcatatcaaagaactgtgttccctatgaaaattttgatctatataaaaatcatgccatcgttaaaattgagatggagcagtgttatcattcatctcttgagatttaaatataacaaaagtcacctttaccttttttggaattacgacctatagggacacatcacatagttattgcattgtttctgtctaactcaatattaactgtgaattttgtggaaattaaaattagaacagggtgaactagttgaagtcctaaaagactatattgacagttyggcttccatagaatgtgcacatttaccttccagaaaacagcaggatgctcctctactacatttcctcttctttactttgctcagctttccaggaagttgaaggttcaaagtggatctaaaggtagacaaagatgtatgtgaaagtagcaaatagagtgagacagttgagtgagatggagcagacgtcagcagccagacaca

SEQ ID NO: 175852 - DNA, 549 bp, Homo sapiens
tttctgtctaactcaatattaactgtgaattttgtggaaattaaaattagaacagggtgaactagttgaagtcctaaaagactatattgacagtttggcttccatagaatgtgcacatttaccttccagaaaacagcaggatgctcctctactacatttcctcttctttactttgctcagctttccaggaagytgaaggttcaaagtggatctaaaggtagacaaagatgtatgtgaaagtagcaaatagagtgagacagttgagtgagatggagcagacgtcagcagccagacacacatttgaggatgagcctagagctcttccaccacccctttcccaaaacaagatactgaaaacagaaacactttgcagctgtgctcatcatggtcagacagactctccaggaatatcatgaatatggtggcagcgctggtgggaggatcccacagtaggggcctcacatagacaaacaacatgacttgaaattgggatctgcaggtcacaggcaccccatagccaccctcacagtatcttagcttcttggacaa

SEQ ID NO: 175853 - DNA, 549 bp, Homo sapiens
tttctgtctaactcaatattaactgtgaattttgtggaaattaaaattagaacagggtgaactagttgaagtcctaaaagactatattgacagtttggcttccatagaatgtgcacatttaccttccagaaaacagcaggatgctcctctactacatttcctcttctttactttgctcagctttccaggaagttgaaggttcaaagtggatctaaaggtagacaaagatgtatgtgaaagtagcaaatagagtgagacagttgartgagatggagcagacgtcagcagccagacacacatttgaggatgagcctagagctcttccaccacccctttcccaaaacaagatactgaaaacagaaacactttgcagctgtgctcatcatggtcagacagactctccaggaatatcatgaatatggtggcagcgctggtgggaggatcccacagtaggggcctcacatagacaaacaacatgacttgaaattgggatctgcaggtcacaggcaccccatagccaccctcacagtatcttagcttcttggacaa

SEQ ID NO: 175854 - DNA, 557 bp, Homo sapiens
gaattctcctttcagacattattttttaacagctttaatgggatagaatttatacaccctaatattcaccaatttaaatgccataattcattggtttgtagtatttatacagttgtgcaaacatcacagctatctaattttagaacatgccaccataccaaagagaagtactcacaagcattcacaccccattcttctctaccccatatgctggcaaccacgaacctattttctgtctctatggatttgcctattctggacattatatataaatggaatcacaacatatgtgctcttttgtaactggattatttcaatagcgtaatgttttcaaagctcatctcagttatacagcatgtatcattactttcttctttctttttcttattcttatttcttattcttattctcaaatattcttccattatagagatgtaccatattttgtttatctctttatcagttgatggatatttaggttattttcaccctctggctattatgaataatattgtacacgtttytgtgtggataaatgttatgttatcatttctctt

SEQ ID NO: 175855 - DNA, 558 bp, Homo sapiens
gatttccaagctgttccacaaactactatgttttctaagatttgtacactgtgtagagtggactagaggggaattktatcctaatttttttaaagagggattgaatgagccagtttaggattcacagtaatgatgctaggttactatattttcttgtgcacgtaacccttcatatattgttttgattatttatgttcacattttactgtgtttacatttttaaaatcatggcaatttaaattaagaatttaaaaaatacatttaattttgtaacttcttattggtctgctcaggttttcaatttcttcctggttcagtcttgggaggttgtttttccaggcatttatccatttcctctgggttttctagtttgtgcacatagaggtgttcatagtcatctctgaggatcttttatatttctgtggtatcagttgtagtgtcacttttgtcattttttattgtgtttagtttaattttctttccttttgccttagctaatctagctaagagtctatcaattttgtttacactttcaaataaccaatttttagttttgtt

SEQ ID NO: 175856 - DNA, 558 bp, Homo sapiens
gatttccaagctgttccacaaactactatgttttctaagatttgtacactgtgtagagtggactagaggggaattttatcctaatttttttaaagagggattgaatgagccagtttaggattcacagtaatgatgctaggttactatattttcttgtgcacrtaacccttcatatattgttttgattatttatgttcacattttactgtgtttacatttttaaaatcatggcaatttaaattaagaatttaaaaaatacatttaattttgtaacttcttattggtctgctcaggttttcaatttcttcctggttcagtcttgggaggttgtttttccaggcatttatccatttcctctgggttttctagtttgtgcacatagaggtgttcatagtcatctctgaggatcttttatatttctgtggtatcagttgtagtgtcacttttgtcattttttattgtgtttagtttaattttctttccttttgccttagctaatctagctaagagtctatcaattttgtttacactttcaaataaccaatttttagttttgtt

SEQ ID NO: 175857 - DNA, 593 bp, Homo sapiens
aagtttttacatatgttgatttttgcwtatgacagtttatgaggctggcaaaaattatgattattatcaccattttacatatagtaatgagatgtgaaaataggaggcttccggaagtgacacagccaacgtttcacatagtgtataatgacgattcatttagatcatattgtatggcggtttcaacttacatttcaaacttcctgacccaaaggacttccaattgtttacaaaatgttccacaaactattatgttttctaagatttttgcactgtgtagagtggactagaggggaattatatcctagttttatagagagggattgaatgagccagtttagaattcacagtaatgatgctaggttactacattttcttgtgcatataatgcttcatgtattgttttgattatttatattcacattttactatatttacatttttaaaatcatggcaacttaaattaagaatttttttaaaaaatcatttaaaatagactttggaaaatctgctcccggggtgaaatttcttaacataattctttaattcacctcagcttatttgtcccttggtttttttatgttgtacttcat

SEQ ID NO: 175858 - DNA, 598 bp, Homo sapiens
cagttagaaatgcagaaatgacccatcttttgcgtcactgatgctgggagctgtagactggagctgttcctattcggccatcttggctccatccctggtgtgggttttaatgatgaatcaatgctgagtttttaaatactttttctgtgactattgagatcatcattttatctttattttttattctgtcaatatggtaggttacattaaatgatctttggatattatatcagttttgcatttctttaataaatctcacttgatttatagtgrcgtagttttccattgttgtgacatctatgtgtggttttactatcaggataatattggcctcatggaatgagctgagaaacgttctttctctattttctggaagaatttgctgaataccagtattaatttcttcttaacattttttattgaatttacagtgagcccatctgaacctgggcttccctttctgagaagattttaaaaaacctttttttaaactgcaataatgtcttattctgtcacttaggctagagagcagtggctcatagtaatgtagaagtcctgggctcaagagattccctgcctcagcctcctgagtagctgg

SEQ ID NO: 175859 - DNA, 598 bp, Homo sapiens
cagttagaaatgcagaaatgacccatcttttgcgtcactgatgctgggagctgtagactggagctgttcctattcggccatcttggctccatccctggtgtgggttttaatgatgaatcaatgctgagtttttaaatactttttctgtgactattgagatcatcattttatctttattttttattctgtcaatatggtaggttacattaaatgatctttggatattatatcagttttgcatttctttaataaatctcacttgatttatagtgacgtagttttccattgttgtgacatctatgtgtggttttactatcaggataatattggcctcatggaatgagctgagaaacgttctttctctattttctggaagaatttgctgaataccagtattaatttcttcttaacattttttattgaatttacagtgagcccatctgaacctgggcttccctttctgagaagattttaaaaaacctttttttaaactgcaataatgtcttattctgtcactyaggctagagagcagtggctcatagtaatgtagaagtcctgggctcaagagattccctgcctcagcctcctgagtagctgg

SEQ ID NO: 175860 - DNA, 364 bp, Homo sapiens
ccaatttcttatacttcatcatagccttagatctctgctcttctaccagcagtaactgcagcaatgaggaaggatttggagggctttatgcaccctaatactaactggcagtgcacggtttatgaagtctgagcagaacttgtgatgtctgcttgcttctctgcacagtgtacttactaatgaacttcttaacttgctttccatatgaaatgattccttgcctgactwaaacgtgaaaaacactatcaagaagaatttgttttaagttttctcaacatttcctcccaagctaaccatggcctaacaaatagtcattccctgtaaccaatttttccagcccatcacattctagcaatgttattgt

SEQ ID NO: 175861 - DNA, 469 bp, Homo sapiens
aagaatatatattctgtagttgatgggtagagtatgcccattagatctaactggtcaagtgtcaaatttaagtccagartatcatagttagttgtttttttttttttttcccctatctgtctaatactgtcagaggggtgttcaagtaccctactattattatatgactgtctaagtctttttgtaggtcttgaagtacatgttttatgagtgtgcatgctctgatgttgggtacatatatatttaggatagttaagtcttcttgttgaattgaaacctttccgttattgtaattttcaaatggtgagccaagtctatgtaagcaaaattatacagtaattctgtgtaatatacaatagtgtaaaggcaatatgttttgacatatttaatgagaacttcagcttcttaacaaaacttcttataaaataaattggttcactgatttttcagcaaatttggaatgcaaaat

SEQ ID NO: 175862 - DNA, 469 bp, Homo sapiens
aaatccaacctctatccagaaagcttcctacccttcaattagagacttatcccagagttcaggacatctgctagtggaatgtgacacaggcttccagctggaacatcagccagacttcaaggcaggcaggcagccagagcccagaggggctcactcaggccgcaggccaggctgcccatgaamctgaagcaggtgcaaaggcctccatgaccagcttcagagccatttcaaatatgcatatatatatatatataaaagttaatgtaaatatataatatataaatataaatatataatgtatataaattaatgtaaatatatattaatataatatataatatataaacatttgtttaatgaatttcagaggaaaagtcagaagaaagtgatatcagattctgaatatcagttataagtgaggtgaccattctggtgagccttaaaggtgtaggagttccataaagacaac

SEQ ID NO: 175863 - DNA, 507 bp, Homo sapiens
gagcctattcttttcactctatttttgcttgcatatttttgaggagaagtttcatgcgatttttattcttgctcctctacaggcaaagttttttgttacccctcagatgtctttcaagctcttttatttctcytttctatttttcttagatttaatacggtattcacaggtgtatattttttagtattgagcctgatggtgttctctgagcttcctagttctggggttaggtgtctatcattaattttgataattctcagttattatagcttcaaacaatttttgtccttctgatattcccattacacatatgttaatggtcccatagttttcagatacctgtactgtctctttcattgctttttctgttttcattttaattttggaagtttgtattgctatctcatcaagcaatgagtccatcaaatacatttatgttacaatgtttctaatttctaacatacattatatttgatttttttcttagatgctctgtctctttgctta

SEQ ID NO: 175864 - DNA, 554 bp, Homo sapiens
attaattatgctataaatttctcccttttggtcaccttctaatttacgggtgagataagcatcattctgttgccatcatggatgacttgactttgtctcagcatgaggcccataagtcatgacatcaggctcactgaagacattttctttcttatttttgtcattctctgcacagtggacctatgtggcctatccttgatgggcaaaaacataactttcatacccttcatagaatacagtgcacgagggagatgaaaatgactgtcaggagaataataccaacatagtaggatatgatctgtagccaaagcccctgtgaacaaagtcaaataaaacaaaaaagttaaaaaaaagagagaaacaaacgtcaatggctataacaaactrtgaagtcagtctgactccagacagcagttaagtcaagaagatttctagatttgagcttgaggcatgtttttctggtttgcagtttgaatgtccctggttattgcttctagaatttcagtgaactccctaaaagatccataaatcagcatgcataaaagttgtcctct

SEQ ID NO: 175865 - DNA, 534 bp, Homo sapiens
caatgtattatttttatgcaatgactttaaaaaaagacaacatcaaatgttgataaagatgtagagtgactgtaactatcatatgcttctatgtgtgtaaacttttatgaacactttcaaaaacaatttggtagtctctcctaaagacaaatgtacatatacataaactttataatccaacaattcaacttttaggtatatatccaatataaattcctgcatctgttcaccatgcagaagaatgttcacagcagtatcatgtggtgtttcttaaaactggaaccaacccaagtgtacatcaataatagaaagaataaataaaatgtgagaatatgaattccaggccattcctttcttcctmtagtgtgtggttggcatatctcaatgttgtgttctttagaaaagtgttggctttttccaggcaaaacttcagtatttcctcatggatgtgctccctctgtccaagagtatatggaggtgcacctcgtggatttggtggtatccccaaaacaagaggaagcagatacgagccac

SEQ ID NO: 175866 - DNA, 354 bp, Homo sapiens
tccaaggaacactaaattttcctcctgctgtgagaggcatgaagtaaacttggcatttagaagtgcaagctggactgacctakgcggctgacacacagggtgttgtatttcaggaaatagcagagagagctcagtatgttggattatctcaagcagtgggattttgaaaaagagccaccatagagtcccatagagtccatatctggttgacgaggagattatccgagtggaaaggggataatctgggctgcttgcctaccgtgcatacaagcatagtaatcgcttttatttaaagtgtgaatggatttagtccatttcagccaggcatttatttgtatcttgatattttgtctt

SEQ ID NO: 175867 - DNA, 532 bp, Homo sapiens
tgacccaagtagtgctgctggggcagcctgcttttattcccttatctgaccccacccacatcttgctgattggtccattttacagagagctgattggtccgttttgacagggtgctgattggtgcatttacaatccctgagctagacacagagtgctgattggtgcatttacaatcctctagctagacataaaagttctccaagtccccaccagattagctagatacagagtgctgattggtgccttcacaaaccctgagctagacacagagtgctgcttggtgcatatacaatcctccagctagaaataaaagttctccaacaccccaccccactgaggagcccagctggctttgcctagtggatgcagtgccagggccgcgggcggagctgcccgccagtyccacgcctggtgcctgcactcctcagtccagcgccgtgcacctgcacgcctcagcccttgggcagtcgatgagaccgggcgccacggagcagggggcagtgcccattggggagtctcgggcagcatggg

SEQ ID NO: 175868 - DNA, 532 bp, Homo sapiens
tgacccaagtagtgctgctggggcagcctgcttttattcccttatctgaccccacccacatcttgctgattggtccattttacagagagctgattggtccgttttgacagggtgctgattggtgcatttacaatccctgagctagacacagagtgctgattggtgcatttacaatcctctagctagacataaaagttctccaagtccccaccagattagctagatacagagtgctgattggtgccttcacaaaccctgagctagacacagagtgctgcttggtgcatatacaatcctccagctagaaataaaagttctccaacaccccaccccactgaggagcccagctggctttgcctagtggatgcagtgccagggccgcgggcggagctgcccgccagtcccacgcctggtgcctgcactcctcagtccagcgccgtgmacctgcacgcctcagcccttgggcagtcgatgagaccgggcgccacggagcagggggcagtgcccattggggagtctcgggcagcatggg

SEQ ID NO: 175869 - DNA, 487 bp, Homo sapiens
cagtgggaaaaactttagcccagagagatgttgactcaatatgaagaagagctttccaattgtcagagctgtctctaaaattataaatatcagatgtgctatctcaggaacttggaagttccctgtcactgctcaggcagaggccagaagcagagaagaaagatggaacataagtcagtagtggggtcggtgatctttaaagtcccttgcagttgtaagtttctatgattccatgagtctcctcctggcattctgaaataagtttgtgaatctagtcacttacctgaactttggagggcaaggaaggacatggaagaaaacactaaatcttgctcactrgtcaggcccaggactttcttgaaaccagcccagttccctctagagtcacagcttatggagtgtgctctgtcctccctcgggacaaccaggccagactagtacatttaccaggcatgtggaattcaaccaaaacaaattcagccttata

SEQ ID NO: 175870 - DNA, 656 bp, Homo sapiens
acagtgcagttttataccttcaaaatggattattctctgtgatcagcctattaggaaagccttaaaaattcagaatcaactgtggtcagaatttttgttacatcttcaaattaaacttttccattaaatcttaagatagctttactgctaaacatttatcatatcatacacaattaaggtgatagctgaacaacagtgatttccayggtaaattttaatattacaacaaaactctgatatttaagttatttaagagtagtccttaaagtgtttctaagaattggtatatattctttaattttaaaataagcttaaagtataaatctgtgtttttaagaattggtagattctttaatatcccagataaatttcaaaataaggtaagttttcttattggtatgcagtcacatttccaaattataaatatatttttggtcccacatcttttaaaaagacattaaaagttataaatatatgaaaaggttatacaattctaaatattttgtgatatgtaggcttaaaactcagcataattagtatatgaaacttattcctatttctttgtacaaaaatctccagtcttttattaaagtcaaattgttcatctgagtgaaaacatttaaaaaaaaatggcagtaaaggctgttgtctcctta

SEQ ID NO: 175871 - DNA, 603 bp, Homo sapiens
tgatttacaaagtcagttaaattgatggttggctgttaatacttaatgctgacttttcatttaatagtattgtaagtgaatttatcctatatttttaacatcattagtagtatgaagaggtcattggaattttccagataagctttagttcataccatgggaaaaacaactacatgtatacgctacagtagttacataaaatgtcaagattttcaaaatccttgatatatcccttatgaatgtcaagtctctattaaacagcagacattatgccacaaaagaaaggaaaaatcaaatttttctcaaaactaaaccaaattgtgctttcttctttatagcttaatcactcagttatcaacatgggtatagggatatttgttataccaattcccttactattctctctcaaatattcatcaataaattctcacccattccctttatcaatatgggcaccactcacttaacagaatayagtcaactcccagtgatttgggcaataaatgaactgtgattaagacaatgactcaatgattaagtaatgtcaattaatccttgacatgatcccaaatgaaactcaaaactaaaatcccttaatctcaa

SEQ ID NO: 175872 - DNA, 523 bp, Homo sapiens
atcgcttgaacctgggaggcagaggttgcagtgagccaacatcacaccactgcacttcagcctgagcgacagaacgagactccgtctcaaaaaaaaaaaaaaagaatgacttattaaaagtaaaaaatatgctgttctgtcataaataagtatggtttacaccttctttatcacaattactagtttttcagtggcttattagtggtaagaagtattggataaaagtaaaatagtacgggtaatgcgtatgttaattagcttggtttaaccattccacaatgtagacatattttaaaacatcatgttgcataccataaatataatttttatattatatataatttatattatgtatataatttttatattatatataacttatgtatataatttayattacatatgatttatatataaatataatataaaattaaatataatttttatctgtaaattaaaaataaaaatatcttaatttttttaattaaaagtaaaatagtacttcacaataatagtgatcctc

SEQ ID NO: 175873 - DNA, 302 bp, Homo sapiens
gcttgcaccagtcattatcgcaagagcacaccgagcagggtaggaaaggggtttttatctctaatgcagttcctagcacttctgtgtcctttccccattggctggggttggacctcacaatctaagctaactcgattggctaaggtttaaaattgaatagggtctattaggtggagagtccgttactaggtgggaaaagagtctgttactaggcgggaaggcatatctggacttgtctgggcatggcaaaggcaggaaggttgtttacagaacaggtarctaggagacaaggaagtacaagg

SEQ ID NO: 175874 - DNA, 569 bp, Homo sapiens
atactgaatacaataagctgtaaaaggcttccaggaatatagagtgaggaagaaggaataacattcctgaccttgaatgtcatcatctaaattgattaatttttaagctacccccataaaataaaactaatagaagaacagaattatctgtttctcatcaagattcaattcagtaggcatttgctgaatatctttgcaatgtgttctgggtgcgttcaaagaagtaaaatgtacagctggtaactttggagatgctctgttttttcaacagtgtgaattaagatgtctttttttttttttttttttttgatttggcataacccaagaaggctttttaaaggaaacactaatttctagtgtttacttgccttagaactttgaatcaagaagcasagaaaggcagttagggaggtgtgaaatgttttaactgaccaaaaatttcctttctctttgaatgctctctttccattttgccctttcacattttaaaattttttataaatactatcaaaggtttatgctggattccaaaaaagttaatagaaactttgaatacataaatggaattc

SEQ ID NO: 175875 - DNA, 569 bp, Homo sapiens
atactgaatacaataagctgtaaaaggcttccaggaatatagagtgaggaagaaggaataacattcctgaccttgaatgtcatcatctaaattgattaatttttaagctacccccataaaataaaactaatagaagaacagaattatctgtttctcatcaagattcaattcagtaggcatttgctgaatatctttgcaatgtgttctgggtgcgttcaaagaagtaaaatgtacagctggtaactttggagatgctctgttttttcaacagtgtgaattaagatgtctttttttttttttttttttttgatttggcataacccaagaaggctttttaaaggaaacactaatttctagtgtttacttgccttagaactttgaatcaagaagcacagaaaggcagttagggaggtgtgaaatgttttaactgaccaaaaatttcctttctctttgaatgctctctttccattttgccmtttcacattttaaaattttttataaatactatcaaaggtttatgctggattccaaaaaagttaatagaaactttgaatacataaatggaattc

SEQ ID NO: 175876 - DNA, 562 bp, Homo sapiens
aatcaatattattaaaatggctatattgaacaaagcaatgtatagattcaatgttattcccatcaaaataccaatgacattcttcacagaattagaaaaaaactattttaaattttatagggaaccaaaaaagaactgaaatagccaaggcaatactaagaaaaaagaacaaagctggaggcatcaacttacccaatttcaaactacactacagggctacagtaaccaaaacagcatgataccrgcacaaacacaggcacatggaccaacagaacagaatagagagcctagaaataaggccacaaatctatgattatttgatcttagataaagctgacagaaaaaaaaaaacaagcaatggggaaaaggctttctagtcaatgaatggtcttgggataactgggtatccatgtacagaagattgaagctgaacctcatccttacagcatttacaaaaatcaactcaagattgattaagacttaaatgtaaaacccaacactataaaaaccccggaagacaacctaggcaatactatcctgggtgtaggaatgggcatagatt

SEQ ID NO: 175877 - DNA, 351 bp, Homo sapiens
cacacagtaatccctggagtcactcatgcyggttaaactctgtcaatggactcctaaagtgcttatttaatcttggcaaaaaaaaaaaagaacaaaagaaaaaaaaacagacaattgaagctgagaatgatatttcccatacttaaagaattaactctgataagaagacagaaaaactaatgattcaaaaggagaatttcctctttattctctttctacagatgattttctgtatcatttcaagctacattagtaaacttaggagtatatagaagaacatatttgaagatctgtttagcccagtggttatcagtttagaatgaaattttaaaaagaaattatagacattca

SEQ ID NO: 175878 - DNA, 351 bp, Homo sapiens
cacacagtaatccctggagtcactcatgctggttaaamtctgtcaatggactcctaaagtgcttatttaatcttggcaaaaaaaaaaaagaacaaaagaaaaaaaaacagacaattgaagctgagaatgatatttcccatacttaaagaattaactctgataagaagacagaaaaactaatgattcaaaaggagaatttcctctttattctctttctacagatgattttctgtatcatttcaagctacattagtaaacttaggagtatatagaagaacatatttgaagatctgtttagcccagtggttatcagtttagaatgaaattttaaaaagaaattatagacattca

SEQ ID NO: 175879 - DNA, 507 bp, Homo sapiens
aaatttcacttgattttcatgatcctaaatttaacgcagcagtggtaagggtgtttgcatgtgtgcatgtgtgctcatgtgcacatgcctgcacatgtgttttattatatttactgcattagtttttttttctcatgctactaataaagacataccagagagtgggtaatttataaaggaaagaggtttaattgactcacagttccacatggatgaggaggcctcacaatcatggtgcaaggaaratgagaagcaaagtcacatattacatggtggcaggcaagagagcgtgtgcaggggagctcacctttataaaaccatcagatcttgtgagacttactcactatcataaaacagagtgggaaagacctgcccccatgattcaattacctcccactgggtccttctctcaacacgtgggaattatggaagctacaattcatgatgacatttgggtggagatagagccaaaccatataatttaccttagtctgagttgagattttt

SEQ ID NO: 175880 - DNA, 568 bp, Homo sapiens
agtgctcatctccctatcatttcagtttgttaatgattctcttgtttctaagcacatctgttgcttttgtcgtgtgagaaacaatccagttcgcatgcatgccttttaattagctaaaattagattccaaactaagcacatatgtcactttgattaaggagtttctaatatgtagcccatgtgtttatcaatatagaaaataaaattacaatattttggtgagtggaaataaggcacattctgaaaattctgtactcattatgtttcttaaaactcatttggaaaacttgtaaattgcaacgcgatatattttttaccagtcaacctataaagaagmaaacagtgatttttgctttagagtgccaagaacctagtgtctggtgaacattctatcaatattttcactaaacgccataaatatccaaagggcttagtaatagctttctgctttttggcatcttatcattgcactttttattaaatgagcaatatgtaaaaacaatgctgaaactttgttcaatatctattccattatcaagaaggaaagtttccccaatatataaaaaaa

SEQ ID NO: 175881 - DNA, 484 bp, Homo sapiens
tcttggcgaatataggctgaacagtgcagtttggcatgcttggcattgaagttcatcaaattattttttcagcaaaatctttcagcacttatacaatatatactgaatcaaatattagctctttgttagtccagcatattcagctttcttgttttttctgttaaaccatactattagtaccaggcactaaatcactattaattattgtagttctcaaatatttgtcaggcccctttttcatactggatgcttaataaatgatttcacgaaaataatgtactgtgtaattacaaacagttcatcaggaaaatagggcagaagtgcaaaaataagactataactttcttgcaaaatatgtaataatttttcaattaaacttctaaatgtcttatggtaataggtacaatacacttttacgttagacagacactacagcaactatgggaayctcaactttgaaatagtatgggacacttcaaattaa

SEQ ID NO: 175882 - DNA, 527 bp, Homo sapiens
aaggtttctacttacatggaacttacgggctggtgagggtataaactaaaaataaataaataatccactttaagtatccagatgaaaataaaatagagtgggatagtgtagtaagtggggctgcttcaaaatggatgttaaggacaatctctctgaggaggtggcatttgagctgataattaaattaatgaagttgattttgtaacttaattctttagaaatactaaaatctttattttatgcagtatgaactgactatccatatataagttacaattttttgctgccttataactaaaattcatcaattgtatcctcaattgtagttaaatcatttaaatgatttcctctccctgygtttgttttcctctcttaaaaagggataattcccccagcccagtaaaaccagtcacgttaaaagaattttttattgttgtaaaaaccatataagattaaatttatcatatcaaatattttatgtgtacacttcagtagtgttaaatatattcacatttccttgcaacaga

SEQ ID NO: 175883 - DNA, 620 bp, Homo sapiens
aaataaatgacttcaatgtccatgcagtgatgtcatggctctgtttgtggagatttttaaggaccgggagaggtgaagaatgtgatcacccagggactgaagcaagtaaaggcagatcagagcaattagaagagttcattatgttatctgtgtggtgcctataactcactaaaggcttccagtattttcatctaatcctaatcatcttagtgccgttggtcaagccagtgttttagattttaataattttagatcaagggaggtcaagtgatttggccaaggtcacacaacaatagcagcatgaaagccagacttccagatgttctaacattaattctacagctctgtgcagagggcattcagaagtgcatcccctgtatggtgaagagttggctcccactgatggagaggtacacaaacaggttggacttcaggtggaagaacctaggcctaacccagcctccagcagtgtaattttgcccaaatcccttcatctccacaggcctcagtttcctcwtctgtaaaatcagcatgctgtgccagactcagagaaataagagaaaaatgcagaagcaggctgatatcaccccctgccctgtgttttataaaagtccaaggcc

SEQ ID NO: 175884 - DNA, 501 bp, Homo sapiens
gaattcagccctcccactttttgtttctgcagaaataggagggtttttaatttctgggataaactagtggaaatgtagctgaaaggggaagttggtcaagtcgttagagcatctgtgtttgctaaktgttgtttgttcaggttagccgcctaccctcccacaaagaatgggaaaaaggcacacttgtcttctttaatgattagatttcaaagggggtggctcccatgtctttgagaaacacatttgtgggctgtaaaaggggcagagaaagattttaccgttgatagtattttactgtaaatactctaagaaaagagaggtcagaagattatggtcatgatgtaatctgtctaaagtttagtgaaagtgagaggaatgtgaaagccgtcttggtcaagatgcaggaagaaagggaagaagttgttgaacattttcaaatactagaagtttggaggagaagactgggcagctgggacctacacaaggagaagaggacgtatt

SEQ ID NO: 175885 - DNA, 504 bp, Homo sapiens
ctgaattcagccctcccactttttgtttctgcagaaataggagggtttttaatttctgggataaactagtggaaatgtagctgaaaggggaagttggtcaagtcgttagagcatctgtgtttgctaagtgttgtttgttcaggttagccgcctaccctcccacaaagaatgggaaaaaggsacacttgtcttctttaatgattagatttcaaagggggtggctcccatgtctttgagaaacacatttgtgggctgtaaaaggggcagagaaagattttaccgttgatagtattttactgtaaatactctaagaaaagagaggtcagaagattatggtcatgatgtaatctgtctaaagtttagtgaaagtgagaggaatgtgaaagccgtcttggtcaagatgcaggaagaaagggaagaagttgttgaacattttcaaatactagaagtttggaggagaagactgggcagctgggacctacacaaggagaagaggacgtattt

SEQ ID NO: 175886 - DNA, 501 bp, Homo sapiens
gaattcagccctcccactttttgtttctgcagaaataggagggtttttaatttctgggataaactagtggaaatgtagctgaaaggggaagttggtcaagtcgttagagcatctgtgtttgctaagtgttgtttgttcaggttagccgcctaccctcccacaaagaatgggaaaaaggcacacttgtcttctttaatgattagatttcaaagggggtggctcccatgtctttgagaaasacatttgtgggctgtaaaaggggcagagaaagattttaccgttgatagtattttactgtaaatactctaagaaaagagaggtcagaagattatggtcatgatgtaatctgtctaaagtttagtgaaagtgagaggaatgtgaaagccgtcttggtcaagatgcaggaagaaagggaagaagttgttgaacattttcaaatactagaagtttggaggagaagactgggcagctgggacctacacaaggagaagaggacgtatt

SEQ ID NO: 175887 - DNA, 360 bp, Homo sapiens
gtgaaaacgaactaatatacaacccctttccatcccttatgtattctccttccccagaactaaaactctaaataaaaattttaatatttttctctttcctggactgtktctggagtttttaaagctattataaaaagtaccaccctttttttttcttttttcaacccctgttttttacaacattgtggttagttgctcacttttctgcaggtgtgttggtgttccttcttccttcctatcttttactacctttgattcgtttcactgggttttggagcctgctatactccaccctcttcaatgggcactttccatggtgagagacacaactatctggatttcctatgccgactaagaatt

SEQ ID NO: 175888 - DNA, 360 bp, Homo sapiens
gtgaaaacgaactaatatacaacccctttccatcccttatgtattctccttccccagaactaaaactctaaataaaaattttaatatttttctctttcctggactgtgtctggagtttttaaagctattataaaaagtaccaccctttttttttcttttttcaacccctgttttttacaacattgtggttagttgctcacttttctgcaggtgtgttggtgttccttcttccttcctatcttttactacctttgattcgtttcactgggttttggagcctgctatactccaccctcttcaatggkcactttccatggtgagagacacaactatctggatttcctatgccgactaagaatt

SEQ ID NO: 175889 - DNA, 360 bp, Homo sapiens
gtgaaaacgaactaatatacaacccctttccatcccttatgtattctccttccccagaactaaaactctaaataaaaattttaatatttttctctttcctggactgtgtctggagtttttaaagctattataaaaagtaccaccctttttttttcttttttcaacccctgttttttacaacattgtggttagttgctcacttttctgcaggtgtgttggtgttccttcttccttcctatcttttactacctttgattcgtttcactgggttttggagcctgctatactccaccctcttcaatgggcastttccatggtgagagacacaactatctggatttcctatgccgactaagaatt

SEQ ID NO: 175890 - DNA, 360 bp, Homo sapiens
gtgaaaacgaactaatatacaacccctttccatcccttatgtattctccttccccagaactaaaactctaaataaaaattttaatatttttctctttcctggactgtgtctggagtttttaaagctattataaaaagtaccaccctttttttttcttttttcaacccctgttttttacaacattgtggttagttgctcacttttctgcaggtgtgttggtgttccttcttccttcctatcttttactacctttgattcgtttcactgggttttggagcctgctatactccaccctcttcaatgggcactttccatggtgagagacasaactatctggatttcctatgccgactaagaatt

SEQ ID NO: 175891 - DNA, 430 bp, Homo sapiens
gagcaataactgagtagaagtacaatagcaaagggagcccagtgggagaaaataatgaacttagagcatagagtacttgttaagaagtggaggtgaggccgggcacagtggctcatgcccataatcctagcactttgggagaccagcctgggcaacayggtgaaaacccatctctactaaaatacaaaaaattagccgggtgtggcagcgtgggcctgtcgtcccagctactcgggaggcggaggcaggagaattgcttgaacccgggaggtggaaaggtggaggttgcagtgagccaaaattgtgccactgcactccagcctgggtaacagagtgagactccgtctcccaaaaaaaaaaaaaaaaaaaaaaagaaagaaataagaagtggaggtggaagtaaaaggaatgtaaaaggaatgcatggata

SEQ ID NO: 175892 - DNA, 517 bp, Homo sapiens
atgtcctgaaaccattacaaatcaggattcttttgatcacaagggaaaaaaatccatttattgtcctaatcaaaaaatagtaattcataagctcttgtaagtgaacatgccagagatagctttaagtatggatgaatctaaggagtcaaagatcgactgggaatttgttctcttcatctttcacccgtgcttccttagtgagggttttcctctcaggcaggttatcccttcacaggaagatggcagctggaagctcggttgttctgacaatagccttgggactgataatcactgggccctcataggccaagtgatgtgaaccartcatggtggctagagagatggtatatgccagttgactagaaccatcaccagctaaacctcatggtccaagagccaggaagagatggtttcccaaaggaaaatcagagtgttatgaccagaagaattcataatcagcaggccagtgcaatggacatcattccacgtgttatgattgggaaaggaaaagcaagct

SEQ ID NO: 175893 - DNA, 517 bp, Homo sapiens
atgtcctgaaaccattacaaatcaggattcttttgatcacaagggaaaaaaatccatttattgtcctaatcaaaaaatagtaattcataagctcttgtaagtgaacatgccagagatagctttaagtatggatgaatctaaggagtcaaagatcgactgggaatttgttctcttcatctttcacccgtgcttccttagtgagggttttcctctcaggcaggttatcccttcacaggaagatggcagctggaagctcggttgttctgacaatagccttgggactgataatcactgggccctcataggccaagtgatgtgaaccagtcatggtggctagagagatggtatatgccagttgactagaaccatcaccagctaaacctcatggtccaagagccaggaagagatggtttcccaaaggaaaatcagagtgttatgaccagaagaattcataatcagcaggccagtgcaatggacatcattccaygtgttatgattgggaaaggaaaagcaagct

SEQ ID NO: 175894 - DNA, 521 bp, Homo sapiens
gaagaattcataatcagcaggccagtgcaatggacatcattccacgtgttatgattgggaaaggaaaagcaagctcaccttttmtggccatcttccatgttctgaggatgtattctaaatgattcatggattctcatggctacaaccattgcagtggatatgaaaggatttattccagctacaaactacaaataatttccataaggctcctcttacctaactcatgggcagcaagtgcatgtgcaagttcctgacgcagtataaagtgcaatagtctttgagtcacttcatttataccatcattaactcgccttgggcagcaagccacatgcatggtccttgccacaatacagcagtctctgtggcaccttatatatgccaacactgagcctcctccccttgtgattatggcgcccgcacagccctgaagtttgaagttattcagcatttgatagtgcctctatcctgtaagtcaagcccaagcttatagtcactgagtcatgcagccatttgaccaataa

SEQ ID NO: 175895 - DNA, 532 bp, Homo sapiens
cacgttaatgccttatttaaacatgaataaactcttttgtggggttttgctgtgaattggctggtgccttggtgactgcagtgagcactgagagtcttagctgtaggctccggctgcctcccagtccttyggtcaggccccatggatggacacatgaatggatggatggatagatggagacggagagaggcatagcatagcaagatggaaggaaaaccatagcagaaaaacagatgaagaaggaggaaggtatcggggaacccacccccaatatttcaacgtaggttctttctattttccataagtgtcagccagctgagaaataaagagaaagagtacatacagaggatttttgcagctgggccaccgggggtgacattgcatatcggtaggaccatgatgcccatccgagcctcaaaaccagcaggtttttattaaggatttcaaaaggggagagggtgtacaaacagagagtatgtcacaaagatcacatgcgtcaaagggcaaaaagcagaacaaagatcaagatcac

SEQ ID NO: 175896 - DNA, 532 bp, Homo sapiens
cacgttaatgccttatttaaacatgaataaactcttttgtggggttttgctgtgaattggctggtgccttggtgactgcagtgagcactgagagtcttagctgtaggctccggctgcctcccagtcctttggtcaggccccatggatggacacatgaatggatggatggatagatggagacggagagaggcatagcatagcaagatggaaggaaaaccatagcagaaaaacagatgaagaaggaggaaggtatcggggaacccacccccaatatttcaacgtaggttctttctattttccataagtgtcrgccagctgagaaataaagagaaagagtacatacagaggatttttgcagctgggccaccgggggtgacattgcatatcggtaggaccatgatgcccatccgagcctcaaaaccagcaggtttttattaaggatttcaaaaggggagagggtgtacaaacagagagtatgtcacaaagatcacatgcgtcaaagggcaaaaagcagaacaaagatcaagatcac

SEQ ID NO: 175897 - DNA, 532 bp, Homo sapiens
cacgttaatgccttatttaaacatgaataaactcttttgtggggttttgctgtgaattggctggtgccttggtgactgcagtgagcactgagagtcttagctgtaggctccggctgcctcccagtcctttggtcaggccccatggatggacacatgaatggatggatggatagatggagacggagagaggcatagcatagcaagatggaaggaaaaccatagcagaaaaacagatgaagaaggaggaaggtatcggggaacccacccccaatatttcaacgtaggttctttctattttccataagtgtcagccagctgagaaataaagagaaagagtacatacagaggatttttgcagctgggccaccgggggtgacattgcatatcggtaggaccatgatgcccatccgagcctcaaaaccagcaggtttttattaaggatttcaaaaggggagagggtgtacaaacagagagtakgtcacaaagatcacatgcgtcaaagggcaaaaagcagaacaaagatcaagatcac

SEQ ID NO: 175898 - DNA, 432 bp, Homo sapiens
ggacaactgaccctggtgaaaagaggaataattattggacagaaaacaactttaaaaagatgtaactggcatggtcagagagactggctatgctgttatagccatccccaaagaactcactgcttggggaaaggaggaagcagagaacaagaaagtaccttggcaatttagaatctatttgtgaatattaaacattcagtatacaggttaattaaaatttgaacacagctaaagaccaagttactaaagaccaayagcacaagctgcaaaagacagagaaagaaaatatgaaaggaaaatgaaaatgtagagaagctaaacccagaaggttcaatatcacctaatctatctccagaagcagataacaaagtgccaggaaggatgagttaaagggcgtttaaaaaagacctacatatgtcctgttaatattca

SEQ ID NO: 175899 - DNA, 646 bp, Homo sapiens
  misc_feature (1)...(646): n = A,T,C or G
ctgtggagtgctttacttccaattaggtggtcaattttagactaagtgtgaagtgttgctgagaagaatgtatatcctgtttctctggggtggagagttctgtagatgtctattatgtccaattggtccagagctgagttcaggtcctgaatatccttgttaattttctgtctcgttgatctgtctaatattgacagtgggatgttaaagtcttccactattattgtgtgggagtctaagggtctttgtaggtctccaagaacttgctttatgagtctgggtactcctgtattgggtgcatatatatttagaatagtgagctcttcttattgcattgatccctataccattatgtaatgcccatccttgtctcttttcgtctttgttggcttaaagtctgttttatcagagactatgattgcaaccctgccttttttttttttttttttttttttttttttttttggcttcccctttgctggggaaawattcccctatccctttattttgagcccatggggggctttgcccatgaaagggggctcctgaacacaacaaactgggggggtttgattctttattcaatttcccagcctgggtattttaactggggcatttagcccctttccctttaagggtagnnnnn

SEQ ID NO: 175900 - DNA, 619 bp, Homo sapiens
ctctttaacccatggatttttttttctctcgagcatctcgtaagactagtgtttctcaaaatcactttgtaacacmccatggtagagtccataaattgaacctcaaaggcacctagtttccttgtacatagtgtggagtaattagactggttggattgcaagatggtaagaaaatataaaataatgtatatttacataggttacagatcagtttccacattttctaatctgtttgtcactttgtaaatcacaaaataccttccatattattattttgatttttttataacaactgtataagataaataaggcaaatatttctattgccattttagagatgagaacactgatactagacgtttaatgacatgcataatatcacatagctaataagtggcagaactagaatttgtatcctgttcctttgatacttaaatccctttcttgtaaccgtttattttcactttaaatttataaccctgtatggaaggcagggaggtgatagcttcatttctaagctgaaacaggaaactaaaaaacattaatgatttatctagcttcaggtaagtggtatttaaatttctatttaagcttttcccctaaaatggtaaatgattgc

SEQ ID NO: 175901 - DNA, 253 bp, Homo sapiens
ttttctccccataagggaggaaaggtatagagacataaaagttaaaattgagagataarcatgaacactccagtggaaaagaggtagaaaatctgaagacgagtgaaattatggggtctgaaaagccaaaatacatttattgtttgaggagtgtatttaagagagtatagtaggtgaacttagagataatctagagttacatcatgataaacattattacctgactaaaggaagttaaacttgatgccaaagg

SEQ ID NO: 175902 - DNA, 356 bp, Homo sapiens
atttttaatgtacataatgtatatgcataatatacatacatatgtgtatatatgttagatatgtatagcacatatggtttagaatgcawtatgctaggcatgttgtttaccacttacttttatataatataataagaacataaaataatatttataatttggaaacctgacaattttgaatatgtgttgcatggttagccctgatcccaggacacatgcaaactttgggacgtgcagaagcctatgtggcttactgttctcttaaaattacacactttatctttcacatccctttgaggcctccaactaaaacttgtcttaatggtcactttttaaagcctcactctagttgtttc

SEQ ID NO: 175903 - DNA, 356 bp, Homo sapiens
atttttaatgtacataatgtatatgcataatatacatacatatgtgtatatatgttagatatgtatagcacatatggtttagaatgcattatgctaggcatgttgtttaccacttacttttatataatataataagaacataaaataatatttataatttggaaacctgacaattttgaatatgtgttgcatggttagccctgatcccaggacacatgcaaactttgggamgtgcagaagcctatgtggcttactgttctcttaaaattacacactttatctttcacatccctttgaggcctccaactaaaacttgtcttaatggtcactttttaaagcctcactctagttgtttc

SEQ ID NO: 175904 - DNA, 356 bp, Homo sapiens
atttttaatgtacataatgtatatgcataatatacatacatatgtgtatatatgttagatatgtatagcacatatggtttagaatgcattatgctaggcatgttgtttaccacttacttttatataatataataagaacataaaataatatttataatttggaaacctgacaattttgaatatgtgttgcatggttagccctgatcccaggacacatgcaaactttgggacgtgcagaagcctatgtggcttactgttctcytaaaattacacactttatctttcacatccctttgaggcctccaactaaaacttgtcttaatggtcactttttaaagcctcactctagttgtttc

SEQ ID NO: 175905 - DNA, 616 bp, Homo sapiens
tcgctcatttgtactatcccccaagggagtttttgttttcataagtggaaaataggcaaacttgctgctacctagaaatgaatttgagtagggcaaatatttctaagctagattttacattatgctattatgctaatttacagtctcttcctgccatttccttctcgstccaattacttctgtttggcacttagaaatgtaaaatgcgtgctttcaaacattttcactgcatagttgtcttaagagttcccttgaagtaaaacaaagcaatttcccatatggtgattcccactaaacagtgagtatcacatctttgtcaaagataatagtacctactaattaagtgcctaagaggttctttcatagcttttgcaaatattatattatttaattcttattatattcctatgagacgtgtattgttaactcggtgacgcagaaaagaatgtggctcagagagactaaatagcatgcccttaaaatcacacatttagttgaggtagaggtgagatacaaacacagacctgtctggctgaaggcatgttattaactgttctgcactgtctctctcctgccacactatccgtccatgctgagggctttcatattgctaaca

SEQ ID NO: 175906 - DNA, 460 bp, Homo sapiens
cggaaggcggagcttgcagtgagtcgagatcgcgccactgcagcctgggcgacagaccgagactctgtctcaaaaacaaacaaacaaacaaacaaamaaacactgactttttttttttttttttggtcacccacatgactcaaacttttaatagctgttttgcttctgatgcactcttagacctgttactggtggcaggtatctgagttaccatctgcgaatctgtacgggtctgcagcaacctgaattcttacctcctcagaataaagaattcaatttaggggcataaggcagaaaaagagacaggaagtttcagagcaggagtggaagtttattaaaaaggctttagaacaggaaaaaagggaaagatcacttggaagagatccaagtgggcgacttgaagaacaagtgtcgcatttaactgtcatcctaggactttgtaggctggcatcttatgccc

SEQ ID NO: 175907 - DNA, 387 bp, Homo sapiens
ggattgctaataatgggtttaatgtatcaagctwtttctcaattcagagacttcccatgtattgtctcctctgtctgcattacttttctgcccactctttgctcaagttctggtgttgtactggagccatctcacaccagctcttgaggttcaattgttaaattttcagaagccagttgccaaacacagcaattattaaaaattaaatatataaacataataaattacatttaaagcaatggtaatacattctaaaaacttatccatttctagctattttgctacatttgattattatctatctatactctttagattatttgcatctattatatttacatagcagaaatataaaatactggtattaatatgtctccataaatccat

SEQ ID NO: 175908 - DNA, 387 bp, Homo sapiens
ggattgctaataatgggtttaatgtatcaagctatttctcaattcagagacttcccatgtattgtctcctctgtctgcattacttttctgcccactctttgctcaagttctggtgttgtactggagccatctcacaccagctcttgaggttcaattgttaaattttcagaagccagttgccaaacacagcaattattaaaaattaaatatataaacataataaattacatttaaagcaatggtaatacattctaaaaactyatccatttctagctattttgctacatttgattattatctatctatactctttagattatttgcatctattatatttacatagcagaaatataaaatactggtattaatatgtctccataaatccat

SEQ ID NO: 175909 - DNA, 610 bp, Homo sapiens
tgaaagtactatagtcacagtgctgagaaaaggagtaaataaggcaatgtatataaaaccacttggctcagcccccggctctgtggttgataaatattaagctagtattcattattattataatctccaaagagtccattacaagatatagaagaatggaggcagcaataacactaagagaaaattccrttatctccaactatttatcctctagcccaacataattgctattagaaagaaagagcaactttaacaaaaattttaagttgcaatagatgttcaactttaaatccatcccagaaaaatttctaaccaaaggagcatagaagatttaatcttattttctaagtagtatagacttaattgtgagaacaaaataaaaacttggggaaatattagggaagagaaataagggtgtgaagagctgattattacaattccttctttcccttcttgtcttttattgctgatgggtaataaaatatgcaaagaatgtgctgagaaataaactaaacaaataagccagtataccacaaagatcatttgaaacttaaacaattaaaataagatatctgctaaaataataattggcagggctagcacagtttct

SEQ ID NO: 175910 - DNA, 449 bp, Homo sapiens
atgcagtttaaagtccaagaatgctatgtctacagattaagaagtagccaaggaggctgggcatagtggctcatgtatttattcccagggctttgggagcctgagacaagaggattgcttgtggccagttcacgatcagcctgggcaacatggcaagaccctgtctctacaaaattttttttaaaatgagtaaggcatggtggctggtgtttgtagcttctgctacttggcaggctgaggtgggaggattgcttgagcccagcggtttgaggtgacaaagccagactttgacaataaataaatgaaagaaagaaagaaagaaagaaagaaagaaagaaagaaagaaagaaagaaagaaagaaagaaagaaagmaagaaagccagtgatttttcttgactaagtatttttcaaaggcaaatatgggtaaaaggctggaaataagaggaat

SEQ ID NO: 175911 - DNA, 449 bp, Homo sapiens
ttgccactgatttgaaatatcaccttaataatacagtaacttattaaggatacttggatttgtttccaggcttcctaaactattaatcaaagctgtccttgtagtcctgggccaatccacactactgaaattttgtagctgtgggcttcaacctctgacaaagccacactcrttactcttcctttttaataagaatctttattctgctaagtgcaaccgctgaagggcacgttgcccctgctattttatgtttaatatttttataatccttcccgagctcatcgatccccactttcatctcagcccagtgcacactgggtgagtggatccctggatggcttctatggactcatggggtctgtttgttgaggacttcagcccagcgctgggcaggcaaatgctcaatgcctgtttctcagccaggcaggtggttaagactttccctccta

SEQ ID NO: 175912 - DNA, 586 bp, Homo sapiens
tgactcacgcataaatgaaactcctctgaaagaagaaaatatacaactgttctcattttttcctgaaaaataaataaaaccaacaacaatacmctcttcactacacaagtaaagacaaccagacagataagtaaacaagaccacatgaatgagaaccaatacaaacaacagacaaaataaaccagtacaggtacctagagagtagaaaggccaggaaagaagccagacaagcaaaacaaactgtatgattgtttccatttatataaaggtcaaaatggcaaaataaaattatagtgtttggagatgcatatttaggctaaaaagtataaagaaaatgagaaagtagctacaataaaagttgagattgtgactggctgaaggggtgagaaggtgctgtgactgggaaggggcattcagagagaggttctgtctcttgtcttgaatagtggtgactctggtgttcaatgcagagtaattcattaaactgtacatatatgttttacgcattttctctttatatttcataggaaaacagttaaaaatacatcgtgtccaaggagcctttatcccagtaatccagaggtga

SEQ ID NO: 175913 - DNA, 500 bp, Homo sapiens
ttaggatcatccatctgatatcaaaaattaaaaatttaaaactcagctgggtgtagtggcatrcacatgtagtcccagctatttgggaggcttaaggagaagtatcacttgagtccaggagtttgaggatagcctgggcaacatagcaagatcctatctctaaattaaaaaaaaaaattaaaatcctaagtgggtaagtcttcattttcaaaggtcttttgacatttttatatagtgagtctctactggcttacaaagaagaaccagaggtggcaaggatcccctcagtatcatttcctcctactgacaatggaagtagtgcaggctgggtaggcactgattctaagggggaggtccccaaagataggaactatcttatccatctgtgcaccccaaataaaggtcctggcacagaggtggttttggtatctgctgagtgaattaaacataatgagatgcttttattaaagatactgactaatcatctgctccaatttctt

SEQ ID NO: 175914 - DNA, 549 bp, Homo sapiens
gcatcgactcctcatctccagtgattataatgttcttcacttcctgttattagaagggcacctttcggctgggcgcggtggctcacgcctgtaatcccagcactttgggaggccaaggcaggcagatcacgaggtcaggagatcaagaccatcctggctaacacggtgaaaacccatctctactaaaaatacaaacaattagtcgggcgtggtggcaggtgcctgtagtcccagctactcaggaggctgaggcaggagaatgacgtgaacccgggaggcggagcttgcagtgagccgagattgcgccactgcacttgggcctgggcgacagagcgagactccatctcaaaaaaaaaaaaaaaaaaaaaaaraagggcacctttctcttgggaaatttatgcccttcttttaggtagaaagtgggaggtcaaagagcgcttcctgcatctgctttgtctcaattgcctttagcttaaaataattgatatctcaaagtggcatattttgggtggcatgttctgattcccttcaggttcttagttttcccca

SEQ ID NO: 175915 - DNA, 533 bp, Homo sapiens
ctttcctttggtctttttcttcttttattcatttaaccaacaactactgagtatctaccaygtgctgaacattgttacaggtgctataagggaagatgccaggaaaacagaaggttatcatctaatgatatttttagggggcaaggagtgccagggcagtatgggaacacaggaaaggaccacttaggttagtttatggggcatgggtgtatgtgataacatgtttggggaggtcaagctgactttgaggtggtcacagatcacccaactggacgttcagtcactactttattaattcatggaataaacattgtcgaaaacctttgccaggtggtacagatttggagattaatatgatagggataatcaggaggatggtgaggagtattacacaaattattgtacaatgcagtaaatgctctgatcatttggggaggatattccaggtagtgggtaccataagagtaaacgaggaggggtcaagaacagtatgatgactgtgagtacaaatattacaaatagttgtggctgga

SEQ ID NO: 175916 - DNA, 553 bp, Homo sapiens
tctaccacgtgctgaacattgttacaggtgctataagggaagatgccaggaaaacagaakgttatcatctaatgatatttttagggggcaaggagtgccagggcagtatgggaacacaggaaaggaccacttaggttagtttatggggcatgggtgtatgtgataacatgtttggggaggtcaagctgactttgaggtggtcacagatcacccaactggacgttcagtcactactttattaattcatggaataaacattgtcgaaaacctttgccaggtggtacagatttggagattaatatgatagggataatcaggaggatggtgaggagtattacacaaattattgtacaatgcagtaaatgctctgatcatttggggaggatattccaggtagtgggtaccataagagtaaacgaggaggggtcaagaacagtatgatgactgtgagtacaaatattacaaatagttgtggctggagcaaagactgtcaagcaggacacaaaaaaggtgttctggcaggggccagatctcagaagaactcagaggctgt

SEQ ID NO: 175917 - DNA, 553 bp, Homo sapiens
tctaccacgtgctgaacattgttacaggtgctataagggaagatgccaggaaaacagaaggttatcatctaatgatatttttagggggcaaggagtgccagggcagtatgggaacacaggaaaggaccacttaggttagtttatggggcatgggtgtatgtgataacatgtttggggaggtcaagctgactttgaggtggtcacagatcacccaacyggacgttcagtcactactttattaattcatggaataaacattgtcgaaaacctttgccaggtggtacagatttggagattaatatgatagggataatcaggaggatggtgaggagtattacacaaattattgtacaatgcagtaaatgctctgatcatttggggaggatattccaggtagtgggtaccataagagtaaacgaggaggggtcaagaacagtatgatgactgtgagtacaaatattacaaatagttgtggctggagcaaagactgtcaagcaggacacaaaaaaggtgttctggcaggggccagatctcagaagaactcagaggctgt

SEQ ID NO: 175918 - DNA, 511 bp, Homo sapiens
tctaccacgtgctgaacattgttacaggtgctataagggaagatgccaggaaaacagaaggttatcatctaatgatatttttagggggcaaggagtgccagggcagtatgggaacacaggaaaggaccacttaggttagtttatggggcatgggtgtatgtgataacatgtttggggaggtcaagctgactttgaggtggtcacagatcacccaactggacgttcagtcactactttattaattcatggaataaacattgtcgaaaamctttgccaggtggtacagatttggagattaatatgatagggataatcaggaggatggtgaggagtattacacaaattattgtacaatgcagtaaatgctctgatcatttggggaggatattccaggtagtgggtaccataagagtaaacgaggaggggtcaagaacagtatgatgactgtgagtacaaatattacaaatagttgtggctggagcaaagactgtcaagcaggacacaaaaaagg

SEQ ID NO: 175919 - DNA, 575 bp, Homo sapiens
tctagagttctctggaatcaattgatttggtcccagtcaggaaaaaatatttgggaagacctaatacctagatccaagtacagctggtaagggattagagtagccatgatccttagtaaataagcctttatgtcacttaattactacatcagactcagaactttctcccttgtcagtttcacattcactctcaggatagggacacgtgactcatttcatacmgttcccactttcagcaacaactaatatggataaggaaacaaaacttttagagcttccttctacctattcctcagcacgactaattgaatatacaacctaaaaacaagtgacaaacaatggctggctgtttcagaccctgttgccagaagatatatatgacaaacagaggtggtatatggtaacttccaggcttctcaaaggtgctaggatccctatcctgtgtggttcttcctactggaggaccctactccatcctacaatgctctgactcgtcttttcccagatggtgatggattaccccttcctgctagactatgacttctcgaggccaaagccaggctcctcttgttcgg

SEQ ID NO: 175920 - DNA, 531 bp, Homo sapiens
tcagactcagaactttctcccttgtcagtttcacattcactctcaggatagggacacgtgactcatttcatacagttcccactttcagcaacaactaatatggataaggaaacaaaacttttagagcttccttctacctattcctcagcacgactaattgaatatacaacctaaaaacaagtgacaaacaatggctggctgtttcagaccctgttgccagaagatatatatgacaaacagaggtggtatatggtaacttccaggcttctcaaaggtgctaggatccctatcctgtgyggttcttcctactggaggaccctactccatcctacaatgctctgactcgtcttttcccagatggtgatggattaccccttcctgctagactatgacttctcgaggccaaagccaggctcctcttgttcggcagtctgtgtgtaaccatcagaactctagagaaggtgcagagtggctgccgcacagttagtatcaacacacagttgctgaatgaaggaacaagtgaatagacaa

SEQ ID NO: 175921 - DNA, 551 bp, Homo sapiens
ctttggtttcctgagttgagggtctcccatataggatcccattttatttacagtgttatttagacagatatgtaaagtagaagaacacttccaaaatgctaatagtggttatgagtggccagattatggccaatttttctttcttcctttgatttttcttctttctccaatttctatgcagggtgcacagttatattcaaaaaaaggttttctaaatcaatgccctggcaaaacacattctatctccatcatgtccttcacagttaattccaaatcctaatctctgagtgggtcaagaaactagtcttatttgtagtcccagcacctggcacagtgtctggcatacagatgatgctcattaaatgtctgctgaaggagtggctggatgaatcatcaccttacagaccctttggaatgggacgcrctttcacctccacattcagagcatatgggttctcaccctgtgagcccggggcttccacccaggggagcattccagcaaagaggcaccagggacaccagggaaagtgccctgctgtcgtctgagaagc

SEQ ID NO: 175922 - DNA, 584 bp, Homo sapiens
tgtgagttttcattttatccactcaatgagactttgagttctttgaagttagagatcatattttaggttctttttattccctgctgtgcctaacacagggttggacacaaagtatatactttacatatgctttgattgatctgaggcccaaagttttacctttttcatcccaactccatcctgtatctgcagaaggaartctaatgtctgatcatcagtgaaatatccaggagtaggctggctgcaaataaggacaaagtaagcaatcaatagtgaacaagaaaaacaggaaaactaagaactctccctcccttctcttgcactggccccagatataagaattgcaagcaattgtcctggacaatttttaaacatgggaaagtggatcaaaacagcaaacacaagaaggaacacaatgcaaacctgcgcaggccttgaagtctcaatgcccagtaaggtgtcagattttgcccccgaagcagcacaaggctttgtctggttgtaatcagaaggttgctgcagttggaatctggtgccttcaccatctggagtagttcaacaccatcactgggttaaataagacc

SEQ ID NO: 175923 - DNA, 467 bp, Homo sapiens
cacttcagggacctccaaacttggctgccctgctgcaaccctgaacctgatggtgggaccattttccccggagctgtgtcaatgttctgagaatgtgagtttcaccgctgtgtgtagtcctaggccaggtgactgcagggccctccagaggacagtgaatgtaatgcagctgggagctagcaccggagcctcagctcctgtgcttgtcctgcagtcctcattcagacttcccagcttcccttcagagggtgtggagaaagcaaattaacttaacaatatcttttcctagggtggagatgcaccttgggtgcagcatttaaggaagcactcactctcacagctgtccaagtgcaggatggggactgagagtgagcgcctccttaaatcttgtgccctgggttagatgtctscttgtcttttccattctatttcctgtgtttgggaagcagcaggtataataaaatgaa

SEQ ID NO: 175924 - DNA, 580 bp, Homo sapiens
  misc_feature (1)...(580): n = A,T,C or G
aagcttgaagtggtatttagagatgctacatttagtgacttcagaaggtataaactgaagcagcaatgtagattaatattcaagatatgaggataaaagggtgactaaagtgggatccaaagcaaatgggtgccagaaaaacaatgaaagaagaactgatggaggctatgatctaatttacatttaggggaatgaggaaaacagtggaagattttgcaaccatgaaaataaatactggaagttctgaccaaagaaattaggtttaaaaaaaagaaataaaaagacattcatattggaaaggagaaagtaaaattatctctgtttctagatgacatggtctaatatgtagaaaaccataygtacttcacaccaaagaaaactgttagaactaataagtaaatttagtaaagttgcagggcataaaattaacatacaaaaatcagttgtgtttctgtacactaaacaatgaataaccctanaaggaaattaagaaaataatcccattttaaataacatcaaaataaaaaaaggcatcaaaataataaaatacttatgaataaacttaattaagaacacaaag

SEQ ID NO: 175925 - DNA, 246 bp, Homo sapiens
tctggaagaaatatgacacctgcccaaggagaaccccaaatttagtwcaaacttgcattggtgatggtagtactggaaaactaccctcatgaaatatcatttgactgctgaatttgagatatagccaccgtgggtgtggagctccatcccctttcgttccacactgatatggtctggctttgtgtccccatacaaatagcatattgaattgtaattcccgatgttgtgggagggatctggtgggag

SEQ ID NO: 175926 - DNA, 246 bp, Homo sapiens
tctggaagaaatatgacacctgcccaaggagaaccccaaatttagtacaaacttgcattggtgatggtagtactggaaaactaccctcatgaaatatcatttgactgctgaatttgagatatagccaccgtgggtgtggagctccatcccctttcgttccacactgatatggtctggctttgtgtccccakacaaatagcatattgaattgtaattcccgatgttgtgggagggatctggtgggag

SEQ ID NO: 175927 - DNA, 362 bp, Homo sapiens
acacccccatcatgttttgtggcaaaaaaaaaaaggatgttaagccagaaaatgaagacaaagtttactctcttctattaaacaaagagtctttagtactataacatttatgtcaaaaataactacwactttgaaaagtccttcctctggcctgctaagaagctcactgaagaccccagcctgaagtttgtagccatgcctgctcttgccccaccacaggttttcctggacccagctttggcagtgcaatatgagcatgatttagaggttgctcagacaactgctctcctggatgagaaggatgacctgtgagaaaataaagctggagcccagagtcagaagtctaacttcataggcaactg

SEQ ID NO: 175928 - DNA, 362 bp, Homo sapiens
acacccccatcatgttttgtggcaaaaaaaaaaaggatgttaagccagaaaatgaagacaaagtttactctcttctattaaacaaagagtctttagtactataacatttatgtcaaaaataactacaactttgaaaagtccttcctctggcctgctaagaagctcactgaagaccccagcctgaagtytgtagccatgcctgctcttgccccaccacaggttttcctggacccagctttggcagtgcaatatgagcatgatttagaggttgctcagacaactgctctcctggatgagaaggatgacctgtgagaaaataaagctggagcccagagtcagaagtctaacttcataggcaactg

SEQ ID NO: 175929 - DNA, 362 bp, Homo sapiens
acacccccatcatgttttgtggcaaaaaaaaaaaggatgttaagccagaaaatgaagacaaagtttactctcttctattaaacaaagagtctttagtactataacatttatgtcaaaaataactacaactttgaaaagtccttcctctggcctgctaagaagctcactgaagaccccagcctgaagtttgtagccatgcctgctcttgccccaccacaggttttcctggacccagctttggcagtgcaawatgagcatgatttagaggttgctcagacaactgctctcctggatgagaaggatgacctgtgagaaaataaagctggagcccagagtcagaagtctaacttcataggcaactg

SEQ ID NO: 175930 - DNA, 620 bp, Homo sapiens
tttaataatgatatacataagacagctgacccagtgcctggcacagaataaaccctcaaaaaattttaactactatcattactattgtcattattatgcctatttaaagcctcttttgaacaaaaacaaagtcatttgtatcctaaaatgacttgcaaataacacataattaacaaacacactaaaatatgtggttataacttgctttttcatttcaaatttataagagaggaagcagaagttcaaaaagcaatttccttaattaaaaagaatctgatgtttaattcacaaacaaggttttatagccattaaactggaaccagtccattacttatacacctttgtggttttttcaaaacactttacctttaaacactttgaacctaatggatcctggatgaaggtgcaggtagagtcatttcccgtgatgaaatacctgcattagtcacgagtcattatttagtaaagacaggaaataaacaaagatgcatatgaaacaaaatyattctgtgacctccacctgaggctttttgctttgtgacaaaatcaaataatcgacttatttaaaaattatgtattattaactttctaattgaggcatctggtagacatttcgtgaa

SEQ ID NO: 175931 - DNA, 525 bp, Homo sapiens
gggaactctgataacatgtgaggcatcttgggccgtctgttcttcatgataggaatctctatgatatgctgagcccaaggtctacccacgtattacctgcagtgttccaaggtgagctgtcttcagtcagtcacacaaatggttctaatgagctggtgctgcccaccctgtggtaagaaaaggactcttgtctaaagccacagtcatcaagtacctgtttaagaaaagcaagtcagcattttggatctttattatcatgaacagaacttttgggcccatgataaagtccaaattcagtcttttaccttatttgaaatataaaaagacaacctatttcatgagctatatatatcaaaagtgcaagcaaacaatcacaatttctttaaagggatttacagatattatttattcttccccaraatagatatgcaaaaaggggtgacaaaaacaagacttgcattataaaaaaggaagtcatcacactttattagctgcatccgttcccataagaaggaaaaagtgacc

SEQ ID NO: 175932 - DNA, 421 bp, Homo sapiens
aattcataggagaggcataaatttttccaacaaattattcttgagcaatttaaatatccgtatgcaaaatatcttaatttgcatcatttaattaagttcatactcacatatgataccaaaagtaactcacaaatagatattagatctaaatatgaaacctaaaactatatacattmtaaaagaatacataggagtcaatcattttggttttgggttaagcaaagatcccttagacacagcaccaaaatttacaatacaaaaaagaaataaaaataaattagattttataaaatttacgtatttctgttctttggtatacactgtaaacagaatgaatacaaaaacattacagattgggagaaaaaaattgcaaatctcatgtctaataatgaaaccatatgtagaaaatataaagaattct

SEQ ID NO: 175933 - DNA, 420 bp, Homo sapiens
aattcataggagaggcataaatttttccaacaaattattcttgagcaatttaaatatccgtatgcaaaatatcttaatttgcatcatttaattaagttcatactcacatatgataccaaaagtaactcacaaatagatattagatctaaatatgaaacctaaaactatatacattctaaaagaatacataggagtcaatcattttggttttgggttaagcaaagatcccttagacacagcaccaaaatttacaatacaaaaaagaaataaaaataaattagattttataaaatttacrtatttctgttctttggtatacactgtaaacagaatgaatacaaaaacattacagattgggagaaaaaaattgcaaatctcatgtctaataatgaaaccatatgtagaaaatataaagaattc

SEQ ID NO: 175934 - DNA, 191 bp, Homo sapiens
ttctcctttcaccccaccatttttaaatttaatcgtataatatacatattactcaagatgaagttgtcacaacaataaaatttttctacttagtagggcagaagatgatcatagaagaaagccatatttcttaaaggaaatgtttaatgattatacatgtgtatgcamctaatagtatacactcaacatat

SEQ ID NO: 175935 - DNA, 547 bp, Homo sapiens
ttgaatattggttttgaaactgaaacatcacttgatataaagaaaagatgttccaagctccaagcaaatgctttacaacgtacttattatatcaacttgttattaattcagatactcacacgtatctcaattttacatattgagaaaatgaacaatgagaattaccaaatatagtagacatcttttatattctttttcaaattttattttagattcagggggcacatgaacagttttgttatgagggtatattgcatgatgctgaggtttgaggtatggaatccattgcacacaggttgtgagcatagtacacaataggtagtttctcaacccttggtcccttccatccttctckcctctggtattcattagtgtttatcgtttccacctttatgtccatgtgtacccaatgtttagctaccacttataagaacatgtggtatttggttttctgtttccacattaattcacttgggataatggcctccagctgcatccattttgctgcaacggacatgattttgttctttttctatggctatattct

SEQ ID NO: 175936 - DNA, 560 bp, Homo sapiens
gaatagtgctgaaatgaacatacagatatttttgtctttctagtagaacaatttctttttctttgggtatatacccagtaatgggattgctgggttgaatagtagttccatttttgggtttttgagaaatctccaaactgcttttcatagtgactgaactgatttaccttctcaccaacattgtagaagcattccttttcctctgcagccttgccaacatctgttatttttcgacattttwataatagacattctgactggtgtgaaatggtatgtcattgtggttctgatttacatttctatgatgatgagtgatgataagcattttttatatgtttgtttgctgcttgtatatcttctttcaagaagtgtctgttggtgtccttggtctacatttaatgggcttgttttcttgctttttgattgttttgtgttccttatagagtctggatattaggcctttgtgacacacatggtttgtgagaattttctcccattttgtaagatgtttgttttctctgttgacagcttcttttgatgtgcaggagctctttagttta

SEQ ID NO: 175937 - DNA, 560 bp, Homo sapiens
gaatagtgctgaaatgaacatacagatatttttgtctttctagtagaacaatttctttttctttgggtatatacccagtaatgggattgctgggttgaatagtagttccatttttgggtttttgagaaatctccaaactgcttttcatagtgactgaactgatttaccttctcaccaacattgtagaagcattccttttcctctgcagccttgccaacatctgttatttttcgacatttttataatagacattctgactggtgtgaaatggtatgtcattgtggttytgatttacatttctatgatgatgagtgatgataagcattttttatatgtttgtttgctgcttgtatatcttctttcaagaagtgtctgttggtgtccttggtctacatttaatgggcttgttttcttgctttttgattgttttgtgttccttatagagtctggatattaggcctttgtgacacacatggtttgtgagaattttctcccattttgtaagatgtttgttttctctgttgacagcttcttttgatgtgcaggagctctttagttta

SEQ ID NO: 175938 - DNA, 560 bp, Homo sapiens
gaatagtgctgaaatgaacatacagatatttttgtctttctagtagaacaatttctttttctttgggtatatacccagtaatgggattgctgggttgaatagtagttccatttttgggtttttgagaaatctccaaactgcttttcatagtgactgaactgatttaccttctcaccaacattgtagaagcattccttttcctctgcagccttgccaacatctgttatttttcgacatttttataatagacattctgactggtgtgaaatggtatgtcattgtggttctgatttacatttctatgatgatgagtgatgataagcattttttatatgtttgtttgctgcttgtatrtcttctttcaagaagtgtctgttggtgtccttggtctacatttaatgggcttgttttcttgctttttgattgttttgtgttccttatagagtctggatattaggcctttgtgacacacatggtttgtgagaattttctcccattttgtaagatgtttgttttctctgttgacagcttcttttgatgtgcaggagctctttagttta

SEQ ID NO: 175939 - DNA, 617 bp, Homo sapiens
actcgtcatttacattaggtatatctcctaatctcctctcttttaattggtctgttcagctctgcattacttcttgatttagtcttgctaggttgtatgtttctaggaatttatctatttcttcaaggttgttcactttgttggtgtgtaattattcctaacagtccctcataatcttttttatttgtcattggtcataatgactctcattccatttctgattctatttgagtctacactcttttacttagtctagctaaggattttgtcaattttgtttatcttttcaagaaacrgactcttagttttatgcatgtttttctattgtcattcttactttcattttatttctgctctaatttttgttatttcttatcttcttataactttggattttgtatgctctacattttctagttttttttttgagctacaatattaggttgtttatttgagatctttcttctttcatggaggcacttgtcagtttaaaattcctcttagtatggtttttgaagttttggcatggtgggtcttatttttatttgtctcaggacatattcaattttccttttgatttcttctatggttcaattgttgttcaagggtgttttata

SEQ ID NO: 175940 - DNA, 507 bp, Homo sapiens
tggcatgacaggaccacccctagctggggggggggggtggtggttaggaaagcagcttttcctggccccctccctcctctacggccctgtcacccccctccatcagagtattactgtgagtgggtggcagagagagagcagggggtgtgaatgggctggagaccccaaaggctggccgtgcctccccaacttggtgagcttagccttccgtttttggaaagcagcctggagctggcctttaggaattcgtgtttacatgtaaacacacgtgttacatggatacagctcctagccagaagcaagcaggctctacccacacaggcctccctcttagctaggtctgccctctgtggggacagagaaagaactctcaggatcttggctgggcaccatcacagggcactgactcctggcagaaagctctcctccttgccccagctccttggarataattgtcagaaaatagcaggccgggctgaatggggagtggaaacagaagccagcagt

SEQ ID NO: 175941 - DNA, 564 bp, Homo sapiens
ctccgcttacaattggatttcccgccttccctgcctaagaccgggagttgagacaaaaattgagtggcaaataagagtttaaacttttgtgctcctcacccccagagcagaccgagtgctaactacttacgtgtcaatgggatctttggcctgtggggatctcctggcgcttggagagaaggaaccctggaagattggtgtcgmcatttcacccgtcttctttttacttagccattgaagagagagggatacaatgcacttacaggcattcatgcgccttgcctctcccattactctgggcaagaaatccccagtcctacaaaagcagtggcatcctatctggagaccagggctgagcaagggctggcttgggagggtcagagatgggggtgggggagaggtcagaggcgctgccgaatataaaggcaatgggagagaaaatgctgtgtcctccccgtgaacctgggctgtgtcctccccccagcctttccccactgctcaacccaacttaaataaaagcccagccctcagcttcccagcgaggctgtagcagcatcaggcaga

SEQ ID NO: 175942 - DNA, 588 bp, Homo sapiens
agatctctcatatttagaggccaaaggagtgggaaaaaaaaaaaacaactcgtgcttccaccgttaattatctgggtaacttgggtcacaccccctaactgatcctcctctagagaccggaaatgggccaggtaagggagagagtttgggtaaagggtaaggtttgtgtgcttctcactgggtgtacttgatcatccaccttacytgggtaactacttttttttttttttttttttttttttggaaatggggtccagctctgtttcccaggctggagtgttgtggcaccatcatagttcactgaagcctcaaactcctgggctcaagtagtcctcccaccttagcctcttaagtatgtgagactgcaggcatgtgccacacccccaggctgggtagctgcttttcaatgtgcttctgcacccacagatttggacaagggtatttttaggcagcagtctttcaactctcttcatcctgaaggtttagcctgccatttacatttgatgcacatgaagaggctaatgggaaggaaatctatagaactggaattggaagtcctttcgaatcccaaatccccttggtctaaga

SEQ ID NO: 175943 - DNA, 564 bp, Homo sapiens
ggccaaaacttatacactgggggtaatttaagttgttaagaagactcccttgctatccaaaagaattatgtgaatgtggtgagataaataggttaatgttagagaacatatatcacaaattcataccatggaaatacgagggtttattaacatcaggtagttcatgaaagacaagactgtcatgaaactgaactttttgtatttgtcattttcagtacctacagatagatattgcagtgayttaggatgagcttaacacagaatacttcagcaagaatgaaatcaaatactatctcactaaagacctacttaacccatatctgccttatttatccaacaaaacagaagtgctttgaaaaaaattaaagtaatataatcattcggtaatattaaagttgaggcattatcatcaacataatcattgttgttttcatcgtcaatttgagaggctattcttcatagatttaaaggggtatgatctctattccataaatgttcgaattgggctcaaagaacagactatggtgtaaataaccaaaaatatatatcattccttagcagtag

SEQ ID NO: 175944 - DNA, 464 bp, Homo sapiens
agaactctcttctgaccccacagaggagagtgttagcatgaaccagtagaaaatggcatgggttgctcacgaaatttgtcctacagcatgtagagtatttgctatgtgcaartacttgagagttttatttctaacatttagaagtctccttcaatgtggttgttacctgtctgtcatatgagaaaactaggacccagagatttgatagttttgcaaggagtcacaactagctagctagtggtgattctgggcttcaaactccagtctatatgactcaagagttcactgtcttcctactaggcaggcattacctctctggcacctacctcattttaaatgggattttgatggatagtgcttacagtttcggtttggggttgggtttttttttttttttttttgttagctaatttgattatgtcacatatattttctaactattggttagaaaagaggttggcaat

SEQ ID NO: 175945 - DNA, 391 bp, Homo sapiens
ttccctacttctctgttttaagaatatttcgaataagattggtattagtttttctttaagtgtttggtggaatttatcagtgaagccattgggtcctgggctttttttttttttttttttctgggagactttttattatgacttcagtctccttactttccttcttgttattgttctgttcaggttttggatttcttcaagtttcaatcatggtagattgtatatgtctaggtatttgttcatttcttgtagatttcttaacttattggcatataggtgcttatgttagctgctaatgattctttgaatttytgcagtatcagttgtaatgtcttgtctttcatctctgattttatttatttggctcttctctttttatttattagtctgc

SEQ ID NO: 175946 - DNA, 583 bp, Homo sapiens
tggcccctctgtaataatttcatagagcactaagtatactactatatagagcacatatctatctacacaaaacatattttatatctgtctctcccattaggtactgaaatttatattcacctctgtatccccagggcctaacatagaacataaaatatagaaactacttaaaaaattgttttgtgaatgaataaataaatgctggaataaagtggtagaaggagatttctcactctctacttaacagaggccaattttagcatcaacctggaagggaagtattaccattcttgattaaatactgagatattctcctttggtatccacatacgttaaattttaaagttaaaggaaatgtacagatgccatagctcaaggaataacagtgctagaacatactatatgctcaatacatatttggtgattaactggcacagtggtgttaggcagaaataactacaatgtgtctgctttaacaacktggatttctttaatggctgcatattaccttgtcattcccttcagtctccacctaaacggtagtgaaggtgctcagatatatatgcagaccacagctcatttt

SEQ ID NO: 175947 - DNA, 551 bp, Homo sapiens
gtacacattttaatattaacttaaaagtaataactccttattaccattcggtatttatgaagttctctttggactcttacatcattacttttctcacctctcaaaattaaaatttttcttttcttttttttttttcttttttttttttgagacagggtcttgctctgttgcycatactggaatgcagtggcatgatcttggttcactgcagcctccaactctccaacacaagggatcctcctgcctcagcctcccaagtagctgggaccacaagtgcataccaccacacccagctaatttctgtcttttcgtagagatggggtttcaccatgtgggccaggctggtgtcaaactcctaggctcaagagatcgcctgccttggcttcccaaagtgcttggattacaggtgtgagctgccacgcccagcctaaaattactttcttaaatgatttatggggaaacaaacttcttagattttgtgataggcttcaataatgtcttatatggtttttgaagagtgttactttatgaaaatggttttaacaatataa

SEQ ID NO: 175948 - DNA, 551 bp, Homo sapiens
gtacacattttaatattaacttaaaagtaataactccttattaccattcggtatttatgaagttctctttggactcttacatcattacttttctcacctctcaaaattaaaatttttcttttcttttttttttttcttttttttttttgagacagggtcttgctctgttgcccatactggaatgcagtggcatgatcttggttcactgcagcctccaactctccaacacaagggatcctcctgcctcagcctcccaagtagctgggaccacaagtgcataccaccacacccagctaatttctgtcttttcgtagagatggggtttyaccatgtgggccaggctggtgtcaaactcctaggctcaagagatcgcctgccttggcttcccaaagtgcttggattacaggtgtgagctgccacgcccagcctaaaattactttcttaaatgatttatggggaaacaaacttcttagattttgtgataggcttcaataatgtcttatatggtttttgaagagtgttactttatgaaaatggttttaacaatataa

SEQ ID NO: 175949 - DNA, 551 bp, Homo sapiens
gtacacattttaatattaacttaaaagtaataactccttattaccattcggtatttatgaagttctctttggactcttacatcattacttttctcacctctcaaaattaaaatttttcttttcttttttttttttcttttttttttttgagacagggtcttgctctgttgcccatactggaatgcagtggcatgatcttggttcactgcagcctccaactctccaacacaagggatcctcctgcctcagcctcccaagtagctgggaccacaagtgcataccaccacacccagctaatttctgtcttttcgtagagatggggtttcrccatgtgggccaggctggtgtcaaactcctaggctcaagagatcgcctgccttggcttcccaaagtgcttggattacaggtgtgagctgccacgcccagcctaaaattactttcttaaatgatttatggggaaacaaacttcttagattttgtgataggcttcaataatgtcttatatggtttttgaagagtgttactttatgaaaatggttttaacaatataa

SEQ ID NO: 175950 - DNA, 576 bp, Homo sapiens
caccagtccctgaagtgcccaatctgtgtgaatatcattacaacaattgtctgaaatactctagctagtaaaacaaaatgtgattgtaagcaagtaaagcattttccactttttttttttttttttttagacaggggtctcactctgtcactcaggctagaaagcagtagcatgatcattgctgactgaagcctcaacctcctgggctcaaaccatcttcctgcctcagtataccgagtagcgaggactacagccacaygccaccatgcccagctaatgtttttattattttcatagagacagggtcttgttttattgctctggctgccactttaatatttgactgacatattctctctagattgaaagagcacattgccttattggttttctatgagtaaatttacatacaaaataatacagatatctgaccagcttttccccattttataaggagtcaattctagacttctactaaatgcagacaaacatttcatctgatataaagttacttatgatgcatattacatggacttcattaaagtctacgtagtaccaaccaatatggcagcccct

SEQ ID NO: 175951 - DNA, 431 bp, Homo sapiens
tggctccactgctaggtgcaatccctgtgctcctctctcacagacctgtctggagtggggagcagcccyggctcctcccatggctcccttgcacaccgagttgtgtcccctctcacaggccagctgtagccccctcccctggtcttgaataggttgccatctggaaaagcagtcaggggtcggggtggagggcagaagccaaggctccctttgatctccttgggaggctgagaagtcccacaagtgacaaactcttatgaagcttagtttaagaaagaaaagagatccccacaccctcagagggcaacagctagagaattatacaaagtgggttgaccgccatcattccttccttccctctcttcgtttctttcctccttctttcttttttgtggagatggagtttcgctcttattgcccaggctggagtg

SEQ ID NO: 175952 - DNA, 607 bp, Homo sapiens
tctaaattgaaaaaaaattttctgatctgtaagcctgaaaaagaaaattgttttgactcttcctatatctgaagattataagatttttttctcttaaccctttctcactttatcctcctttcacctccgtggtgagcttgggacacagaatattgttaatgtattttttgtatatttcatgtttctaattccatcttcttttggtaattttgttttatttatttgtttgtttgtttgtttgtttgagacagagtttcactctgttrcccaggctggagtgcaatggcgcaatctcagctcactgcaagcacctcttccctggttcaagcaattttcctgacctcagcctcccgaatagctgggattacaggcgtgtaccaccacgcctggctaatttttatatttttagtagagacagggttttgtcgtgttggtctcaaactcctggcctcaagtgatccgtctgccttggcctcccaaagggctggtagtaaaagcatgagccaccacgtctggcctatttatttttgagacaaggtctcgctcttgtcccaagctcaccatggaggtgaaaagagggtaacgtgagaatgggttaagagaaaaa

SEQ ID NO: 175953 - DNA, 608 bp, Homo sapiens
ttgttggaatttctaccttctctaaattgcctctcattccttaaggaataaggaatcttattccttagagatgtgcaacccaatgagagacatataaagtgtatcctgtagctttaggaaacaataaattcacattgaaaaacagagcaatttttaattgtttaacaacgaaaactaaaaaccygatgctcataaaaactatttggcattcattcattcactcatccattcagaaaatacattttgagaatctaccaaacagagtctagacattggaaagaaaataaaaaagataagaagttttgattttgctgtcatgaagcattttagaagagaaagataagtaacaatatcagacagtaataaatgattggaaattgtaacagggcaacaagacaaggagtgtcaacagggactgtgttaggttgagcaaccaggagacaaaggccaaggtaggtgtgaatttcttatgcttgaaaaatagaatgttgtctatatctggaccccaatattagagaagaagtagaaggataaaatgagagactacagactgactggcctcatagttgagttggcacctttttaaatgcagtggggacgtgtaggag

SEQ ID NO: 175954 - DNA, 508 bp, Homo sapiens
tttattcttttaattaaaaataggcaatggatgttagagaaaggacatgtggaatattcagatgtcacattctcctgtgttaaagaaccagaaaagcatgctatgtaataacttgtataaatrtttaaattagcaattcacaaactctttaagtattagctcattcttttgaatcaatttagaattctctttcttaccatataagaagtggcactattacactgaatatgtaagatgcatgaagtagagttacatatgaagaaaaaaatttactttgatgttagtgttttcaagacttataatatgtagcaatagtaaaatgcgttgaattagaaaggggatgtgacagttacatgcatgtgtataacccaagtaccaatattataggcaacaacagatatgatgtttgagtgtgttatgtaattcagacatagtgagagtgaccacgtagaagtagtgcttacactgttgataaaactttaagaaagaagtctcaaataggtttaag

SEQ ID NO: 175955 - DNA, 606 bp, Homo sapiens
tggtaggggattagaatttagaaataacttcaactgaaaaagttcaggttgaagccctgtaacacaaaagtacctggttggggcttgagaaggcctgggttttgcttttactttacctctgactagttacatgacctttttatgccatagcttcataggattaaggaaatcaggcaaaccactaataggttatcagttctctttattaagctttgtcaaggacagatactatattttggtcagcaaggttccaagtgtctgcagctttgggctgtgatttacaccagattctagcttcttagaggtgcttctcctgggcgcaccattaagccgctagaaagccacttctttgagcctttcccatcctctctctctaaagctagggcttgtgctggggatagttaattcctaggaatcagactctggaaaacctcagtcattttccattctcttagatcgcccctccacygcagtagtactctgctgcttccttcttttcagcaacatgtcatagacttctcaatcaatttctgatttctcatatgcctggaggaaaagactgcttcacctctcagctatggcaaaaagccctaaagcaataattgc

SEQ ID NO: 175956 - DNA, 563 bp, Homo sapiens
tagcaggctcctcagccttcagaagtgtagcgtaggtctcagggtgagcatgctttaagtactttacatattgtgtaaagctacttcacagttattatcaacaagattaatttatttttgctctgggagcctcttttttgtgtgaatctctaaatatttttccatattcaggcgtattttcttaatctgacattgatgtagaaattgcagtcaagcctctcctttacaagttaaagacgttgattcttagaagctstcattaaccacgaaaatcgcatttctagtaatcaagacttttaagccttctcactgaagatcctgatgttataatatggcaaatgtggctgaggttatttgggtgtttcttcaggggatatatttatacatcagaaagaacttacaggactgtaaaaaagaaagtccttctaggagggattgcaatgttgagaggttttctagattaagtggaaactggtgtggtttgttcagtttatctttctaaaatataacacagagaaaatttatttttacttagaaatatctttgtatcagctgagggagta

SEQ ID NO: 175957 - DNA, 573 bp, Homo sapiens
gaagtggtatttagagatgctacatttagtgacttcagaaggtataaactgaagcagcaatgtagattaatattcaagatatgaggataaaagggtgactaaagtgggatccaaagcaaatgggtgccagaaaaacaatgaaagaagaactgatggaggctatgatctaatttacatttaggggaatgaggaaaacagtggaagattttgcaaccatgaaaataaayactggaagttctgaccaaagaaattaggttaaaaaaaagaaataaaaagacattcatattggaaaggagaaagtaaaattatctctgtttctagatgacatggtctaatatgtagaaaaccatacgtacttcacaccaaagaaaactgttagaactaataagtaaatttagtaaagttgcagggcataaaattaacatacaaaaatcagttgtgtttctgtacactaaacaatgaataaccctaaaaggaaattaagaaaataatcccattttaaataacatcaaaataaaaaaaggcatcaaaataataaaatacttatgaataaacttaattaagaacacaaag

SEQ ID NO: 175958 - DNA, 602 bp, Homo sapiens
gcacgaaaaaaatagaacttgttttgagagcagtctgttcatttggcttcccagatacaccaaagctgaagcggggactgtcctgtgagtagaccagtgagttggccaacctcattggcttggctggatggactaaaatatttttgtttgaccttgagtggataacgcttaaactgttctttgtctgctctatgctgtatattttaagtattgcaaggtatagaggtaacttaatcaaacctttaccatatatcagccataaaaaataagcactggcagatgtgcctagagactaaaagaaatcagggcamctaaatgagaatcagacatcgaatctaaatggatgttattacagtctgccccttttcatttggtttgacaggaatctccaagtagagactctggtggagttgctacaggcatatgttcagattccttatcctggccttccctggagcagcagaaagcctttgccatgaaactgcctcaggtatcagtggctgaaattaatatatgattttgaggcagaagttagagaaaatgtttggaggcctgactttgaaaactattgaaaggattttattaaacctgacaatggacat

SEQ ID NO: 175959 - DNA, 332 bp, Homo sapiens
ccccattccctggctcctctggttgtgtgactggggccattttctttccctctgaggctgcaactcctcctccattacttcagctctcactgagctccaggacttctttagtcccacgacttcctctttgggcctcagaattatgaggccccgtggttgctaatttctgggtaccacaaatcccttgttaatttccttaattccaaccacacaccctgtgtactccctgtaggaacagcaacaacaacaaaaaatctcttaaaactacttaaatagagttatgtttcccctggcacctaargaatacaacttactatgtgctaggcactgtt

SEQ ID NO: 175960 - DNA, 530 bp, Homo sapiens
atcgggagagttggtgagggctgagatcaggttactacagttttaaatactgcggtgaggaaaggcctaaatgagaaagtgacatgtgagaaaggacctagaaattgcatttctgcttcgaatagaacccttcttaggtggaacatggttaaacatgagaaggttacctatttaccttacctccacttagattggcctcttctgcattttgttttgatttcatgccttggacgtttttaaaaagatttctaagrcagtgatttggaatcaccttctaaaatctcctttgatccgtaatttaaggacattgccttgcatttatttgttgaataggtcattattgagcacctatgagctggttgttcctcacgtgtcttctcagaggttgagggataagagaaaaatcaggtcaactagttagaaataccctgcaataattcaggcaagagatgatggtggcttggactgggtatcgatggtggaaagagtgtgtggtcagattctggatttattctgaatgtggacccaac

SEQ ID NO: 175961 - DNA, 530 bp, Homo sapiens
atcgggagagttggtgagggctgagatcaggttactacagttttaaatactgcggtgaggaaaggcctaaatgagaaagtgacatgtgagaaaggacctagaaattgcatttctgcttcgaatagaacccttcttaggtggaacatggttaaacatgagaaggttacctatttaccttacctccacttagattggcctcttctgcattttgttttgatttcatgccttggacgtttttaaaaagatttctaagacagtgatttggartcaccttctaaaatctcctttgatccgtaatttaaggacattgccttgcatttatttgttgaataggtcattattgagcacctatgagctggttgttcctcacgtgtcttctcagaggttgagggataagagaaaaatcaggtcaactagttagaaataccctgcaataattcaggcaagagatgatggtggcttggactgggtatcgatggtggaaagagtgtgtggtcagattctggatttattctgaatgtggacccaac

SEQ ID NO: 175962 - DNA, 530 bp, Homo sapiens
atcgggagagttggtgagggctgagatcaggttactacagttttaaatactgcggtgaggaaaggcctaaatgagaaagtgacatgtgagaaaggacctagaaattgcatttctgcttcgaatagaacccttcttaggtggaacatggttaaacatgagaaggttacctatttaccttacctccacttagattggcctcttctgcattttgttttgatttcatgccttggacgtttttaaaaagatttctaagacagtgatttggaatcaccttctaaaatctcctttgatccgtaatttaaggacattgccttgcatttatttgttgaataggtcattattgagcacctatgagctggttgttcctcacgtgtcttctcagaggttgagggataagagaaaaatcaggtcaactagttagaaataccctgcaataattcaggcaagagatgatggtggcttggactgggtatcratggtggaaagagtgtgtggtcagattctggatttattctgaatgtggacccaac

SEQ ID NO: 175963 - DNA, 530 bp, Homo sapiens
atcgggagagttggtgagggctgagatcaggttactacagttttaaatactgcggtgaggaaaggcctaaatgagaaagtgacatgtgagaaaggacctagaaattgcatttctgcttcgaatagaacccttcttaggtggaacatggttaaacatgagaaggttacctatttaccttacctccacttagattggcctcttctgcattttgttttgatttcatgccttggacgtttttaaaaagatttctaagacagtgatttggaatcaccttctaaaatctcctttgatccgtaatttaaggacattgccttgcatttatttgttgaataggtcattattgagcacctatgagctggttgttcctcacgtgtcttctcagaggttgagggataagagaaaaatcaggtcaactagttagaaataccctgcaataattcaggcaagagatgatggtggcttggactgggtatcgrtggtggaaagagtgtgtggtcagattctggatttattctgaatgtggacccaac

SEQ ID NO: 175964 - DNA, 561 bp, Homo sapiens
cattatgaatttcacaactctttgagtgactctgacattcagccatagtggagaaccaccatccttaacatacatgaagccaagctcatggtgagttctatcagtgttaattgtcattactattattatcacatgttattattactggagagaatgacatgtataatgctgagcctattttaaagattttgttagctattactataattaacaatcataattttaaaagagaacattccagtgggtggtatcttgccaattactatgggcttggcttagaatagtgggatttgattgaggtgattttgccccaggagatatctagcaatgactgaagactttttttttttttttaagaacaaaggtcttactctgctgccaaggttggagtgcagtggcacaatcatggctctctgcagcctcaaatacaggggctcaagcaatcctccttcctcagccccctgagtaactgggaccacagacacgtgctgytatatgcagctattttttaaatgtatttaggtattttttattattattaatttttttacagaaacaaga

SEQ ID NO: 175965 - DNA, 512 bp, Homo sapiens
aaaaatcctacaattcccagggcagcaccccacaacaaagtattattacctggccccraatgacaatagcaccaagagagaacccttgctttagaagttggaatagagagagactcttgaactaaaaagtcatgtcagaaactcaggaacagcctttgtagtcttgcccttgtgttaccattgccctttgccagctctcagaggagaaacaagcccctgcggcctgtcctgggttgcacggtcagcatcccacttaaaactcctcatggatccagatcatcacacaccaggtatgtactcaagattgcctttcaacttggagaagctcttcaaaagtcttggcatcctccagtgctggaagtgtttataagagacttcctcaagaaagaaaggccacgcagggaaaagcagaaacagattccttctctggctaacttccaccgggcacctcaaagaggttcactagcaccttagtcatggaaaaggaacgtttgagagaagggaagggggaa

SEQ ID NO: 175966 - DNA, 574 bp, Homo sapiens
aagctttaaatgaactggtttctttccccctgaattcaattcagagagaaaagagcagtcagatataatcaaggactgacagagagcaaattatttgttctggtraacacacatctctccaaactcgcttgaagcattttctgctttctaaagaagctcttatgaatgcagagccgcaaagaatcacctggtaagtgtctgttccgaaaggcaacagtggcacttccaagaaaaggcagcccatccctgggtgcatcggagcccaaggcccctggctgggcgtcatggagagtgggctccgaggggctttgtagctgctgccacttaatgtgctaacggagatggcaccacatgagacaccagccacagatggggcccctccagcaaaggaaggcatggcgaggtggcaggggtgagctgaggcttctctccagaggcagaggaggggcactcattgctggagtttctgtctgtctttttcgtcttttgatgcataaatgttcagctgaggtcatgaggttgggaaagcgtggggatgcagatgagtgctgtccaatagaaatataacaccaga

SEQ ID NO: 175967 - DNA, 574 bp, Homo sapiens
aagctttaaatgaactggtttctttccccctgaattcaattcagagagaaaagagcagtcagatataatcaaggactgacagagagcaaattatttgttctggtaaacacacatctctccaaactcgcttgaagcattttctgctttctaaagaagctcttatgaatgcagagccgcaaagaatcacctggtaagtgtctgytccgaaaggcaacagtggcacttccaagaaaaggcagcccatccctgggtgcatcggagcccaaggcccctggctgggcgtcatggagagtgggctccgaggggctttgtagctgctgccacttaatgtgctaacggagatggcaccacatgagacaccagccacagatggggcccctccagcaaaggaaggcatggcgaggtggcaggggtgagctgaggcttctctccagaggcagaggaggggcactcattgctggagtttctgtctgtctttttcgtcttttgatgcataaatgttcagctgaggtcatgaggttgggaaagcgtggggatgcagatgagtgctgtccaatagaaatataacaccaga

SEQ ID NO: 175968 - DNA, 514 bp, Homo sapiens
aagacttggtacacacacacacacacacacacacacacacacacacacacacagagagagaatgtaggatatcccattaatacttttatattgattatatggtagtctgggtgcacatatgataataagtggcctgtaatctcagcactktgggaggctaaggcaggaggattgcttgagcccaggagtttgagaccagctagggcaacatagtaagaccccatctctacaaaaaataaaaaatcagccaggcatagaggcaggtgcctgtagtctcagctacttgggaggctgaggcaagaggattgcttgagcctgggaggttgaggctgcagtgagctggagtcacaccactgcactccagcctgggcaacagagtgagaccctgtctcaaaaaataaaaataagtaaaaaattaatacttcgtatatactgggttaaattgattatattattaaagcacattttagtttttttttttaaactttgcttttaaatatggctactagaaaat

SEQ ID NO: 175969 - DNA, 637 bp, Homo sapiens
ttttaaaaatatcttggcaagtgtacaacttgcattggagaattctgcatgactttattgtgcttttacagagggtaggagtatatagaatggaatatatcacaaaacctttgtagtagttttggaagatgggggacaaattgctttgctcaggacatataaccacactaccacctggtggtaatgttgtacctgaaacccttgaataaaggtggccctgagcccaaatttttggtgaaatttatgaattggagagagatttttcatgtatgaaattaaaagggccaagcatccatgtaaaaccatatctcagaaatctgatgaaaattcagatcaatacttcccaattatcatctttaactgycatatttatggtgaatcataactgttctcagaagcaaagtgcttttcatgtgcctgacttgagataacattactattgcttccatttcacagctgagaaaacggaggctcaaagaggccatggaactgcccagggtgtagagttagcaaaatagggaagccaggactcaaacccacattttctgatgctgaaaaacacactatgcatttaggaagggtatcattatacttttgggtgctgtttaaattgaaaatcaatgcatgaatcaatgac

SEQ ID NO: 175970 - DNA, 637 bp, Homo sapiens
ttttaaaaatatcttggcaagtgtacaacttgcattggagaattctgcatgactttattgtgcttttacagagggtaggagtatatagaatggaatatatcacaaaacctttgtagtagttttggaagatgggggacaaattgctttgctcaggacatataaccacactaccacctggtggtaatgttgtacctgaaacccttgaataaaggtggccctgagcccaaatttttggtgaaatttatgaattggagagagatttttcatgtatgaaattaaaagggccaagcatccatgtaaaaccatatctcagaaatctgatgaaaattcagatcaatacttcccaattatcatctttaactgccatatttatggtgaatcataactgttctcagaagcaaagtgcttttcatgtgcctgacttgagataacattactattgcttccatttcacagctgagaaaacggaggctcaaagaggccatggaactgcccagggtgtakagttagcaaaatagggaagccaggactcaaacccacattttctgatgctgaaaaacacactatgcatttaggaagggtatcattatacttttgggtgctgtttaaattgaaaatcaatgcatgaatcaatgac

SEQ ID NO: 175971 - DNA, 473 bp, Homo sapiens
gaattgcatgtttcagcttgaggcttctacaacgtaataccatagactgggtggcttctaaacaacataaatttatttctcaccgttccagaggctgggaaatccaaatmaaaatgccagcagatttgctgcctggcgagagggcctgctttctggttcataaatggccatcttctcactgtgtcctcacatggtagaaaaaactggcgagagaactctctggggtctcctagaagagcactaatcctatttatgggagctctaccctcatgacctaatcacctcctgaaggccccacctcctaatactatcacatttggggctaagaccccaacatatgaatttggagggaacacagacattcagtctacagcactgaacaaccctgagcgttaacctccttgctttcttatatcaaaataaatgagggaggaagggagaatctatttatagtaagatcattataagaattc

SEQ ID NO: 175972 - DNA, 471 bp, Homo sapiens
gaattgcatgtttcagcttgaggcttctacaacgtaataccatagactgggtggcttctaaacaacataaatttatttctcaccgttccagaggctgggaaatccaaatcaaaatgccagcagatttgctgcctggcgagagggcctgctttctggttcataaatggccatcttctcactgtgtcctcacatggtagaaaaaactggcgagagaactctctggggtctcctagaagagcactaatcctatttatgggagctctaccctcatgacctaatcacctcctgaaggccccacctcctaatactatcacatttggggctaagaccccaacatatgaatttggagggaacacagacattcagtctacagcactgaacaaccmtgagcgttaacctccttgctttcttatatcaaaataaatgagggaggaagggagaatctatttatagtaagatcattataagaat

SEQ ID NO: 175973 - DNA, 538 bp, Homo sapiens
tcaatggtgctgacactccacagcactatagaagcacatagagggagacatcccagagcagtttcttagatttattcccaaacactcagaaaggttaccacaatttttggtgggaaaaataacrgaaccaataactgttagaactgattttatcctgagctatatctaggagaggcagcattcttactgccaccctctaatcgcacacacccaaggcagacattactagccaatcagaacagttccctactaagaccagatacagcttgaaaatcatcctcaacactataacccaggcagtcaccaaagtcagtcatggctgggactcaagaagaaacattttgccatctgttctgattatctattgctgcacaacacactaccccaagacttcatggcttgaaacatgattttcatttctcactattttctgggtcagggatttggacagagctcagctggacaattctcaatatgtggtttactaagggccactcagttgtatttagccaatggctgaaagttcagggggttccaa

SEQ ID NO: 175974 - DNA, 402 bp, Homo sapiens
agatctccctctactttgaatcctgagtctagagaggagcttggcacattcattgaatatagacatgactgcacaaagatrctaataacaaacagagtctcaagaggattcctaactgggaactcctcaacaggagagcacgccttttcttatctttatatttccttgctgggcacacagtaggtgctcagttgatgtttgttgaatggattactaagtgtatgcatgaatgaagatagcaatataaaaactgccacagtgcaactgagaattgtgagtttctcaagttaaaagactgatttatgatccgtcttgtatcttcaacttaccaggcaacgtctggtacatactcgccgggcaatgcctggtacatagtaggccctcagattccggaagtcagaa

SEQ ID NO: 175975 - DNA, 388 bp, Homo sapiens
agtctagagaggagcttggcacattcattgaatatagacatgactgcacaaagatactaataacaaacagagtctcaagaggattcctaactgggaactcctcaacaggagagcacgccttttcttatctttatatttccttgctgggcacacagtaggtgctcagttgatgtttgttgaatggattactaagtgtatgcatgaatgaagatagcaatataaaaactgccacagtgcaactgagaattgtgagtttctcaagttaaaagactgatttatgatccgtcttgtatcttcaacttaccaggcaaygtctggtacatactcgccgggcaatgcctggtacatagtaggccctcagattccggaagtcagaaaaactgaccat

SEQ ID NO: 175976 - DNA, 388 bp, Homo sapiens
agtctagagaggagcttggcacattcattgaatatagacatgactgcacaaagatactaataacaaacagagtctcaagaggattcctaactgggaactcctcaacaggagagcacgccttttcttatctttatatttccttgctgggcacacagtaggtgctcagttgatgtttgttgaatggattactaagtgtatgcatgaatgaagatagcaatataaaaactgccacagtgcaactgagaattgtgagtttctcaagttaaaagactgatttatgatccgtcttgtatcttcaacttaccaggcaacgyctggtacatactcgccgggcaatgcctggtacatagtaggccctcagattccggaagtcagaaaaactgaccat

SEQ ID NO: 175977 - DNA, 616 bp, Homo sapiens
cagaattcttgttaaccctgtgaggacagcttcatataccctaaattcagaatctgtcttagtaatggyttttcaggaagttgataccaatgtaaccgcccaacgggttcaccttgtcctctgcctagacaaagctgatttatcaagatgggaattgcaatggagaaagagtaattcacacagagctggctgtgtgggagactggagttctattattactcaaatcaatttccccatattcggggatcagagttttaaagataatttggcaggtaggggcttgggaagtggggagtgctgattggtcaggttggagatggaaacactgggggttgaagtgagatgttcttgttgtcttctgttcctgggtgggatggcagaactggttgagtcagattatgggactgggtggtgtcagctgatccattgactgcagggtctgcaaaatatctcaactactgatcttagtactgttatccccaggagcaatttggggaggttcaaactcttggagccaaaagctgcatgacccctaagccatcatttctaatcttgtagctaatttgttagtcctgtaaaggcagactggtccccagacaagaagggagtcttttca

SEQ ID NO: 175978 - DNA, 563 bp, Homo sapiens
gaattcttgttaaccctgtgaggacagcttcatataccctaaattcagaatctgtcttagtaatggtttttcaggaagttgataccaatgtaaccgcccaacgggttcaccttgtcctctgcctagacaaagctgatttatcaagatgggaattgcaatggagaaagagtaattcacacagagctggctgtgtgggagactrgagttctattattactcaaatcaatttccccatattcggggatcagagttttaaagataatttggcaggtaggggcttgggaagtggggagtgctgattggtcaggttggagatggaaacactgggggttgaagtgagatgttcttgttgtcttctgttcctgggtgggatggcagaactggttgagtcagattatgggactgggtggtgtcagctgatccattgactgcagggtctgcaaaatatctcaactactgatcttagtactgttatccccaggagcaatttggggaggttcaaactcttggagccaaaagctgcatgacccctaagccatcatttctaatcttgtagctaattt

SEQ ID NO: 175979 - DNA, 596 bp, Homo sapiens
ttcatataccctaaattcagaatctgtcttagtaatggtttttcaggaagttgataccaatgtaaccgcccaacgggttcaccttgtcctctgcctagacaaagctgatttatcaagatgggaattgcaatggagaaagagtaattcacacagagctggctgtgtgggagactggagttctattattactcaaatcaatttccccatattcggggatcagagttttaaagataatttggcaggtaggggcttggraagtggggagtgctgattggtcaggttggagatggaaacactgggggttgaagtgagatgttcttgttgtcttctgttcctgggtgggatggcagaactggttgagtcagattatgggactgggtggtgtcagctgatccattgactgcagggtctgcaaaatatctcaactactgatcttagtactgttatccccaggagcaatttggggaggttcaaactcttggagccaaaagctgcatgacccctaagccatcatttctaatcttgtagctaatttgttagtcctgtaaaggcagactggtccccagacaagaagggagtcttttcaggaaagggct

SEQ ID NO: 175980 - DNA, 596 bp, Homo sapiens
ttcatataccctaaattcagaatctgtcttagtaatggtttttcaggaagttgataccaatgtaaccgcccaacgggttcaccttgtcctctgcctagacaaagctgatttatcaagatgggaattgcaatggagaaagagtaattcacacagagctggctgtgtgggagactggagttctattattactcaaatcaatttccccatattcggggatcagagttttaaagataatttggcaggtaggggcttgggaagtggggagtgctgattggtcaggttggagatggaaacactgggggttgaagtgagatgttcttgttgtcttctgttcctgggtgggatggcagaactggttgagtcagattatgggactgggtggtgtcagctgatccattgactgcagggtctgcaaaatatctcaactactgatcttagtactgttatccccaggagcaatttggggaggttcaaactcttggagccaaaagctgcatgacccctaagccatcatttctaatcttgtagctaatttgttagtcctgyaaaggcagactggtccccagacaagaagggagtcttttcaggaaagggct

SEQ ID NO: 175981 - DNA, 576 bp, Homo sapiens
ttgcagtgagccgaaatcatgccacttcactccagcctaagtgacaaagcgagactctatctcaaagaaaaaagtatagatttattatattctacactggtaaaatcagggaaaggacatctatttttaaattagtattaaaataataaaataatactgatttgcgtgagaattattttgattacacaaatttggattcttaacagtgtttttgacctattggtttctttgagttttggagtttttctatttgttgttattttttaagagatggtaatctcgcagtgtgttattagctggactcagaactcctgggctcaaatgatcctcctgcctcaccctcccaagtcsctgggaatacaggcatgtatcactacacccagcctgggtttgtttttttttgtccttaaaaggctaacatgtttaaagtattacatgtttagtttcattatgttggaggaattctagaaatatagatagagttaaggaagttcttgtaattatctgtcaaccaactagagtagagattgtttgagaaactttataatctaatgtattaatagccctggggatatt

SEQ ID NO: 175982 - DNA, 545 bp, Homo sapiens
tttccttctgcttgctttgggcttattctgctcttctttttctagttccttgaaccttaaattatcaagacttttcttttctttcttttattattattatagaggcaagatcttgctatgttgtcaaggttagtctcaaactctggggctccagcaatcctcccaccttggcctcccaaagtgttgggatttcaggcatgagccactgggcccagcctcttcttttctaatgtaagcatttaagtggcagaagtttccctttcagcaccgctttagtggcatcctgaaactttratatgctgcattttcatttagttcaatatatttttcaaaatttccctttgactcgtaaatttagaagtgttacttagtttttaagtttttgaagatttcctgctatccttctgttggtgatttttagttggatctctttgtggtcaaaacactgtatgatttcaattattttaaatttattgagcactgttttgtagcccaggataaggtctatcttgatagttctatgggtgctcataaagaatgtgtac

SEQ ID NO: 175983 - DNA, 567 bp, Homo sapiens
ccacttaaatacaatattttatataattaaatctggattccttgcttctcttagataataagactggacatcactgaaccctaccatgtaactgactaatgcgatacgcatgggaagctgccctctccaaaagggccacacggcttcattcaccacagtccctcttaccgaccaccccacttccctacacaggttccctgcctggtcccaggaagcattctgagtttgtggttctttgatctaaaaaaagggttctttttttttttttctcaagacagagttttgctctcgttgcccaggctggagtgcaatagcgtgatcttggttcaccgcaacctccgcttccctggttcaagcaattctcctgcctcagcctcctgagtagctgggattacatgcatgcaccaccccacctggctaattttgtaattttagtagagacagggtttctccatgttggtgggctggtctcraactcccgacctcaggtgatcagaccactcggcatcccaaagtgttgggattacacaggcgtgagccactgcgcccggcctaaaagaagaattc

SEQ ID NO: 175984 - DNA, 411 bp, Homo sapiens
ttttatgttatcttctaggagttttatagtttttcatttttcatttaggcctgggatccattttgagttatttctttgtgaaggtccatgtctagattcattgtttgcaagtgctctttttawgtgcattgatgaggtttgggaaggtcaataacttggacaaagtacacaccctggtcagcaaaggaaccccagaccatgcttctatccatagggctgagctggggcacagctttgtggaaactgagttatgtatgagaccccacaaaaggcttagaatcacttcccttttcccctctcacttccttggctccagaatgagaatagaatgcacgtccagaagctcctttcagtctgcatcctctgacccgtgtgcccacatgctgcaagggctctggtgccctctatgaa

SEQ ID NO: 175985 - DNA, 411 bp, Homo sapiens
ttttatgttatcttctaggagttttatagtttttcatttttcatttaggcctgggatccattttgagttatttctttgtgaaggtccatgtctagattcattgtttgcaagtgctctttttaagtgcattgatgaggtttgggaaggtcartaacttggacaaagtacacaccctggtcagcaaaggaaccccagaccatgcttctatccatagggctgagctggggcacagctttgtggaaactgagttatgtatgagaccccacaaaaggcttagaatcacttcccttttcccctctcacttccttggctccagaatgagaatagaatgcacgtccagaagctcctttcagtctgcatcctctgacccgtgtgcccacatgctgcaagggctctggtgccctctatgaa

SEQ ID NO: 175986 - DNA, 411 bp, Homo sapiens
ttttatgttatcttctaggagttttatagtttttcatttttcatttaggcctgggatccattttgagttatttctttgtgaaggtccatgtctagattcattgtttgcaagtgctctttttaagtgcattgatgaggtttgggaaggtcaataacttggacaaagyacacaccctggtcagcaaaggaaccccagaccatgcttctatccatagggctgagctggggcacagctttgtggaaactgagttatgtatgagaccccacaaaaggcttagaatcacttcccttttcccctctcacttccttggctccagaatgagaatagaatgcacgtccagaagctcctttcagtctgcatcctctgacccgtgtgcccacatgctgcaagggctctggtgccctctatgaa

SEQ ID NO: 175987 - DNA, 411 bp, Homo sapiens
ttttatgttatcttctaggagttttatagtttttcatttttcatttaggcctgggatccattttgagttatttctttgtgaaggtccatgtctagattcattgtttgcaagtgctctttttaagtgcattgatgaggtttgggaaggtcaataacttggacaaagtacacaccctggtcagcaaaggaaccccagaccatgcttctatccatagggctgagctggggcacagctttgtggaaactgagttatgtatgagaccccacaaaaggcttagaatcacttcccttttcccctctcacttccttggctccagaatgagaatagaatgyacgtccagaagctcctttcagtctgcatcctctgacccgtgtgcccacatgctgcaagggctctggtgccctctatgaa

SEQ ID NO: 175988 - DNA, 497 bp, Homo sapiens
agatctaatggtcgaaaacctccattacaaaagcaccaaataagataaaaacatttagggataaatgtatcaagaatgtggggaaaaactatttacggaaaacattaaaatactcctgagagacacatacaagtagactgacaaatgagaaggcatctcctgttcctggccaaggccactcaatggccgaaggcatcggttctcctgaagttaattcctactgctaaggcaaccccgcccaataccaatgagctttttacaatgatgctaagttgatatgaaaacctatatgaaaaataaacacgttagcacagtgggggctggtgggggggtggaggaggaggtccagctttaccaggcattaaaacacactaaaaagcttcttgagagaaaaaagtgtgggaccgatacacaacaaaacagaacggtggaaaagaacacccagaaatagacctgaggacctctgaatartttgtagatggtcaaagtgacgttca

SEQ ID NO: 175989 - DNA, 499 bp, Homo sapiens
tgcccgccacacaccaggcaatattctaggagctaggcatgcagaaatgaaacatccatcctcctgatgaagacagacagcaagccaaaagataaacaaacaacatcatttaggtggacagggctaggaagagagtaaaatgccattacgggggtagacagtgattgatcccggggactcctccagatagcggggtcacagaagacctctatgagaaagtggcatttgagctgmcactgaatgaccagcagaagctggcctgggaagacggagggggaagaatgcttcagatagaggatccacgagtgcagaagctgtgagaggtgacaacacagtgagatcctgtctctaaaagaaagagaaaaggcagatgtgggtggagcaaaatgaggaagggaaggggtgttccaagatggagagacaggaagtggccccatgatgcccggcctataggccacactgaaaagtttggattttagtcctagtggtcaacctattg

SEQ ID NO: 175990 - DNA, 361 bp, Homo sapiens
agggtggcagtaggatctacccaaaaagcgtcctgctgatacaggaccaaagcatcctgttgttctcgagcctataaaaagagctaatggtsttgcttctcttaactgtggcctcctacactgtgttttggatgattggtgatgtcttggatattctgtttctttggaactttgaatatacaacactttactagggaattagcaatggaagcagagcaaagatgtacagaggaaacaatgcgtaactctgatggaattgaagtcatgaggcagcagagagcttaaattacagctttaaaaatttttattttttagagggaatttacttgggagtaacagcagtaatagttaacggagccag

SEQ ID NO: 175991 - DNA, 527 bp, Homo sapiens
aacaaattataaggaaacaatagaatatccaaaataaagagaatagttatgggttcgtatagataattcttcagaatctactaatttgtgtctttcttctttacttctgtaaacttttcagctactatatattagaatatttcttaacttttttatattcattctgaaatttcttgctgaaatttgttcagaaggtgagttaacggagctatacatctttagtgtcatgtgctctaaattgcaaaatacatgtatttttatttcagacaacttgagyaacatttgtgcaaatgttttatatacacggacttaatttggtaaatttaggcatgtggtagacaaatttaaaaatgtataaaaatcgtgggcaagcatatgaacattctatttttgctactataaaaaaatagcagactatccaactattttatgatactcaacgatacatcttactaaatggtcacgactcttgcctctcagggtcagagtttgcaatagtgaaagcaagagaaagccacggaaaaaaa

SEQ ID NO: 175992 - DNA, 591 bp, Homo sapiens
tctgtcttctttctttttaatattttcaggtgaattagaggtttgtcaaccgtaagaatgaaatatatggtttatggcctatttttatgtaactggtcattctgagatctggaaaacactacctgtgtttatctgcaactaaaatctagacacctgagcctacactgcatagcgaaacaggtcactagaaaaacacaagcaatttagaaaggcttttaatattgaacagttgcattttgtttctattcatgtctatcgctttctcttttttattctaaattgctttattatattctatatttaatattctatcattaayatgtcaataacagtcaataataattgaggactcaggttttgtcaatacactgatttataattagtacaatatgttatgagtttccttcgcacattaatattatcagctcttcattttttgttgttcacaatatatcttcaactacctttttatttttaggcaatgtacatattacaatttaagaataacatcttctttgttaaatatttatttccaccccttttcagaaaattagatggtttacatttattgttagaaataatataaagctt

SEQ ID NO: 175993 - DNA, 591 bp, Homo sapiens
tctgtcttctttctttttaatattttcaggtgaattagaggtttgtcaaccgtaagaatgaaatatatggtttatggcctatttttatgtaactggtcattctgagatctggaaaacactacctgtgtttatctgcaactaaaatctagacacctgagcctacactgcatagcgaaacaggtcactagaaaaacacaagcaatttagaaaggcttttaatattgaacagttgcattttgtttctattcatgtctatcgctttctcttttttattctaaattgctttattatattctatatttaatattctatcattaacatgtcaataacagtcaataataattgaggactyaggttttgtcaatacactgatttataattagtacaatatgttatgagtttccttcgcacattaatattatcagctcttcattttttgttgttcacaatatatcttcaactacctttttatttttaggcaatgtacatattacaatttaagaataacatcttctttgttaaatatttatttccaccccttttcagaaaattagatggtttacatttattgttagaaataatataaagctt

SEQ ID NO: 175994 - DNA, 591 bp, Homo sapiens
tctgtcttctttctttttaatattttcaggtgaattagaggtttgtcaaccgtaagaatgaaatatatggtttatggcctatttttatgtaactggtcattctgagatctggaaaacactacctgtgtttatctgcaactaaaatctagacacctgagcctacactgcatagcgaaacaggtcactagaaaaacacaagcaatttagaaaggcttttaatattgaacagttgcattttgtttctattcatgtctatcgctttctcttttttattctaaattgctttattatattctatatttaatattctatcattaacatgtcaataacagtcaataataattgaggactcaggttttgtcaatacactgatttataattagtacaatatgttatgagtttccttcgcacattaatattatcagctcttcattttttgttgttcacaatatatcttcaactacctttttatttttaggcaatgtacatattacaatttaagaataacatcttctttgttaaatatttatttccaccccttttcagaaaattagatggtttacayttattgttagaaataatataaagctt

SEQ ID NO: 175995 - DNA, 624 bp, Homo sapiens
aatgtaattttaaagaccactctcattcaaatgtaataatatcaaagcacccttaactcattaatgagtgaaacaatgagtgtcatggtctgaactgtgttcccctccccaaacccgtatgttcaagccctaacccctagttatacacataaggtaaatgaaacctcatttggacacaaagtttttgcagatgtaatcaagctaaaattatstctgtaggtgggacttaaaataacatgggttgtctttataagaagagggaacagaaacagataggatgtggagaggaccatgtgaagagagaagctgagactgaaaaggatttatgtattaatattgacagaagccaaggaacaccatctgaagttctgacggcaacatcagaagctaagagaaaggcatggaaaagattctcacctagagcatccagaggagaggttggtcctgcagacaccttgttttctgacctctgacctccgcaactgtgagggaagaaatttctgttgcttaaagacacacagcttgtggtacttcattatagcagcccaaggtaactaatatagatgacaaaattggttccaagggtgtttgaggaactggacctttataggcattattttcata

SEQ ID NO: 175996 - DNA, 624 bp, Homo sapiens
aatgtaattttaaagaccactctcattcaaatgtaataatatcaaagcacccttaactcattaatgagtgaaacaatgagtgtcatggtctgaactgtgttcccctccccaaacccgtatgttcaagccctaacccctagttatacacataaggtaaatgaaacctcatttggacacaaagtttttgcagatgtaatcaagctaaaattatctctgtaggtgggacttaaaataacatgggttgtctttataagaagagggaacagaaacagataggatgtggagaggaccatgtgaagagagaagctgagactgaaaaggatttatgtattaatattgacagaagccaaggaacaccatctgaagttctgayggcaacatcagaagctaagagaaaggcatggaaaagattctcacctagagcatccagaggagaggttggtcctgcagacaccttgttttctgacctctgacctccgcaactgtgagggaagaaatttctgttgcttaaagacacacagcttgtggtacttcattatagcagcccaaggtaactaatatagatgacaaaattggttccaagggtgtttgaggaactggacctttataggcattattttcata

SEQ ID NO: 175997 - DNA, 393 bp, Homo sapiens
aaacattttttcaagtttttaaactatatgcagccctttttttctgctatacctgttcatttcctcaagctatttttccatcagacagtttyatgttttctcattgatttgaagcttctattaaagtattgtatacacatgggtaaatgcacataagtttaaagcttagtgagttttaaaatactatgatcatccagaataagaaaatgtaatagtcacacacctgatttccacccatccctcctaacataacactattctaacttttaccagtaaggaatcaaatagtgtgtgtagtgttttgaaccacatttttttgcttaatattatatttgtgagacgaattgactatatgacctgcaaatgaaactatttatatttatttctctaata

SEQ ID NO: 175998 - DNA, 393 bp, Homo sapiens
aaacattttttcaagtttttaaactatatgcagccctttttttctgctatacctgttcatttcctcaagctatttttccatcagacagtttcatgttttctcattgatttgaagcttctattaaagtattgtatacacatgggtaaatgcacataagtttaaagcttagtgagttttaaaatactatgatcatccagaataagaaaatgtaatagtcacacacctgatttccacccatccctcctaacataacactattctaacttttaccagtaaggaatcaaatagtgtgtgtagtgttttgaaccacatttttttgcttaatattwtatttgtgagacgaattgactatatgacctgcaaatgaaactatttatatttatttctctaata

SEQ ID NO: 175999 - DNA, 393 bp, Homo sapiens
aaacattttttcaagtttttaaactatatgcagccctttttttctgctatacctgttcatttcctcaagctatttttccatcagacagtttcatgttttctcattgatttgaagcttctattaaagtattgtatacacatgggtaaatgcacataagtttaaagcttagtgagttttaaaatactatgatcatccagaataagaaaatgtaatagtcacacacctgatttccacccatccctcctaacataacactattctaacttttaccagtaaggaatcaaatagtgtgtgtagtgttttgaaccacatttttttgcttaatattatatttgtgagackaattgactatatgacctgcaaatgaaactatttatatttatttctctaata

SEQ ID NO: 176000 - DNA, 393 bp, Homo sapiens
aaacattttttcaagtttttaaactatatgcagccctttttttctgctatacctgttcatttcctcaagctatttttccatcagacagtttcatgttttctcattgatttgaagcttctattaaagtattgtatacacatgggtaaatgcacataagtttaaagcttagtgagttttaaaatactatgatcatccagaataagaaaatgtaatagtcacacacctgatttccacccatccctcctaacataacactattctaacttttaccagtaaggaatcaaatagtgtgtgtagtgttttgaaccacatttttttgcttaatattatatttgtgagacgaattgaytatatgacctgcaaatgaaactatttatatttatttctctaata

SEQ ID NO: 176001 - DNA, 537 bp, Homo sapiens
agatctaagttactagtcatggtgtcagatatagagaatgattgaaggttatcagagtcacacgccagatgagtaaattgttgttttcaaggaagaggttacataaaggtaagcggagtaatatttyagcatttttgttaattaaaaatttgtaaagttatttccatttcaaggaaattactctcagtaattttacgggtaaaatgacaaattccaagtttaattttcacatgtaacaccctccttgagcacttatttttataaagctattaatctattttggtctcaatttacctttctttaaagagattttaaaattttctgaaagaagttgacatctggaagtgtagctgttatatttttcaatttttaattacatatttaattatcctttaattacttaaggttattctcaaaagtgaagagatagctgggatcacactgcgtaagattttactcctgaatgtaatattcaaaaatgttacaaagtctatcaaagaggttttcattctgtgacaatacatggtcaatttgaca

SEQ ID NO: 176002 - DNA, 577 bp, Homo sapiens
agatctaagttactagtcatggtgtcagatatagagaatgattgaaggttatcagagtcacacgccagatgagtaaattgttgttttcaaggaagaggttacataaaggtaagcggagtaatatttcagcatttttgttaattaaaaatttgtaaagttatttccatttcaaggaaattactctcagtaattttacgggtaaaatgacaaattccaagtttaattttcwcatgtaacaccctccttgagcacttatttttataaagctattaatctattttggtctcaatttacctttctttaaagagattttaaaattttctgaaagaagttgacatctggaagtgtagctgttatatttttcaatttttaattacatatttaattatcctttaattacttaaggttattctcaaaagtgaagagatagctgggatcacactgcgtaagattttactcctgaatgtaatattcaaaaatgttacaaagtctatcaaagaggttttcattctgtgacaatacatggtcaatttgacatggtcaggaagcaccacccccactgagagataccaaatta

SEQ ID NO: 176003 - DNA, 537 bp, Homo sapiens
agatctaagttactagtcatggtgtcagatatagagaatgattgaaggttatcagagtcacacgccagatgagtaaattgttgttttcaaggaagaggttacataaaggtaagcggagtaatatttcagcatttttgttaattaaaaatttgtaaagttatttccatttcaaggaaattactctcagtaattttacgggtaaaatgacaaattccaagtttaattttcacatgtaacaccctccttgagcacttatttttataaagctattaatctattttggtctcaatttacctttctttaaagagattttaaaattttctgaaagaagytgacatctggaagtgtagctgttatatttttcaatttttaattacatatttaattatcctttaattacttaaggttattctcaaaagtgaagagatagctgggatcacactgcgtaagattttactcctgaatgtaatattcaaaaatgttacaaagtctatcaaagaggttttcattctgtgacaatacatggtcaatttgaca

SEQ ID NO: 176004 - DNA, 563 bp, Homo sapiens
agatctaagttactagtcatggtgtcagatatagagaatgattgaaggttatcagagtcacacgccagatgagtaaattgttgttttcaaggaagaggttacataaaggtaagcggagtaatatttcagcatttttgttaattaaaaatttgtaaagttatttccatttcaaggaaattactctcagtaattttacgggtaaaatgacaaattccaagtttaattttcacatgtaacaccctccttgagcacttatttttataaagctattaatctattttggtctcaatttacctttctttaaagagattttaaaattttctgaaagaagttracatctggaagtgtagctgttatatttttcaatttttaattacatatttaattatcctttaattacttaaggttattctcaaaagtgaagagatagctgggatcacactgcgtaagattttactcctgaatgtaatattcaaaaatgttacaaagtctatcaaagaggttttcattctgtgacaatacatggtcaatttgacatggtcaggaagcaccacccccactga

SEQ ID NO: 176005 - DNA, 577 bp, Homo sapiens
agatctaagttactagtcatggtgtcagatatagagaatgattgaaggttatcagagtcacacgccagatgagtaaattgttgttttcaaggaagaggttacataaaggtaagcggagtaatatttcagcatttttgttaattaaaaatttgtaaagttatttccatttcaaggaaattactctcagtaattttacgggtaaaatgacaaattccaagtttaattttcacatgtaacaccctccttgagcacttatttttataaagctattaatctattttggtctcaatttacctttctttaaagagattttaaaattttctgaaagaagttgacatctggaagtgtagctgttatatttttcmatttttaattacatatttaattatcctttaattacttaaggttattctcaaaagtgaagagatagctgggatcacactgcgtaagattttactcctgaatgtaatattcaaaaatgttacaaagtctatcaaagaggttttcattctgtgacaatacatggtcaatttgacatggtcaggaagcaccacccccactgagagataccaaatta

SEQ ID NO: 176006 - DNA, 563 bp, Homo sapiens
agatctaagttactagtcatggtgtcagatatagagaatgattgaaggttatcagagtcacacgccagatgagtaaattgttgttttcaaggaagaggttacataaaggtaagcggagtaatatttcagcatttttgttaattaaaaatttgtaaagttatttccatttcaaggaaattactctcagtaattttacgggtaaaatgacaaattccaagtttaattttcacatgtaacaccctccttgagcacttatttttataaagctattaatctattttggtctcaatttacctttctttaaagagattttaaaattttctgaaagaagttgacatctggaagtgtagctgttatatttttcaatttttaattacatatttaattatcctttaattacttaaggttattctcaaaagtgaagagawagctgggatcacactgcgtaagattttactcctgaatgtaatattcaaaaatgttacaaagtctatcaaagaggttttcattctgtgacaatacatggtcaatttgacatggtcaggaagcaccacccccactga

SEQ ID NO: 176007 - DNA, 563 bp, Homo sapiens
atagagaatgattgaaggttatcagagtcacacgccagatgagtaaattgttgttttcaaggaagaggttacataaaggtaagcggagtaatatttcagcatttttgttaattaaaaatttgtaaagttatttccatttcaaggaaattactctcagtaattttacgggtaaaatgacaaattccaagtttaattttcacatgtaacaccctccttgagcacttatttttataaagctattaatctattttggtctcaatttacctttctttaaagagattttaaaattttctgaaagaagttgacatctggaagtgtagctgttatatttttcaatttttaattacatatttaattatcctttaattacttaaggttattctcaaaagtgaagagatagctgggatcacactgcgtaagattttactcctgaatgtaatattcaaaaatgttacaaagtctatcaamgaggttttcattctgtgacaatacatggtcaatttgacatggtcaggaagcaccacccccactgagagataccaaattatggagtaaaccaccgt

SEQ ID NO: 176008 - DNA, 611 bp, Homo sapiens
tgctaccacaaaaacccacttaagtacatagctcacaggcactataaagtatctacacaatcaagtctacctaaaaaccagctacaaacgtgatgataggatcaaaatctcatgtatcaacattaaccataaatgtaaataggctaaacacccccacttaaatgacatacaatggcaaactggataaaaatgcaaggctcaccatctgyagtcttcaagagactcacctcatatgtaatgacagccactggcccaaaataaggggatggagaaaatctgccatgcaaatgataacaaaaaagcaggagtaactattcttatatcagataaaacagactttaatcaaaattaaaaagaacaattgaagaatgaagagcattacgtcatgagaaagtatatgatcaaacaagaatacttaagtaccctaaatataaatgcacccaacatggagcacccagattcataaaacaagttctttttggactacaaaaagacagacgaccacccaataactgtaggagacttcaacacccccgctggcagcactggatcatcaaagcagataactaaggaagaaactgtgtacttaaacttcacccttgaccatctgg

SEQ ID NO: 176009 - DNA, 611 bp, Homo sapiens
tgctaccacaaaaacccacttaagtacatagctcacaggcactataaagtatctacacaatcaagtctacctaaaaaccagctacaaacgtgatgataggatcaaaatctcatgtatcaacattaaccataaatgtaaataggctaaacacccccacttaaatgacatacaatggcaaactggataaaaatgcaaggctcaccatctgcagtcttcaagagactcayctcatatgtaatgacagccactggcccaaaataaggggatggagaaaatctgccatgcaaatgataacaaaaaagcaggagtaactattcttatatcagataaaacagactttaatcaaaattaaaaagaacaattgaagaatgaagagcattacgtcatgagaaagtatatgatcaaacaagaatacttaagtaccctaaatataaatgcacccaacatggagcacccagattcataaaacaagttctttttggactacaaaaagacagacgaccacccaataactgtaggagacttcaacacccccgctggcagcactggatcatcaaagcagataactaaggaagaaactgtgtacttaaacttcacccttgaccatctgg

SEQ ID NO: 176010 - DNA, 503 bp, Homo sapiens
acaaggataccttttggtcaattttcttgaaaatattggctttttcaacagtgtagtttatttaaaatttagtcccagttcttagcaattatttatatactgatggacttatatccagggtcttcttgaattaaaaaaagtcaaaaaataattttataaatttaaaatattataaaattatgatatatacaattcttgctctctctgtcatatttttccaattttttgtctgtcttgttttttcttgccttttcttccctgtcctttccctttcgtttcttttctttttgtttcctttgtctggccttgctttgagtttcttttccaaacgaattcactggaggtggtatttttatgcataatatacacagcaaatgtctagggcctctcattttttacaaatctttgtaagaaaaggctatctattaacccaatgacattgtcataaccttttctaaatttcaatgatattcagtttctcrcagctattacattacaaagta

SEQ ID NO: 176011 - DNA, 557 bp, Homo sapiens
ttaagaaacaaagaggttcagaaggagtggctctcaggataaatctgcctggagttcattgctaagttcaattttgtcagttccataggcattgactaccatttggaagttctggaccagtgttaytctgttagatgcatcatttctgcagaggttggacaggaaacagataaaaagtttaaaaagaatgatgcggtacaaaattaatagtaacatgaaatattgtctatgaacatggacccaaaggcagccaactaatgaatcaaaagtctacgtgagactgagtgagatctgttgtagccataaagcctgtcttgctattttatgcaattaggtcttgacttccccagagaaatatattcaggtacagcatgtagttattagcaatggcacagacattcttgttcaaccagtagataattgagagttatctcatcctgtcctgttgtgttatctacggctactcagcaagatactttaatgagcactgctgggcggcaatagcctttgcagtgaagcctgcaacgaaacccaaggtggcaaataaattagggatg

SEQ ID NO: 176012 - DNA, 553 bp, Homo sapiens
aaagagaatagatttttattgaattaatgcaaataactatgttgccataaaataaaaatatcaataagagctctctgaagactgcagccgcaggtaggaagaaaaaataaatatttccatttttatttataaaagtatactttaccaaattgctgtatgctatagatagctttttaaaagttttctcaaatctggaaaacaaaaaatttaaaaaaaacagcaaaatgttaaacaaaaagtcactcgaaaatattgccatcagtttgtttagtcccattcattaaacttattctacttgatctgggttagatgttttaagaagccatcgtttcttcattagagtyctggaaattctttcccagtccagtggtataatcttaaactcataagaaatctaaattccagcatacttgttagagtccttttcatgaacctccttgaagaggaagtatttttctttattcattttaatttattctctacaatacttcattagggagttcaatgatttgcactcagaagttaaatagccaacaggcaagcaagtataata

SEQ ID NO: 176013 - DNA, 553 bp, Homo sapiens
aaagagaatagatttttattgaattaatgcaaataactatgttgccataaaataaaaatatcaataagagctctctgaagactgcagccgcaggtaggaagaaaaaataaatatttccatttttatttataaaagtatactttaccaaattgctgtatgctatagatagctttttaaaagttttctcaaatctggaaaacaaaaaatttaaaaaaaacagcaaaatgttaaacaaaaagtcactcgaaaatattgccatcagtttgtttagtcccattcattaaacttattctacttgatctgggttagatgttttaagaagccatcgtttcttcattagagtcctggaaattctttcccagtccagtggtataatcttaaactcataagaaatctaaattccagcatacttgttagagtccttttcatgaacctccttgaagaggaagtatttttctttmttcattttaatttattctctacaatacttcattagggagttcaatgatttgcactcagaagttaaatagccaacaggcaagcaagtataata

SEQ ID NO: 176014 - DNA, 458 bp, Homo sapiens
cccaccttggcctcccaaagtgcagggattataggtgtgagccactatgccaggcctctctcatgactttaaacttgaacatgcttttgtgctgtggccgagtttaggatcccaaccagcctgtgattactgtggtcaccacacagattccctcttgttccatcttttatattccatcttctcactctcataactgtgtggatagkaaaacaattatccatacaggtatgatattggcagagaaaatcacaaaatgttttaatgagcaaacactttggggatggtaataatctttctaccaccttcattgtcttgtttaagtatctctacattcttctttaaaaattaggaatatatctttcttgctctttcgttgttgttgaacaccagaaggggatattccttaattctctctccatagctaaggacagtacagcacaatattccattcagcaggt

SEQ ID NO: 176015 - DNA, 458 bp, Homo sapiens
cccaccttggcctcccaaagtgcagggattataggtgtgagccactatgccaggcctctctcatgactttaaacttgaacatgcttttgtgctgtggccgagtttaggatcccaaccagcctgtgattactgtggtcaccacacagattccctcttgttccatcttttatattccatcttctcactctcataactgtgtggataggaaaacaattatccatacaggtatgatattggcagagaaaatcacaaaatgttttaakgagcaaacactttggggatggtaataatctttctaccaccttcattgtcttgtttaagtatctctacattcttctttaaaaattaggaatatatctttcttgctctttcgttgttgttgaacaccagaaggggatattccttaattctctctccatagctaaggacagtacagcacaatattccattcagcaggt

SEQ ID NO: 176016 - DNA, 414 bp, Homo sapiens
tgttctgatcattatttgtctcttgttggcatggagaaaatcctttttttttttttcagcctggggaatcccaaactatatctctagtaacaaggaaaccattttaccggaatttttattaacatggaaaagttctgtcaattaatcagacttcactgtccatatcastttcaaccttttgggaaggtagaaagatggaattctgaaactaaagttggtaaagttcacagacatcgtcaaacttgcatggtctaaggtatttcttctttctgtggttcatgagttagtaacagctaaaccaagtgtctaggaatattagctctgattctagaaatctacacttatttaactaaatgctgtaaggactcaggaaatccattctttcaacaaaagttactgaagactttccccatt

SEQ ID NO: 176017 - DNA, 414 bp, Homo sapiens
tgttctgatcattatttgtctcttgttggcatggagaaaatcctttttttttttttcagcctggggaatcccaaactatatctctagtaacaaggaaaccattttaccggaatttttattaacatggaaaagttctgtcaattaatcagacttcactgtccatatcactttcaaccttttgggaaggtagraagatggaattctgaaactaaagttggtaaagttcacagacatcgtcaaacttgcatggtctaaggtatttcttctttctgtggttcatgagttagtaacagctaaaccaagtgtctaggaatattagctctgattctagaaatctacacttatttaactaaatgctgtaaggactcaggaaatccattctttcaacaaaagttactgaagactttccccatt

SEQ ID NO: 176018 - DNA, 535 bp, Homo sapiens
ctgtaaggactcaggaaatccattctttcaacaaaagttactgaagactttccccattagtatcctaaacaatgtctgcaaaattggttttcatacctggataccttgtcttctaagagacacggcagrgaaagatcataggaaaaaagtcactatcaggcacagctaacaactagcaaacccatagtctttaaaagactgatcctttgattcctatctctcaagtaaagaggtttaggtcatcttcatattacaggaaagtatccctaccaaaaacttctaactaatgactcttaggattcttccaaaagcaaatagtctttgggagaagacagcttccatcaaatgcctttggatcaagtgaatcactatatgagatatcggtatctgcaaaccaagatccacaaaaaaagatccattgtttgtcatatttaatctgtatatcttgagttttcattttcctagttaactttatctttttatgcttaaggttacatttaattactttacctataaagctactattcctaattcc

SEQ ID NO: 176019 - DNA, 521 bp, Homo sapiens
aggactcaggaaatccattctttcaacaaaagttactgaagactttccccattagtatcctaaacaatgtctgcaaaattggttttcatacctggataccttgtcttctaagagacacggcagggaaagatcataggaaaaaagtcactatcaggcacagctaacaactagcaaacccatagtctttaaaagactgatcctttgattcctatctctcaagtaaagagstttaggtcatcttcatattacaggaaagtatccctaccaaaaacttctaactaatgactcttaggattcttccaaaagcaaatagtctttgggagaagacagcttccatcaaatgcctttggatcaagtgaatcactatatgagatatcggtatctgcaaaccaagatccacaaaaaaagatccattgtttgtcatatttaatctgtatatcttgagttttcattttcctagttaactttatctttttatgcttaaggttacatttaattactttacctataaagctactatt

SEQ ID NO: 176020 - DNA, 533 bp, Homo sapiens
ctgtaaggactcaggaaatccattctttcaacaaaagttactgaagactttccccattagtatcctaaacaatgtctgcaaaattggttttcatacctggataccttgtcttctaagagacacggcagggaaagatcataggaaaaaagtcactatcaggcacagctaacaactagcaaacccatagtctttaaaagactgatcctttgattcctatctctcaagtaaagaggtttaggtcatcttcatrttacaggaaagtatccctaccaaaaacttctaactaatgactcttaggattcttccaaaagcaaatagtctttgggagaagacagcttccatcaaatgcctttggatcaagtgaatcactatatgagatatcggtatctgcaaaccaagatccacaaaaaaagatccattgtttgtcatatttaatctgtatatcttgagttttcattttcctagttaactttatctttttatgcttaaggttacatttaattactttacctataaagctactattcctaatt

SEQ ID NO: 176021 - DNA, 401 bp, Homo sapiens
actcaggaaatccattctttcaacaaaagttactgaagactttccccattagtatcctaaacaatgtctgcaaaattggttttcatacctggataccttgtcttctaagagacacggcagggaaagatcataggaaaaaagtcactatcaggcacagctaacaactagcaaacccatagtctttaaaagactgatcctttgattcctatctctcaagtaaagaggtttaggtcatcttcatattacaggaaagtatccctaccaaaaacttctaactaaygactcttaggattcttccaaaagcaaatagtctttgggagaagacagcttccatcaaatgcctttggatcaagtgaatcactatatgagatatcggtatctgcaaaccaagatccacaaaa

SEQ ID NO: 176022 - DNA, 557 bp, Homo sapiens
actaaatgctgtaaggactcaggaaatccattctttcaacaaaagttactgaagactttccccattagtatcctaaacaatgtctgcaaaattggttttcatacctggataccttgtcttctaagagacacggcagggaaagatcataggaaaaaagtcactatcaggcacagctaacaactagcaaacccatagtctttaaaagactgatcctttgattcctatctctcaagtaaagaggtttaggtcatcttcatattacaggaaagtatccctaccaaaaacttctaactaatgactcttaggattcttccaaaagcaaatagtctttgggagaagacagcttccatcaaatgcctttggatcaagtgaatcactatatgagatatcggtatctgcaaaccaagatccacaaaaaaagatccattgtttgtcatatttaatctgtatatcttgagttttcattttcctagttaactttatctttttatgcttaaggttacatttaattaytttacctataaagctactattcctaattcctctatgccgtcctt

SEQ ID NO: 176023 - DNA, 434 bp, Homo sapiens
ataatcaatatcacggcagcatacaactgtttggttagtatgtctctttaaacaagcacataygctcattcatggagtgtgtatttgtatctgtgtatggtctgtgtggtgaagcagcaagcaacagttggatgtcttaattatctaacaggaaaaaacacctaaataatcagaagaaattttgatttatttattagttcgactgagcttttctcttgaatgtaacacagatggtcccagatttacaatggtacaactttacagcttcatcatggtacaaaagtgataaacattcagtagaaacaatgcttttattacccatatacccattccgtttttcacattcagtatttaataatttacatgtgatattcaacactttatttaaaaataggctttaggttagattttttttttggactggctaatgtaag

SEQ ID NO: 176024 - DNA, 397 bp, Homo sapiens
cactttctttccactctaaagacaggatatttcttttttctttttttyttttttttttttttgcctgtgtttatctatttcttggattatggaacagaacaaacatgaacacattaccttttgcctttcctcatttcccacactctttcctagaggtaatattaagcttccaattaattttagatggtagtttcaataattttttttcactgggtattacaagtcttcatttcaaccctctgagtttggtttacttgtccatttaatactaatttagtggatacgttttaggtgctgttatggcagacccaactcaagctggtgatttctatattacttggaatcgtgctagttgctttgacaactacactcaacaacatataatatcttaaacaga

SEQ ID NO: 176025 - DNA, 397 bp, Homo sapiens
cactttctttccactctaaagacaggatatttcttttttcttttttttttttttttttttttgcctgtgtttatctatttcttggattatggaacagaacaaacatgaacacattaccttttgcctttcctcatttcccacactctttcctagaggtaatattaagcttccaattaattttagatggtagtttcaataattttttttcactgggtattacaagtcttcatttcaaccctctgagtttggtttacttgtccatttaatacyaatttagtggatacgttttaggtgctgttatggcagacccaactcaagctggtgatttctatattacttggaatcgtgctagttgctttgacaactacactcaacaacatataatatcttaaacaga

SEQ ID NO: 176026 - DNA, 357 bp, Homo sapiens
aaaacgcatgctcagactaccatttatagaaatttgaatttaaaaaaaatgtcctaggtgagggagtacctatcaagggtggaaatcacttgtgtagatgacagtgacagtggagaactgaagtctataaaagttaagacctagatctagatgctcctgaatttcccctttttattcttaacaacacttcctttgtgctgtgatctcaagcaactgagcctaggtctttttattcttgtctgatataacagaaggtagaggatgaaataaatgagtttattaggtaacacattttgaaaattgtgtttaagatttrgatgatatattttagaacttctaataaattcagaggaattc

SEQ ID NO: 176027 - DNA, 399 bp, Homo sapiens
gaattcagccagccggtcagggtcgcataccacacagtgactgggcctggctcggctgtctagccaagaacagactggtctttgttcctgtgtgactgggggtgctactcagggatggagaatctagggtgggtgcaattatgagatttttttaaggtatagaaattgtatctcccatcttggaccatgggaaaataaactgaasgagtatgatgttgaaagaggagaaagtggggtcattttcattgctggaaattcatcttcccaaacgtgaaccatgagttcacctgccttcctattgttgcaagagctaccactggggtcaaaacagtgcacttaactttcaaatctggttcaccttctcctgaagtcatatcccctaaggactcataatcccaa

SEQ ID NO: 176028 - DNA, 534 bp, Homo sapiens
ctcatctccatctgagaccacaatgtgtccatatcattatcagcattttggacacaactatttagcaagtctctaggaagttccaaactttccctcatcttcctgtcttcttttgagccctccaaactgttacaacctctgcccattacccagttccaaagttgtttccacatttttaggtatctttatagcaataccccactcttggtaccagcttttttgtgtgagtttattctcacactgctataaagaactacctgaaactgggtaattttttttttttaaagaagagttttaattggctcatggttctgtgggctgtayaggtttccacttctgggaaagcctcaggaaacataaagtcatggcagaaggtgaaaggaaagcaaacacatcttcacatgatgacaggagggcaggggtggtgctacacacttttaaacaagcagatctggggagaactctatcagaagaacaccaagggggaagttctctcccatgattaaatcacctcccaccaggtttctcctccaa

SEQ ID NO: 176029 - DNA, 534 bp, Homo sapiens
ctcatctccatctgagaccacaatgtgtccatatcattatcagcattttggacacaactatttagcaagtctctaggaagttccaaactttccctcatcttcctgtcttcttttgagccctccaaactgttacaacctctgcccattacccagttccaaagttgtttccacatttttaggtatctttatagcaataccccactcttggtaccagcttttttgtgtgagtttattctcacactgctataaagaactacctgaaactgggtaattttttttttttaaagaagagttttaattggctcatggttctgtgggctgtataggtttccacttctgggaaagcctcaggaaacataaagtcatggcagaaggtgaaaggaaagcaarcacatcttcacatgatgacaggagggcaggggtggtgctacacacttttaaacaagcagatctggggagaactctatcagaagaacaccaagggggaagttctctcccatgattaaatcacctcccaccaggtttctcctccaa

SEQ ID NO: 176030 - DNA, 597 bp, Homo sapiens
cccattcccctcactggtgtggacaaccacggtactggtaagaggrctaattcatggtagggatgtggcacattcagacagttactggggtggacccagagcaagccaagccaaacattgcttggctcccccgaccaaagacacacatatacatgcatacatgtacacacatacacaaacacacatatacacacaaacacacactgcatctagcatctcttattatccaaatgctcatggggacctggaatctgaacatactgtgaactactctatcaactcaatgtttccacaataacaaactcattctttttcttcctcaaccctaatcttcttcctgacttatgcatttctatttcccttctttttctaataagacaccaacatcttctcaatcttccaggcctcaaaatttagtgtcatcttagacgccacctgctgtcactgctccctcatccaaacagtctccaagtcttgccaatttcatgctcatcatcttgtgtttactctgataagggctctgataatttcacatttgtaatttcattgagacttacctgaataagtattaaaattgttagagtagccttcattttt

SEQ ID NO: 176031 - DNA, 581 bp, Homo sapiens
tagtggaacagattcttttttttggtcaaagtttattattgaaactccctatctataggattttttcaggtcggagtgcaggggcacgatcatggctcactgtagcctcaatctcctgggcttaagtgatcttcccacctcagcctcccacgtagctggactacagggatgtgccaccatacccagctcattaaacaattttttttgtagatacaggatctcactatgttgaccaggcttgtcttgaactcctgggctcaagtgatcctcctgccttagcctcccaatgtgctgggatgacaggcatgagccaccatacccagcctcggatttataaggtttttgtatttttttttctgtccagtacaaaacgtttggttacatgctccctttcaaccttatttaccttcatgaggctgtagctttatgtggagtcttcrgctatcagataagtataggtttcccagactacataaaataaaaataatagctagcattctttggatgtccatacgccagacactgtgttaaaggcccaacacatatcatgccatttaatcctcaaaacatccctctgagct

SEQ ID NO: 176032 - DNA, 476 bp, Homo sapiens
tacgtctgagcccaagacttggttagggacaatgatctcctgttcacacaatatacccaggtatgcatctcatttcaaactgcactgcaatgctatycttctccaacatgtctctcaccccggaagttcacatgttattcctcttcatatccctagcttttgtccagaacttgacgagtcatgagtgcccaggacatgttgagatggatggatggagatggggatgccctggaggagtcagattacagaggaggctgaggagggaaaagacttactaggctgtaagatacacaggggctgtgacttcctcatctctgtattcccagcacccgggattcgactggggttctggaaatgtttcttgagtgaatatgtgaccacatgctggaggcagccaggctctctggagtaagctcatgctccttcattcacttttaaggagtaagctcagctcctctccattttgaagggttaaa

SEQ ID NO: 176033 - DNA, 476 bp, Homo sapiens
tacgtctgagcccaagacttggttagggacaatgatctcctgttcacacaatatacccaggtatgcatctcatttcaaactgcactgcaatgctattcttctccaacatgtctctcaccccggaagttcacatgttattcctcttcatatccctagcttttgtccagaacttgacgagtcatgagtgcccaggacatgttgagatggatggatggagatggggatgccctggaggagtcagattacagaggaggctgaggagggaaaagacttactaggctgtaagatacacaggggctgtgacttcctcatctctgtattcccagcacccgggattcgactggggttctggaaatgtttcttgagtgaatatgtgaccacatgctggaggcagccaggctctctggagtaagctcatgctccttyattcacttttaaggagtaagctcagctcctctccattttgaagggttaaa

SEQ ID NO: 176034 - DNA, 407 bp, Homo sapiens
ggttcaaatctgagctcttctacttttttattgcatggccatggacaagtccatgtacctctttgagtctctgtttgttcatctgtaaaatgggtctcataatagagctcatcttggtgttgtgatgtgcgtaaagcacgttgcatacatacataggtcctggggagcattgaggaaacggtggagcatctgtttaggaagccacattttttaactgatacatagtatttgcagatatttaagaggtacatgtagtatttcattacatgcataggatgtacagtgatcaggatggggtacttaagatacccattacctcaaacatttattatttcgatgtrttggaaaatgttcaaatcctctcttctagctattttgagatatacagtacattcttaactatagtc

SEQ ID NO: 176035 - DNA, 547 bp, Homo sapiens
gcccaggagttagcaagcaaggtatttcacaaagtgtgtgcacaagggaaagagactgtcaggcatgtgcaaatactcagaggaaagagaagaaatttattctataaataatgaatatgtgctggccattttcataagcactgttgacactctgggaatayagcaataggttataagacagacaagagaactaaattcactcgtttttcatgctggttagggagacggatagaatatcaacaagatcatccagataaaaacagatcctgttaagaaagccccaaagtggagggtgaggaagaataaaggatctcaggatggctggagtacagcacgctagagttaagggtatgatgtgagcttgcagaagtaggcaggggctagtccgtgcacatcctggaagcagtaagaagtccctgggcagatgttaaaagcaagatgaggggagtggttatcactgaagactttttaacgttgcacaagacagaatgacctaggaagaaagagatttgggaagtttatttacattccaaggggaaagaggaga

SEQ ID NO: 176036 - DNA, 547 bp, Homo sapiens
gcccaggagttagcaagcaaggtatttcacaaagtgtgtgcacaagggaaagagactgtcaggcatgtgcaaatactcagaggaaagagaagaaatttattctataaataatgaatatgtgctggccattttcataagcactgttgacactctgggaatatagcaataggttataagacagacaagagaactaaattcactcgtttttcatgctggttagggagacgsatagaatatcaacaagatcatccagataaaaacagatcctgttaagaaagccccaaagtggagggtgaggaagaataaaggatctcaggatggctggagtacagcacgctagagttaagggtatgatgtgagcttgcagaagtaggcaggggctagtccgtgcacatcctggaagcagtaagaagtccctgggcagatgttaaaagcaagatgaggggagtggttatcactgaagactttttaacgttgcacaagacagaatgacctaggaagaaagagatttgggaagtttatttacattccaaggggaaagaggaga

SEQ ID NO: 176037 - DNA, 547 bp, Homo sapiens
gcccaggagttagcaagcaaggtatttcacaaagtgtgtgcacaagggaaagagactgtcaggcatgtgcaaatactcagaggaaagagaagaaatttattctataaataatgaatatgtgctggccattttcataagcactgttgacactctgggaatatagcaataggttataagacagacaagagaactaaattcactcgtttttcatgctggttagggagacggatagaatatcaacaagatcatccagataaaaacagatcctgttaagaaagccccaaagtggagggtgaggaagaataaaggatctcaggatrgctggagtacagcacgctagagttaagggtatgatgtgagcttgcagaagtaggcaggggctagtccgtgcacatcctggaagcagtaagaagtccctgggcagatgttaaaagcaagatgaggggagtggttatcactgaagactttttaacgttgcacaagacagaatgacctaggaagaaagagatttgggaagtttatttacattccaaggggaaagaggaga

SEQ ID NO: 176038 - DNA, 547 bp, Homo sapiens
gcccaggagttagcaagcaaggtatttcacaaagtgtgtgcacaagggaaagagactgtcaggcatgtgcaaatactcagaggaaagagaagaaatttattctataaataatgaatatgtgctggccattttcataagcactgttgacactctgggaatatagcaataggttataagacagacaagagaactaaattcactcgtttttcatgctggttagggagacggatagaatatcaacaagatcatccagataaaaacagatcctgttaagaaagccccaaagtggagggtgaggaagaataaaggatctcaggatggctggagtacagcacgctagagttaagggtatgatgtgagcttgcagaagtaggcaggggctagtccgtgcacatcctggaagcagtaagaagtccctgggcagatgttaaaagcaagatgaggggagtggttatcactgaagactttttaacgttgcacaagacagaatgacctaggaagaaagagatttgggaagtttattyacattccaaggggaaagaggaga

SEQ ID NO: 176039 - DNA, 485 bp, Homo sapiens
ttgaccgtgttggccaggctggtctcgaactcctgatctcaggtggtccacccgcctcggcatcccaaaatgctgggattacaggcttataccaccctgcccggccaagattcatgtttttatttaagttattaaaatctcattcaattcctcacaaattcagaatttttaaacaggaactyatgttaaatttttatcaaattattccctggaatcttagatacgctttaaagatcactttgtcttaaaaatacacacgcagtaaatgacagtccgtgcagctaattcttggtacttcagggaaactgatctcccaggaaaaatcaggcttgcgggacgacccagtacgctaaacaccgacttgcaaccgaaatctctaaccaccacaatgcctttgcgggaaatgcgtgtcgactcgcccactttgccagctggcagtgactcaaccggagcccgacacccaagctaagtcaattcttaacact

SEQ ID NO: 176040 - DNA, 596 bp, Homo sapiens
cgaattttactatatgtcttgctctaatgctttgtattgtgaacgctgaaaatctgagacaggtctcagttaatttagagagtttattttgtcaaggttgaggacacaygcccatgacactgcctcaggaggtcttcatgacatgtgcccaaggtagtcggggcacagcctggatttcacttattttagggagacatgggacattaatgaatataggtaagatgtacattgattccttctggaaaggcaggacaactcaagcagggagggggcttccaggtcactggtaggtgagagacaaagggttgcattctcttgagtttctgattagcctttccaaaggaggtaatcagatatgcgtttatctcagcgagcagagggaagagtttgaatagaatgggaggcaggttggccctgagcagttcccagcatgagttttccctttagcttagtgatttgggggccctaagatttattttcctttcacagtatccttacatcttgctctaattatttatttcatttttaaaactatttaaacaaggagttgtattttagctaaaacaaaatcgtaattggaaggataggattggtta

SEQ ID NO: 176041 - DNA, 596 bp, Homo sapiens
cgaattttactatatgtcttgctctaatgctttgtattgtgaacgctgaaaatctgagacaggtctcagttaatttagagagtttattttgtcaaggttgaggacacacgcccatgacactgcctcaggaggtcttcatgacatgtgcccaaggtagtcggggcacagcctggatttcacttattttagggagacatgggacattaatgaatataggtaagatgtacattgattccttctggaaaggcaggacaactcaagcagggagggggcttccaggtcactggtaggtgagagasaaagggttgcattctcttgagtttctgattagcctttccaaaggaggtaatcagatatgcgtttatctcagcgagcagagggaagagtttgaatagaatgggaggcaggttggccctgagcagttcccagcatgagttttccctttagcttagtgatttgggggccctaagatttattttcctttcacagtatccttacatcttgctctaattatttatttcatttttaaaactatttaaacaaggagttgtattttagctaaaacaaaatcgtaattggaaggataggattggtta

SEQ ID NO: 176042 - DNA, 596 bp, Homo sapiens
cgaattttactatatgtcttgctctaatgctttgtattgtgaacgctgaaaatctgagacaggtctcagttaatttagagagtttattttgtcaaggttgaggacacacgcccatgacactgcctcaggaggtcttcatgacatgtgcccaaggtagtcggggcacagcctggatttcacttattttagggagacatgggacattaatgaatataggtaagatgtacattgattccttctggaaaggcaggacaactcaagcagggagggggcttccaggtcactggtaggtgagagacaaagggttgcattctcttgagtttctgattagcctttccaaaggaggtaatcagatatgcgtttatctcagcgagcagagggaagagtttgaatagaatgggaggcaggttggccctgagcagttcccagcatgasttttccctttagcttagtgatttgggggccctaagatttattttcctttcacagtatccttacatcttgctctaattatttatttcatttttaaaactatttaaacaaggagttgtattttagctaaaacaaaatcgtaattggaaggataggattggtta

SEQ ID NO: 176043 - DNA, 558 bp, Homo sapiens
ttgtaccttgcatctaagggacgatctttgagaggcctcctaaatgacaacccatcattgtggacctttgggttttgtcttggataccctaggtaacaaagtgggccactctaagaaaatattagatatcggtttaattgtaaaacatggaggctccctggagagcactcacagtgacttctacctttatgagaaattgtattagtgtgaattgcctgtcaggatgtttaaacagcccctcagagcacctaayagctcactcctagtcattatacatcactaatgggtgctcaacattcaaacacctatttactgcatggatttagtcgtcctggaggacctatttctgattaaataattcatgatttcagagtgtctgaatactgtctatatgcccagggctgcacttctgggtcctaaggttctgctcgagacattcccgtgagcttccttgacgatgatccacagaggcattcctttgtgcccagtgctgaagctacggtgcctatcagttttccgtgggggagtgtaggacctgcagatttctggcccccaccc

SEQ ID NO: 176044 - DNA, 430 bp, Homo sapiens
acctgcccaggagccacttacacaccaacagtgagagcctgacttagtacctctgagaaggatggacctgcagacccacgatggccaaaggccttacagaggagagatcctggtgccaagcccagggacatatggatgataataggaggggagggagtgatgggtgcagggcatgaaggcccagacgcaaaaatataattgccagataatgtacagtgtaagctgcaactgcctatcagataatttctgctgggaaataagagatcaggttgatgtgtgagtatccatctctcaaatgcttatccccatcttctctcccaacagcctagcctgagctatcatcttctcctgyctaaacaacagccacagcctcctaaaacatcttcccagtgccatgcacacccctttcctcccaccaccctttattctc

SEQ ID NO: 176045 - DNA, 584 bp, Homo sapiens
tcacaacttgtaactgtgtttctgataaaccagccaatgtcagcacagagaggatccacgtcaagccaaagggagctacacagcataatgtgttcaagattcatccaagttgtagaatggatttctgcttccttcctttttatggctgtataatattccactgcatggatagaccacattttatttggacatgtcagctatttctccttttggcttccatgaataatgtcactgtgaagtcgtgtgtccatgtgcttgtttgagtacctgttctcagcaatttggggtatatatgtaggagtgaaattgctgggccatatggtaattctatgtttaacttttggaggaactgccaaactgttttcttggtaaaagaagccagacacaaaaggccacttactatatgattccacttatgygaaaaactcagaataggtgagcccacagagacagaatgcagactggtgtctgtcaggggctgaagggagaggagaacaacaggggagactgcttaatgggtacagggctttactttggcatgatgaaaatgttttggaagtacagagaggtagtgattgcccaac

SEQ ID NO: 176046 - DNA, 547 bp, Homo sapiens
taaagaggtgattaaattaaaatgaggctgttagactgggccctgatccagtctgacttctgtcttcataagatgatgaaatttggacacacaaagaggtgtcagggatgcagcagcagagaagaaaggccaggtgaggacgcagcaaggagatggccacctacaaggcaaggagaggggcctcagaagaaaccaatcctgctgacacctcratcttggacttctggactccagaactgagagaaataaatttgctgtttaagccactccatctgtattactttgttacggcagcctgagcaaacacacacacacccaggcagatatggcttttctctcccctctgaaaggtgcaaaggagatggtctgtggttttcaaggtcctctcctcccagtctccagacccctgtgtcagctcaggtgggtctctgccctcaagctcctaaaggaggtgcctgcagaccagggtctgcacacaggggctgaacagatacagaccttcctcctgggctcctagagccacaccctgtgcctccccagcccctcc

SEQ ID NO: 176047 - DNA, 567 bp, Homo sapiens
agggttgaattttcagacttgtagtcctggcaaaaaacaaacaaatagagaaaaaggttggggaagccgggttgaggaaaaaaattctaaccttgagtaacccagtttagcacaacccagaatgtctcaccacrtttagccacagtaccctctgtctctccacccatcccctgcaggggtcaagacctgcattgccctgcgcaatggccacaagcccgatatggctacaaagccccgtggctagtctcattgaaatgggctgtatacataaaatagtcactgggttttcaggacatgatgaagaaaatgaatataaaacacctcattaatattaatatttcattatttttatatcgattacatgttagaaagacatttaataatatataaaaataaaatatattgctatgtttaaaaatgtaaatatattaagactatctcaaaggaagtttattattacagttaatctcatccgtttctttttactttttagtgtggctaccagcaaatgctaaattgcatctttgactccgctgacactcctgaggcagtgctggtccggatgtt

SEQ ID NO: 176048 - DNA, 567 bp, Homo sapiens
agggttgaattttcagacttgtagtcctggcaaaaaacaaacaaatagagaaaaaggttggggaagccgggttgaggaaaaaaattctaaccttgagtaacccagtttagcacaacccagaatgtctcaccacgtttagccacagtaccctctgtctctccaccsatcccctgcaggggtcaagacctgcattgccctgcgcaatggccacaagcccgatatggctacaaagccccgtggctagtctcattgaaatgggctgtatacataaaatagtcactgggttttcaggacatgatgaagaaaatgaatataaaacacctcattaatattaatatttcattatttttatatcgattacatgttagaaagacatttaataatatataaaaataaaatatattgctatgtttaaaaatgtaaatatattaagactatctcaaaggaagtttattattacagttaatctcatccgtttctttttactttttagtgtggctaccagcaaatgctaaattgcatctttgactccgctgacactcctgaggcagtgctggtccggatgtt

SEQ ID NO: 176049 - DNA, 429 bp, Homo sapiens
gaggaatagacattcatccattcattcagaaaatatttcccaaaggcttactgtgagtcagttctgcatgcctgggaaatcacaatgaataaaacagacaaaaataactatcctcatggggcttagatcctactggagagagayaaaaaatgttatagaggtgcattgaccaatacagtagctgataaacacatgcagctacttaggtttgaaaaaattaactaaaattaactaaaactgaacatctagttctttagtcacagtagccacatttcaagtgctcagtagccacgtgtggctagtgtttactgcaatgaacagctcatcaactccaaaatctcacctgaatatcatcagctcatctacagtatccacatttggtgtggaagtgggtgggagtatggtccatcctggggcacaattcatttc

SEQ ID NO: 176050 - DNA, 596 bp, Homo sapiens
aaggcagctcattcttcagggctgtcgtgagccaccctgggctctgattaccgctctgttggatccatcagccaccaaagaaggctgaggctgcccaggggggcagtaggaaggggagccagctctcccttgacccagaactgagagagttgtacagaaacagatgcccagacattgttatttcagacctgtcacattaaaaaaatgtagtcattgacatgatgttgtcaattcaatcaccagcttgttattgacttattgagtacctagtatgtatcaggtcccatttatggtacgttagcaaataaagcagacaaagctccctgtccctgtggcatttatattctggagactcagataaatgaggtgttatttttctgaatamggacatgagaataaacaagtcagcaataacaataacaattcatgctttcatttcaaaaaagaattgtcacctttatttttgaaaggacatctttataccaggtgcacagggctgatgtaatctcagaatgcaggactgatctttaaagaaaatggtatatccacatacagagtcttggaaaccacagctgatgggcaagggaaggttaagc

SEQ ID NO: 176051 - DNA, 574 bp, Homo sapiens
ggggggattttgccatggcaaatgcttactggatgactcacttgtgttttgtcttgcaaccactttgaccttgatgccaccagtgagtaaagccattgcccacaaaggacactgggctaaagggaaaacatggaaaagaagagctaaaaaggggaggaggaaaggaaggtggaaataaaggaagagaaagagggggccaagaggtggagaaaggtgtagagagatggaaaatgacagaaaagagtcagagaaagagggagaaaaaaagaaaaaggaagggacgagaccaaaaagaaaagaatataaaagatgctagaaagaggagagagagagttgtagaacagccgagggtttggagaaagaaacagagaatgctgtggtamgagaggaagagaaaggcaaaacaatctaatacaggcagagcatcactaatccaaaagtccaaaatcagaaatgctccaaaatctgaaactttttgaatgcctagatgctcaaatcagattttggattttctgattagtgatgcttaacctgtatgtattctgcaaatatttcaaaatctgaaaaaaattaa

SEQ ID NO: 176052 - DNA, 545 bp, Homo sapiens
ttcagagggagcttttggttgagtggactcagtatggtacatctagggaggaggatcatcttaaataacagaagactgattgggggtgcgaatgattgagggaccccaatctgcactgctgggataggggctggggactacccaggtctcagaaaacgatktgtcatttattagggcattcttaatgccaaacatctgagtagaagagggagactgggatgtttacgtcactccttcttcacttgcatctttggtgtcatataggctcaactcagctggggccagcagcagataaggactgaaccctgtctactctgaggctctctgtccatgggcactgccaacaccagcctctagtgtgcctcccttttgtgaagcctcgggaccactcactgggtcatagaaccagagagcatcagttggcaagatcctcagtggacagggagagaaactgaggcctagagggagaaaggaactttcacatcaatattcagatagattcacaaaattcagattcacagcccaggactcctttacagtaaagg

SEQ ID NO: 176053 - DNA, 576 bp, Homo sapiens
aagcttgagtgcagtggcatgatcttcactcaatgcaacttcaaactttcaggtacaagcaatcctcctgcctgagcctcccaagtaactgggactacagggcaaatcatcacactcagctgattttttgttttttgtagacatggggtcttgctttattgcccagactgatctcaaatttttgggctcaagmaatcctcccacctcagcttcccaaagttctgggattccaggtgtgagccacagcacctggccacctgtactatattcttagatgaatatttacatgtactaatatgaatatgtatagtctttgcatctaacaatgaacacatataaatatacagtcttagatgaagatgtatcatattattatgcatatccttagaggaatatgtgtatgtactaacatttgttaatatacatagtaatatccatattcttcagatacatatgagtgtattatttcaaatcataatcaagataagtgtgacccaatccatgcttctagaagaaattgaaaatgggaaggtaagccctagtgagggaaaggatctaacactgaccgtgtattta

SEQ ID NO: 176054 - DNA, 616 bp, Homo sapiens
cattcatttctgtccagtttggacccacttctgcttggttctgtgccgccggcacaaatacacccaggcttccttctcactcaccaccgcgggcaagcaaaggagactgacgtggaccacaggcacaaaaaatggttgtataaagtatcatcaaggtgaaattaattgcccccaaaccatgaaagtaataacatctctggcagctatttattgagtctttttacatattaggcaccctgtaaggcacttcacacacagaagctatatatatatatatatatatatatatatatatatwtttttttttttttttcttaaaaaacgagcctattttctttacctggaacaatttgcctcctacctgtatcttcccctgtcccatttttcaggtcttcctcttctcaagaagccttccttgaccttatcctaggaaaatggtagatggcttcactctaatttacccaaagctgctcctgactttcttaccacaataccttcctacccccacactcaattcactttacaatagttgcatgctaattcccactagactggcggttctttgagatcagagactgtatctggattactaaataattatttataaaataaatag

SEQ ID NO: 176055 - DNA, 541 bp, Homo sapiens
ttaacatctaaagcccatttcatttctttctttttcttcaaaaatatcttgaaacatcatttgttttttcttcattagaaagaggaaatggtgttttatcaaaggtaaatagacttgaacgctgatgggttgaagttstgttcaccactcaaagcccataagtttgattaggtactaaacttggcacagagagtccttcattcaccctgtcagccaagtcacgccactggtctcaacttttggaaaattaattacctacatgttgcttgtgaagcctgtgggtagctgacttatttgatcacagcttaagcaaataggaatctactcttcattcaaattcagctaaaagtaactgagatgttaaatctactgactctattttaaaaccagatttgaaaaagattttgttcaatatctgtggagatgaaatcttatggctagaaaagaataaatgacatgttttatattagacatatgtatttgtatcaattaaattattgaactttggttgttttaggaactaaacttaagagaagaattc

SEQ ID NO: 176056 - DNA, 347 bp, Homo sapiens
gtaactttgataggttccggtacacagacattaarcttcccaacagccgtgagtttacagattcctcttcctgaatttggccatgttttttcgatgtgtaaattgccatcatggccacacacatgtagaatagtttataccattcattttgtattactaattgctcaatttggctgacagtgcttcatacatcatggttggtttccaacctttcttgaaaattggaagtgatggccttttatggaatgttgtttttgacacacttccatctaaggctttgtgtccccacagtgctaagaagacaagtagtcatcactcccattttgagggggtcaggggaagcagac

SEQ ID NO: 176057 - DNA, 347 bp, Homo sapiens
gtaactttgataggttccggtacacagacattaagcttcccaacagccgtgagtttacagattcctcttcctgaatttggccatgttttttcgatgtgtaaattgccatcatggccacacacatgtagaatagtttataccattcattttgtattactaattgctcaatttggctgacagtgcttcatacatcatggttggtttccaacctttcttgaaaattggaagtgatggccttttatggaatgttgtttttgacacacttccatctaargctttgtgtccccacagtgctaagaagacaagtagtcatcactcccattttgagggggtcaggggaagcagac

SEQ ID NO: 176058 - DNA, 250 bp, Homo sapiens
tgcaggctagagcagaagtgggcctgtaaattctccagcactaggcctaagtgasaggcttcacctgactgttcagctgcagcaaggccacctgtacatctatccaagaagaacctatcttcttcctgccttcaatccattcaccagcaaagggtcagttgtaccagttcttcctctaccatacacatcttatggtccctgggatccctctgtgggctgcccaagtcaggcatcaagggtggcaatgcac

SEQ ID NO: 176059 - DNA, 601 bp, Homo sapiens
acactgggcagcagccaaaattccagggtgcaggcagagcagctgtgctccagggctgtcactggtgagccttgccccactcccttggtgggtgcagtgaagagtgacagctgtgggcatgtggcccactcgaacatctcccctgcagagccagccatggatttcactgctaggtgcacagaggtgcccaggctccatgcttccttgcaagcctggtggcagcagtggtagataatatctataattcagatagttttgtggtagaaaaaaaaaaactgacctgtttattagcaattactctaatacaattaaacacaatgttccttatggccatctgctaaaatatcattattgtaaaatattttaaaattttgttttatcacgtaattrttcaaacagttcttaagtattagagatatattaaaatatcttcaaatttaaaaaaataaaaatatggcccgggcgcagtggctcacgcctgtaacgccagcactttaggagaccaaggcgggcggatcatgaggttaggagttcaagaccatctggccaacatagtgaaaccccgtctctactaaaaatacaaaaaattagccgggtatgg

SEQ ID NO: 176060 - DNA, 610 bp, Homo sapiens
aactatttccaacagaaaaaaatatttagttaccttttacaagaactatattgtaactttcattttaagggtattatattgcctcagtattacaacaaacctctttattagatttaaatttaactaattctaacccaacccaaattaaaaactgctcacatttaagagcaagaaatactattgcacattacacttatatgtgaagaatgtgtgcttcctcccatgccccccaaactgaattatattctatgaattacattccattatctgaatttataacacttaaagttcttatgctcttccccctaacaaatacattaatatacttgtagcctcaaaatacttcatgaactctgaagtgaatctctatggygggagcttcctttgtgaaataaatttggctagtcacatgcaaaccaatatccccaagtatctaaacaaatttattttgctcctttccaatatactcaatagtgggaatgctggatggtatggtagttccatttttaggtttttgctttttgttttttgttttgtttttattttcgttttaagaaacctgcatagttttccatgcatgtttctaagagatgaataaatctgaaaatgg

SEQ ID NO: 176061 - DNA, 559 bp, Homo sapiens
tgcatgcctgtggttccagctacaagggaagttgaggcaaaaagaccacttgagcccaagaggtcaaggctgcagtgggccatgttcacatcattgcacagcatgtgtgacagagcaagacactgtctcaaaaaaaagaaatgcacttgttagtaaaatttttaatttcaaaataattttcrggcaatcttggctgccccaaaggcttcacatgtctctggtgctatgtgaaatgccccacccaaagtgaatatggtcaaaatgaacatgttcattgataactttgtttgcacccaatgatttttttttttaatttctgaaacttattgcaaggataaaacaaatttgcatctgccaagtctactacctgcaatctaagttgtttttgcatttctaaattataaattcattaaaacccggtacttcatatttagctatgtttctcacattttcattacgtatttggtttgtatttaaggagttttcataaagaaaaacaaaacttccagcagtgacaaaagcagagccgatttattttattggctattcctgaaaacaa

SEQ ID NO: 176062 - DNA, 523 bp, Homo sapiens
cagatcttataccttgaatttccaagaattttttcttgttctctaactgtcctttttgaattagcaccctgttcttggttttagatgcagtatattcttttctttctctgaggatattaatcgaagttttttcctgtttttttctcctaagttttcttttgctccctgccctgtctctctctcccaaattcttccatttatttgtctgtctctgttttctgttgaaagcatcctttagttgtctgttgagcttttgcagtttgtacaaagctgaktaaatgctttgtacctagacagagtttgtcagttgatggactttattgtagagtgactaacagggactcagtcattttggtgaagaatgccccaatgtctgtaccttacagatgttttctctgggatttttagtttctccagagaaaaatcctcctctcctaggagatggattttgccagttttatccgtgtttctggagccaactatggggcaggggctgaaggtcttaccacccagttttctgagt

SEQ ID NO: 176063 - DNA, 462 bp, Homo sapiens
atcaagtccaagctaaggaaatatgaataagcaacagactttagttaataataacaatggatggatattggttcattcactgtaacaaatgttccatactaatgtaagacatcagtaacaggggaaactgtgtgtagggggtatatggaaactctttgtactatatgctcaatctttctgtaaatctaaaactgttctaaaaaatagagtgcatttcattctcattataaaaaacaaatcaaaccaacaaaaacctctttctctgctgcatcccaatgtcttggtgtattgacttgctgtgcacattggacaaagggcttattatggttataccctctgttagcycaaggttaattctcgagtgtactcctggacataaatgtgtggtctcttgtgagtttgagcaatgcagaaatttccagagcctggagactcagtccgggtcaagtcctgctaagctaa

SEQ ID NO: 176064 - DNA, 584 bp, Homo sapiens
ggtacatcagtgactgaagacatgggttatggcaaaatgagtcaccaattcaagctagagctgtccccaccaagaattgttgggcatggacactagatcacgtgggaaagatctcaaatggaataatttggctggaatcttgggccaaggataaggcatggcctgtataactagtaagaactagggaccaggggcaggagtccttcctgatgatgtcttcagggcaatcttctcccaaatcctttccaccatagaatgaatcgattgtccctaaaaactaaaatgtgtaagcttgragttaggaacacattagcttggagttagagcatgtggatttccatcaaggctctgttgttcagcatctgtgtgaccctgaactaatctctcccactttctgagcctcagtttccccatttgaaaaataaggaggttggactagattagtgtcttttaaactccttctcttccttctctgttcctttcttatttgttcccttctttctcctcttcttcttatgactatggtagccaaaaacatttttcaaataaataaatattcaaagaacgttttgtttaaagcgaga

SEQ ID NO: 176065 - DNA, 384 bp, Homo sapiens
ccagtacaagaggtacttgctatctctcrgacatgacctgtgcccatcagaagagctgggcatttgtatccctcagaccgtatgactgggcatgggctgctctgggaagggtgtggcttcaggtgaggcagctctctgcagctgaggctgactctgaaggagctacaggttgaagccatctgttggccacaccttctgcagttgggcagtaagatgtggtcagccagagataacacatcttagtgcctctgtgttgtgacctctgtgctagagggctggattcatcctgggtggtcttgagggcaggagaaaacttgagattttcctcagtgagtacagagctgtccctcagagctggggagctctttgggaaaagggctgggt

SEQ ID NO: 176066 - DNA, 449 bp, Homo sapiens
gctttcactggttcccacagaaccaggctgttacaaagtgaaattgcctctcatggttggtcccttgtgtcatatccacatattctgtttctctgccatgttataatgtagcatgaggccttcaccagacacagagcagattttagtgctatgcttcttagacttcccagtctcaagaatcatgagccaagtaaaccttttttttttaataaattacccaatttcargtattctgttatagcaacacaaaacagactaagataagggattggagggatagagaaatgaataggtggagtccagaggatctttaggatcctatcatactatctatcatattctgtatgatactataaaggtaaatacacatcactttaaatttattcaaacccacagaatgtacaccaccaagagtgaacctcgatgtaaagtattaactttgtatgata

SEQ ID NO: 176067 - DNA, 449 bp, Homo sapiens
gctttcactggttcccacagaaccaggctgttacaaagtgaaattgcctctcatggttggtcccttgtgtcatatccacatattctgtttctctgccatgttataatgtagcatgaggccttcaccagacacagagcagattttagtgctatgcttcttagacttcccagtctcaagaatcatgagccaagtaaaccttttttttttaataaattacccaatttcaggtattctgttatagcaacacaaaacagactaagataagggattggagggatagagaaatgaataggtggagtccagaggatctttargatcctatcatactatctatcatattctgtatgatactataaaggtaaatacacatcactttaaatttattcaaacccacagaatgtacaccaccaagagtgaacctcgatgtaaagtattaactttgtatgata

SEQ ID NO: 176068 - DNA, 415 bp, Homo sapiens
tgtgttctcaggtaccttgtacaagatgtctcacctgagttcaccccatgatggtctacacatggcttgttgagtggtatacaaatattttttaaatccttcccaattgagacaactcatcttctaagtaaggaattttggcccctaatttgttgttgsttttgtcttccttatatgagagtattcagctatgggagctggtggctgtttaggacagaaaatgccaatctgtatttacttcaccttcatttgcaagtgaaaaacaggcccttgctaaaaagatcaattaaagtgagttttgagagttacatatgtaaacacagatattttaatccagccatgacaactagctacataaatacaagtcttgaagaacgagatgagaaggtagagtagataccctgtaggatcatcc

SEQ ID NO: 176069 - DNA, 579 bp, Homo sapiens
atgtaccactgcctgggcaacagagcgagactccctcaaaaaaagaatagctaaaaggtaaattttatgttaggcatattatatcacaagaaaaaaatacaaggagaaaagcatataccgcttaaaaaaatgaagtcttgcttggccacaaaggttcattcccttcatggggggctcattggtttctagctgccctcgagtgtgagacataggctggagactggtaactcgtgggctggaactcacccttctgggtgttttgtttgcaccacacagtttgtattatttgtcagcatttcactaagaggtatttggcatcaaaaactgaaactggattcccttttatgttggatggtttgtccatgctgggtccacattctcctttgctacccmgctccctctaaagagagtcttcagtctccatgggcacctgggccctacagaagcttgcagttatagccccagcgtgaaagttttcactctgtctcagagctgaccctctgctattggagtcattgcctttgtattgtaggatttgattattgtaatgtaaatgagcctaagatgacccctagggat

SEQ ID NO: 176070 - DNA, 521 bp, Homo sapiens
atgtgtctgtgggccttagaaacacgtagctttgaattccgaaagtgagaattaagttgaccttgcagaaatgaattgcaggttaggtggtggtaagyctctaaagaagattcatgtgggaccttttcaaataattctgttctccagtcaattttaaaccaccctgcgtcccagcaaggacagtttatggctttgttcacatcatagatttagaaatcaagacctaagaaaggtcacaccattaaataaatgttcaacactccgggaaaaatgggatgttaataacaaattctcagttgagtgacattgacttgctacttttgtaacagctactttggtttgcatttgtaaaacctaaaaaaaatttttttctttacttttgttggagaaaagggaagtttttgacctgagcattttctcacttcagagaattgaataagggaagcgtgcattgattaatattcttgggggtgctagaaatgtatctgaaaacctctccagtctagtgtttctcaatttta

SEQ ID NO: 176071 - DNA, 521 bp, Homo sapiens
atgtgtctgtgggccttagaaacacgtagctttgaattccgaaagtgagaattaagttgaccttgcagaaatgaattgcaggttaggtggtggtaagtctctaaagaagattcatgtgggaccttttcaaataattctgttctccagtcaattttaaaccaccctgcgtcccagcaaggacagtttatggctttgttcacatcatagatttagaaatcaagacctaagaaaggtcacaccattaaataaatgttcaacactcygggaaaaatgggatgttaataacaaattctcagttgagtgacattgacttgctacttttgtaacagctactttggtttgcatttgtaaaacctaaaaaaaatttttttctttacttttgttggagaaaagggaagtttttgacctgagcattttctcacttcagagaattgaataagggaagcgtgcattgattaatattcttgggggtgctagaaatgtatctgaaaacctctccagtctagtgtttctcaatttta

SEQ ID NO: 176072 - DNA, 548 bp, Homo sapiens
agatctacctggcaagacaagtgacacttgagaagaacttataaaaaatacacaggcaagcycagcaggagctgtcgcctctgtgacagcaggtgctccagcagagaaaaggtgaggcctgtcatgggcttcacagccctgcagggaggtggccagggaattctgggtctagggcaatggagtcactcataacatgcagaattagaaagttgtgatcaaggccatctcccagtcagacccatagctcctgcagggcagggtcagaccttggggccagtttctccagggcaccgggcagcctgtgaaacatgggttagtgggtggatgggctgcagcttggctgctgctctaggcaggaactctgctctccagccagaggacccttctgttcacttcactcccattgccaaactggatggctgagaggcgctccagacctttctcgtctccttaaaccatgaccagtcagcaagtcctactaactccatggttcaaaggccctcagatccactatctcatctaacagtcaagggtgacagggaagagtc

SEQ ID NO: 176073 - DNA, 261 bp, Homo sapiens
gcctggtcggccgcgcagcccgccgtcagcacgaactggttgatcatgacctggtgcttgagctcgtccatgttcacggacatggcgccgccgcgctgcccgctccggcctccctcckccgcccgcgcctccgcctcacgcgtccaccattagcgagccggctccggctaatacaaatatttactgtgcggctctgactcaccgcgcctcgcctcgctccgccggcgccgcggcatgctgggatatgtagtccccacggtg

SEQ ID NO: 176074 - DNA, 447 bp, Homo sapiens
gtcacccaagccgggcagtagcagcgccaggtacggctcgggcaggttcctccggggcccccagccacgcctagggatcggggccgyggggccgcgcgaaggctcggggtagcaacgaggcccggagggggccgagcagggcgccccgccccgagtccccgcccccgcgcccgccgggtccgcgttccagcgcgtgcctagcagtccgcgcctggggccgggcgctcaccggacttcggagggtagcgataggccgagttcgcctggatgtcgatgtcctccacccccgcgatgcggcggctgagaatggagcccatggtgcgcggcgctgccgggcagaggggccagggccggaacgggagcggcgacagcggcggggtcctcacgcggacatggcccggaccaggccgcacggacgctcgtccacggccgcggaggcgcctcgag

SEQ ID NO: 176075 - DNA, 447 bp, Homo sapiens
gtcacccaagccgggcagtagcagcgccaggtacggctcgggcaggttcctccggggcccccagccacgcctagggatcggggccgtggggccgcgcgaaggctcggggtagcaacgaggcccggagggggccgagcagggcgccccgccccgagtccccgcmcccgcgcccgccgggtccgcgttccagcgcgtgcctagcagtccgcgcctggggccgggcgctcaccggacttcggagggtagcgataggccgagttcgcctggatgtcgatgtcctccacccccgcgatgcggcggctgagaatggagcccatggtgcgcggcgctgccgggcagaggggccagggccggaacgggagcggcgacagcggcggggtcctcacgcggacatggcccggaccaggccgcacggacgctcgtccacggccgcggaggcgcctcgag

SEQ ID NO: 176076 - DNA, 447 bp, Homo sapiens
gtcacccaagccgggcagtagcagcgccaggtacggctcgggcaggttcctccggggcccccagccacgcctagggatcggggccgtggggccgcgcgaaggctcggggtagcaacgaggcccggagggggccgagcagggcgccccgccccgagtccccgcccccgcgcccgccgggtccgcgttccagcgcgtgcctagcagtccgcgcctggggccgggcgctcaccggacttcggagggtagcgataggccgagttcgcctggatgtcgatgtcctccacccccgcgatgcggcggctgagaatggagcccatggtgcgcsgcgctgccgggcagaggggccagggccggaacgggagcggcgacagcggcggggtcctcacgcggacatggcccggaccaggccgcacggacgctcgtccacggccgcggaggcgcctcgag

SEQ ID NO: 176077 - DNA, 563 bp, Homo sapiens
tgctgggtgtcttcattcacatcctggcttacttcccatggctgacagtgcaggctctggagtctgcccaggggtcccagtgagaatgtctctcactggttgtgtgacctgagcaggtcactcagcctcaccgggccagtttccctgactgtcaaacaccagtaacaacagcatctgctttcattcattaggtgagtgttcatccagctcttaggcatggagcggggaggtcatgaggatgcggggccgtggacagttgaggatgatgcctacttttgggctggggaggacagagggaaccaacaggtacacgagataaagcagcagtgacactatgaggagaatggcggcgggagcgttgaccacgagctggcagttggcctgcgkggtggtccaggctggcctcaccgcggcatcccaaggagggaatagcccaggccgggaaggtggggcggggtgggcagggcatgtggaatcactggtctgcagagcggggagcttggccatggccttcaggtcagggtgcagcaaccttcaccattgggcatcattaggctgggggc

SEQ ID NO: 176078 - DNA, 566 bp, Homo sapiens
ttctttaccttaatttctagttttatcttttacttcaccctattcccatatctcctgtttttcaactaatcaaggaagtgaaagatgtttacaaagagaactacaaaacactgctgaaataaatcagaaatgaaatgaataaatggaaaaacattccaagctcacaaattggaaggactgatatcatttaaatggccatactgcccaaagcaaggtacagattcaatgttattcccatcaaattaccaayctcatttttcacagaattaaactattctaaaattcatatggaaccataaagaacccagatagccaaggcaattgtaagcaaagagaacaaagctggaggtatatcattacccaacttcaaactatactataaagcaacagtaaccaaaacagcagggtactggtacaaaaacaggcacatagaccaatggaaaagaatagagaatccagaaacagccacacaccctaaccatctgatctccaacaaaattgacaaaaacaagcaatagtgaaaggacttcctagtcaacaaatggtgctgggataactggctagcc

SEQ ID NO: 176079 - DNA, 547 bp, Homo sapiens
atggttgttaccaagagctgcagggagagggaaatgggaagatgttggccaaagggtactaagttttagttaggatgaatatttctggagagctaatacacaatactaaatttaacaatactatattgtatgctagaaatttgttaaaagggtagatcttaagtgttctcaccagaaattttaaaaaagaaaggtaaatatgtgaggtgataaatatgttacctagcttgattgtggttatgatttcacaatgtatattaaaaacatcaaattttataccttatatatagataattttttgtcartcatattcagtaaagctgaaaaagcgctggggagaaaacattaaataatcatgctattggataagtaattacaatctgagattctgtacaacaaatctgtgagtacctactgttttggtaggtactgttctggtcactggacatattccaataagtaagctttcttcatacagtttacagtcttgaggatggcagaaataaaaaataatttttaaaagataatctcagatagtgataaatat

SEQ ID NO: 176080 - DNA, 428 bp, Homo sapiens
acaagtcacacggctattccatgggagactatgtcagttagccattgcaataacaatgtttggggaaagtgcctgtcccacaatcaaatcctccttcttccccagtagtttccactgcaaattcttttctgtcatatgcaaactcccttcaatctcttacctctgagactcttgcagaagrcaatggatatcggcagttgaaagtctttgaaggttgagaaaaaaagagaaagatctcatcattttttatgggtgcatagtattccatggtgtatatgtgccacattttcttaatccagtctatcatcgttggacatttgggttgcttccaagtctttgctattgtgaatagtgccgcaataaacatacgtgtgcatgtgtctttgtagcagcatgatttatagtcctttgggtatatacccagtaat

SEQ ID NO: 176081 - DNA, 507 bp, Homo sapiens
  misc_feature (1)...(507): n = A,T,C or G
ccgaggttttcatgcattggggcagaggttaaaggcagcaccaaattaagactagggaattaaatttacaaagttggtgacagtagcttaagagtgttggggggcagggagttgcaaggggagaaaattcattcttgaacccaaagtagggtagccagataaaataagggactcatggttaaatttgtatttcagwtaaataacaaataatttttcattataagtatgttccacaagggaattttttggtataagtacatcccaaatattatatgagacatatttatacttaaaaaaaaccaaatcattgtttatctgcaattcaaacttaactgngcactctatatttttatttactaaatctatctaccctaatccaaagcactaaaaaaattcagaaatgagaacactgcaagtgatccaattggacataaagtcatgttctaaaaaatgggtgtgatcttcacaagggggtaaggatacctctacttgtatttgtgcaccaat

SEQ ID NO: 176082 - DNA, 610 bp, Homo sapiens
ccacagcctccaaatagacagagaaggggaaagatgtagagccattggcttacaaagttgtgatttcagagatgcgctttagatgatagcagtgaataacaagcacaatgcttgccttagcaaatggttttcctgtctcctttaattgaatcagtcagctattaggctcaaataaccgtttcctaaagtggttgcaataagcagaagccactgtactgtactttcaaagacttgattcaaactcagtaattgaattgtcctgattcctctaagtcacagggctacaacactggcagaaaccagcagaagctagtactgtctagagaatatttgttttcatctcctttagtctgaaaaggcagactataggtataattaatwaataaaacaattaggtaaattgtcctatttcctaaataggaaaattattttgtatggcaagaagtacccaaatattctttaaagaatatatgttcacgtggataaaactgaattgctgaaaataagtactttgcaactgttcttgcctgagtgttttatgaagcattagaaaatgagcaggtgtaaccaatgtagccttattaaaatccttaggtgggtagtagaattc

SEQ ID NO: 176083 - DNA, 334 bp, Homo sapiens
aacatgctatgattttataatctctgaagaaatatttattatatttttctcagcaaatggaataaggaatgattcataatattcttttctgatgtttaggacttttctgaatctctgcagaggtgccaagaattagataggatgtccacagagcagaaggacaaatgaagatgccagaccacaagacagattttttaggagagcagcttttgcccaaatgtgtagttttcaacatagtcmaccatgtaaattgttcttaataattgtagcctaaagcagtccaaaccctgttgtccatcatcttttcctggatcttgcccaaaaggttgcccag

SEQ ID NO: 176084 - DNA, 418 bp, Homo sapiens
gtgttatccccacccccaaatagaatgtagactcatcaagggtagattctgtgccttctacttgttttttaaatggaaacaatactgtgtgaaaacacagttattgtttaataaatatatatgccaagaaagcttgcaggccctatttttcagggttcttttgattacaaatgaaagaaatgtaacccaaagtaacataagcaaaaaktaggaaattttttcatcatgaaactaagaaggtggtccagcattgctcaatccagaggctcgtgcaggatttttagtgcttcactaggtgcattgacctcattctctcctactgctaagttcttcgctgtctgcttctttacattccagggctcagtattccagctttgcaaccccagcaaaacgagaccttctttctgtgcaaattcgt

SEQ ID NO: 176085 - DNA, 425 bp, Homo sapiens
tattatttccaccttctataatacagaggaatttttacatttatttgaatatgtattctaccaaaggaattttcaaaaaggccttcgttttcctaacttttcagtaattcttactgttggtaaataggctatcgcagtattttaattaaatacatactaattacatgagtatgatgtacatctgctacagaggcaagaataatagggaatattacaagatgtaatcaatcataattcaaataagtttcaaggagaagaaaccagtaaacaatrcggtactaccacagtataacttttaagggaaaatttttttaactgaatgaccacaaaactggaaaatgtgtacatgccagcaatattttcataaaaaattaattatacctttaatttctatttggaagaaatatatttactagctttagaac

SEQ ID NO: 176086 - DNA, 562 bp, Homo sapiens
tagattttttgaggtgaaaggtactattgcagacagagtccagtcctctttcctttatcaatgaagagtcagagacttgcccaaaggcagagcttggttagtgacaacttaggacttcagtgcggtttcaggcaactccttctctaatgttgtttccatgacttacaaactgaatgagactttaaactgttagcaacaaagattttttaaatgataaatcatgtcatcaacaactttttaacatatgagagtcctacatgttgttcctcattttgtccactcatttaacaatccgtaaaaaggagacctcctgaaggaccaacaytttctattttatataggtccttgacatgctattgtgacttccaaaaagaaaggatggagaattgtcttaggtgtaggattttaagaaagtttttttttaatcttaaagctaagaagaaaatctgaaaaagaaaatcttaggctaaacaacaaattagtctctgaaaaaagtgttttctctgtctaaatatttcatcactgtaacgccttttttctataattctttttattagtatac

SEQ ID NO: 176087 - DNA, 562 bp, Homo sapiens
tagattttttgaggtgaaaggtactattgcagacagagtccagtcctctttcctttatcaatgaagagtcagagacttgcccaaaggcagagcttggttagtgacaacttaggacttcagtgcggtttcaggcaactccttctctaatgttgtttccatgacttacaaactgaatgagactttaaactgttagcaacaaagattttttaaatgataaatcatgtcatcaacaactttttaacatatgagagtcctacatgttgttcctcattttgtccactcatttaacaatccgtaaaaaggagacctcctgaaggaccaacactttctattttatataggtccttgacatgctattgtgacttccaaaaagaaaggatggagaattgtcttaggtgtaggattttaagaaagtttttttttaatcttaaagctaagaagaaaatctkaaaaagaaaatcttaggctaaacaacaaattagtctctgaaaaaagtgttttctctgtctaaatatttcatcactgtaacgccttttttctataattctttttattagtatac

SEQ ID NO: 176088 - DNA, 562 bp, Homo sapiens
tagattttttgaggtgaaaggtactattgcagacagagtccagtcctctttcctttatcaatgaagagtcagagacttgcccaaaggcagagcttggttagtgacaacttaggacttcagtgcggtttcaggcaactccttctctaatgttgtttccatgacttacaaactgaatgagactttaaactgttagcaacaaagattttttaaatgataaatcatgtcatcaacaactttttaacatatgagagtcctacatgttgttcctcattttgtccactcatttaacaatccgtaaaaaggagacctcctgaaggaccaacactttctattttatataggtccttgacatgctattgtgacttccaaaaagaaaggatggagaattgtcttaggtgtaggattttaagaaagtttttttttaatcttaaagctaagaagaaaatctgaaaaagaaaatcttaggctaaayaacaaattagtctctgaaaaaagtgttttctctgtctaaatatttcatcactgtaacgccttttttctataattctttttattagtatac

SEQ ID NO: 176089 - DNA, 465 bp, Homo sapiens
aggagtgaaggcatgtcttacgtggtggcaggcaagagaatatgtgcagggggactgccctttgtaaaaccatcagatctcatgggacttattcacgatcaygagaacagcacgggaaagacacacccccatgattcaattacctgccactgggttcctcccacgacatgtggggattgtcggagctacagtacaagatgagatttgggtggggacacggccaagccatatcagaaagtataaaattacaagtgttatttacttagaaccactttccttctgccttattttttctttttctttttttttgctcatgtagacacaatctttatattgcacaccaggaaaatacattaccagtgttttcagtgttattgtattatgaatataaatatcctaatctgtataaataatcgttaccacaaaaagtaagtatagactgtgactctctgctttgcaatcccc

SEQ ID NO: 176090 - DNA, 465 bp, Homo sapiens
aggagtgaaggcatgtcttacgtggtggcaggcaagagaatatgtgcagggggactgccctttgtaaaaccatcagatctcatgggacttattcacgatcatgagaacagcacgggaaagacacacccccatgattcaattacctgccactgggttcctcccacgacatgtggggattgtcggagctacagtacaagatgagatttgggtggggacacggccaagccatatcagaaagtataaaattacaagtgttatttacttagaaccactttccttctgccttrttttttctttttctttttttttgctcatgtagacacaatctttatattgcacaccaggaaaatacattaccagtgttttcagtgttattgtattatgaatataaatatcctaatctgtataaataatcgttaccacaaaaagtaagtatagactgtgactctctgctttgcaatcccc

SEQ ID NO: 176091 - DNA, 580 bp, Homo sapiens
gaggcataagcaacctgcttaatgctaagcattctagatttggatgccaactgtctacaggagttgtctgaagctaaggacctggggccaatggaaaatartaaccctgtggacaggaggcagaagccacaagtcttacaagaagctgggttttggtcaagtacctacctcttagagaagagcaagcttccagtttcatctggctccttgtccaggaaagccagagtgagtttatgagatcatttttggacaaggttgcttgatgcagcagtttttaaatcaacaccttcttcagagaggacttcaaatgccatcatgcttatactttgaatctatttttaataggttgagacactaagttttccaagaatctgctcctctatcaagacaaatccaaaaatttcttctaatagcatttgtttaggtcaataatatttattaatgtgtcaggcaatgtactaaacgataagcatagaaaatttagaagtataattcctgctttcaggtatgtacagccttagaggaaaggcagatgaaaaaatacagtacaatgttatggatgcaatcatacatacatgca

SEQ ID NO: 176092 - DNA, 580 bp, Homo sapiens
gaggcataagcaacctgcttaatgctaagcattctagatttggatgccaactgtctacaggagttgtctgaagctaaggacctggggccaatggaaaatagtaaccctgtggacaggaggcagaagccacaagtcttacaagaagctgggttttggtcaagtacctacctcttagagaagagcaagcttccagtttcatctggctccttgtccaggaaagccagagtgagtttatgagatcatttttggacaaggttgcttgatgcagcagtttttaaatcaacaccttcttcagagaggacttcaaatgccatcatgcttatactttgaatctatttttaataggttgagacactaagttttccaagaatctgctcctctatcaagacaaatccaaaaatttcttctaatagcatttgtttaggtcaataatatttattaatgtgtcaggcaatgtactaaacgataagcatagaaaatttagaagtataattcctgctttcaggtatgtacagmcttagaggaaaggcagatgaaaaaatacagtacaatgttatggatgcaatcatacatacatgca

SEQ ID NO: 176093 - DNA, 548 bp, Homo sapiens
cacattaggggcttcttgactatcagctcaaatgtggcatcccaggacgggcagcagttgtccagatgttggctacctcagaaataatgctttgcctaggccaagacaccttatgtactgtatattgttactacccactgggccataattagggatcttataagactttagcaactgcaactaccagcttctgtagtacatattagtctatcttgtaactttaaagcacttagtttccagtaatatgtgaatcatgaaggtagggaaaagcccataccaataccattatttagaacctcttctttaaaaaactgtgaataatgctgtaagactgaatagtactatctctctccatttagcgaattatgcaccaatactgctatcttctgaatacaataacttccaacattttgatataaaattttctacttattttgagaagattttgttcaatgccacataggcaatacataatcagcatttgytaaattgtttatctctatacaccaagtcatagacaactttttttttttgattcttgttgctag

SEQ ID NO: 176094 - DNA, 620 bp, Homo sapiens
tatttaagtatagatttagctataatctagcaaactgtatttatagaaaagaattgctggcaaacataaatactggatagtggaacaggcttgtcgagaaataaacatgaaataaaaatgaagaggagatwaatttttaggttaatggcatatattgatagaccaaagaaaaatggttgcataagggcaagcattcatgtgtgtatgtgtgattgtatttaaaagtattgactgaccaaatttttaacacattcatacacaatagataagtgtataagactgttataaaaattcagttgaatgaaacagaagttttagttccctgaaattttttaaatttatgatgcatatctagttaaaaaagtaagaataatctctactatttgaaaatcttcggtctgaaaaaatctttttaaaaggccaaatcagcccccaaagtacatggcaaggtatcctccaaaaggaacaacctcagttcatacttgatgattgaggaaagtcctatacctctagtcatgatctgagctcatggtggcagagactgacagtggcctttccatacctgtttctttcatcccagtttcaaaacccctgtcgttaagggccatatggctggccag

SEQ ID NO: 176095 - DNA, 546 bp, Homo sapiens
tttgctgtattaagaagagactacagtgaggcacaaatagatgcagggaaattaggaggcttttgccataatccaggtaagagataatgatgctctaaactaggatcgttgcagtagagtttatgggaaatggtcaaagtctatgatgtatgttaaaagtasagccaataggatttgctgatggattggataaagtgcataaaagaaagagaaaatcaaggacaacatttacgtacaaaataagttcaatgataggcaataactgtttcctaaggttattgcactacagtattaaatggctaatatacataaaactcctagaacagtgtctgccacataatcaggtattcataaggtcatctattattattatattatatttcagaagatatcactaagagtcataaaattgtctgttacttcctgatctgttttttcaggtggctaaaaatagtttcaatttttaccattaaaaaatgtagatatacttcaggaatatgactattgaaataacatatctaagtgcatatcagcatttcaacagca

SEQ ID NO: 176096 - DNA, 600 bp, Homo sapiens
ccacatattctgatttgtatagtttggggagtgagaggtagttttccatattttaatgtatataaatgacctatgcagaactcaaaggcagaattaacaaggaagtgaaaatagttttattcttctaatatcatgtatttccttatatattaaggaagaattggtctctgtttagcataaccattattaaaaatatttatgtgagaaaaaatgtgtctggaactgttagaaatatacaattaaatatgttatttgtccactttatatgatatttatgctatatgtgtctatttctcctccttgctttttaggttatcagcatgaaaatcagcctctgtttytaagaaattctaaaaatattactcacctatgcctatcatgtcctgccacattataatcttggttacagctctcaaaatgtcagagcagatcatgaactaaagatgtgtcataggtaaaatcatttaaaaggcaaattcaacataatgaactgaagaaaaaaatccaaccatgagaatagttgatgttgactataattaaaaaaaaaatagcattctttacaaaatgcaaaactgtatgagcactaggattaaaactgct

SEQ ID NO: 176097 - DNA, 534 bp, Homo sapiens
cacccctgacatttaacttacgaatttcccaaggagcctcaaggctaaccttccctcacaataccctaaaactagggggaatatttttgccttcatagctttgttcctgctccactctggatcttccttccttcctctcatatcatcatattgggttccttcaatgccctgcatgtgttctatcttctttgcaattatctctctgaccactgcatcatttgcagctttccctcttctgaaccctcagcagtaattcttagccttttctgcatcaatgttgatactgagaatctgacaaaagctatgaataatctttttattcatctatccatcaatcagtcttggaactgaatatatacttaygcagaaaaactagcttggtgatctgaggatgtcctaaatctatccttgaaaccctcaggttctacagcatttgtctccaaatcaaccaacacagcacaaccttgtattgttatttagctgataaatacatctgttatcttcatactagtttagtaagttcttgaagacatg

SEQ ID NO: 176098 - DNA, 486 bp, Homo sapiens
taggagttaggagtgtaccaggaatagcgatgagtcattgtgcagtgatcctcaaaactggctgcccattagaatcacctagaacgttaaaaaaaaaaaaaaaagaaaaaaaagaaacagaaaaacactgatgccagggccatgaccctcctgagaattctcatttaattgtttctgggtacagccttggcctagtgatattttttaaggtcccagattattttaacwtgcacgaaaagttgagaacaattggtgggtggccggtagtgaaattttcaaagtcagatttatcaggtttgaatcccaactcttgtcctctagctgcatggtcttaaccaagttattttcttgctctgaggctcacttgtaaagttgctgtgggagtttggcttcaggagagaatatttccctgtaaacattttggtgcagcaataatctatgtgtaactatgtttttctcagcttctgataatactatctttatttt

SEQ ID NO: 176099 - DNA, 486 bp, Homo sapiens
taggagttaggagtgtaccaggaatagcgatgagtcattgtgcagtgatcctcaaaactggctgcccattagaatcacctagaacgttaaaaaaaaaaaaaaaagaaaaaaaagaaacagaaaaacactgatgccagggccatgaccctcctgagaattctcatttaattgtttctgggtacagccttggcctagtgatattttttaaggtcccagattattttaacatgcacgaaaagttgagaacaattggtgggtggccggtagtgaaattttcaaagtcagatttatcaggtttgaatcccaactcttgtcctctagctgcatggtcttaaccaagttatttycttgctctgaggctcacttgtaaagttgctgtgggagtttggcttcaggagagaatatttccctgtaaacattttggtgcagcaataatctatgtgtaactatgtttttctcagcttctgataatactatctttatttt

SEQ ID NO: 176100 - DNA, 419 bp, Homo sapiens
ttgaaaaaccagtctataacctgatacrtggatagagattctataggttacagccaaggttgtttgatgcctatatactaactttttaactaatgcaaagatagtagtcatagggctgtgagttgggttggggatggagtagacattgttgaagaataaacttcactcacagttacttaaaaatcacaaaacgctgatttaaccctttacagtatacgacagtttacaaaatctgccctatgaagtaatactctaaaagtttccactttattttttctttatcataacagattcattttcacaatattattcctttatgcatatgcttttttccacatattaggattttgtcactaaaaggttttaggtgagttacaatgtagcaaagcatttagcattaaatattgagaatattagtg

SEQ ID NO: 176101 - DNA, 515 bp, Homo sapiens
acacaatctccagtagagaatgaaaagacaacatatatatatatatatatatatatatatatatatatatatatatatatgcacacactggaaggagaatggtggcaggaaggagaataatagataatagataagagtctaatatccagaagtcttgcaactcaataacaaaacaactcaataacaaacaacccagttaaaatattgttaaacaacttgaataaagcatttatccaaaaaagaaatagaaatagccaacaagcacacgaaaaaacagtatcataatcataagaaaatgcaaatcaaaaccacaatgagataccacttgtcacccactaggattgcttataataaamagagataataatagcaagaatattgagaggttggaaaccctagtaccttgcaactaagaatgtaaaatggtagaactgctgtgaaaaacaatttggcagttccttaaaatgttaaacacacaactaccaatgatccagcaagtcggctcctaggtatat

SEQ ID NO: 176102 - DNA, 620 bp, Homo sapiens
tccaatatagctatgaagaattactgaaactcttgtttgcagagagttgtaatgtgcagtgttgggcaattgtgacttatcttaagccaagttagtgcagtggttcaagaggtccgtgcagataatttagcacttgtaccctagagtttaagtgtctggtggaagacagaagagcaagcctgcacagtyaatagccacaggttcataggcagttggaacaaggattcatacatattgttttagctgtggatttcaagaaaggagagaaagaaaaaaaattgcagattaattgttctattattttctaaggttttactatattgcatctgggtgctaatttcatctgtgctgctgggcatctgctgtgatttctgactctgaagagtcatacctttgtttaatactgcaaaattatcagcaattgtctcttttctgttctctttgttctcctcttagaactccttatatgtaagttaaatactctcgttctcttctctgtcacttctatttcatattgttcatctctctgcttcagtttggataattacttcagattaatattctagttcctaattattcttcatctgtatctaatctatttcacatatccattggatgtt

SEQ ID NO: 176103 - DNA, 445 bp, Homo sapiens
aggaggatgcaggtagatttgaataatccaccttttccttacatatgatatacacatatatatatatatatatatatatatatatatatcttctcactttattgctctggctggagtgcagtggtgcaaacatggctcactgcagcctcgacctcctggactcaagcgatcatcccatctcascctcctgagtagctgggaccacaggcacatgccaccatgcctggctaatttcccatatcatatatatttttaataatgaaaatttgagggtctttacttcttataatccacccaattttgtgtgtgtgtgtgtgtgtgtgtgtgtgtgagagagagagagagagagagagagagagagagagagaattagtagactgcattgttttagctagctaatactatgaactcttggcttatttttccagatgaccattaaaattcc

SEQ ID NO: 176104 - DNA, 531 bp, Homo sapiens
tgtcagttttcacatatttataaactactattttccatacactatgctgtttagaaatgctcataatattttaatgttcaattattcttctgtcacaaaatttgtttagatcaaaagcaaggataattcgcctttgaaagcacagagatcatatatgatattttgaaaaatgtatttgtgtctgacaaatttagtaacttaggcctattaactcaacatattataggactgtggttaaaatagaactatccatctgacacatatactgtttaggaacagtaacattacaaatgagtgttatcctttgagtatcatttatgtcaactttgtctcatgtgtattccayaagcttaaaaatgatattcaaagaaaagtgtgtgagcaataaggtggaaagcagtgtatttatggggaagaaattttggtgatattttatcatcaatatcaacaaacataaattgaatccaatttatgtacgaacatagttctgtgctcttcatacttaaaaacgtaacatttggttctacgtta

SEQ ID NO: 176105 - DNA, 575 bp, Homo sapiens
agtagaaaagagcaaaagacaaccttatctttgtaaagttatttttttttctgttatagaagctgctgcagatgtcttacacaagaatggcgagagctgcagggagttaatccaaaagacagtcagaagcagtgccccttgctaaatgtgattgttatctgacctcataaacaagaatacactaaccctagatgtcactgacttgattgattttcaaacagggaagactgatgctctaattttcctaattaactcagatgattctatcaacctgatgggcagagcttgcttactgagaaatgatgtgaaaattaagatgcacagacrgttttctaagaaacctgattcaaagcactatgcttccaatgctaggatttttactcaaatgaattctagccctgttccagctccaccaaaggaaatgtgtagattgaaatgtttacattttggctttccgcagacaaaaatggaggtattaatactactttgttgacaatttccacttaatgatttgtgtaactaataattatcatgacacgaatgaacattattaggatctgagaagtataacgtta

SEQ ID NO: 176106 - DNA, 453 bp, Homo sapiens
cacctcctcagctttgagcagaggataactgaatgtcttgaagcacagtgaaatggatttcatgttcctaatgagaaaaatgaggcctcctgtgttgtttcttttgtttggactttctggaaataaaatgggaactccctttttagaatcagtcatctgccacctgagaagaggcttgaaaaagtgctctactccccttcttcacctgcgcttttgtttttttctacagtcatcccctgaaaacytgtgctctgcatttaccaccatgctgtgaatgtttaatgaacaactgttttctgtgttaggccacaggctagccttgaactcttgtgactgctgccagcagctgcctagcagctgtgcttaatgagaaggagcatgacaatatagactttaaggaaagtagaaggcactagaggattaacgaaccttttacttctggatttctcactc

SEQ ID NO: 176107 - DNA, 422 bp, Homo sapiens
gaagaacaatagtgtgatttgttcactattttgtgtaaagctgtaatgagtacctgtcttctttgctaggttatgaactccaatgaaagtgcacttatgttccacaaaatcttcaaaacctagaacattgcctgcctaaggaataaatgactgtatatattcatgttaaatcacttgcaaaattatatgrcttataaataaggactgatattcaaacacataacttgttcaagatcacatcttatatggatctcattatgaaatgagcttgtctaaattctaaacccatgctttctccactatattaagaatcattacagtgatccctcaatatccatggggaactggctccaggatctccacagaaaacaaaatccacggatgttcaagccattgatctaaaatggcctactatttgtgtt

SEQ ID NO: 176108 - DNA, 597 bp, Homo sapiens
gaatgacctttacatatttaaaggttgaaaaatgtcgaaagaaggatattatttaatgacaagttgaaatgtgaaactcaaatttcagtgcccataaatacaattttattagatcacaagcacaagataatttgtttatgtattgtctaagactgcttcctcactaaaatcatggagttgagtatttgctacacacaccctgtggctcttcaaagcctgaactctactctttggccatttaaagaaaaatttgctaacccctgatctcgttgagcttcttcacacagctaggaagttcttagagctttggtggccagtacaactgaacaatgtcttacaaattgttctcaacagaactaaaatcagaacccagatgggctgamtacactacatctttgtgtctcttttatcctaacagaatcacatatccataggatctggtgctagaagagtttgaaagttagaaaattacccactatttgtcttactatatgtaatcatttttgtggggtatgttggtttactattttgattacaacaacacatatttttgatagtttttattatctctgatttagaaatgaagaaactgaggac

SEQ ID NO: 176109 - DNA, 389 bp, Homo sapiens
tgaggtttgtgggaaagcacacaggagcacaacacatgcacacagggagagaagtacgcasaggcacacagctgggctttcaaatgcacacatgacatacagactcacacatgcacagcccatgacggctagtttccaaactgtggatttcagaacacagcaccatcagagagccactaagataaccccacgagtaattttaacgttgccttcctcatgcgtgaaaaagcaactgagacccatctcaggagagtctgctcagctgggagaggcacagggagcacttgtgcccacgtgtgtcaactgacaccacatgaggacaaatggagccccatggcaaggtttagtacaaaaatgaaaacacatagcgtgaggagacacatgacccc

SEQ ID NO: 176110 - DNA, 389 bp, Homo sapiens
tgaggtttgtgggaaagcacacaggagcacaacacatgcacacagggagagaagtacgcacaggcacacagctgggcttycaaatgcacacatgacatacagactcacacatgcacagcccatgacggctagtttccaaactgtggatttcagaacacagcaccatcagagagccactaagataaccccacgagtaattttaacgttgccttcctcatgcgtgaaaaagcaactgagacccatctcaggagagtctgctcagctgggagaggcacagggagcacttgtgcccacgtgtgtcaactgacaccacatgaggacaaatggagccccatggcaaggtttagtacaaaaatgaaaacacatagcgtgaggagacacatgacccc

SEQ ID NO: 176111 - DNA, 578 bp, Homo sapiens
aggaatatacatgtaggtaattctctttcctaagatagtcacagcccgtaagatgtggatcgtgtaaaaaactgctgtaaaaggtataaccacataatgaggataataaccacatgtgaagagcagtagtcttcattaatgagcacttgctctccatcaagtcgtgtgtcaaggacttttcatgtatattacacttaatcttcacctcaatcttgtgacttagggacttacaggattctcattttatagaaaattgagactgagagctcaaataagaggtagagctgggatttgaacccagaatgtgcatttagattctaccaactttggcctcttttctccccaccttccttcaaatgggtggactcatacagggcaggtmtagagagccttcagccccctcccacgtcctctgtgacctcttggttttcccaagttcatatgtttgtgctgaacaagcactgctgctctgacccaccacaaatttagctgctgagcacgtgtagaatcacatcgtgcttttaactgcaggcaaaacccatccccctgggaactgtcccagtttgagggttaaaaaa

SEQ ID NO: 176112 - DNA, 679 bp, Homo sapiens
aaaaagtggaagatggaaggatatctgagcacctgctttgttctaagttcccctgggacaattatgggaaaggcaggagaaaatgctgatggaattctgagttgcacaatcctaaaccacaagcacagctctagataactcaggagcaattgcagctggaaaattggcagtcgaggtaaggactggaccagctatgctggcagaaggagctaacyttaagtctagaaggcagcttcgcgaggcataggtgagacattcacggcagtaggatgaatattacgtgcccacaggatgaaaagaactgttagttcaatactatcatcttctgtctttgtcgtccacaaagagtttggtttttctttaagacacaggacaaatactctcattttccatgaagtccattctgaactctttcttttttctcatgatagatactgtctaaatgttaaatgaataatgtagtgtcattttcaaaaagataaacagacatttatgctcagatatattttactttatatgtatacatgtataggacatttaaatctgatgacttaacaatttgcaatgttataactttttctatctctgtctgtttctatttctgtttgctttattttttttaattgccttagtactgtcaccagacagttatcatattcagatgctttagagattttaa

SEQ ID NO: 176113 - DNA, 427 bp, Homo sapiens
aattttttttctggagttgtatcttataaaaatgtatgtgggcatgctttccagttgaattataatacatatacagagcatcatatgaatacagatacccagttttagtgatgagacaattgaaccttagaaacatggtgattgtccaaggtcacactggcagtaagstgcagatctgagataaggatccatgtctcctggttctcagtttcttgctgcagagtacccatgaaatatcaatgctaaaatttaggcagcctgtagaaactggaatgcctaaaggacatcttcccactcccacattttaacaattaccttcttgtttcagaggtagtatctgtgaagcaccctgatttggctgtgccccaacttattgtcttggttttgttttgtttttaatggggattcaaattctggcaataataag

SEQ ID NO: 176114 - DNA, 427 bp, Homo sapiens
aattttttttctggagttgtatcttataaaaatgtatgtgggcatgctttccagttgaattataatacatatacagagcatcatatgaatacagatacccagttttagtgatgagacaattgaaccttagaaacatggtgattgtccaaggtcacactggcagtaagctgcagatctgagataaggatccatgtctcctggttctcagtttcttgctgcagagtacccatgaaatatcaatgctaaaatttaggcagcctgtagaaactggartgcctaaaggacatcttcccactcccacattttaacaattaccttcttgtttcagaggtagtatctgtgaagcaccctgatttggctgtgccccaacttattgtcttggttttgttttgtttttaatggggattcaaattctggcaataataag

SEQ ID NO: 176115 - DNA, 576 bp, Homo sapiens
aataacagtttcaattataagtgttagtgtttatcctcctgaaaggctatagcattaatccccacttctaattccaacacatctcactcctaactatagaaagaaggtatgtggtagtagccttactggccccttcatgaaaatggtttcctatagaaagcatgtatctggtagtagcagccttactagttccctcatggtttcctatagaaagaaggtatctggtagtagtagccttactagctccctcatgaagatggtttcctggaaggtagtgtatagcattgagtcaacatttaaagctaacataaaatgaagtcaaactcatttttcagccagcagccacatcaaaaaggtgttttataacaaacaaaataaataaaagatattctgtaaacaatgacamcctaaatcttacttcgttcattcattcatttggcaaatatgtattgtgtacctactgtgtaccaggtactcttcaagatttgtggggaagaactgttttcaaattccttttattacttccctaaaggcagagactgtgggcctagcatggcatacctcattcacaaagag

SEQ ID NO: 176116 - DNA, 574 bp, Homo sapiens
ctgccccatcttgtagaggacttgctgaggactagctgaggatgcatttacacagcatctcagaattttccaccacaacagaggaaagcagtatttatccacagattcccatgtcttacagattaacagttgtccttggatcattatatcccaaacacttctgggctgtcctgcagtgggctcagcaaatttccatgctkccagagtcagcccttgggcagagaagcaagaggccagatacacaagcttttgcagtgcaatcatgctagtcagcatagaaaatacccatcaccatagctgtaagtgaattcagaggtaggtcaatatgatatgagatggggcatcaacagtgtctgctgcaagcagtgagaacaagaggaatggagaaaaacaggaggaggcttcaggaaagggaagccttataaaagcattgtacatcttgtaatgattttaagttaaatgtggaaccattagagggttatggaatcatatatatggctgtggtattgaagatagactgtggttgatggagtagaagcaaacttagggacaggaagaactgtagaaagctgtt

SEQ ID NO: 176117 - DNA, 621 bp, Homo sapiens
gccctgttagtgcttggttcaattactttattgacactctttgaacactttattatcaatcaatcatcataatttattaagcatcagtaatttatatagcaacaaaaatgaacaataaattttatttatatttatatacatatttatataaaattaacacccgacaacattcctggcactgttctatgaagtctacatatattagcaaattaatcctcataatacatttatgacatagatatatttatcctattttaaaatatttaaataggatatttaggcaagataactgactggttggttgttgcagaaacatttaacatgaaatttacactcttaaayttttaagtgtgcagttaactacatgtacagtactgtacaacagatctctagagctttttcatctagcatgactgaaattctttactgatgaaacaacagcttcccatttccacccctttcaccagtgcctggtaaccaccattctactttctgctttgatgttttactttgatgatatacttcatatgaatggaatcatgcagtatttaccttgcaattggcttatttaactcagcataatgtcctctaggttcattcatgtttttgcagatggcagga

SEQ ID NO: 176118 - DNA, 396 bp, Homo sapiens
  misc_feature (1)...(396): n = A,T,C or G
tgaattctttaataacattacttctttcagagtatttctcacaatgcatagaaatcaccggggcaggttttaaaatgcagatggagccctgagattctgattcagtggggcctggagtgaggcctgggartgcccattttaactagcacaagagatgattctggtgcaagtggacttcagtccctactttgaaaacattgcctctaggatgtaatccatgttcccaataaagaatgtcttcagagactattaggcttgacttttatttttctgtctgaaaagtttccaaacagtntagaagcttctacatcaagagttgcttcttagagttaatagggatagaacatggctgatatagaggacaatcctaaatttgttccggtctcccgtcacccc

SEQ ID NO: 176119 - DNA, 396 bp, Homo sapiens
  misc_feature (1)...(396): n = A,T,C or G
tgaattctttaataacattacttctttcagagtatttctcacaatgcatagaaatcaccggggcaggttttaaaatgcagatggagccctgagattctgattcagtggggcctggagtgaggcctgggaatgcccattttaactagcacaagagatgattctggtgcaagtggacttcagtccctactttgaaaacattgcctctaggatgtaatccatgttcccaataaagaatgtcttcagagactatkaggcttgacttttatttttctgtctgaaaagtttccaaacagtntagaagcttctacatcaagagttgcttcttagagttaatagggatagaacatggctgatatagaggacaatcctaaatttgttccggtctcccgtcacccc

SEQ ID NO: 176120 - DNA, 399 bp, Homo sapiens
  misc_feature (1)...(399): n = A,T,C or G
acttctttcagagtatttctcacaatgcatagaaatcaccggggcaggttttaaaatgcagatggagccctgagattctgattcagtggggcctggagtgaggcctgggaatgcccattttaactagcacaagagatgattctggtgcaagtggacttcagtccctactttgaaaacattgcctctaggatgtaatccatgttcccaataaagaatgtcttcagagactattaggcttgacttttatttttctgtctgaaaagtttccaaacagtntagaagcttctacatcaagagttgcttcttagagttaatagggatagaacatggctgatatagaggacaatcctaaatttgttccggtctcccrtcaccccggccaggaagatgtcacgaatt

SEQ ID NO: 176121 - DNA, 562 bp, Homo sapiens
caggcgtgcactaccatgcccagctaatttttttgtatttttagtagagatggggtttcaccatgttggtcaggctggtctccaactccagacctcaaataatccgccttccttgtcctcccaaagtgctgggattccaggtgtgagccaccgcacccagccaaaaatgtgttttctgtacctaatattaacatcactaaccaacatagcccatgactaattcttttattgtagactttatccatcaggagagtttgtatatgtgaatatataatccacaaaaatacaattaggattccaaggttgtactaatacattaacaattggcattatgggaaggagagtcctaatatgtagtgtttggaaattttcatgtaaatacttccatcatgaccaatttccagctaccattgtggtttcactaaagaaatagagttaggaagagccagtsaagatgtgctgtggcactggctttaccacaccattagaattaattatatacatacagtttctatgtccttcaaaatgcttttcacaacactatggcaagttctgaaacgat

SEQ ID NO: 176122 - DNA, 234 bp, Homo sapiens
gagaaaaacaaagctctgaaaccctaattaggtgcaaagccctcaggctttatacatctaaacagctaaggaacagaggataagattctccagtyggcactcccttgccagtcctggctgagctaatggtgaagtgagagctgtgccacagatcccatggttggctttttgctgttgttgttatttcagatggagtttcactcgccacccaggctggagtgcagtggtgcaatc

SEQ ID NO: 176123 - DNA, 234 bp, Homo sapiens
gagaaaaacaaagctctgaaaccctaattaggtgcaaagccctcaggctttatacatctaaacagctaaggaacagaggataagattctccagtcggcactcccttgccagtcctggctgagctaatggtgaagtgagagctgtgccacagatcccatggttggctttttgctgttgttgttatttcagatggastttcactcgccacccaggctggagtgcagtggtgcaatc

SEQ ID NO: 176124 - DNA, 234 bp, Homo sapiens
gagaaaaacaaagctctgaaaccctaattaggtgcaaagccctcaggctttatacatctaaacagctaaggaacagaggataagattctccagtcggcactcccttgccagtcctggctgagctaatggtgaagtgagagctgtgccacagatcccatggttggctttttgctgttgttgttatttcagatggagtttcactygccacccaggctggagtgcagtggtgcaatc

SEQ ID NO: 176125 - DNA, 255 bp, Homo sapiens
gcttcatagggtatcgtagcatcttataaaaagtggccyatcaaatgattgattcaatcatttaaaatgcattagcagaggatgcctatcagactaagacatccgtgtttctgatccagtgaaaagggtccaggtaaggaacacatattaagcctcttggcatccttgtgtgagcaccgtgcatgacgtggccatcagtatcattgttttctttgagttttgcttgagtgttgagatgtgtgagggatagaagat

SEQ ID NO: 176126 - DNA, 255 bp, Homo sapiens
gcttcatagggtatcgtagcatcttataaaaagtggcctatcaaatkattgattcaatcatttaaaatgcattagcagaggatgcctatcagactaagacatccgtgtttctgatccagtgaaaagggtccaggtaaggaacacatattaagcctcttggcatccttgtgtgagcaccgtgcatgacgtggccatcagtatcattgttttctttgagttttgcttgagtgttgagatgtgtgagggatagaagat

SEQ ID NO: 176127 - DNA, 255 bp, Homo sapiens
gcttcatagggtatcgtagcatcttataaaaagtggcctatcaaatgattgattcaatcatttaaaatgcattagcagaggatgcctatcagactaagacatccgtgtttctgatccagtgaaaagggtccaggtaaggaacacatattaagcctcttggcatccttgtgtgagcacsgtgcatgacgtggccatcagtatcattgttttctttgagttttgcttgagtgttgagatgtgtgagggatagaagat

SEQ ID NO: 176128 - DNA, 573 bp, Homo sapiens
gtggtcccagctactcaggaggctgaaagaggaggatcactagggcccaggagttcaaggctgcagtgaagctgtgattgagccattgcactcaaacttgggcaacagagcaagacaccagctctaaaaaaaaaaaaaaaaaaaactgctgaatgctataaataagattggaacttgctctgcttttacaagaccactgttagatgaccactgacaagaagactgtgagctggtctctgtaggaagcaggggcctgggcagctctgggggcagaggagacaggcctggggcagagacacctcagggcattttcagaagacagccaaagcagccattccagcttgyccaggtagatggcaagtcaatgggaaatgattccaggaaggtagggaaagatggaattctggagagcattggacctcagattgggagtctgaacatctttccatatgcatcaggaagtcatggaaaattcacagactggagtgactttggcaaaggtgggatttaggaagactgatcaaggcacgggatagacccatggatgaatagccttctggtcagtttgtccct

SEQ ID NO: 176129 - DNA, 528 bp, Homo sapiens
gatcactagggcccaggagttcaaggctgcagtgaagctgtgattgagccattgcactcaaacttgggcaacagagcaagacaccagctctaaaaaaaaaaaaaaaaaaaactgctgaatgctataaataagattggaacttgctctgcttttacaagaccactgttagatgaccactgacaagaagactgtgagctggtctctgtaggaagcaggggcctgggcagctctgggggcagaggagacaggcctggggcagagacacctcagggcattttcagaagacagccaaagcagccattccagcttgcccaggtagatggcaagtcaatgggaaatgattccaggaaggtagggaaagatggaattctggagagcattggacctcagattgggagtctgaacrtctttccatatgcatcaggaagtcatggaaaattcacagactggagtgactttggcaaaggtgggatttaggaagactgatcaaggcacgggatagacccatggatgaatagccttctggtc

SEQ ID NO: 176130 - DNA, 528 bp, Homo sapiens
gatcactagggcccaggagttcaaggctgcagtgaagctgtgattgagccattgcactcaaacttgggcaacagagcaagacaccagctctaaaaaaaaaaaaaaaaaaaactgctgaatgctataaataagattggaacttgctctgcttttacaagaccactgttagatgaccactgacaagaagactgtgagctggtctctgtaggaagcaggggcctgggcagctctgggggcagaggagacaggcctggggcagagacacctcagggcattttcagaagacagccaaagcagccattccagcttgcccaggtagatggcaagtcaatgggaaatgattccaggaaggtagggaaagatggaattctggagagcattggacctcagattgggagtctgaacatctttccatatgcatcaggaagycatggaaaattcacagactggagtgactttggcaaaggtgggatttaggaagactgatcaaggcacgggatagacccatggatgaatagccttctggtc

SEQ ID NO: 176131 - DNA, 430 bp, Homo sapiens
gaattccaatgtgcagccaagtttgcaactacacggagccaggttagtggtgcggtcagcatggtgataattgggctcatgaacccatgacctcagcttcatcaggagacccactgcaagtactggcccaacaggagggaaaggagctgagtcagatgataccactgaggggcatgagcaaatgaaaaaacaggaacccagccatgaagctgggcctgagtgttggagatgccactatagagaccctggtcttagcaatccaracttttccctagtagaagggagaggcaaagattatcctggccgggactgtgtaaggcctttgaaggttgaccgtccatctcaccctgctgtttccctccttccctgcagaacagctgttcacctgaatgttccaggcttttggttaacaacccctggtcttttatac

SEQ ID NO: 176132 - DNA, 430 bp, Homo sapiens
gaattccaatgtgcagccaagtttgcaactacacggagccaggttagtggtgcggtcagcatggtgataattgggctcatgaacccatgacctcagcttcatcaggagacccactgcaagtactggcccaacaggagggaaaggagctgagtcagatgataccactgaggggcatgagcaaatgaaaaaacaggaacccagccatgaagctgggcctgagtgttggagatgccactatagagaccctggtcttagcaatccagacttttcyctagtagaagggagaggcaaagattatcctggccgggactgtgtaaggcctttgaaggttgaccgtccatctcaccctgctgtttccctccttccctgcagaacagctgttcacctgaatgttccaggcttttggttaacaacccctggtcttttatac

SEQ ID NO: 176133 - DNA, 430 bp, Homo sapiens
gaattccaatgtgcagccaagtttgcaactacacggagccaggttagtggtgcggtcagcatggtgataattgggctcatgaacccatgacctcagcttcatcaggagacccactgcaagtactggcccaacaggagggaaaggagctgagtcagatgataccactgaggggcatgagcaaatgaaaaaacaggaacccagccatgaagctgggcctgagtgttggagatgccactatagagaccctggtcttagcaatccagacttttccctagtagaagggaraggcaaagattatcctggccgggactgtgtaaggcctttgaaggttgaccgtccatctcaccctgctgtttccctccttccctgcagaacagctgttcacctgaatgttccaggcttttggttaacaacccctggtcttttatac

SEQ ID NO: 176134 - DNA, 430 bp, Homo sapiens
gaattccaatgtgcagccaagtttgcaactacacggagccaggttagtggtgcggtcagcatggtgataattgggctcatgaacccatgacctcagcttcatcaggagacccactgcaagtactggcccaacaggagggaaaggagctgagtcagatgataccactgaggggcatgagcaaatgaaaaaacaggaacccagccatgaagctgggcctgagtgttggagatgccactatagagaccctggtcttagcaatccagacttttccctagtagaagggagaggcaaagattatcctggccgggactgtgtaaggmctttgaaggttgaccgtccatctcaccctgctgtttccctccttccctgcagaacagctgttcacctgaatgttccaggcttttggttaacaacccctggtcttttatac

SEQ ID NO: 176135 - DNA, 433 bp, Homo sapiens
aactacacggagccaggttagtggtgcggtcagcatggtgataattgggctcatgaacccatgacctcagcttcatcaggagacccactgcaagtactggcccaacaggagggaaaggagctgagtcagatgataccactgaggggcatgagcaaatgaaaaaacaggaacccagccatgaagctgggcctgagtgttggagatgccactatagagaccctggtcttagcaatccagacttttccctagtagaagggagaggcaaagattatcctggccgggactgtgtaaggcctttgaaggttgaccrtccatctcaccctgctgtttccctccttccctgcagaacagctgttcacctgaatgttccaggcttttggttaacaacccctggtcttttatacccattcacactcaaaatcagggggaattc

SEQ ID NO: 176136 - DNA, 502 bp, Homo sapiens
tgtagtttaccttataatatttttattatttcatgtttgtctgcattttcttctgcagcataacaacgaaaacgaattaaaagaaaaattttttaaatcaaatgtggctatatcaccatataataatttacaattctaggcacgttataaaatgccttacataaataatcccattcaaacagaaacaagtttttaaatgaataggcattactacatttgctcaaacaaaaatatgttagttctgttaagaactagtttttgtgtccttgggcttgaaaaaaattggaaaatagctactcatgtgaaaatttactttagctttgtcttttacatttagycttaatgagccatttctgatcagactggttttgttcttccctagttgattattgtctagtttcaacaaacttgttcttctgaggtcactttctgtctaagttcaagtaaaatgccatttgttacaagcagttcagttatatagcaaacaactcataacacctta

SEQ ID NO: 176137 - DNA, 502 bp, Homo sapiens
tgtagtttaccttataatatttttattatttcatgtttgtctgcattttcttctgcagcataacaacgaaaacgaattaaaagaaaaattttttaaatcaaatgtggctatatcaccatataataatttacaattctaggcacgttataaaatgccttacataaataatcccattcaaacagaaacaagtttttaaatgaataggcattactacatttgctcaaacaaaaatatgttagttctgttaagaactagtttttgtgtccttgggcttgaaaaaaattggaaaatagctactcatgtgaaaatttactttagctttgtcttttacatttagccttaatgagccatttctgatcagactggttttgttcttccctagttgattattgtctagtttcaacaaacttgttcttctgaggtcactttctgtctaarttcaagtaaaatgccatttgttacaagcagttcagttatatagcaaacaactcataacacctta

SEQ ID NO: 176138 - DNA, 464 bp, Homo sapiens
atgctgtcaattctcaatggccagaagagggcatctgcccagatcagttcaggtgtctatccctggtcyaatcgcctgtgcccagggtagcgtatcaggtacacagggctgtttcttccctgctattggtagaacagcttttccaagaaggggataggctggaatggaagaaaagagtccaaagaggaaggaaccacaacagaaagagaattgctttcctttcagttgtgggagcaccagcttaatgcctcttttccacatttgcccagcagaggaaatgtttgggccgaatgacagaaaacctagggtagcctttttggtgcctcctgacaatcacagaagcaggctgggatcctacccaggtatggcagagcaagtgagcccacctaggtgggaatccttaccctcctaatcctgcaggttcacttcacaatcttgtgtagaccttaaacggttgtttagac

SEQ ID NO: 176139 - DNA, 464 bp, Homo sapiens
atgctgtcaattctcaatggccagaagagggcatctgcccagatcagttcaggtgtctatccctggtccratcgcctgtgcccagggtagcgtatcaggtacacagggctgtttcttccctgctattggtagaacagcttttccaagaaggggataggctggaatggaagaaaagagtccaaagaggaaggaaccacaacagaaagagaattgctttcctttcagttgtgggagcaccagcttaatgcctcttttccacatttgcccagcagaggaaatgtttgggccgaatgacagaaaacctagggtagcctttttggtgcctcctgacaatcacagaagcaggctgggatcctacccaggtatggcagagcaagtgagcccacctaggtgggaatccttaccctcctaatcctgcaggttcacttcacaatcttgtgtagaccttaaacggttgtttagac

SEQ ID NO: 176140 - DNA, 461 bp, Homo sapiens
ctgtcaattctcaatggccagaagagggcatctgcccagatcagttcaggtgtctatccctggtccaatcgcctgtgcccagggtagcgtatcaggtacacrgggctgtttcttccctgctattggtagaacagcttttccaagaaggggataggctggaatggaagaaaagagtccaaagaggaaggaaccacaacagaaagagaattgctttcctttcagttgtgggagcaccagcttaatgcctcttttccacatttgcccagcagaggaaatgtttgggccgaatgacagaaaacctagggtagcctttttggtgcctcctgacaatcacagaagcaggctgggatcctacccaggtatggcagagcaagtgagcccacctaggtgggaatccttaccctcctaatcctgcaggttcacttcacaatcttgtgtagaccttaaacggttgtttagac

SEQ ID NO: 176141 - DNA, 463 bp, Homo sapiens
tgctgtcaattctcaatggccagaagagggcatctgcccagatcagttcaggtgtctatccctggtccaatcgcctgtgcccagggtagcgtatcaggtacacagsgctgtttcttccctgctattggtagaacagcttttccaagaaggggataggctggaatggaagaaaagagtccaaagaggaaggaaccacaacagaaagagaattgctttcctttcagttgtgggagcaccagcttaatgcctcttttccacatttgcccagcagaggaaatgtttgggccgaatgacagaaaacctagggtagcctttttggtgcctcctgacaatcacagaagcaggctgggatcctacccaggtatggcagagcaagtgagcccacctaggtgggaatccttaccctcctaatcctgcaggttcacttcacaatcttgtgtagaccttaaacggttgtttagac

SEQ ID NO: 176142 - DNA, 452 bp, Homo sapiens
cagaagagggcatctgcccagatcagttcaggtgtctatccctggtccaatcgcctgtgcccagggtagcgtatcaggtacacagggctgtttcttccctgctattggtagaacagcttttccaagaaggggataggctggaatggaagaaaagagtccaaagaggaaggaaccacaacagaaagagaattgctttcctttcagttgtgggagcaccagcttaatgcctcttttccacatttgcccagcagaggaaatgtttgggccgaatgacagaaaacctagggtagcctttttggtgcctcctgacaatcacagaagcaggctgggatcctacccaggtatggcagagcaagtgagcccacctaggtgggaatccttaccctcctaatcctgcaggttcacttcacaatcttgtgtagaccttaaacsgttgtttagacagttatatg

SEQ ID NO: 176143 - DNA, 543 bp, Homo sapiens
agatctacgagccaacaggtggtattttccatttagcggggtatgggtttactacaaaacaactcagggacatatgttaagatgttatctctagtttctatagggaaacaaacattttgtggctctaattttcttttttttagattacactttaagttttagggtacatgtgcacaacgtgcagttctgttacgtatgtatacatgtaccatgttggtgtgctgcacccattaactcgtcatttaagattagtttgtggctctaattttcttgactgttgttttaagctattattaccttcttactcatcagggtgctcatctacttcttgaggctagccaggtggctggaattttccttggaggkactcaagagattcctttatttttcgtgccttaaatgggtgtgttctccctcttcagagctcgagctcttaaggaatatgctagtgttagatttttcatattggagcagaccttccctcatactcaagaacaccccttcttcagacagcctggctgggtcttcatcctgggagagctc

SEQ ID NO: 176144 - DNA, 543 bp, Homo sapiens
agatctacgagccaacaggtggtattttccatttagcggggtatgggtttactacaaaacaactcagggacatatgttaagatgttatctctagtttctatagggaaacaaacattttgtggctctaattttcttttttttagattacactttaagttttagggtacatgtgcacaacgtgcagttctgttacgtatgtatacatgtaccatgttggtgtgctgcacccattaactcgtcatttaagattagtttgtggctctaattttcttgactgttgttttaagctattattaccttcttactcatcagggtgctcatctacttcttgaggctagccaggtggctggaattttccttggaggtactcaagagwttcctttatttttcgtgccttaaatgggtgtgttctccctcttcagagctcgagctcttaaggaatatgctagtgttagatttttcatattggagcagaccttccctcatactcaagaacaccccttcttcagacagcctggctgggtcttcatcctgggagagctc

SEQ ID NO: 176145 - DNA, 543 bp, Homo sapiens
agatctacgagccaacaggtggtattttccatttagcggggtatgggtttactacaaaacaactcagggacatatgttaagatgttatctctagtttctatagggaaacaaacattttgtggctctaattttcttttttttagattacactttaagttttagggtacatgtgcacaacgtgcagttctgttacgtatgtatacatgtaccatgttggtgtgctgcacccattaactcgtcatttaagattagtttgtggctctaattttcttgactgttgttttaagctattattaccttcttactcatcagggtgctcatctacttcttgaggctagccaggtggctggaattttccttggaggtactcaagagattcctttatttttcgtgccttaaatgggtgtgttctccctcttcagagctcgagctcttaaggaatatgctagtgttagatttttcrtattggagcagaccttccctcatactcaagaacaccccttcttcagacagcctggctgggtcttcatcctgggagagctc

SEQ ID NO: 176146 - DNA, 535 bp, Homo sapiens
tctgagatctacgagccaacaggtggtattttccatttagcggggtatgggtttactacaaaacaactcagggacatatgttaagatgttatctctagtttctatagggaaacaaacattttgtggctctaattttcttttttttagattacactttaagttttagggtacatgtgcacaacgtgcagttctgttacgtatgtatacatgtaccatgttggtgtgctgcacccattaactcgtcatttaagattagtttgtggctctaattttcttgactgttgttttaagctattattaccttcttactcatcagggtgctcatctacttcttgaggctagccaggtggctggaattttccttggaggtactcaagagattcctttatttttcgtgccttaaatgggtgtgttctccctcttcagagctcgagctcttaaggaatatgctagtgttagatttttcatattggagcagaccttccctcmtactcaagaacaccccttcttcagacagcctggctgggtcttcatc

SEQ ID NO: 176147 - DNA, 487 bp, Homo sapiens
catttgagatgcacttatttagatgatgagtttctggaatggcctcttcagggaggagggcaagataagataaccctttgggatgcaggaaaaatattagaacttaatgtttacttttattttcatatttttaatttttattttggattgtgttctatagtgtataaaatctattactacactgtaagagagtatgtataatttctaaacatacatttattgtggagtacatgcttaaagtttaccactgagctgctcaactccaaacttttagagacccattgtctgggaaataggtgagcaatattatagttgttaatatgaaaagtatagtgtttaagaaacatctgatgtttcttaatgactgatcataatggctgatgttttcccattaaaagattattttgcagtgaaggattttatatgtatatatatacagagagagagagagagagtgcartttaagaacatggacacttgtaagcag

SEQ ID NO: 176148 - DNA, 555 bp, Homo sapiens
agatctcaggtcttcagaggacattccttcctcagagaagtctttagtcgttcagttaaaaaaaaaaaaaagtagtcactgtcatcaacttgtttcattttaatcataagctttattactgcttcaccagttsactgtttattcatttgcctccccactcccattggaaagagacacaaacaaatgtaaactccatgactgtaggaacctagtgccagcatataaaatgtcctcaataaatattgccagctgagctagtcgtgaaacatacataattaatcccataacaggcatgctaggtagagttttccagaaatatggaacagcctattcgaaagcacaggagcacacatgacttgttcagaggaccacagttacttttgaagagatgagattggactcgatattgaagttcattatatatcatactgaggactttaatgctgaaggcagtggggaatcattgaaaacatttaagtagggcaatgacatggtcgagtcactgtcagaagtgtgaagtatggattgaacattggaaatgccagaagcacagaa

SEQ ID NO: 176149 - DNA, 555 bp, Homo sapiens
gtctttagtcgttcagttaaaaaaaaaaaaaagtagtcactgtcatcaacttgtttcattttaatcataagctttattactgcttcaccagttcactgtttattcatttgcctcccyactcccattggaaagagacacaaacaaatgtaaactccatgactgtaggaacctagtgccagcatataaaatgtcctcaataaatattgccagctgagctagtcgtgaaacatacataattaatcccataacaggcatgctaggtagagttttccagaaatatggaacagcctattcgaaagcacaggagcacacatgacttgttcagaggaccacagttacttttgaagagatgagattggactcgatattgaagttcattatatatcatactgaggactttaatgctgaaggcagtggggaatcattgaaaacatttaagtagggcaatgacatggtcgagtcactgtcagaagtgtgaagtatggattgaacattggaaatgccagaagcacagaaggcaatctaaaagctgctgtcatgtccagtagtcaatta

SEQ ID NO: 176150 - DNA, 575 bp, Homo sapiens
tcaggtcttcagaggacattccttcctcagagaagtctttagtcgttcagttaaaaaaaaaaaaaagtagtcactgtcatcaacttgtttcattttaatcataagctttattactgcttcaccagttcactgtttattcatttgcctccccactcccattggaaagagacacaaacaaatgtaaactccatgactgtaggaacctagtgccagcatataaaatgtcctcaataaatattgccagctgagctagtcgtgaaacatacrtaattaatcccataacaggcatgctaggtagagttttccagaaatatggaacagcctattcgaaagcacaggagcacacatgacttgttcagaggaccacagttacttttgaagagatgagattggactcgatattgaagttcattatatatcatactgaggactttaatgctgaaggcagtggggaatcattgaaaacatttaagtagggcaatgacatggtcgagtcactgtcagaagtgtgaagtatggattgaacattggaaatgccagaagcacagaaggcaatctaaaagctgctgtcatgt

SEQ ID NO: 176151 - DNA, 571 bp, Homo sapiens
gagaagtctttagtcgttcagttaaaaaaaaaaaaaagtagtcactgtcatcaacttgtttcattttaatcataagctttattactgcttcaccagttcactgtttattcatttgcctccccactcccattggaaagagacacaaacaaatgtaaactccatgactgtaggaacctagtgccagcatataaaatgtcctcaataaatattgccagctgagctagtcgtgaaacatacataattaatcccataacaggcatgctaggtagagttttccagaaatatggaacagcctattcgaaagcacaggagcacacatgacttgttcagaggaccacagttacttttgaagagatgagattggactcgatattgaagttcattatatatcatactgaggactttaatgcygaaggcagtggggaatcattgaaaacatttaagtagggcaatgacatggtcgagtcactgtcagaagtgtgaagtatggattgaacattggaaatgccagaagcacagaaggcaatctaaaagctgctgtcatgtccagtagtcaattagttaatgacta

SEQ ID NO: 176152 - DNA, 555 bp, Homo sapiens
agatctcaggtcttcagaggacattccttcctcagagaagtctttagtcgttcagttaaaaaaaaaaaaaagtagtcactgtcatcaacttgtttcattttaatcataagctttattactgcttcaccagttcactgtttattcatttgcctccccactcccattggaaagagacacaaacaaatgtaaactccatgactgtaggaacctagtgccagcatataaaatgtcctcaataaatattgccagctgagctagtcgtgaaacatacataattaatcccataacaggcatgctaggtagagttttccagaaatatggaacagcctattcgaaagcacaggagcacacatgacttgttcagaggaccacagttacttttgaagagatgagattggactcgatattgaagttcattatatatcatactgaggactttaatgctgaaggcagtggggaatcattgaaaacatttaagtagggcaatgacatggtcgagtcactgtcagaagtgtgaagtawggattgaacattggaaatgccagaagcacagaa

SEQ ID NO: 176153 - DNA, 562 bp, Homo sapiens
gagaagtctttagtcgttcagttaaaaaaaaaaaaaagtagtcactgtcatcaacttgtttcattttaatcataagctttattactgcttcaccagttcactgtttattcatttgcctccccactcccattggaaagagacacaaacaaatgtaaactccatgactgtaggaacctagtgccagcatataaaatgtcctcaataaatattgccagctgagctagtcgtgaaacatacataattaatcccataacaggcatgctaggtagagttttccagaaatatggaacagcctattcgaaagcacaggagcacacatgacttgttcagaggaccacagttacttttgaagagatgagattggactcgatattgaagttcattatatatcatactgaggactttaatgctgaaggcagtggggaatcattgaaaacatttaagtagggcaatgacatggtcgagtcactgtcagaagtgtgaagtatggattgaacaytggaaatgccagaagcacagaaggcaatctaaaagctgctgtcatgtccagtagtcaattagt

SEQ ID NO: 176154 - DNA, 491 bp, Homo sapiens
atcttccaatatacccaaatgtacaattattttttccagtatacaacccttcagtgaaaaaaaagtgttatgactgagataatttacataggaaaattataaactttatgacttaaagtacatttctcatgttatctcaccgttttttcttaaataatgcatacttatttctacagaattgttgaaattgagtcaatggttctgacacttgggaaaacataaagactaggactagtgtcagagaactgaacccttagcttctgttttgttccttcagcrctattttcttatccatattttgtaataaaatggaattaaatgtgaaaatatctattaggttttcaaatcaacaatatatgttgtatatacgttaagaattgctcattttaatacatattttactatatcacatgtggagattgctgttgtccatgttttttctaattaatttatactgttttccagaaatattagaaacttcattgtacaga

SEQ ID NO: 176155 - DNA, 491 bp, Homo sapiens
atcttccaatatacccaaatgtacaattattttttccagtatacaacccttcagtgaaaaaaaagtgttatgactgagataatttacataggaaaattataaactttatgacttaaagtacatttctcatgttatctcaccgttttttcttaaataatgcatacttatttctacagaattgttgaaattgagtcaatggttctgacacttgggaaaacataaagactaggactagtgtcagagaactgaacccttagcttctgttttgttccttcagcgctattttcttatccatattttgtaataaaatggaattaaatgtgaaaatatctattaggttttcaaatcaacaatatatgttgtatatacgttaagaattgctcattttaatacatattttactatatcacatgtggagattgctgttgtccatgttttttctaattaatttatactgttttccasaaatattagaaacttcattgtacaga

SEQ ID NO: 176156 - DNA, 499 bp, Homo sapiens
ttcaataactgtcaatttatactgtttttttttatcctatcaagctcaagaatcttgaatgtctcattattattattcaaaattstaagtttcacagcttaaccttttgagactttgtgtgttctggcccttttcttacgtgcgtatctatgtgtcccattatagtatttaccaccatttacaagtttcttgaccaccatgagtttttcatccttctgtaccctgcgtcttcctccccttccttcctgcttcaaggtcccaccaacctcttcataaagcttccttcacttgaccgcaccacatagggctgtgccacatacggctgtgccacatacgtgcattttctcttcccttcccccatgacatatacacgtttcttccctggtaactaaagtaatcttcatttcctggatagtccctttgctttgaaacatctgtgccattttgtctccttcatctctccttggatttgcttgccacatctctgcctgaaaggatt

SEQ ID NO: 176157 - DNA, 499 bp, Homo sapiens
ttcaataactgtcaatttatactgtttttttttatcctatcaagctcaagaatcttgaatgtctcattattattattcaaaattctaagtttcacagcttaaccttttgagactttgtgtgttctggcccttttcttacgtgcgtatctatgtgtcccattatagtatttaccaccatttacaagtttcttgaccaccatgagyttttcatccttctgtaccctgcgtcttcctccccttccttcctgcttcaaggtcccaccaacctcttcataaagcttccttcacttgaccgcaccacatagggctgtgccacatacggctgtgccacatacgtgcattttctcttcccttcccccatgacatatacacgtttcttccctggtaactaaagtaatcttcatttcctggatagtccctttgctttgaaacatctgtgccattttgtctccttcatctctccttggatttgcttgccacatctctgcctgaaaggatt

SEQ ID NO: 176158 - DNA, 569 bp, Homo sapiens
tttagaagcgaggttcctgaataaagatgaatttttaaaagctgsaatgaatgagcagcaatagcagaagcagaaaagtgagtgagggctctccaagaagccatctggcaggctcaagggttgtgagagaagctttggtttcagaagcaactcacgaattacttctgtcatattaggatgggatggtagtagattgggaactctatggactagaagtcatttaatttcctgtctacaatccttagaagaggttttgagacttgcaacctaggaccttaactaatcatcttccctcagcattgatagaattctttattatacatgttaatatcagattagtcaggatgggctagattatgctgtgttaacagccattctctaaatctctgtggctcaacagggagctctgcctgtcatggtcacttgggacccaggctttgggtataaggctacagcacatggaaaacgtatgactgtctctcagattcttaaagtttctgctggaagtgacatgtcattctgctcacagttcattggctaaatgagtcacgtggctgtctctaacttca

SEQ ID NO: 176159 - DNA, 539 bp, Homo sapiens
aatttttaaaagctgcaatgaatgagcagcaatagcagaagcagaaaagtgagtgagggctctccaagaagccatctggcaggctcaagggttgtgagagaagctttggtttcagaagcaactcacgaattacttctgtcatattaggatgggatggtagtagattgggaactctatggactagaagtcatttaatttcctgtctacaatccttrgaagaggttttgagacttgcaacctaggaccttaactaatcatcttccctcagcattgatagaattctttattatacatgttaatatcagattagtcaggatgggctagattatgctgtgttaacagccattctctaaatctctgtggctcaacagggagctctgcctgtcatggtcacttgggacccaggctttgggtataaggctacagcacatggaaaacgtatgactgtctctcagattcttaaagtttctgctggaagtgacatgtcattctgctcacagttcattggctaaatgagtcacgtggctgtctctaacttc

SEQ ID NO: 176160 - DNA, 530 bp, Homo sapiens
agctgcaatgaatgagcagcaatagcagaagcagaaaagtgagtgagggctctccaagaagccatctggcaggctcaagggttgtgagagaagctttggtttcagaagcaactcacgaattacttctgtcatattaggatgggatggtagtagattgggaactctatggactagaagtcatttaatttcctgtctacaatccttagaagaggttttgagacttgcaacctaggaccttaactaatcatcttccctcagmattgatagaattctttattatacatgttaatatcagattagtcaggatgggctagattatgctgtgttaacagccattctctaaatctctgtggctcaacagggagctctgcctgtcatggtcacttgggacccaggctttgggtataaggctacagcacatggaaaacgtatgactgtctctcagattcttaaagtttctgctggaagtgacatgtcattctgctcacagttcattggctaaatgagtcacgtggctgtctctaacttca

SEQ ID NO: 176161 - DNA, 540 bp, Homo sapiens
aatttttaaaagctgcaatgaatgagcagcaatagcagaagcagaaaagtgagtgagggctctccaagaagccatctggcaggctcaagggttgtgagagaagctttggtttcagaagcaactcacgaattacttctgtcatattaggatgggatggtagtagattgggaactctatggactagaagtcatttaatttcctgtctacaatccttagaagaggttttgagacttgcaacctaggaccttaactaatcatcttccctcagcattgatagaattctttattatacatgttaatatcagattagtcaggatgggctrgattatgctgtgttaacagccattctctaaatctctgtggctcaacagggagctctgcctgtcatggtcacttgggacccaggctttgggtataaggctacagcacatggaaaacgtatgactgtctctcagattcttaaagtttctgctggaagtgacatgtcattctgctcacagttcattggctaaatgagtcacgtggctgtctctaacttca

SEQ ID NO: 176162 - DNA, 539 bp, Homo sapiens
aatttttaaaagctgcaatgaatgagcagcaatagcagaagcagaaaagtgagtgagggctctccaagaagccatctggcaggctcaagggttgtgagagaagctttggtttcagaagcaactcacgaattacttctgtcatattaggatgggatggtagtagattgggaactctatggactagaagtcatttaatttcctgtctacaatccttagaagaggttttgagacttgcaacctaggaccttaactaatcatcttccctcagcattgatagaattctttattatacatgttaatatcagattagtcaggatgggctagattatgctgtgttaacagccattctctaaatctctgtggctcaacwgggagctctgcctgtcatggtcacttgggacccaggctttgggtataaggctacagcacatggaaaacgtatgactgtctctcagattcttaaagtttctgctggaagtgacatgtcattctgctcacagttcattggctaaatgagtcacgtggctgtctctaacttc

SEQ ID NO: 176163 - DNA, 540 bp, Homo sapiens
aatttttaaaagctgcaatgaatgagcagcaatagcagaagcagaaaagtgagtgagggctctccaagaagccatctggcaggctcaagggttgtgagagaagctttggtttcagaagcaactcacgaattacttctgtcatattaggatgggatggtagtagattgggaactctatggactagaagtcatttaatttcctgtctacaatccttagaagaggttttgagacttgcaacctaggaccttaactaatcatcttccctcagcattgatagaattctttattatacatgttaatatcagattagtcaggatgggctagattatgctgtgttaacagccattctctaaatctctgtggctcaacakggagctctgcctgtcatggtcacttgggacccaggctttgggtataaggctacagcacatggaaaacgtatgactgtctctcagattcttaaagtttctgctggaagtgacatgtcattctgctcacagttcattggctaaatgagtcacgtggctgtctctaacttca

SEQ ID NO: 176164 - DNA, 530 bp, Homo sapiens
agctgcaatgaatgagcagcaatagcagaagcagaaaagtgagtgagggctctccaagaagccatctggcaggctcaagggttgtgagagaagctttggtttcagaagcaactcacgaattacttctgtcatattaggatgggatggtagtagattgggaactctatggactagaagtcatttaatttcctgtctacaatccttagaagaggttttgagacttgcaacctaggaccttaactaatcatcttccctcagcattgatagaattctttattatacatgttaatatcagattagtcaggatgggctagattatgctgtgttaacagccattctctaaatctctgtggctcaacagggagctctgcctgtcatggtcacttgggacccaggctttgggtataaggctacagcacatggaaaacgtatgamtgtctctcagattcttaaagtttctgctggaagtgacatgtcattctgctcacagttcattggctaaatgagtcacgtggctgtctctaacttca

SEQ ID NO: 176165 - DNA, 389 bp, Homo sapiens
tggactagaagtcatttaatttcctgtctacaatccttagaagaggttttgagacttgcaacctaggaccttaactaatcatcttccctcagcattgatagaattctttattatacatgttaatatcagattagtcaggatgggctagattatgctgtgttaacagccattctctaaatctctgtggctcaacagggagctctgcctgtcatggtcacttgggacccaggctttgggtataaggctacagcacatggaaaacgtatgactgtctctcagattcttaaagyttctgctggaagtgacatgtcattctgctcacagttcattggctaaatgagtcacgtggctgtctctaacttcaaggatggtatgaaattccaatccta

SEQ ID NO: 176166 - DNA, 632 bp, Homo sapiens
agattcagtgacttcatcaggcactgcccgtagtaccacagtaagcactgctgccaccacccctggctctgccatagacactagagaagaggtaggagatcttcatggagaaatgcataaggttctttcttttctttatttcttttgcttttagctttttgcttagtttattttagttatgtccaccctccctgtttgcatgaagctctgcattttccaactttgctttaacagtttatgtttttgtaacaaaactagtgaaggctaacatttggtctactattaacacgaagctggaaaattctttagaaacagcattttgcctgataattcttggtccrtagcttcacttgaaacatgaatataaatggtattttgaaaagcaacccaaaatttgataaatgatggtataaagtttctataaagtttgactatgaaaatgctccaattaaaagtatttttatcgctagttaactagaagatactctgataacaaagagaaaaatcctacagtttcactgctttaataattctgttgataaatacaaacacatacacataaagatattttgaaaaattgaaatatatatgtaatatacacacatacaaatacatattcagaacatttttat

SEQ ID NO: 176167 - DNA, 488 bp, Homo sapiens
ttgtttctttaaattatggttgaaatatttacatgtcggtcacttgaccctgataattatctagtctgtcagtttacctttgaaacagtctcttttgagttcgggccttattatatcttaactgggccattctagtagccttgtaggtttctacttccagtctctatktgctcttagacattctccttaatgcaaacacatttctttctcaaatgccgaagtgatcatgccccccacttgctgataacctttgataaaatcctagttgactaaaaacaaacaccatatttcttttcagtaattcatagtctaaaaccgtccccaggttggtccttacctacagttcattctgctgtaataatcttactcattttagtctttgttccagccacagttttaagctccatttccttatcacaccactcatctttgtacctctgtgactgtttttagagctgaatctgccttaatgcccttgctccatccct

SEQ ID NO: 176168 - DNA, 582 bp, Homo sapiens
accagaacgctaacggattcatagacattgttctgtggagagtgggaaacactaaattttatttattgactttcagtgggaggaaaacataatcggggctgtttttaaaagttagctttggctgcaatgtggaggactggtaactaagagtagagcctgcaggcattaaatgaatgtttcagtattctctccaagagataatgaagtcccaaaatggaacagtgatagkacttggagaaatgaagaaagacacgagttgtacatattcaaatgcccaggatttggtgactgatgggggagtggcaaagagaggaatcagggatgattatcactagtgtcctagatcatgacaataaatataaaactgcttgaaatttaaagaagagaaactggttcttctcaacaggaacattttgatgataagtctgtgcccagattgaaatgcagcttagcttacataattgaaataatcacgtctgaagtattcaaacaattcaaaatcaaacgcaaaagcaattttcatgaattgagtgggcatatttatttttgagttgaatgaaaatgtttttgactagttgacac

SEQ ID NO: 176169 - DNA, 582 bp, Homo sapiens
accagaacgctaacggattcatagacattgttctgtggagagtgggaaacactaaattttatttattgactttcagtgggaggaaaacataatcggggctgtttttaaaagttagctttggctgcaatgtggaggactggtaactaagagtagagcctgcaggcattaaatgaatgtttcagtattctctccaagagataatgaagtcccaaaatggaacagtgatagtacttggagaaatgaagaaagacacgagttgyacatattcaaatgcccaggatttggtgactgatgggggagtggcaaagagaggaatcagggatgattatcactagtgtcctagatcatgacaataaatataaaactgcttgaaatttaaagaagagaaactggttcttctcaacaggaacattttgatgataagtctgtgcccagattgaaatgcagcttagcttacataattgaaataatcacgtctgaagtattcaaacaattcaaaatcaaacgcaaaagcaattttcatgaattgagtgggcatatttatttttgagttgaatgaaaatgtttttgactagttgacac

SEQ ID NO: 176170 - DNA, 489 bp, Homo sapiens
gctagaattctgaaattatgatgatgttaccaatttaagtggrtgttacataaattcacctcacatacaaccttagatgtattcgaggcatcatatatctagttattttaattttctctacttgccgtgccactgaggtaatcagacctatagatactacatataaatcatctttttaatccacaaagtgcttttgttatattaagtaaaatttttaagattatttgtatcaatgccaatattgaactatctctgggaaaaattaaattacgtagatttattttcaccttttaagtaattgtttttagaaatctttcaagagaagtatatacatcagcattaaatcaaatgttaaaatctgaagaacctctaaggcatgagctaattcaaaccctgtctccacaccccacctcagtgtatgcatacctgtatttctgtgaaaataggtcctggagaggtaatatgactttttttatgggcataaaatca

SEQ ID NO: 176171 - DNA, 489 bp, Homo sapiens
gctagaattctgaaattatgatgatgttaccaatttaagtggatgttacawaaattcacctcacatacaaccttagatgtattcgaggcatcatatatctagttattttaattttctctacttgccgtgccactgaggtaatcagacctatagatactacatataaatcatctttttaatccacaaagtgcttttgttatattaagtaaaatttttaagattatttgtatcaatgccaatattgaactatctctgggaaaaattaaattacgtagatttattttcaccttttaagtaattgtttttagaaatctttcaagagaagtatatacatcagcattaaatcaaatgttaaaatctgaagaacctctaaggcatgagctaattcaaaccctgtctccacaccccacctcagtgtatgcatacctgtatttctgtgaaaataggtcctggagaggtaatatgactttttttatgggcataaaatca

SEQ ID NO: 176172 - DNA, 489 bp, Homo sapiens
gctagaattctgaaattatgatgatgttaccaatttaagtggatgttacataaattcacctcacatacaaccttagatgtattcgaggcatcatatatctagttattttaattttctctacttgccgtgccactgaggtaatcagacctatagatactacatataaatcatctttttaatccacaaagtgcttttgttatattaagtaaaatttttaagattatttgtatcaatgccaatattgaactatctctgggaaaaattaaattacgtagatttattttcaccttttaagtaattgtttttagaaatctttcaagagaagtatatacatcagcattaaatcaaatgttaaaatctgaagaacctctaaggcatgagctaattcaaaccctgtctccacaccccacctcagtgtatgcatrcctgtatttctgtgaaaataggtcctggagaggtaatatgactttttttatgggcataaaatca

SEQ ID NO: 176173 - DNA, 519 bp, Homo sapiens
tgaatatagatgcaaaaatgctcaacaaaatagtagcaaaccaaatccaacagcgcatcaaaaaaataatccactatattcacatggatttcactttagggatgcagagatggtttaacaaattcaagggaataaatgtgattcatcagataaacagaatttttttaaataaatatatgatcatttctatagatgcagaaaaagcattcaataaaatccagcatractttatgataaaaaccctcaacaaactagacatagaagaaacatacctctaaataattaaagctgtatattccaaacccatagccaacatcatactgaatgagaaaaagttcaaagtatttcccctattaactgaaataagacaaggatgctgacttttatcccttctattcaacatagtacaggaaatcctagccagagcaatcagacaagagaaataaataaagggcattcgatttgtaaaacatggagtcaaattatctttgtttgccaatgatataatcttatatctag

SEQ ID NO: 176174 - DNA, 615 bp, Homo sapiens
caaatccaacaaaacaaaaataatgaataggactcaaactaaaaagcttcttcacagcaaaataaataatcattacagtaaacagacaacttaaaaactgaaatgtggacaaaacacatgaatagatatttctcaaaaaatatacaaatggtcaaaaacatatgaataaatgctcaacatcactaattgtcaaggaaatgcaaattaaaaccacaatgtataccaccttacccgagccagaataaccattattaaaaagtcaaaaaaaaaaaatccccaaaagatgctcgggtggacgtggtgaaagaggaacacttatatgctgctggtggaaatacacattagtacaacctctatggaaaagagtatggagatttctcaaagctaaaagtagatctaccatttgatccaggaatctcactactgggtatctacccaaaagaaaaggaatgaatatatcaaagagatgcctgtgtgcatatgtttattgcagcacaattcacaattgcaaagatatgcagtcaacytaaatgtccattaactgatgagtggataaagaaaatgtgatgtatgttatcatggaatactactcagccataaaaagaatggaataat

SEQ ID NO: 176175 - DNA, 566 bp, Homo sapiens
tcactgcacctggcccacaaatttattattttactgttctagagatcagaagtcttaaaatcaaggtgtcttaaggggtaagtcccttctgaaggctcttggagaaaatatttccttgtcattccctgtttctggaggccacctgcatgccttcactcagaggccctttcctgcatctttaaagccagccgtatagtttctwcaaatctgtttctctgactataccccctgcttctgtcaccacatcaactgtcttctctcttgcccctctgtctatgtcttataaggacccttttgattatattaggcctacctggacaatccagttcctctccccattttgaaatcttaatcacatctacaaagtcccttttaccatgtaaggtaacatatatacgggttcaggggattgggatgtgcacatctttgggatggtctaccataaaactcctttctactatttagcctactgtaatattaatttataaagcattaaaaaagagtttagaaacaaagaaagaagaaaaatgtatctcgttgcactactgaaagatagacaaaatgaa

SEQ ID NO: 176176 - DNA, 413 bp, Homo sapiens
cagctgttgtttagcatctttgagcattaactattctcactctcagaaaatggagtatttagagagcagtcactggaggaggccaaaggttttagcaagagaactgttttacattcaacagctattaaacaagtcrcacccttcttcctgcagtctttaagtatggtcactcagtggagctcatgggaataaatacacttggaggagatcaaatcccagtgttcctggtctatggggcatgagttccccagttactctttctccaagcactcagcaaggtgtggtgattctgagctctgaactggaggttaggatattgaagttcaaaattccagctctgccacttacctgccagttggctctgtcagggctgttgctcccttgtttacagaacaagggctgtccctagagtg

SEQ ID NO: 176177 - DNA, 442 bp, Homo sapiens
cggatacctcatacagacagaagagttctggctggcatatgatgggtgcccctctgggacgaagcttccagaggaaggaacaggcagtaatttttactattctgcagcctccactggtgatacccaggcaaacagggtctggagtggacctccagcaaactccagcagaactacagcagaagggcctgactgttagaaggaaaaccaacaaacagaaaggaatagcatcaacatcaacaaaaaggatgcccacacaaaaaccccatccaaaggtcaccagcatcaaagaccaaaggtagatgaatccacaaagatgaggaaaaaccagcacaaaaagkctcaaaattccaaaaaccagaatgcctcttctcctccaaagatcacaactcctcaccagcaagggaacaaaactggatggagaatgagtttgacgaactaacag

SEQ ID NO: 176178 - DNA, 493 bp, Homo sapiens
tcaactcaatactggacgtcagtgattatagctaggaaggtgcatctgttttaggatgccttcagatataagagtattagttatcttctgtaacataactaattacccccaaaactgaatggcttaaaacaatagacatttattttcacacattttctgcaagtcaggaatttaggagtggcttakcttggtggtgctggctcagattccctcgtggggttgcagccaagatgtcagctggggccacagttattagagagcttgtctggagttggagaacttgcttccaagatggcacattcacatacctggcaagttattgctggctgttggcagaagtcctcagttccttaccacatggacctcttcatagggctgtttgagtgccctcatgacacagcagctgacttcctccagagtcagtgatacaatagagaaagcaaggaggaagacacaatgcctttgtgtcctaatcccagaagtcactcactgt

SEQ ID NO: 176179 - DNA, 554 bp, Homo sapiens
tttccacttctcagagagaaacactttgaagaggtgccaacatatcttaatattatcttaagtgatctgggggtttgtgttaataatatcaccaaattgaccatgggacatatccaagatcattccattcccaaatcgtctgttgtcgtttggcttggcatttgttgaggccaaggtgaacaggttcaattcccaggtgaggcaggcagcctcactctggccacagatgtttctgtaacccgggccackgggccatccacagtgtgtgcctctgatggtggtgggattgtgggagagggagggtgtgggtggttcaccgactctttcaccttagccactgggggcagcacaaaagcccgtgctttatgaagaggggtcagtcaatgtcgttttgatttacagggtatgtcatttgactatacatttttagtctgcatgttcctcccttgggcatttttcccacaaaaagaatgaaatcagcaaatggtggcaaactggatttagagttgtggctttcaagaggtttacttgtcactccaaagagctgattttac

SEQ ID NO: 176180 - DNA, 593 bp, Homo sapiens
cctggttggtcatccattctctgccctgacatgttgtgtgcagaaacccatgtgacagcatgagtgtgttgtgtggatatgtgcttcccaggacaggattatgtacaggggagttgtacagacatggagtgtacagatacattgtagagacaaatgttaaagagacatacagtgtacagaaattggattgtagagatatgaacttcacatacaggagttacaaaagcatggtatgcagattggattattgagatgcaggttgtctagacactggccctgaaggcataggttgtgtagacacagcctgggaccaagctctttggtcctggccttaaarcagggtgtgcagcatgagcccagtgatggttgcctggctatgtgccagaagtgggactctgatgtctgtgcagagggtgagggcaggacggtatattctgccactctactttgagcactggctttgaagctttccctccaatgccattcccacccccaagggactcaggaaatgacttctgtcttttctttgatagaacaaagaaagagagagttctaatagatgagagagagagaaagagagagagagagagaga

SEQ ID NO: 176181 - DNA, 614 bp, Homo sapiens
atttgtgtactgactcagaaataaggaggcaaagactaaaatgatatctttatgaatcatgcttgaggcatatgtttttgaccattagtaagaaacgatggcctgaggttccttctagctttctcatgcagtagccattggtgagacacaaattcttcattagcatctctcaacaagggctgaggagcctctctgctgccattctaagacttcccagaatggccaaattaggccaagtctgaaccataaaattgtggaaactggacttgctgacctcccrtctccccacctggatgttctcagcctcaatatgcagtttaattctagaacgcaggctatacaattaatcccatcctaatcagggtcgggcaatgaggagaaattctgtttactctggtcgcaaattcagttgatttgacatcaaatctgattgttggaccccttctgagtgtcccctgggaagaactcagatctattgtgagctacttgaggatggagatctttgcatcccttgggcctaacccagaggcctgcatatataaatgctcaattaataataataaattaccacttgttgagtgccaattatgtgccagacactgtgctatcccgtt

SEQ ID NO: 176182 - DNA, 614 bp, Homo sapiens
atttgtgtactgactcagaaataaggaggcaaagactaaaatgatatctttatgaatcatgcttgaggcatatgtttttgaccattagtaagaaacgatggcctgaggttccttctagctttctcatgcagtagccattggtgagacacaaattcttcattagcatctctcaacaagggctgaggagcctctctgctgccattctaagacttcccagaatggccaaattaggccaagtctgaaccataaaattgtggaaactggacttgctgacctcccgtctccccacctggatgttctcagcctcaatatgcagtttaattctagaaygcaggctatacaattaatcccatcctaatcagggtcgggcaatgaggagaaattctgtttactctggtcgcaaattcagttgatttgacatcaaatctgattgttggaccccttctgagtgtcccctgggaagaactcagatctattgtgagctacttgaggatggagatctttgcatcccttgggcctaacccagaggcctgcatatataaatgctcaattaataataataaattaccacttgttgagtgccaattatgtgccagacactgtgctatcccgtt

SEQ ID NO: 176183 - DNA, 589 bp, Homo sapiens
taaatctgagaacagaccaactttgctgggatatagattacagcaggtagaaactgattttgtcaccctctggcaatttaagcccctgatctttccctcaattcctgccccatatcagggagctagtcatgccattgggcttttcatgccagtatttctcaaactaagsccactggacattttctctgagttcatgagattctgatattgtttttttaatttgttttcatattgatgaaaatataaaaataatcaatattcatatcttgtgggtcaactgaatgaccaactcaaaccacagaatttctatgtccacatgtagatttgtgtttatgacagcataagggtcaaatagaactgctttaattctctcagactagtgaaaaatgagtgtgatggacttcaacacaaacaatgtgatcattgacaagtgaggaacaaatgacctcacagcatcctgtagaaacaaaagtgtcatgatatttaggatagaggaagatggaagacacactgagtcatcatgcggcatgcagcacattcagcagagtcgtggccaactcacacaaacctgtgccatagccccaggacc

SEQ ID NO: 176184 - DNA, 486 bp, Homo sapiens
atgaattcatcctcccagagctggaggaagttatcatrtttttgaggcagcttctaaatcattccaaatcaccagaaaagcaattatgtcccaccacttctgcaaaggtcttgcttcttcctttcttccttccttccctttccaccattctcttaactgtgaatcacctccatgaggtcaatctgtctggtgtgatcttcactttatctctggtacagagagcctggtacagaactgacattcagtagattttgtcccggtatgaacatgccaggcactgtgctgatattgtgataaaaggtgaatcagacacagatcctgcccttgaggaggacagagacaaggaaacaaacaattaaaatgcagcaaggtaagggcaatgtgagaggcgaacgcagcgcagtaagggagctgagaggagtggaatcagactctcctgcagtcagcaattatttcttggaagaggagacaaccaagctgagtctt

SEQ ID NO: 176185 - DNA, 484 bp, Homo sapiens
gaattcatcctcccagagctggaggaagttatcatatttttgaggcagcttctaaatcattccaaatcaccagaaaagcaattatgtcccaccacttctgcaaaggtcttgcttcttcctttcttccttccttccctttccaccattctcttaactgtgaatcacctccatgaggtcaatctgtctggtgtgatcttcactttatctctggtacagagagcctggtacagaactgacattcagtagattttgtcccggtatgaacatgccaggcactgtgctgatattgtgataaaaggtgaatcagacacagatcctgcccttgaggaggacagagacaaggaaacaaacaattaaaatgcagcaaggtaagggcaatgtgagaggcgaacgcagygcagtaagggagctgagaggagtggaatcagactctcctgcagtcagcaattatttcttggaagaggagacaaccaagctgagtctt

SEQ ID NO: 176186 - DNA, 222 bp, Homo sapiens
tcctgcccttgaggaggacagagacaaggaaacaaacaattaaaatgcagcaaggtaagggcaatgtgagaggcgaacgcagcgcagtaagggagctgagaggagtggaatcagactctcctgcagtcagcaattatttcttggaagaggagacaaccaagctgagtcttaaaggttgcaggagttttctaggtagaaacayggggaagggagagagaattc

SEQ ID NO: 176187 - DNA, 605 bp, Homo sapiens
aagaaaaactagagtaagtagaaggcataaaataagaaggtagaaacaaatacaaatatatcaataaatgaaataattacaaatgaaacaaactcaccacttaaaaaacagaagatcttggccgggcgyggtggctcatgcctgtaatcccagcactttgggaggccaaggcgggtggatcacctgatgtcaggagtttgagaacagcctggccaacatggtgaaaccctgtctctactcaaaatacaaaaattagccaggtgtggtggtgcacacctgtaatcccagctactcaggaggctgaggcagggagaattgcttgaacccacgaagcggaggttgcagtgggccgagactgcgccactgcactccagcctgggcgacagagtgagactttatctcaaaaacaaacaaacaaacaaaaaacccagaagctctcaaactggctacaaaacaaaatgctatttaggggagttatttcaaaaacataggaactgagaatgatgaaaataaagaaaataaaaaataaaaatggaaaattaaaaaaagaaaatatataaatgaaaataccgatcataagaaaactagtatagatatgttagtaa

SEQ ID NO: 176188 - DNA, 617 bp, Homo sapiens
cccaaagtgtattttattttttgtttttattttaattttatttttttgagatcgagtctcgctctattgcccaggctggagtgcggtggcacgatctcggctcactgcaacttccgcctcccaggttcaagccattctcctgcctcagcctcccaagtagctggtactacagatgtgcaccaccacacccagctaatttttgtattttgagtggagacagggtttcaccatgttggcatgttgtccaggctggtcttgaactcctgacctcaagtgatccasccacctcagcctcccaaagtgctgggattacaggtgtgagccaccgcacctggcccaaaatgtgttttaaataaagttctgtggtgtagctgtactccacattaaccaacagcatttttgttgtttagacttcttactaccggtcaaggtatacagctgaagagcgggcccttgtctgtttccaattttgttttgctgtgggcattagaggtctttctaggcttcacttaagcttgtttgtgtgcatactttggaagagctgaaagtgctgcaaccctagaggtactgttgactggagccaatcagaatgaccgaaacaacaaaggattagcaga

SEQ ID NO: 176189 - DNA, 617 bp, Homo sapiens
cccaaagtgtattttattttttgtttttattttaattttatttttttgagatcgagtctcgctctattgcccaggctggagtgcggtggcacgatctcggctcactgcaacttccgcctcccaggttcaagccattctcctgcctcagcctcccaagtagctggtactacagatgtgcaccaccacacccagctaatttttgtattttgagtggagacagggtttcaccatgttggcatgttgtccaggctggtcttgaactcctgacctcaagtgatccagccacctcagcctcccaaagtgctgggattacaggtgtgagccacygcacctggcccaaaatgtgttttaaataaagttctgtggtgtagctgtactccacattaaccaacagcatttttgttgtttagacttcttactaccggtcaaggtatacagctgaagagcgggcccttgtctgtttccaattttgttttgctgtgggcattagaggtctttctaggcttcacttaagcttgtttgtgtgcatactttggaagagctgaaagtgctgcaaccctagaggtactgttgactggagccaatcagaatgaccgaaacaacaaaggattagcaga

SEQ ID NO: 176190 - DNA, 617 bp, Homo sapiens
cccaaagtgtattttattttttgtttttattttaattttatttttttgagatcgagtctcgctctattgcccaggctggagtgcggtggcacgatctcggctcactgcaacttccgcctcccaggttcaagccattctcctgcctcagcctcccaagtagctggtactacagatgtgcaccaccacacccagctaatttttgtattttgagtggagacagggtttcaccatgttggcatgttgtccaggctggtcttgaactcctgacctcaagtgatccagccacctcagcctcccaaagtgctgggattacaggtgtgagccaccgcacctggcccaaaatgtgttttaaataaagttctgtggtgtagctgtactccacattaaccaacagcatttttgttgtttagacttcttactaccggtcaaggtatacagctgaagagcgggccctygtctgtttccaattttgttttgctgtgggcattagaggtctttctaggcttcacttaagcttgtttgtgtgcatactttggaagagctgaaagtgctgcaaccctagaggtactgttgactggagccaatcagaatgaccgaaacaacaaaggattagcaga

SEQ ID NO: 176191 - DNA, 617 bp, Homo sapiens
cccaaagtgtattttattttttgtttttattttaattttatttttttgagatcgagtctcgctctattgcccaggctggagtgcggtggcacgatctcggctcactgcaacttccgcctcccaggttcaagccattctcctgcctcagcctcccaagtagctggtactacagatgtgcaccaccacacccagctaatttttgtattttgagtggagacagggtttcaccatgttggcatgttgtccaggctggtcttgaactcctgacctcaagtgatccagccacctcagcctcccaaagtgctgggattacaggtgtgagccaccgcacctggcccaaaatgtgttttaaataaagttctgtggtgtagctgtactccacattaaccaacagcatttttgttgtttagacttcttactaccggtcaaggtatacagctgaagagcgggcccttgtctgtttccarttttgttttgctgtgggcattagaggtctttctaggcttcacttaagcttgtttgtgtgcatactttggaagagctgaaagtgctgcaaccctagaggtactgttgactggagccaatcagaatgaccgaaacaacaaaggattagcaga

SEQ ID NO: 176192 - DNA, 558 bp, Homo sapiens
agatcttctttgttcagtctaccaatttaaatactaattttttctggaaatgcccttacagacacacccagaaatggtgctttaccagctatctgggcatcccttagccaagctgagttgacactaaaattaatcattacagcaccctaacatccaggcatgatgatgtcaaaagtcaaggaargagctgggacttatgtccctgctggacagtaatgaggccaactacctctccctcctgcagtgtcagtggagaccacactgggattctggaccttcacccccacccagcagtaataaggcatctttccactactcactggagtggtgtcagaggagacctagtggagaataaagactttcaccataccccagcagcaacagggtaaccccatagggtgtcaacagaggctaagtaggaaacctatacttctacttccacctagcagtaatgaggcaacagtgccttccccagaggggattgaatttaaacagaagatttgggtaatatttagagccttataattgtttaaagtccaagtttctattgaaaatatc

SEQ ID NO: 176193 - DNA, 617 bp, Homo sapiens
ctttgttcagtctaccaatttaaatactaattttttctggaaatgcccttacagacacacccagaaatggtgctttaccagctatctgggcatcccttagccaagctgagttgacactaaaattaatcattacagcaccctaacatccaggcatgatgatgtcaaaagtcaaggaaagagctgggacttatgtccctgctggacagtaatgaggccaactacctctccctcctgcagtgtcagtggagaccacactgggattctggaccttcacccccacccagcartaataaggcatctttccactactcactggagtggtgtcagaggagacctagtggagaataaagactttcaccataccccagcagcaacagggtaaccccatagggtgtcaacagaggctaagtaggaaacctatacttctacttccacctagcagtaatgaggcaacagtgccttccccagaggggattgaatttaaacagaagatttgggtaatatttagagccttataattgtttaaagtccaagtttctattgaaaatatcttgtcatatgaagaaccagaaaatctcaaacttaatgaaaaaaatacaatctaaagatgccaaccc

SEQ ID NO: 176194 - DNA, 617 bp, Homo sapiens
ctttgttcagtctaccaatttaaatactaattttttctggaaatgcccttacagacacacccagaaatggtgctttaccagctatctgggcatcccttagccaagctgagttgacactaaaattaatcattacagcaccctaacatccaggcatgatgatgtcaaaagtcaaggaaagagctgggacttatgtccctgctggacagtaatgaggccaactacctctccctcctgcagtgtcagtggagaccacactgggattctggaccttcacccccacccagcagtaataaggcatctttccactactcactggagtggtgtcagaggagacctagtggagaataaagactttcaccataccccagcagcaacaggrtaaccccatagggtgtcaacagaggctaagtaggaaacctatacttctacttccacctagcagtaatgaggcaacagtgccttccccagaggggattgaatttaaacagaagatttgggtaatatttagagccttataattgtttaaagtccaagtttctattgaaaatatcttgtcatatgaagaaccagaaaatctcaaacttaatgaaaaaaatacaatctaaagatgccaaccc

SEQ ID NO: 176195 - DNA, 493 bp, Homo sapiens
aatgaaaaaagggacatgataagcaaaaatatagataagaacaatagagtatctttctcctcttgagttttctaaaatatgcctgagagttgaagcaaaaattataacactgtctaatgtggttccaaatatatgtagatgaaatatttaagacaattttattgtaaatgggaagaagtaaagaaacatgaagggaggtgaggtttmtacacattactcaaagtgataaataatggcaccagtagactgtgagatttacatatatataacgtagtacctacatttggcaaccaccaaaaaagtgaccaaagagatatactaaacaacactgtagatatatcaaaatgaaattctaaaaaacattcaagtagcctacaagaaggcagggaaaggaaaacagaaaaatgaaagatggcaaaaacaaacagaaaacaaaaaaccaaatagtagacttaattccaacatatcaataattccattaaaagtgaatgca

SEQ ID NO: 176196 - DNA, 493 bp, Homo sapiens
aatgaaaaaagggacatgataagcaaaaatatagataagaacaatagagtatctttctcctcttgagttttctaaaatatgcctgagagttgaagcaaaaattataacactgtctaatgtggttccaaatatatgtagatgaaatatttaagacaattttattgtaaatgggaagaagtaaagaaacatgaagggaggtgaggtttctacacattactcaaagtgataaataatggcaccrgtagactgtgagatttacatatatataacgtagtacctacatttggcaaccaccaaaaaagtgaccaaagagatatactaaacaacactgtagatatatcaaaatgaaattctaaaaaacattcaagtagcctacaagaaggcagggaaaggaaaacagaaaaatgaaagatggcaaaaacaaacagaaaacaaaaaaccaaatagtagacttaattccaacatatcaataattccattaaaagtgaatgca

SEQ ID NO: 176197 - DNA, 541 bp, Homo sapiens
catcatggctctaccaagggctgaggggaggtagcaggtgaggtctgcaggcagagattcctgaaagagcccaggagcaccagctgagatgacctggggagtcctcccttggaacagggttctgccagggactggttacacagagtgagctgcatccacctcccccaggctggagcagagtgggaaggtgttggggacaggagagtgggcaggaagttagcaagacccagggagggcttgtgtacgaagctgcccttcctgcctcccgctgacccagcccctcctctcagcccagggcagctaggttagaagcaataattccccaggaaggggaaggatgaaacaacacccaggaatccagtatcacagccagcattatctgagagaaggctggagaggagcacagtacagggaaggaggcatgcttctgagaggccaaggtggcatcaccaagatgaaaatggccgcctcttacrgagcagtttcccaaggcctggcactgggctaggaggtttccagaccttacttcaccctgaccgca

SEQ ID NO: 176198 - DNA, 604 bp, Homo sapiens
catctcactgatttagtactgaagcttgaggaggtcatgtggcttgaccattgtcacctggtaaaatgagaaggarccagcacatgaacccacatctgtctggctccaaatctcctgcttcttatttaactctttgctgcctctggtacaaatcagaatacctaattctcccttcccacaagagcccttcacagtttcaaaaacaaccgccagctcccctcctcttccctgcttccagaccaatgtttcgcagcccaaatagtcccagtcctgcatcagtcagcatgacatggcttcatatctttgcatctttcttctctgaatatgttccaatttgcccaaatccccttaaacatgtgaggcccagaagtggacatggattttcagatctggactgatgggctgaccaaagcaaagcctgcagggattatcttcccctttgatctggaatcgaagctgacggtagcacaatttaggatagattcattagctttgctgacagccacaacacatagctggctcataatgagtgttcactcagctaaagctccccagagctttgcaccctggcctctgctaagccagctttcctcgtcctacactt

SEQ ID NO: 176199 - DNA, 604 bp, Homo sapiens
catctcactgatttagtactgaagcttgaggaggtcatgtggcttgaccattgtcacctggtaaaatgagaaggagccagcacatgaacccacatctgtctggctccaaawctcctgcttcttatttaactctttgctgcctctggtacaaatcagaatacctaattctcccttcccacaagagcccttcacagtttcaaaaacaaccgccagctcccctcctcttccctgcttccagaccaatgtttcgcagcccaaatagtcccagtcctgcatcagtcagcatgacatggcttcatatctttgcatctttcttctctgaatatgttccaatttgcccaaatccccttaaacatgtgaggcccagaagtggacatggattttcagatctggactgatgggctgaccaaagcaaagcctgcagggattatcttcccctttgatctggaatcgaagctgacggtagcacaatttaggatagattcattagctttgctgacagccacaacacatagctggctcataatgagtgttcactcagctaaagctccccagagctttgcaccctggcctctgctaagccagctttcctcgtcctacactt

SEQ ID NO: 176200 - DNA, 451 bp, Homo sapiens
cagggctcaggcaagccaatttcccagtgggaccttcagttttatcccctattttataggcaagataatccctgacctgcctgtgtcccacagtaacagagctaatgcaaaaaakctctgtaaatggaaagatctcttttgcaacaacaaagccaggacctgatagaatttaatgctgaaaggagaaacttctctataaggtgacaactcacctcttgaaactgtttcccaaaatctcaccacccccaggctcctcatttctgccaacaccccagcaggagaaagaaattgtcctttaacaagctggataagtgaatctcatgctgccctaaactgtgtgtgctccagtgtctacacatttccttttcactctattgcaagttctttgcatgttctatagagttgttttagttatctactgctgtgtaacaaatcaccccaaaacttaatg

SEQ ID NO: 176201 - DNA, 628 bp, Homo sapiens
ctggagactttcctaagctgcttggtaattcttagatatctactcatgcttaggagccggggactaaaaatctgtagaggatgtttatacaccggaaacttttctgtagggttatccagctatgccatttgctagggaaaaccccaatgtcaattttcaaaaaatcttttctcttgaaccagccagatacctttcatagaccctaccactctgctgcctggaaggcaaaggcctggttgctgatgttctaggagcccggtgcaggtagcaagatgagagtctcaacacttcatatgtgtatgttcacttaatttaatgtggtatcttggccttcaactggttctgttgttcttcagtccasacaccctttattttgtgctctacagagaataaacctcctgtattcttgagaatggggcagggtagtcacctgcgggcatagaggcacggaaagaagctctaattgcttcttaaataattcttgaccaatctaacttgttttaccttctccatcctcggatccagaggcatcagtgccgctcatctccatgcctattatattgtgttaattctcagctttctccactgtcgggttaagattgaccgtctacagctctaccaagtcagt

SEQ ID NO: 176202 - DNA, 573 bp, Homo sapiens
aaaacatgaatatatgggaaaaactgaagaacactaaaaaggataaacctgtgggtaaatctaaatgaatactgattgtacaaaatagtaattttaatatcttatatggatatttaatatcttatgtggatatatatatatcttctatggtaaccactatgagcagattataaaaacatagaataagctaacattttaaaataaaatactattatatattctaacagttgggaaatctttcattatatttattcttaggtaccctttttgttgctattataaattatatatrtatattgttgctagtatatgaacatataattgtttcatgtagtaatttatgtctacccaactagttaaactctcttcttcataataacaatttttgtggaatttttggagcttctatattggcaattatattatctgtgcataatgagagttttttctctcttgtttttatttcctatttatttctcttgttttaccatgtttgctaggatcttgaagacaatggtgaatggaagcagggtctctggacatatgtcttatttctgatattcaagagaattc

SEQ ID NO: 176203 - DNA, 614 bp, Homo sapiens
ttggctgtgcctgcttttgtattctgaaagtgactagggatggatggggctgtagagaaagatgtgagggtaagctgacataatccatgcaatgtggatgcaactgtgcagctcccgcccactgtggaaacaagtagaggaggaagaaggagtgagacccagagaataagccccaccgtctagcagagtgctaacaaatcattggttatgcaaagggaggtccagagctggttttggaaggagaagcaaaggaaagaaaagtgtgaacaagtacaggttcatgaacgactgaagtctgaattggtggaaagaacagagggacaataatcagtataagaatatctgatattcaattctaaactgcttgtccatcagtgatgtaaaccktctggttctcctccaaacagtaaagacataaaccaaaggccttccttatgattgtggattgtggagtgggcatagataaaagcaatggatgacttccatatctaagagacaaagatatgaaataatgatggcccattcaggacagcaaaacaattcataaatctgggggtaagataatttcatctgaatcttgaaagaggaaacagctcattctaacatctgggtta

SEQ ID NO: 176204 - DNA, 498 bp, Homo sapiens
atgccacagtcataacatatccatcacaataaccctatcttctcccaattcagggtgtaggcatcatcagggaaacgtagccagcctgtggttgtagagttatttctttattcttctctttcttttgaagatgcagattttgttcaatgctttgtggcttgtggttcacctgctggtgatgcactcagaagcagtggggaggttaatcaatccctctgaaagcatgtagaacattgggatgctgtcttatgcagatcagaatgtctttccagagctgccaatgactaaacaaattcttaacagtgaacrtgcgggattactatccataaagaaaagattaaatctggtctaagaggcatttggcagtattaacaacaatgtaatagctaacattcattgagcacgtattttgtgccaagccctgttctcaggactttacatgtgtttcctcatgtaatcttcatgagcaagcaaggaaatatatcttgggaaaatgat

SEQ ID NO: 176205 - DNA, 581 bp, Homo sapiens
ctggggtgattgtgaagtggcaggagaaaggttaggtcaaatcacatggaaaactgcagcacctggtgtgggtgggtgtggctcctcacacccccagggaactggggtagctgtcagatatttgtggtgtgtgcatgtgctggtgttattatccttatgcagctcattccagcaagcagcagttttctgcattcaccacagtgtttcttgtttataagcaaatgctaaattggtgtcatgctcggattattccctaatatatcaatcatgctggaacaaattcatgtctttaaaacaagycttgtagcaaaactgactatgcctatctttcaaaagatggaggaaggacaggaaataagcaaaatgagcttggggcatcttggagtgccagtcggtaaagaagtgctcaaagcaacacaaaacaggaaaagaacagaaaaaaggaaaaggcccacaatgatgagggcctgtcacagagatataggagccaactgaaagagctcccaatggccaaagctggaacaatttgagcaataaaataaagtagtattggattaaaactcaaagtataaaataaatac

SEQ ID NO: 176206 - DNA, 581 bp, Homo sapiens
ctggggtgattgtgaagtggcaggagaaaggttaggtcaaatcacatggaaaactgcagcacctggtgtgggtgggtgtggctcctcacacccccagggaactggggtagctgtcagatatttgtggtgtgtgcatgtgctggtgttattatccttatgcagctcattccagcaagcagcagttttctgcattcaccacagtgtttcttgtttataagcaaatgctaaattggtgtcatgctcggattattccctaatatatcaatcatgctggaacaaattcatgtctttaaaacaagccttgtagcaaaactgactatgcctatctttcaaaagatggaggaaggacaggaaataagcaaaatgagcttggggcatcttggagtgccagtcggtaaaraagtgctcaaagcaacacaaaacaggaaaagaacagaaaaaaggaaaaggcccacaatgatgagggcctgtcacagagatataggagccaactgaaagagctcccaatggccaaagctggaacaatttgagcaataaaataaagtagtattggattaaaactcaaagtataaaataaatac

SEQ ID NO: 176207 - DNA, 605 bp, Homo sapiens
agagagagagggagagagagatttattgtgggaattatgggaattatctcatgaaattatggaggccaagaagtcctgcaacacgtcatctgcaagctgtagaactggaaaagccggtggtgtactttagtcccagactgaagggctgagaatcagggaggctgatggtgtaactcccactccaaggctgaagtcctgagaactagggtgggggaagtaaggggtttgaaatgtgagggttggggccatggtgtaagtctagtagtctgaaggctgcagaaacaagggctctgatgtccaagggcgggagaagatggatgtcccagctcaagaagagagatcaaatttccccttcctctgcctttttgaactatttgggcctttggtggattggatgatgcctatacacattggtgaaagcagatcttctttactcagtctattgaktcaaatgtaaatctcttctggaaacaccctcacaggcacacccagaaattatgttttgcccactgagcatcccttagtccagtcaaggtggcacataaataaaattgagcatcatggtagatctgaattgaaatttgaggcaagttcaggaaaaggta

SEQ ID NO: 176208 - DNA, 605 bp, Homo sapiens
agagagagagggagagagagatttattgtgggaattatgggaattatctcatgaaattatggaggccaagaagtcctgcaacacgtcatctgcaagctgtagaactggaaaagccggtggtgtactttagtcccagactgaagggctgagaatcagggaggctgatggtgtaactcccactccaaggctgaagtcctgagaactagggtgggggaagtaaggggtttgaaatgtgagggttggggccatggtgtaagtctagtagtctgaaggctgcagaaacaagggctctgatgtccaagggcgggagaagatggatgtcccagctcaagaagagagatcaaatttccccttcctctgcctttttgaactatttgggcctttggtggattggatgatgcctatacacattggtgaaagcagatcttctttactcagtctattgattcaaatgtaaatctcttctggaaacaccctcacaggcacacccagaaattakgttttgcccactgagcatcccttagtccagtcaaggtggcacataaataaaattgagcatcatggtagatctgaattgaaatttgaggcaagttcaggaaaaggta

SEQ ID NO: 176209 - DNA, 618 bp, Homo sapiens
acaagcacctgccagcacacccggctaattttttgtatttttagcaggggtttcttcatgttggacaggctggtctcaaactcctgacctcaggtgatccatcagtgtcagcctcccaaagtgctgggattacaggcgtgagccaccgtgcccagcctcaagttagcttttctaaagcagagattattaayttttcttgtactgtggacctctttggcaatatggtgatgtctggggagcacctctcaaatttgcttatattgcataaaataaaatatgtagatttgcaaaggaagccaaatctactgaaatcattatcaaaatattcaaaaatataatttgtgttgtattataataataatgtgtgtgggtctaataacaaacaatttcaaagcaataatgagctatgaacaatctactttgagagatctgcgacaactgtaatgtgatatgaaaatatctgcaatttctactggtgacaaagacacattattgctaatactattgtgccacatttgtaatcaaagaaaatgttaaacttcagttaaaagtgagtgaaatttaagttgtaattttttcccagaatttcatctataaaaatgttataggaaataaatt

SEQ ID NO: 176210 - DNA, 567 bp, Homo sapiens
tctctgtgaacatatacagattattttcttatcattattctctaaacaatacagtataacaactctttacatagcatttacattgtattaggtattataagcaatctagagatgatataaaatgtacaagaggatgtgccttaggttatatgcaaatactatgccattttatttaagagacttgagtatccatggattttggcatttgtgggggttagagagggtcctggcacaaatcccccatggaaagcaagggacaactgtacatcataaaaattagcatatagaacaatggattaggagctttcaaaatttcaaaggttaagcagatcactcaaaattacaatcgttaagtggatagatatgcatttactgttgacctaagaacattctatgctttttctttaaatgctgatttataaaaggcatttcccccaacagttttagaagaaatactgagcaacayatgtcgatcattttgaaatagagtatctgtttctacaaagaaagaatgagccattttggaaggagaggaacaaattattttccaatataaaattttccttc

SEQ ID NO: 176211 - DNA, 595 bp, Homo sapiens
gaaatgcagatagaaatcttttcagtacaaagatgagaaggatttgcaattgaacgctgaaaatgcacacaagtgtgaaaaccatgactgatgaactttaaatatgtaacaaatctttagttacatatttcaaaatttagttacattaatcaaaatacacagtagcataataacggcatctcatcacccttaccccttcgcaattgcagtgttaaacaaggagagcacagagaggaaaagaaagcactttcaagctggaaagaaccttgaagaacagagttcacctttctttttttacaattaaggaagcaagatcctcaaccagaggtagtttgctcaaggacatgtaacgagtttgtgccagaaacaaagcaagaatcctgatattctgaccctggacgaacaatcaggtttcttcctctattgttacttaaatcccccaaattaattatttttataagtgtttctaaaaatatgawttcaaagtataatatgtgaatttacttgaaataaacaaatttgtcaaaacatattggcttgctactaacaggacaaggaaagccaagatcaaactttgtcatgactaacaaaggaa

SEQ ID NO: 176212 - DNA, 519 bp, Homo sapiens
tggagggcatagaagctctgcatcctttctcccatacttcgctctacacgtgtcttcattcatatcctttgcaatatcctttataataaacagtcaagagagctgcacagtaagattctactgcagaaacttcccaggagacttgaattgaagcatcagcaaaactgaaggagcaatgcctgtccacacatccaagaatagaytcgtcctgaatctattctgacaagtcagccagcggtcaagaaacccaaggtgtgatccatgtacctggcagagcctcccatcaaaacatgaactgggctccttctcaccttatggacagctaaaggaggtgggaggtggatttgttgattggccttatgctgcacccaagcacttgggccgggactcaaccctcattgccaagcaatgaggcttcaagtttgctcccatgatgtaccctagcctgtcaccaagacactcatcctggccacttcgacctctggctcactgttgtactggtgtgaatgcaaacccagc

SEQ ID NO: 176213 - DNA, 560 bp, Homo sapiens
ttactaattggcaggcactttatgttactttatcttcccaaacagtctataatgtaggggactacaattctcaccattttagggttgagagtattgagccttcaaagaaaagctaaagcaagtggtccatttctaaaaagtagtaaagtcaggatacaaattcactatggtattacrgagatcaatttattagctaccacgctaattatctctcttccagtttcagagattctataatgattgcaaattactgtaaaatttcatgcaaaaattagaaagcagaaactctgtaagttaatactgcttttagtcatagtaatacatgaaaactttcaggtaacttttgagatttgcatttaagatgccaaaaaagcaagaaggcttaaatacctctcctatatctgatttcatatcaccaaagttgacttggaatgacctcaaaatgttttactcatggcaaagagatgaagatgctgggctgaaatctccaagcaatggtttcattggtcatcatattatttttatacctgaaaatgcaattcttcattcatacaaaatgc

SEQ ID NO: 176214 - DNA, 549 bp, Homo sapiens
cttcggctctatagaggcaaagtacaggtattaaggaatgagtaggttaatggtgaacaaaagggaaaagactacggtagttcatccaagtgttcaaaactccacccccaggtagaacggggacccctttgtggtgtgattgcaggatgttggaaagctgagcaaatgcctgccccatggggcctcgcacaatccctaattcaggagcagcataagtctttacgttgatagatgggaaaccttccctaccccagaaattccttcttgggatagaatgttagagttgggtcyacaacccaactctcatgtcagtttcctagtggggagaaaaaggcaggcaaggaaactccagagtaggcagcaaaataaaggatctatttgcatgattctctcaaatttaggcaaaggatagactcaattaaggcatgattgaatataggaggaggcttctcttcttgtgtggctacctgggggagacattttattggcaatggggtgacttggattctacacactagtggctcttattctctctggtctttgcagcac

SEQ ID NO: 176215 - DNA, 577 bp, Homo sapiens
ttccatctgggaatcattttcctcatatatttttcatttaaacatcatattggtatgtctaagagaaggcttcttaaatcagctataaaataaatgtaggaatataaatctaaatataatcagtacacttagtgttcctcactgaaaatcaagatgctcttctttatggcatattttttccaaaactaactattcacttgtagaatatttgtgtgacaaagtatcatattgtcatgagtgtgccagtccaataaaaggaaacttcattatgcctatatttasacacacatagtaaattggatatttaaagctgtttgttttgcagtagttgagagtgtcagcaataattctgtaagtatttatgcgccttcatacattgtgtgtgtgtgtgagatggagcgttgaggttggggagaattcagaaaagtagactctaaagtgactccaataggcagagtaaaaagtgacactaggttaatagacatgatattgagtagatagagggccagaattttgaaatgtgagattttgggattttacccacaaaatgacattgagctattacggattcttaaac

SEQ ID NO: 176216 - DNA, 577 bp, Homo sapiens
cattttcccatgtggaatgctgtttgttcatgattagatttgtagcttttgtttacttccttaatcaatgtagtttcaatcaaataattctaatcaattttgcttcctaatttgatgaattatactaataaactccaattttcagtaagaaaatgtagatttacasttaattcctcttcatttgaaagagatacttccactatttccaaaattatctgatctcatttttttttttcagaggttttgactaaactaaatgttctattggactatgcccaagaagctaaggttttatttctctgtaggtggtgccagatgtttttcattggttactatgagagctattaaataagtcatagcctcttaaatctcattaatgtcagatggtggaggaagtacatcattttgggttgtttgccttgaagagtagaaatattctgggactagatcctgtcataccctggggcatgtgtcttgagctctctattccatgggaacgtttcgatattccaccctaacatcctaatttcatatttggagtgatagtttttcctttaactttcaacaaccttaccaa

SEQ ID NO: 176217 - DNA, 629 bp, Homo sapiens
ttttattattagcactgccattttacagatgaggaaacagacacagagagaactgtctctggacaaataactagaaagaggcagagcaaagttttgaaccaaagaagtctgcctgcacattccatgctctaaccaccatattctacaatctctctaatgaactgtaatggcttcaagaccagaggaaatataaaaagcagtaagcctttatgatgggcataatttagatagtctagacttacatgaacaactcatctttaactggagatctgatgaagttaaataatttatatcattgctctcagtctgaataaaaggaaaaaagagttagctaaatgtgtttaatgacaatctaaatgttatctccaaatctgcttatatgatttatttaaaacaagcttagatgaactctcytatcatagaagaaactacttgtgaagtcagttcttccttctaaggattttggagaatttttccactgacatctctgaaaatggctttagaataaagcagatttttttcccccagtccctctctctcttttgttaagcaattgggaagccatgtttattagtttggcttgtaggttacaatgagcacactgcacctaaatgtttcagtttatttat

SEQ ID NO: 176218 - DNA, 394 bp, Homo sapiens
ttagctgcataattgtcaaacactctacttgtgggttaaaaacacacatcaataaagaattcattgtgacttctagcattcttaaccaagtgacaaaartctctcagtggcccagtcattcttactgtttttggcctttaatcttacgttatcaatttttaacttgtatatgactgtaaattatctacatctaccttgagtatagaataaggtccttaagcagaagggccatgatgacccaacctttttcatccattttccttacaagtgaatatagtgctgtgcacccaggggtcccttaataaattccacttgcatttttagactatggtaatttggtgatttccagtaaaaatgccctcctagttttttaaataaaaggaatgataaatga

SEQ ID NO: 176219 - DNA, 292 bp, Homo sapiens
atacacacatttacatatatatgttcaaatattaagttaaaataagctcatcttctgtaaatataacttacctcctgagatgggattggaggacatggttctgagatgagaatgaaaacaaaatataccacacacaccccttgatattccttagtgagagataacacggtcatattcccatattccatctttcactccaaaaatattttaacartttttttcttcttatcacagaaatcccattgcttcagaacccagttctagatagctgtttgattaaacacatttaata

SEQ ID NO: 176220 - DNA, 193 bp, Homo sapiens
acttaaaaccttctctcctgatttttctgacatatctcccttctggtttttccctttgcttccataactgttttcttctaatatccttttctgaatcctagaatctagacctcagaaaagccaggagctaaagacaygcccacgaataataaggttagagatataaattaagggcagcagagaggataagatg

SEQ ID NO: 176221 - DNA, 656 bp, Homo sapiens
aactcattctttaattggaatttaacaaaacttagatatgttccttttgttaaagtctctgaaaaaaatacgtcatacttatttttcctcaacttttaatccaaaatgaatcataagatattaagcctggaggagaccttagtccaaatgctccatctcacagataaagaaacagaagcccagtgcgatgaggtgctatgcacaaggtcacagactcaaggattagcagtactgacagggtcagggcctaggcctctgactgtatggcaccatgtagacaaagacaacaatatctaatagagccagtgtgagcttgttattaaagtaaaaataaatcaggagaaaccaagcaaatataaaattggtragaaaagcttaaactgcaaattcttggtagatcttttggaaaatggaatctggaaggcatttagccaaaagctttacatcatctactgtgttgtgccagctttttaatttggcagaaataaaggaatattctccgtaatcaaacgccctgcccaggattctgggctataataaattaatgaagtgagtttcttctctctattagattatcagtggctacaatttttcaagacagagataataaaatatcataccataaagtgctctatcagcatgcatttcttcagtgc

SEQ ID NO: 176222 - DNA, 514 bp, Homo sapiens
ctcaaattcctgacctcatgatccacccacctcggcctcccaaagtgctgggattttaggcgtgagccacagtgcctggccaccactactttcaataatagaaactgtaattaattttgcaccaacctaataggctgtcctctctggaggacacaactacaaggcaccattcagggagcagagagcagccctcaccagacaccaagtctgctggctacttaatcttaatcttctaccctccaaaattgtgagcaataaatttctactgtttataaactaccctgtccagagtgagggctacagcagcatgaacagactaagacagtttctttcctgtcaaatggcctgtgcccctcaactttctctccagagctgttcaccactggacaatgataaattacaccgaggtgcaattatgagtcatatattcacatccacatgtgtaagagagaaaagtcttttcacccattgcaaggttcatgtctgasacagttatagcaaaaatcagatcagc

SEQ ID NO: 176223 - DNA, 601 bp, Homo sapiens
gggaggcaatgtggattcaccatatatgttcccatatcctgaggctttagccactaatccaggaggcttctttctccaatgtaactcattcctacctcattcatggtatacctgtagctagggatgaatgattcttaaacctgcagccaagatatgaatgaaaaagtttccccaaatttaaaaaataattggctagcctagaagctattgttgtgggccagatttcatggattattctttttttccctttagggcaagrggtatactaatttagaaaggtagaaaactggtatcttagttttctgatatcttgtttccgtttttcaaaggtacaggtcaagtggccaggtgcagtggctcacgcctataatcccagcactttgggaggccgacacgggtggatcacctaaggtcaggagttcgagaccagcctgcccaacatggtgaaaccccaactctactaaaaatacaaacattaattgggcatggtggcgggcgcctgtaatcccagctcctcaggaggctgagatgggataattgctgcaacccgggaggcggaggttgcaatgagctgagatcgcaccactgcactccagtttgg

SEQ ID NO: 176224 - DNA, 601 bp, Homo sapiens
gggaggcaatgtggattcaccatatatgttcccatatcctgaggctttagccactaatccaggaggcttctttctccaatgtaactcattcctacctcattcatggtatacctgtagctagggatgaatgattcttaaacctgcagccaagatatgaatgaaaaagtttccccaaatttaaaaaataattggctagcctagaagctattgttgtgggccagatttcatggattattctttttttccctttagggcaagaggtatactaatttagaaaggtagaaaactggtatcttagttttctgatatcttgtttccrtttttcaaaggtacaggtcaagtggccaggtgcagtggctcacgcctataatcccagcactttgggaggccgacacgggtggatcacctaaggtcaggagttcgagaccagcctgcccaacatggtgaaaccccaactctactaaaaatacaaacattaattgggcatggtggcgggcgcctgtaatcccagctcctcaggaggctgagatgggataattgctgcaacccgggaggcggaggttgcaatgagctgagatcgcaccactgcactccagtttgg

SEQ ID NO: 176225 - DNA, 271 bp, Homo sapiens
tcagtaattaactactggttaccaagtgaatgtaaactcaaacaaatgtaccttatttctcagtgtatatatataaatacatatttgaaataaaaacttcttcttcctcttcctcttcctcttcttcttcctcttcttcttcctcttcttcttcttcttcctcktctcattctgtcacccaagctggagtacagtggaataatcatagctcactgcagcctcctactcctaggctcaagcaatcttcccaccttagcctcctatagaacta

SEQ ID NO: 176226 - DNA, 457 bp, Homo sapiens
tttctcaaaagaaggcatacaaatcgcacacaggtatatgaaaagatgttcaacatcactgatcatcagagaaatgcaaatcaaaactacaatgagataccatctcaccccagttaaagtagcttttatccaaaagacaggcaataacaaatgttgttgaggatatggagaaaagagaaccctcatacactgttggtggaaatgtaaattagtataacccctacggagaacaatttgcagktttcttaaaaaactgaaaatagagctaccatatgatccagcaatcccaccactaggtatatacccaaaggaaaggaaatcagtgtatcaaagagatatctgtactcccgtgtttattgtagcactattcacagtaaccaagattttgaagcaacctaagtgtctgtaaatagatgaatggataatgaaaatgtggtacatatacacagtgtatatg

SEQ ID NO: 176227 - DNA, 556 bp, Homo sapiens
tggtcattttgattggtgtgtagtggtatcttgttttgatttgcaattccctaatgacatatgatgttgaacatattttcatatacctacttgtcatctgtgtgtattttttgttaaagtgtctgttcaggccttgggcccattttttaattgggttgtttgttttcttattgttgagttttaagagttctttatatattttggatagcagtaccttctaaatgctaagccagagtttgaagaccattaatattataatactattgactgtgatatgtatatcttcactgttacaactgcsaataaattggttatatattccttggacttcattcttatacctgagggatcagaaagtaaaagcataggtgtatttcagtacagaacattaggatgggtggtgataatcatgtttctggcccttaaaagtctgtctatttagcaaactacttaagagtacaattaatatatatgtagaaaacatttctttttagatacatcctcgaaaattagaggtggctctttttaatataaagagaaaaagctataatttaaa

SEQ ID NO: 176228 - DNA, 592 bp, Homo sapiens
cacattttttcttcagactctggagccagttgtaggcattccaaaatagsctttttaaacttcttcaaagatttggctttttggatatcatgggggccgggactgtatgtcataaagattagctagggtatttcctctagccttaacgttatccctttcagtgtggctttatgataaccatcccctaaggaagcattagaacacttaaaatggttgactacttgaaattgggattcctactgagatcggaaaccataattatttttacagtattccaaaatcatggacaacaccaaaggcatagctgctattaatgttaactctctaatgtcttggcaactggcaagctttgctgaatagaataagttctgtcatctgggctggtttaacctctggtaaggagtcatgatttaggggtcagttgagactgttgcaatatatcctgcctgatattttttccatttcactttcaaaaaatgacctatcaacaaacaagattacatgtaaatttaatccggggggagtttctaataaatctgtctgaagcacagttattgcttagacagagactgagtcgtcatggattttcctt

SEQ ID NO: 176229 - DNA, 592 bp, Homo sapiens
cacattttttcttcagactctggagccagttgtaggcattccaaaataggctttttaaacttcttcaaagatttggctttttggatatcatgggggccgggactgtatgtcataaagattagctagggtatttcctctagccttaacgttatccctttcagtgtggctttatgataaccatcccctaaggaagcattagaacacttaaaatggttgactacttgaaattgggattcctactgagatcggaaaccataattatttttacagtattccaaaatcatggacwacaccaaaggcatagctgctattaatgttaactctctaatgtcttggcaactggcaagctttgctgaatagaataagttctgtcatctgggctggtttaacctctggtaaggagtcatgatttaggggtcagttgagactgttgcaatatatcctgcctgatattttttccatttcactttcaaaaaatgacctatcaacaaacaagattacatgtaaatttaatccggggggagtttctaataaatctgtctgaagcacagttattgcttagacagagactgagtcgtcatggattttcctt

SEQ ID NO: 176230 - DNA, 592 bp, Homo sapiens
cacattttttcttcagactctggagccagttgtaggcattccaaaataggctttttaaacttcttcaaagatttggctttttggatatcatgggggccgggactgtatgtcataaagattagctagggtatttcctctagccttaacgttatccctttcagtgtggctttatgataaccatcccctaaggaagcattagaacacttaaaatggttgactacttgaaattgggattcctactgagatcggaaaccataattatttttacagtattccaaaatcatggacaacaccaaaggcatagctgctattaatgttaactctctaatgtcttggcaactggcaagctttgctgaatagaataagttctgtcatctgggctggtttaacctctggtaaggagtcatgatttaggggtcagttgagactgttgcaatatatcctgcctgatattttttccatttcactttcaaaaaatgacctatcaacaaacaagattacatgtaaatttaatcyggggggagtttctaataaatctgtctgaagcacagttattgcttagacagagactgagtcgtcatggattttcctt

SEQ ID NO: 176231 - DNA, 233 bp, Homo sapiens
aatttggtttgatcatacataaagttaccagtaagtcaacatctaaattagctacgatctgattatgaacaggaaagtcatcagggatctgagggaaaagaaaargaaaataaaaaacaggagagaacttaattttgcaattctgtttacataatagatccctatcttttaatttgatgggcatgatgttgtaaaggaaaataatatttctcatttggggaaccgaggttggc

SEQ ID NO: 176232 - DNA, 539 bp, Homo sapiens
tttgtcaaatggtaggtttcactgtggattgatctggctgagctatttcactgggaaagcttaactgtagcagctatagtcttttctctcgggcaggttagcttcccctgaaaggaatcttccatttttctgccagagagttaggctagttgccctctcaatgaggatactgggctggaaggtctcaccatttagaattcagacttccaacctcttgtcaatatcatactcgtagtagtaaactgataaactagctctcaaaaaaaaaaaaaaagcctgatttgaggcatttgccattttcattcatgttaaatattcacatcatagttaatttcaaactaccattggtttaacaaccagttcacaaaattccttaatatctaacaacyagcccccactggcaaaagctggctccagcaaaccactagatccccttccccccaaacctcagctgttcctcagattctccaacagaaacctccaatcttctgcaaagtaggagaggagcactgtctacttgggcagggtgggaaagaaaa

SEQ ID NO: 176233 - DNA, 633 bp, Homo sapiens
tactagtttgagaaatatttgagacaaagctaatctggagaattaagacttaatgagagcgagtgaagaaagaagcaagttatgctgaggttttgggaattttgtggctttctttcgttttcttttcttttagycacatttcgttttcatttttccagctacataaacattgcaggtataagttgaaaatgagaagtctgttttggccactgtaaataaaagcatctgttttaatagtaaatatgagtgacaactaaatattttaaaattcacacttttaggttagatcagtgtgatttgtttcttttgctctttgtattcagaattttgtaggatagtatttaccttttagtgtgaaagaggaagctaaatagttatgaaaaatgccattaaatgtgtttttcgatctaagtcctggtgtgtttagataaatacagtttctaaaatggaggctaggtagcctgcagtctcaatttcctgaaatttcccattgccatagcaacgacatgcacttaggttttcgtttttcaggttccctagcttataacgtggaagatgttattggaggttggcagagatgaggcaaaataggagcgttctattgcatagtctgtaagactgtagatttcatta

SEQ ID NO: 176234 - DNA, 601 bp, Homo sapiens
cttcttcataagtttaattggacatacattaataacctgtgatctcagacttgagatatactgatacaaacatgggttcagcgagggaggagttcacaaatatttttttagccctactattatgcaacctttgctaaaattttcctcacatttattttcattgcaattgtacagtaacaaggcatggcaaatagagttatcagcagataaattaaggcagaaatgttacatctttaagataagtgagagcagacactgattaatttgtataatggcctttctttattttcccttacttcactccatagacgttagagtaacctactaaagaaaaatgtctccagcccatacattagcctcagctctagaatygcattaaatgtagctatggaggtgagaataaagtacgcatttttactgtatttgaaataaaaatgtagattatttaaggccttttaggggattcaacatgtctaataaaacgtggattctttaaaagttgtggattgtttccaaacgtcacataaatgccagagacaatgagaaaagtgtggacagagaatgcttgagacaaaaggcagtattgcaagatttaaaaagt

SEQ ID NO: 176235 - DNA, 588 bp, Homo sapiens
ctccaaagtgagctctatgtagagtcagtgttaaaaatagcgagtcaggagcacaggtatgtggtaggaattagtggcggttgagtcaatatctgattgagattagtgtctgtgtcaaggtatttactgcacaaaccataagaaaaaggaggtttttaaacaaaatgaattacgtttttgaattgaagaagatattagtgtggaaaactaattttatttagagaggaaaaagagaacaaacgccgtgaaaaaaggcagtagttgaagtcagtttcgattaatgtagtaaagagaaggctgaacacagaaaccaaatttgcaagactttttaagatgagcaattagaatttgatggccttttkgatgggatggaaagagcgacattcaggtcagttgtacatttgtgtatgagagaaagctggacagaaatatcaggggggcttcaatgctactgacattgatgaattaaataattttaattagtaattaataaacattttatgtttgttatttattttgtactctgatatgtaagtcttcaaaaatattcacttaaattatttcctgtcgtaaatagtgactaaataa

SEQ ID NO: 176236 - DNA, 607 bp, Homo sapiens
tctattaaagttagcacttgcaaacataaatttgtagagtatgtttgtgcagtggtaaattttatatgttaaatctttaatactgctttatagatttcattttttgttgaaatggttgcttgtgttcatactgattgaaataaactgaatttacaaaaatatatttaggaaaaatattcaaaatgactaatttacaacatacattaaaaatattctgtcttttttaagcacttatatcagctcagggtagcgaattgaaatttcaaaattacacctttcggaacatacaacccagattggtgagagaaaagctacaaacacacatatgaaaattaattcttataaagtagtaactaaatattttatattgaagacatagtaagtgaccaataagttattttgaagaaatttatgaatttataagctaaatataatttatgttttagcttatagtcatgttatataaattcagagattagtataggttggaagtagtcaggctttagaagctcaaaattgaaatagayttataagaacataaagacaatgtttatctcatttattacatttggaatataataacaattcctttaaaaggcatcactga

SEQ ID NO: 176237 - DNA, 385 bp, Homo sapiens
gacagcagttttcttgatgaaacctcacttggtggaatgcaaggaaattcccttgagtcattttttaataggagcactaaatccatttgtgaggcttccactctcatgacttaatcaactcccaaaggcctcatctttaaatattattatattggggattgggtttcaacatataaatctgggggacaaaaatcttcagtktatagcattttaagaataatcctctttgactcacaggtctgccttccagatgactggggcaaaagtttcaacttctgaacttgctgaaacaccaaccctgctccctcagctttgctggctagggcttggactctgacatatttctgatgtgtgtcctggcccaaattgcgtgtggaactgtcat

SEQ ID NO: 176238 - DNA, 598 bp, Homo sapiens
tattcctgctctggccacgtgatttgcctgctcctgcttcaccttccaccatgattgtaattttcctgaggcctccacagaagcccagtagatgccagcagcatgcttcctgtatagcctgcagaaccatgagccaattaaacctcttttctttataaattgcccagtctcagttatttctttataacaatgtgagaatagactaatacaggcctccaaggccctgggcctagatcctgcacctatgatgaatccctttttgggcccagctgctctccagggatgggatgctaagcctgtggctcttccaggmggccctatcctttgaaatggagatgaagatagccacagcctcctgctgttctgggtgcagtccatggcacattgggctccatctgaaccactcccaaggcagctggggaatataatgctggagtgaggggaacagagctcataatttgagatactgtcaaagcagagtgtaccaaagttctacatgtgctggtgacatgcctctctccccctgcatccctccaacccctgtttaaaactgctctgaccccagtgtttgcactctgggcccataataggagtagca

SEQ ID NO: 176239 - DNA, 570 bp, Homo sapiens
ctggagataacacaagcacacatggggagaacatgcaartgacacacagtgaccacatcctggaatcattttttttcttatcaacattataacaaaacaaaacaacgtttaatttaacaaaatggcactataaaatacctgctgtatatatttctaatatgcaatatatatatctcttaggtaattgtcttggaaaaacaagacaattgttttaagcagtgcaggctatagataataatttttttaaatgagttaggctttagaagaggaaattaatacacaaccccctagctaaattatggagctcaattatcacgtgctgtattagatatatacaccctgtacacacatacacaaaaatatataaataaatatatatggacatatattccacagcgaaggaagtaaataattccaacttacaggtaaggaaagttttacaatataggtgacatgagaactgaatctactgaaaatatgatactatagatcgaaaatttcacaaaataaatcgataaaatgtaaatatcttaagcagacacattcaagggcctgctgtgtttaagaaag

SEQ ID NO: 176240 - DNA, 570 bp, Homo sapiens
ctggagataacacaagcacacatggggagaacatgcaaatgacacacagtgaccacatcctggaatcattttttttcttatcaacattataacaaaacaaaacaacgtttaatttaacaaaatggcactataaaatacctgctgtatatatttctaatatgcaatatatatatctcttaggtaattgtcttggaaaaacaagacaattgttttaagcagtgcaggctatagataataatttttttaaatgagttaggctttagaagaggaaattaatacacaaycccctagctaaattatggagctcaattatcacgtgctgtattagatatatacaccctgtacacacatacacaaaaatatataaataaatatatatggacatatattccacagcgaaggaagtaaataattccaacttacaggtaaggaaagttttacaatataggtgacatgagaactgaatctactgaaaatatgatactatagatcgaaaatttcacaaaataaatcgataaaatgtaaatatcttaagcagacacattcaagggcctgctgtgtttaagaaag

SEQ ID NO: 176241 - DNA, 570 bp, Homo sapiens
ctggagataacacaagcacacatggggagaacatgcaaatgacacacagtgaccacatcctggaatcattttttttcttatcaacattataacaaaacaaaacaacgtttaatttaacaaaatggcactataaaatacctgctgtatatatttctaatatgcaatatatatatctcttaggtaattgtcttggaaaaacaagacaattgttttaagcagtgcaggctatagataataatttttttaaatgagttaggctttagaagaggaaattaatacacaaccccctagctaaattatggagctcaattatcacgtgctgtattagatatatacaccctgtacacacatacacaaaaatatataaataaatatatatggacatatattccacagcgaaggaagtaaataattccaacttacaggtaaggaaagttttacaatataggtgacatgagaactgaatctactgaaaatatgatactatagatcgaaaatttcacaaaataaatcgataaaatgtaaatatcttaagcagasacattcaagggcctgctgtgtttaagaaag

SEQ ID NO: 176242 - DNA, 434 bp, Homo sapiens
tgaattctcccttacagctggtacttrtgcctgccattgatgttctgtaggcaattctgcttgttctagtacctcccatcttgcctcctatcccctagagactgagaagggagctcaaactactgtgcactctgtgaatcagcatattgcctgtaacaaagattatatacgcagccacagtggctgcagccaatacatatctatgagcaccatctactggcttgtaggtcaaactgcacagtccagtgaaaaacctgccaacagaagtgcatagagttaaagaagcaaagccaaaggacactacccagcattctctagtcacattccctagaaaggaagagaaaggggaaataaaggaaaaaataaaagcaatattatagtgaaaaaaaaagaaaaaactacccacatgaaagtaattccaaaaattagaggtg

SEQ ID NO: 176243 - DNA, 419 bp, Homo sapiens
ttctgtaggcaattctgcttgttctagtacctcccatcttgcctcctatcccctagagactgagaagggagctcaaactactgtgcactctgtgaatcagcatattgcctgtaacaaagattatatacgcagccacagtggctgcagccaatacatatctatgagcaccatctactggcttgtaggtcaaactgcacagtccagtgaaaaacctgccaacagaagtgcatrgagttaaagaagcaaagccaaaggacactacccagcattctctagtcacattccctagaaaggaagagaaaggggaaataaaggaaaaaataaaagcaatattatagtgaaaaaaaaagaaaaaactacccacatgaaagtaattccaaaaattagaggtgtcagcatctccagatgagaaggaacca

SEQ ID NO: 176244 - DNA, 608 bp, Homo sapiens
gttaactgcattggtctgtattttcatatcatcattggtgttgtttactaatatgttaattaaaaattcttgccataaatgtcaatttaaatttttcactttgtaattctgtcattggtcttgatatagtcatgagctacactgcttaatacacaccaatttatgaytgtgataatttatgtttgatttctttaactattgtatagtgtctctctttccttgttagtaggtttttcttaactgtattttttctgatctcaacatataagcatcctggccttatggcgtttatggtcaaatgtaactacattatgattaagagaacacaggaaaaacaaaacacacatacacattagaaaaaaagaagtaaaacatatgatatattggattttgctaattactgaggaaaagctaaactagggaaaggatagggagttctgggtaggggagggcataaaatttaaacaggatggttaggaaacatcttactaagaatttgtagttgaataaactcctgaataataaaattttcagataacagggcaccaggcaggggtaaacatgtccagtaagatggacttgagtgtttgaaaaattggtagaagttc

SEQ ID NO: 176245 - DNA, 565 bp, Homo sapiens
attttgttgcacccatcacctgagcagtatacttcgcaccctatttgccgtcttttatcccttgccttcctcccacccttccccccaagtccccagtgaccaytgtgtcattcttatgcctttgcatccacatagcttagctcccacatatcagtgagagcatatgatatttgagttttccattcctgggttacttcagttagaataatagtctccaatcttatccaggtcactgcaaatgatgttaattcattcctttttatggcttcacagtattccatcatatatatatatatatcacatatatatatatctctcacatcatatatatatctctcacatcatatatatatcacatcatatacatatatatatcatatacatatatatatcacatcatatacatatatacatatatatatatatatatatatatatatatatatatatatatatatcagtttctttatccactcattgattgatgggcatttgggttagttccaccattttgctattgtgaattgtgccgctataaacatgtgtgtgcaagtatcttttttga

SEQ ID NO: 176246 - DNA, 553 bp, Homo sapiens
aactagtaagtggcaaagtgcaaaaaaaaaaaaaaaaacaccaccaaaaaaaaacaaaaccttatggaatgatggaatgactctttacttgctaggaaaatttgttagccaggtaacagggcatttggggaatgagaatactggtttatttaatttcttgatagctgaagaataatcagaaaatgtgttgttataaccattgacacaaatatctgcttgtaacatccacttttcttcctttttatgtaggrgatgcaaccagtttaaaaccttttggaataaagacagaggctaacagagtaggaaaaatgggaagcaaagagaagagggaagaagataaggggcaaaagaagaaactaaaacataattgattaatattgatttttgattattatttcagagcatcacgtcattattttatacacgaattctatgtgtaattgaatgagatgcaggacattgaggtgattctactgtggaaccttgttttattagtcaggacttttcagttgcaagagaaagaaatcccaaattaaaccagttttgttaaaca

SEQ ID NO: 176247 - DNA, 496 bp, Homo sapiens
aaatctctgggactgaatttcctattatattctagtatctactctttgcagcagtcattgaccagcctctgcatcactctccttctttcttaaagactcccagattactgctggtctccagaacacattcccatcacattcctcaatgatttcaaaaccccaactttctggcctttcaggaaactgacctcttctccactcataaacttccttttaaattctcagtttcctcttttcagtaaaatagatataataatgacttcctcttagaatgataagaagtattaagaaatgttgaaaaaactagctacaaaaggttgcctgaagttgaatctgaatgacttaccatttttagcctggaaactgtgacwgtgccttagataaaatttcatgcagcagggctaaagtatataaaagcggagctgcttttgttgaaatgagggagggtgatgagaatggagagttctgtggagaatggccagctaagtatggaggc

SEQ ID NO: 176248 - DNA, 563 bp, Homo sapiens
gtgctggaacctgctgagtgagtaccctggaaccagaaagcaaaattcttttcctcctgcagtgtctctctagcaccttccactcacaaagcttcacggccagctgatatatatattgaaagggcccagatccgtttttatagccgaaaaaccgggtgaatttggacctgagaggcaataaataaataatcaggccgggcgcggtggctcacgcctgtaatcccagcacttcgggaggccgaggcgggtggatcatgaggtcaggakatcgagaccatcctggctaacaaggtgaaaccccgtctctactaaaaaaaaatacaaaaaattagccgggcgcggtggcgggcgcctgtagtcccagctactcgggaggctgaggcaggagaatggagtgaacccgggaagcggagcttgcagtgagccgagattgcgccactgcagtccgcagtccggcctgggcgacagagcgagactccgtctcaaaataaataaataaataaataaataaataaataaataaataaataatcagcacagaggcattgaaaagccgtattttg

SEQ ID NO: 176249 - DNA, 545 bp, Homo sapiens
ataggaagacaaaaatatccagcaacaaacaaggtaaaattcatrattcttgagacctaataaataattactgatcatgccaagaaggaagaaaataggacctatgatgagaaaagaattaatctatcaaaattgacccagaactgatgttaaaattttcatatgagaacattaaaacagctattataactttatttcatacatttataagttaagcaaaaacatagacaatataaagaaaaagacccaaatcaaatgtctagagaagaaaactacaaaatgggagataaaaaatatacagtgggatagcattatggcagattaaacattgtagaagaaaagattgatgatctgaaagatatagcaatattaaccaaaataaaacacagacaaaaataataattaaaaaaaataatctgagcatcagtgagttgtgggataacttcaaacaaaatccttgaatgtgaggaaaacagagagatcaaaagtatttgaagaaaaatggccagaatttttcgaaatttgttgaaaaccatgaactgaca

SEQ ID NO: 176250 - DNA, 545 bp, Homo sapiens
ataggaagacaaaaatatccagcaacaaacaaggtaaaattcatgattcttgagacctaataaataattactgatcatgccaagaaggaagaaaataggacctatgatgagaaaagaattaatctatcaaaattgacccagaactgatgttaaaattttcatatgagaacattaaaacagctattataactttatttcatacatttataagttaagcaaaaacatagacaatataaagaaaaagacccaaatcaaatgtctagagaagaaaactacaaaatgggagataaaaaatatacagtgggatagcattatggcagattaaacattgtagaagaaaagattgatgatctgaaagatatagcaatattaaccaaaataaaacacagacaaaaataataattaaaaaaaataatctgagcatcagtgagttgtgggataacttcawacaaaatccttgaatgtgaggaaaacagagagatcaaaagtatttgaagaaaaatggccagaatttttcgaaatttgttgaaaaccatgaactgaca

SEQ ID NO: 176251 - DNA, 626 bp, Homo sapiens
ggatacttttaaaggagaatcaggccacatatttaatgaccttaattataagaaacatgaattccaacctgacattttaaagtaacagaagaccattatagttctgagtgacataaagaaactgacatctaaagatgagttgtctatcacaggtacatagagtgatttgggatgagctgatgaaatcaatagggagaaaggggtaaaagtgaggacaactcaataataaaaattatcaccacttccttatgtctctgcattgtttgtagtactgacagatgttggggtatagtaaaaagttgggcagcatagmctgcactcctcccagcactactcattcccccattgagctctttctgaggtagctgaaggagctagactgggccccatgtgtgaggtactttaaggtttgagtaatttggccagctgtggagatattattttgtgagccaggaaataaaatgaataatactctagatatctggattgggtgtaattcattgcttaagcatgcatgatactcacctcaaggctcattagacctggctgtaattcaggatatgccctcatttttattgacagacaccatggccatgaatgggtttccggtatgctaagcattgcag

SEQ ID NO: 176252 - DNA, 411 bp, Homo sapiens
cattagaaataccctatgggaatttgactccaggcagcaaaaaaaaaaaaaaaaaaaaaaaaaattatttatgtcttaaagttcttgtctataccttcgtacagattttctatctaaaaaactgtgctagtttattgtacttaactataaccttcttgagagcagatctttgatacccacagcattatgtttgtggccagggtctactgcccacaaagtgtccagtaaatgaaaaaaacattttytttttttacccagttctgcacctttacccaagtcacaatagtatgccagttgtcttgtaagtgcataaatgtcatcaataacttagcacaacccttgtaaaatgttgcataaaaacaaacatataaagcctgatggtaaaattgaacagaatatactcagtcctca

SEQ ID NO: 176253 - DNA, 411 bp, Homo sapiens
cattagaaataccctatgggaatttgactccaggcagcaaaaaaaaaaaaaaaaaaaaaaaaaattatttatgtcttaaagttcttgtctataccttcgtacagattttctatctaaaaaactgtgctagtttattgtacttaactataaccttcttgagagcagatctttgatacccacagcattatgtttgtggccagggtctactgcccacaaagtgtccagtaaatgaaaaaaacattttttttytttacccagttctgcacctttacccaagtcacaatagtatgccagttgtcttgtaagtgcataaatgtcatcaataacttagcacaacccttgtaaaatgttgcataaaaacaaacatataaagcctgatggtaaaattgaacagaatatactcagtcctca

SEQ ID NO: 176254 - DNA, 605 bp, Homo sapiens
acttttattccatttttccagataagaaaacatagatgtagtaaagctgaattcacccagcttgtaaagtggcagcacaggaattagaactcacaatatcacctctgagtatatattcttagccattagcttgacttccttgttgccttttcatcctttctcacaccccccaatttcacgtttagagaatgagtccccaaaacagattttatatttcattagcctaatcatagcacaattctatttaggtacagtcatagcaacagcaaccattccttatttttagattgtaattgacagtaacctagagaccacatgccatttctgaactatgcccattaagtttatataacatcaaaagctcaacttctcttattgttcacctacaacttcccttctgccctcttataggtgaaatcaattacagcatcctgttcttgcctttcacatattgtcaaatcatttctcacactacatgcttagtctaattgtgtgaattccactcccctgagttactggctttgaaaggttgmtgagctctgtcacgacctggccaccaacgtgtacacaatcttcctaaaatgctgccatggcctcattttgta

SEQ ID NO: 176255 - DNA, 450 bp, Homo sapiens
gttttctttacattttgttaattttttacatttaaaaatgatgcagattattttaataacacgaaaaaagaaataataaaagttgcgatgactgtgcagatttataatagcaacactgaagaaaatcttgttttgccctaatatagcatatcccatgctaataaactatagggattttttttttgctgtggttaatagctaattgtcattcttccattgttttttatttcttgtaacatctttctactctttattgatttagtggccttgttcttggcatttctttgataatacataaagtatcaatttttttctcttcttacctacatatcttgacctctgttgcctttactttaagcctttcactttcaaacctgttatttactttagaacctgtktctttcttctttttaattttttttctatttggggaaaagaactctgccctca

SEQ ID NO: 176256 - DNA, 367 bp, Homo sapiens
acatagtaactcagaaatctagaaatacagaatataaacctcagttacttactgtgtagttttttatgttctcaagtaattcctttaaggtttatggctggaagatcctctggagagatcatagttcaacccatttattctttctttgtctcttgcattaaaaagtgaataaactaaggtttcgaggggttcagcaatggctgaaagtcagagagttagttaactgctgagctttctaggactccagatagctaacccggtattctttctttataygctgctcctgacttctttcttctgcaatttcctaacctgtaaaatggcgttaagttttggctccctaatagaaagcaggttattgtaccat

SEQ ID NO: 176257 - DNA, 594 bp, Homo sapiens
ttaaccttttcacttctgtatcctttacatctactcgtattacacatgaatacatawaaaagaagggaaaaagtctttggaatgagaccaattcaaataacaattctgccacataattagtgcctcagttttcttatctgtggaatatgaactagagtatcactcttccaaaattgttgtgatgattgaggtagatatgtatgtcccatgtggatgacagtgccagacccttgataagctcttgataactactacttttatcttaggtatgattcacataaaatttaactgtggttgagcagcaaagttctctcctaattattttttagtgccctaggttctctaaattgtattgtgtatgttaattctgtaactttctgccactcaagttggatgattcatatgcacagaactcaggaatttattctcatgtcaccaactgacaccggtgcattagacaccagagcacgtattatttgtgtcatcttaattgtgtcattttaattgacacataataattacacatatttatggggcacaatgtgatgtttcaatacatgtatacattggtaaatgatcaaattagggtaatta

SEQ ID NO: 176258 - DNA, 347 bp, Homo sapiens
attacaaaaaaaatgctaaaagaagttctaaatcttggaacaaaaccttgaaatataccaaaataraacttcctgtattagtccattctcatgcttctctgaagtaatacctgggaatggataatttataaagaacacagatttaattgactcacacttcttcatggctggggaggcctcaggaaacttacaatcatggtggaagtcacctcttcacaggggagcaggagaatgagggccgagagaagggggaagccccttataaaaccatcagatctcgtgagaactcactcactatcacaagaacatcatggggaaaactgtccatgattcaattatctccacct

SEQ ID NO: 176259 - DNA, 461 bp, Homo sapiens
tatttgttgattattacatgctttgatgcagaaaatgcaaacctaggaagcccctgacttaagctatggtcttggaataggatgatgctatctagtgcatgaccttggcttgcccaaactccattaatttcattcaaacaatactaagcatgtagaatatacatgcacattgatgggcatataagaagctataaatgttattaaagctcagttccttctataaagagtcctggaatgaactaaaggagtgtattagtccattttcacgctgcggataaaaacatacccaagactggrcaatttacaaaagaaagagttttaatggacttacagttccacatggctggggaggcctcacaatcatgacggaaggcaaggaggagtaaatcacatcttacatggatggcagcaggcaaagagagagagcttgtgcagaaaaactcccatttttaaacccatta

SEQ ID NO: 176260 - DNA, 605 bp, Homo sapiens
ccagaacacgtgggaattatggaagctacaagatgagatttgggtggggacacagagctaaaccatatcagggggatatattatgcatttctagaactatctgtatgtagaactagcaccaggcagatttgatttgactaagtaaaatctttcaaatgcgaaggtatctgggaacacaaggaaggcaataaagtcatcatccagtcaggtgtgtagagagggaaatacatagaaaagataactttggaagagtaactatttgtaggaggtggagaaagaaagatgacccagaaagaacacattaagaaaagtgaactcagagacagaaggaaaataatgaaaaaataatttattctttgaaagtcagtagaaaataaggcatttaagaagaaatgttggagagcatcttcgaacatttgaatggataacgaggatagagaacaggctactagttttgctgtgacttgttatttggatcactagtgaccttttcaagagcagtctcagtagaatgctgaaaaaaagcattaagggggaattggcaagtgattytgaatatgtagcttattcttttgggaagttagattatcacaaataagagaaaa

SEQ ID NO: 176261 - DNA, 575 bp, Homo sapiens
aagcttccagaggaaggatcactcagcaatatttgctgttctgcaatatttgctgttctgcagcctctgatggtgatacccaggcaaacaggtctggagtagacctccagcaaactccaacagacctgcagctgagggacctcactggyagaaggaaaactaacaaacagaaagaaatagcatcaacatcaacaaaaaggacatccacaccaaaaccccatctgtaagttaccaacatcaaagaccaaaggtagataaaaccacaaagatggggagaaaccagagcagaaaagctgaaaattctaaaaaccagagcacctcttctcctccaaaggatcacaactccttgccagcaatggaacaaagctgggtggagaatgactttgacgagctgacagaagtggacttcagaaggtcagtaataataaacttctcccagctaaaggaggatgttctaacccatcgcaaggaagctaaaaaccttgaaaatagattagacgaatggctaactagaataaacagtgtagagaagaccttaaatgacctgatggagctgaaaaccatggcacgagaac

SEQ ID NO: 176262 - DNA, 591 bp, Homo sapiens
ctgagaacttgtcccagaccatgaccctccctgctgagaaaacatgcagactcacagtttttttgcatctcgaggagcctgcagtagtgatccagttccttcaaagggtctgtggattctcttggctttcctggtatgttcctgcagtagttcttggagcaaaagttcaggatgtgagtctccacacactgctctgtttgtctgagcaggagctgcaagctagtcctgcctcctatctgctatctttatcagtattctggcaattctatatttaaattctctagcttttcatcttttttttttttttttactttccctctattttcttgaacattttcatcataattattggaagtctctcatttctgaaacacctgtgggtctatttccattgtctgccttttctcttgatttttagtcatttggccctgtttttttgtttgtgttttgttttgttttttagcatgtctcatacttctctattagatgacacacattttggatgaaaagttggaaagtctctgggtgatgttgtattcatccagraagagagaattaagttgacttctggaaggcagagtaccaaataaa

SEQ ID NO: 176263 - DNA, 615 bp, Homo sapiens
gcatgcaattattgggctccttctctcttctttcctaccttctggaattttccttcttaatttccatcttcttcggcagccctgaactctgacctttgtatcctcagtctggtaagactgatgctttctgcytggtccctattccctcaagtaacaatgtgtgaaatgcccctagggaaaaagcaaaggtaaatgtggaactcactacacattattcccttttctccaggatcacaactcctcaattcttagctgtattggttgttctcaaatgccttcaaatagttgttttatacattttgtccaacttttatagttgttttcagcagaaggataagtctgacacaacctgctatagtggccagaactgtacattttattcagtccaattctgatgccaggttagaaagaactacagcagggtatgctcaactggcccagctgctttgagatgaagctcagactcttagacatttatgacatcagatccacatcttgaattaagggtccctattttcttttccttttctttcttcttttagttttcaaactttccttaggttccaaccataactgataagttggtaataaacttccctccccactgtaaacaac

SEQ ID NO: 176264 - DNA, 527 bp, Homo sapiens
aacacacatgctctagaaacaatctgtgcagttaatgcaatcatcacagggtcctgaggtgacatacatcctcagcttacaaagatgacaggattaagagattaaggtaaagacaggcatagaaaatcacaagagtattgattggggaagtgatcaaagtccatgaaatcttcacaatttaggttcttctgccatggcttcagctggtccctctgttcagggtccctgacttcctgcaacacaaactcaacacccaactcaatacagagtatcataacaccgagggtccctctgtgctctgaactcccagactcttgccttatgccaactatagaagtaacaactattctgtaacttatttttttattccttgcttttccttaaaaaatgaccacatagcacatgcctctacacaaaattttaagaattatttaatctaaaatgtatttgaaatatgataccatactctaagaattcttcacgtatatggcttttttwttcactgaatatggtttctaagatacatc

SEQ ID NO: 176265 - DNA, 576 bp, Homo sapiens
cgtttctttgttgactttctgtcttgatgacttgactagtgctgtcagtggaatattgaagtcccccactattgctgtgttgccatctatctcatttcttatgtctagtagtaattgttatatacatttgggatcttcagtgttagctgtgtatatatttaggattgctatattttcctgttggactaatscttttatcattatataatgtccctctttgtcattgtgtttttactgtgttgctttaaattctgttttttcatgaaataagaatagctattcctgctttcttttggtatccatttgtgtgaaatatctttttctatgccttaccttaagtttatgtgagtccttacgtgttaggtaaatctcttgaagacagaagttacttggttagtggaaatttattcattctgccattctgtgtcttttaagtggagcatttaggctatttacataaaactttagtagtgagatgtgaggtactgttctattcatcatgctaattgttgcctaaatacctagtcatttttcattgtattttttgtaggtcctgtgagatatatgctttatgga

SEQ ID NO: 176266 - DNA, 609 bp, Homo sapiens
ttaagtcaatcgtttctttgttgactttctgtcttgatgacttgactagtgctgtcagtggaatattgaagtcccccactattgctgtgttgccatctatctcatttcttatgtctagtagtaattgttatatacatttgggatcttcagtgttagctgtgtatatatttaggattgctatattttcctgttggactaatgcttttatcattatataatgtccctctttgtcattgtgtttttactgtgttgctttaaattctgttttttcatgaaataagaatagctattcctgcttkcttttggtatccatttgtgtgaaatatctttttctatgccttaccttaagtttatgtgagtccttacgtgttaggtaaatctcttgaagacagaagttacttggttagtggaaatttattcattctgccattctgtgtcttttaagtggagcatttaggctatttacataaaactttagtagtgagatgtgaggtactgttctattcatcatgctaattgttgcctaaatacctagtcatttttcattgtattttttgtaggtcctgtgagatatatgctttatggaagttctattttggtgtattttga

SEQ ID NO: 176267 - DNA, 576 bp, Homo sapiens
cgtttctttgttgactttctgtcttgatgacttgactagtgctgtcagtggaatattgaagtcccccactattgctgtgttgccatctatctcatttcttatgtctagtagtaattgttatatacatttgggatcttcagtgttagctgtgtatatatttaggattgctatattttcctgttggactaatgcttttatcattatataatgtccctctttgtcattgtgtttttactgtgttgctttaaattctgttttttcatgaaataagaatagctattcctgctttcttttggtatccatttgtgtgaaatatctttttctatgccttaccttaagtttatgtgagtccttacgtgttaggtaaatctcttgaagacagaagttacttggttagtggaaatttattcattctgccattctgtgtcttttaagtggmgcatttaggctatttacataaaactttagtagtgagatgtgaggtactgttctattcatcatgctaattgttgcctaaatacctagtcatttttcattgtattttttgtaggtcctgtgagatatatgctttatgga

SEQ ID NO: 176268 - DNA, 576 bp, Homo sapiens
cgtttctttgttgactttctgtcttgatgacttgactagtgctgtcagtggaatattgaagtcccccactattgctgtgttgccatctatctcatttcttatgtctagtagtaattgttatatacatttgggatcttcagtgttagctgtgtatatatttaggattgctatattttcctgttggactaatgcttttatcattatataatgtccctctttgtcattgtgtttttactgtgttgctttaaattctgttttttcatgaaataagaatagctattcctgctttcttttggtatccatttgtgtgaaatatctttttctatgccttaccttaagtttatgtgagtccttacgtgttaggtaaatctcttgaagacagaagttacttggttagtggaaatttattcattctgccattctgtgtcttttaagtggagcatttaggctatttacrtaaaactttagtagtgagatgtgaggtactgttctattcatcatgctaattgttgcctaaatacctagtcatttttcattgtattttttgtaggtcctgtgagatatatgctttatgga

SEQ ID NO: 176269 - DNA, 326 bp, Homo sapiens
atagaggcagtaattattttagccatattgtttgtaattaaaactgaatgtataccagtcataccaatgacatgctaagtgtaagtacactaaggtactctagggaaatattttgcattcttctctctggtaaatctccacttcctgccttggagttaagtaagtgatcttgtgccaatgaagaatgaaatcccttgccaacagagctccctaccaacatttgccttgttatgtgtaagcytctgattgatgaagccaattggtttttctgccatttacagctgaaagtatcactaattgatacactgttcaagcgaagggcttct

SEQ ID NO: 176270 - DNA, 575 bp, Homo sapiens
gatggagacaaaaagccgctataaccataccaggctccatgaagaagcacttgatgttaaaacagcgggcactgaattatcaaagaatgcacatatttcttaaaaattttactggataattggacatgtatgtaaagaaagtaaattttagcttctatataaccctatacatgacaaataatttgagatcaatcttaagcctgaaagaaagtattggaaccccagtgctggctccctttaacaaaacataaatgcaagcctggaaaaggatgaaacacttcccaagtaacataactgcatccttaaataaatatgaagagtattcgtgrgaaatacaaaagtatccagcactcaacaaaatcaaattaaatctctggcattaaaacaaattaccagctatgtaaaaatacagtgaaaggtgattcataataaggagaacaattaagcaattgaaaccaattgtgaacagacataggcattaaatatagcagacacaggtggtaaatcaaagccttcaaaattttagaacatatagaaaaataattttacatgtttagagtaagcaaatgtttttc

SEQ ID NO: 176271 - DNA, 586 bp, Homo sapiens
gcattaatttttctttatatgtttggtagaattcactagggaagccatctggtcctgggattttctttgtcggaaggctcttaaatacagtgtcaatcgtggtactggttacagatcttttcagactttctgttttttcatgatttagaatggtttagataggttttyaggaatttatgtatttcttctaggttatccagtttgttaacatatgattggtaatagtattttatgatcctttttatatctgtggtatcagttgtaatgtttcctgtttcatttctgcttctaattatttgaagcatctctctaatttttaaattagttaagggctggctaaaggctgcccattttatttatttttttgaagcagcatctcttggttttattgatttttttctatcatttttctattttattaacttttgcactaatctttattattacctttattctactaactttgatcttagtttcttctttttctagttccctgtgtgaagttaggttatttatttgaaatcttttattttttaatgtaggtatttactgcaataaacttctctgttagtacttactgcttttt

SEQ ID NO: 176272 - DNA, 586 bp, Homo sapiens
gcattaatttttctttatatgtttggtagaattcactagggaagccatctggtcctgggattttctttgtcggaaggctcttaaatacagtgtcaatcgtggtactggttacagatcttttcagactttctgttttttcatgatttagaatggtttagataggttttcaggaatttatgtatttcttctaggttatccagtttgttaacatatgattggtaatagtattttatgatcctttttatatctgtggtatcagttgtaatgtttcctgtttcatttctgcttctaattatttgaagcatctctctaatttttaaattagttaagggctggctaaaggctgcccattttatttattttttygaagcagcatctcttggttttattgatttttttctatcatttttctattttattaacttttgcactaatctttattattacctttattctactaactttgatcttagtttcttctttttctagttccctgtgtgaagttaggttatttatttgaaatcttttattttttaatgtaggtatttactgcaataaacttctctgttagtacttactgcttttt

SEQ ID NO: 176273 - DNA, 385 bp, Homo sapiens
ggacctagaaattgatctgccctacttgccactgctagaccccatgtaagctttctgggggcctgatgccatgtctgccccacatacatttacaactgctggcatgcacatgtgtcaytgggggacctggggttcaacccatcctacttgccaactctggatcctacatatgtcttctgggtacatgaggacaagtccactctgcccatttttttttcactggagcatgtcatccacggccttggggaatgggcctgccttgcctgtagcctattggggaacacgcatgctgaccacaggtgtaaaggggggcctatcatgcctgctgctgatgcccattcacactttctggggacctggattctggaccacccagcttacccct

SEQ ID NO: 176274 - DNA, 385 bp, Homo sapiens
ggacctagaaattgatctgccctacttgccactgctagaccccatgtaagctttctgggggcctgatgccatgtctgccccacatacatttacaactgctggcatgcacatgtgtcactgggggacctggggttcaacccatcctacttgccamctctggatcctacatatgtcttctgggtacatgaggacaagtccactctgcccatttttttttcactggagcatgtcatccacggccttggggaatgggcctgccttgcctgtagcctattggggaacacgcatgctgaccacaggtgtaaaggggggcctatcatgcctgctgctgatgcccattcacactttctggggacctggattctggaccacccagcttacccct

SEQ ID NO: 176275 - DNA, 513 bp, Homo sapiens
tcttttctttgtgtccatgagttattatcatttagcttccacttgtaagtcagaacatgtggcatacggttttgtgtttctgcattaatttgcggaggataatagcctccagctccatccatgttttccccaaaagacatgctctcgttgttttgtgtggctacctagtattctgtggggtatatgtaccatattttctttatccagtctttcacttacgggcatttaggtygatttcgtatctttgctattgtaaatagtactgcaatgaacattcacatgcatgtcttcatggtggaatgacatattcctctgggaatatacctagtaatggaattgttgggctgaattgtagttctggttttagtgctttgagcaatcatcacactgctttccacaatggttgaactaatttgtactcccaccaatagtgtatgtgttcccttttctccacaacctcaccggtatgtgttgtttttttttttgactttttaatcataactcttctgacta

SEQ ID NO: 176276 - DNA, 513 bp, Homo sapiens
tcttttctttgtgtccatgagttattatcatttagcttccacttgtaagtcagaacatgtggcatacggttttgtgtttctgcattaatttgcggaggataatagcctccagctccatccatgttttccccaaaagacatgctctcgttgttttgtgtggctacctagtattctgtggggtatatgtaccatattttctttatccagtctttcacttacgggcatttaggttgatttygtatctttgctattgtaaatagtactgcaatgaacattcacatgcatgtcttcatggtggaatgacatattcctctgggaatatacctagtaatggaattgttgggctgaattgtagttctggttttagtgctttgagcaatcatcacactgctttccacaatggttgaactaatttgtactcccaccaatagtgtatgtgttcccttttctccacaacctcaccggtatgtgttgtttttttttttgactttttaatcataactcttctgacta

SEQ ID NO: 176277 - DNA, 505 bp, Homo sapiens
tcattccaccattaactcaaaagtgcaaagttcaaagtctcgtctaagacaaagctagtcctttctgcctaagagcctgaaaaattataaacacgttagttacttccaagatataatgragggataagcattgactaaatagtcttattccaaatgaaataaatcaactaaaagaaagaggctacagtccccttgcaagtccataatccagaagggcaattattaaatcttaataatccaaactaatctcctttgacttcatgtcctacatccagcacacactggtgggctccaaaggccttgggcagctcttctcctatggatttaaaggattcagcctctgtggctactctcacaggttagcaccgagtgcctgtggctttgccagatgcatagtgcaagctgtcaatggatccacaattctgggatctggaggatggtggacctcttctcacagcaccacaaggcagtgccccagtggggactcggtgtagagcttccaacc

SEQ ID NO: 176278 - DNA, 319 bp, Homo sapiens
tccctagtgattttgatagagatggtctaatgactctccagtgatggagagaaagaaattttatactggagtaatgaagagtgaattattacrggaaaaaaatagttaagcaggtgaaaactgttcaaaggttatccccttcattcgttactacagattgagtattccttatctgaaatgcttaacaccagaaatgtttttggactccagatgtttttggatttgggcatacaaaaatacttgtgaagccatcctaccatcaagataattgaagtattgtcacctaaagagttccttctcacacttttctaactgcttc

SEQ ID NO: 176279 - DNA, 440 bp, Homo sapiens
aagaaaaacgttgaaaaaacacacatttctacattagcttttggaaaagtgtcaagcattccatacacaagtaattggagtccttacaggagagtagagaaaaagtactgaagaaacaatattagaagaaatatggatgaaaatattctaatttggttaaaaaaacccatcaacatgcagacgcaagggctcagcaaaactcaarcatgttaaatacaaagcaagccatgcctacatccaaatcaaactgctgaaaatcaaacaacaagagcaaatcttaaaaacagacagaataagacacttcacacaggacaatactgataataatttccctggtgtggctttggaaataaagacctccagaaggagtgaagtaatatgtttaaagtgttagaaggaaagaaaatgtaaatcccatattctacatccagcagaagaat

SEQ ID NO: 176280 - DNA, 495 bp, Homo sapiens
ctttaacccatgatgtaggttaagagragtggaccaatgttctgtttctgactgactatgaagctatatatgtaccattaaaatttctcacatacattgggtcttcatcttccatctatcaaggtgtaaggttatccatgtataagactggttgcaaaatccttcacaaataaaattataaccctatgagtgcatacaaccaatccccttttcacttttattgttcatagaggcataaacaaaggaaaaaaaatgaaagataagtgtcgtatgatagtagagaagtcttgctccatgatcgtcagaaaaagttgtttacgtcatggatgccatcttcttttggggagaaacttccctggttagctttaccttaaggtttccaatagctgtacagttccaacagtgtggagggacccttctgagttgtgagattatgaacacaaggttaaagatcccaaagtattgcttcaatgtggatagccagggcaatctttc

SEQ ID NO: 176281 - DNA, 464 bp, Homo sapiens
ttactcaactgacaaaagctctaacaattttccttgagaactggagtaaaacaaggatgcccactgtcagcactcctgttcaacctagtcctggaagtcctagttcaagcgttcaggaaagagaaagaaataagggcatccaaataggaaaagaagaagtcaaactatctccctttgctgatgatatgattctacacctggaaaatcctgaagactctgccaaatgatacctagaactgataaatgactttagtaaaatttcaggwtacaaaatcaatgtacaaaaattagtagaatttctgtacaccaataatgtttaagctgagcatcaaatcgggaacatattcccatttacaatagtcaaaaggaaaataaaatacctaggaatagagctaaccaaggaggtgaaagatctctacaagaagaactacaaaacactactgaaataaatgaaagaaaacaca

SEQ ID NO: 176282 - DNA, 464 bp, Homo sapiens
ttactcaactgacaaaagctctaacaattttccttgagaactggagtaaaacaaggatgcccactgtcagcactcctgttcaacctagtcctggaagtcctagttcaagcgttcaggaaagagaaagaaataagggcatccaaataggaaaagaagaagtcaaactatctccctttgctgatgatatgattctacacctggaaaatcctgaagactctgccaaatgatacctagaactgataaatgactttagtaaaatttcaggatacaaaatcartgtacaaaaattagtagaatttctgtacaccaataatgtttaagctgagcatcaaatcgggaacatattcccatttacaatagtcaaaaggaaaataaaatacctaggaatagagctaaccaaggaggtgaaagatctctacaagaagaactacaaaacactactgaaataaatgaaagaaaacaca

SEQ ID NO: 176283 - DNA, 595 bp, Homo sapiens
gcaccaaatctagggcaaacccaagaggtacataccatcattatgctcatgttatagctgaagagaattaggcacgaagagttaagtaacttgcttggagccacccagctggtagtgtcacaaccaggattcaaacgcaggcagtctgatatggtttggctgtgtccccacccaaatctcatcttgaattgtagctcctataattcccacatgttgtgggagggacctggtgggagataattgaatcatgyattcgggcggtttcccccacactgttctcatggtagtgagtaagtctcaggagatctgatgattttatttggggtttcccctttcacttggctctccttctctctttgccccacgccatgtaagacatgcctttgttcttccctcaccttccgccatgactgtgaggcctccccagccacctggaactgagtccattaaacctctttttctgtataaattacccagtcttgggtatatcagcagtgtgaaaacagactaatgcacaatccaagagagagtccctgcacttaactattaatagttcactacactgaaaccacgtgtcttttaaccacataccacc

SEQ ID NO: 176284 - DNA, 622 bp, Homo sapiens
aataattagctgctctgggctctcctacttctttgatctcaatcccctccacccaagagtatctgtgttctacttcttcccaggcacacggctagcctgggtttcccagcctcctttgcaggagcatcaaacactgtgtgtggttttccaccagagggcratagaggagtcctagggggatggaggagccataagatggaaagagcttggatccctgagtcaccaggtggaggaagacaaaaaatactgatattggactgttatataagaggtaaatcaactccaattgtgttaggccacacacaaaattgggaggatttatttgttacagaagcaagcctctccctaacaaatacagggggaggaggagggatgggagaacattaactcagaataacagccaagaacttggagataaggtgagtctgggaggacttggctgagggtgtcagggatgtggtagtggaagagcaggggagaaccagaatgaaagtctgaaatattattacttaagagttacttaaaaactaccacagtttatcatcctgtatcacaattactaagccagtcatttaatgttttcaaattgtaatggacccagctgtgcaatgggaatgtgtct

SEQ ID NO: 176285 - DNA, 622 bp, Homo sapiens
aataattagctgctctgggctctcctacttctttgatctcaatcccctccacccaagagtatctgtgttctacttcttcccaggcacacggctagcctgggtttcccagcctcctttgcaggagcatcaaacactgtgtgtggttttccaccagagggcaatagaggagtcctagggggatggaggagccataagatggaaagagcttggatccctgagtcaccaggtggaggaagacaaaaaatactgatattggactgttatataagaggtaaatcaactccaattgtgttaggccacacacaaaattgggaggatttatttgttacagaagcaagcctctccctaacaaatacagggggaggaggagggatgggagaacattaactcagaataacagccaagaacttgkagataaggtgagtctgggaggacttggctgagggtgtcagggatgtggtagtggaagagcaggggagaaccagaatgaaagtctgaaatattattacttaagagttacttaaaaactaccacagtttatcatcctgtatcacaattactaagccagtcatttaatgttttcaaattgtaatggacccagctgtgcaatgggaatgtgtct

SEQ ID NO: 176286 - DNA, 553 bp, Homo sapiens
gaattttatcattttgcatttttacatttagttctgtggcccactttaagttagtttttgtgaggacrcaacccagaagaataagatcagaggactgacgtgactcaagttcaagactgcctggaaaaccgtaatagccaagacaatgtggcattgctgaaggaataggtaaattgatgaataagacagaaaagagagctcagaaacagacctgcataaatgtggccaactgatcgttgacaaaggagtaaaggcaactcaatgaaaccaaagtctttgacagccttttcagtaagtggtgctggaacaactgggcaccaaaattcgtaagaatgatagtgatgatgatgatgagatgatcacagagcttgcattctcatgtattttgctttttcaaaccatgcagtgacaaatgtcctcgtgcctacctactcgggcacagatgcctttttttctagggtctctaccaagaaatgagtcttacagtaagataaggcagtattttaattccactaactccactgtccttcacaacagccctgtgaggttggtg

SEQ ID NO: 176287 - DNA, 553 bp, Homo sapiens
gaattttatcattttgcatttttacatttagttctgtggcccactttaagttagtttttgtgaggacacaacccagaagaataaratcagaggactgacgtgactcaagttcaagactgcctggaaaaccgtaatagccaagacaatgtggcattgctgaaggaataggtaaattgatgaataagacagaaaagagagctcagaaacagacctgcataaatgtggccaactgatcgttgacaaaggagtaaaggcaactcaatgaaaccaaagtctttgacagccttttcagtaagtggtgctggaacaactgggcaccaaaattcgtaagaatgatagtgatgatgatgatgagatgatcacagagcttgcattctcatgtattttgctttttcaaaccatgcagtgacaaatgtcctcgtgcctacctactcgggcacagatgcctttttttctagggtctctaccaagaaatgagtcttacagtaagataaggcagtattttaattccactaactccactgtccttcacaacagccctgtgaggttggtg

SEQ ID NO: 176288 - DNA, 553 bp, Homo sapiens
gaattttatcattttgcatttttacatttagttctgtggcccactttaagttagtttttgtgaggacacaacccagaagaataagatcagaggactgacgtgactcaagttcaagactgcctggaaaaccgtaatagccaagacaatgtggcattgctgaaggaataggtaaattgatgaataagacagaaaagagagctcagaaacagacctgcataaatgtggccaactgatcgttgacaaaggagtaaaggcaactcaatgaarccaaagtctttgacagccttttcagtaagtggtgctggaacaactgggcaccaaaattcgtaagaatgatagtgatgatgatgatgagatgatcacagagcttgcattctcatgtattttgctttttcaaaccatgcagtgacaaatgtcctcgtgcctacctactcgggcacagatgcctttttttctagggtctctaccaagaaatgagtcttacagtaagataaggcagtattttaattccactaactccactgtccttcacaacagccctgtgaggttggtg

SEQ ID NO: 176289 - DNA, 553 bp, Homo sapiens
gaattttatcattttgcatttttacatttagttctgtggcccactttaagttagtttttgtgaggacacaacccagaagaataagatcagaggactgacgtgactcaagttcaagactgcctggaaaaccgtaatagccaagacaatgtggcattgctgaaggaataggtaaattgatgaataagacagaaaagagagctcagaaacagacctgcataaatgtggccaactgatcgttgacaaaggagtaaaggcaactcaatgaaaccaaagtctttgacagccttttcagtaagtggtgctggaacaactgggcaccaaaattcgtaagaatgatagtgatgatgatgatgagatgatcacagagcttgcattctcatgtattttgctttttcaaaccatgcagtgacaaatgtcctcrtgcctacctactcgggcacagatgcctttttttctagggtctctaccaagaaatgagtcttacagtaagataaggcagtattttaattccactaactccactgtccttcacaacagccctgtgaggttggtg

SEQ ID NO: 176290 - DNA, 564 bp, Homo sapiens
tgaatcacacatgtgcttaatggcgaatagggaatcctttccagaaggtttgcaatttactttgctcaggcccatcagaggaatcacagtctctggcagctatagctttacaaaatgtatttcttaagtagtaacacttggaagtcagaattactttttgctttgtaggctgcagagtggatgttgtgttggcaggtgtgaaaacaagattcatctcgcacatctccatcagcactcttgggcgatgaggtgcattgtcattragcaggaatattttgaaagaaatcttttcttctgagaagtagatctcaacaggtaggcttaaaatatttagtaaaccatgctacaaacagatacgctgcgatacaggctttgtggttccatttacagagcacaggcagagtagatttagcataactcttaagggccctaggatttggggaatgctaaatgagcactggcttcaataaagttactaggtgcattactccctgacaagacagtcagcctgtcctttggagctctgaagccaggcactgacttcttctctccagctatgaaagc

SEQ ID NO: 176291 - DNA, 593 bp, Homo sapiens
aaacatgagggaaattgttggctcttgtaactaaaaagtcaagggctacatagaatggctgggtacatgggttcaaacactactatcaggaatcagtctctctctatggcttgtctctggcttccttcatgttagtttcattcctaagcaagagggatgtcagcagattcagttccatgatctgctgtgtcagcaacaagatggaaagagatgttgtttcacctactaatgcaaactaaagtcttgagactgagtcttattggctcaatttgggtgatttgtccatctctgaaccaatcagtgcaaccagatggaatgggatttagtgattggtgaggcctgggccacatgccacttcccaagccaactattccagcccacttggcctgggagtaggagagagatgattctacaacaaaaatgtgaattgaattctgtgaaaaataaaagacaacaatgggtgtgggtgaggccaaaacaagtgtgcatatgaccccaacatacacyaggagttgatgcagtagcaaagcatatattcctcaaaaacacactccactgagataagtgatttgcagcccccaaatcagagctca

SEQ ID NO: 176292 - DNA, 568 bp, Homo sapiens
ttttaactatggtttccactaaggagtctgctatttgggckcctcaatccatctcctcttttgggattttttttttaccaacaagagctttattgatatataattcacataccacacaaattatcctttaaaagtataaaattaagtgatttttagtatattctcagagtcatgaaaccatgaccactatgtaatttttgccacacccaaaagaatccccatacccattatgagtcactttcattcctgctcctgccagcccctgtggacccctaatttactttccgctctatggattttcctattctagacatgtcatatacatggagttatataagacatgcctttcacgtccagcttccttcacctaatatgacgtcctcaaggtccacctgtattgtggttcccagagctgtgatggaccctcaagttcacctcccccaggggggttccacctgggctctacagacatttaaggttggataattctatgtttcgtggggctgtcctatgagtcataggctgtgtagtgtcatctctgtcctctaccttccagatgctggtggta

SEQ ID NO: 176293 - DNA, 629 bp, Homo sapiens
tgctaatgataatctaagccattaacaagtcataatctttttgctggtggagggtcttgccttgaggttgatggctgctggctgatcaggctggtggatgctgaagtttggggcggctgtggcaaggactkaaaataagacaacaatgaggtttgctgcattgatcgactcttcctttcatgaatgacttctctgtagcatgcgatgctgtttgatagcattttacccacagcagaacttctttcaaaattggaatcattcctctcaaatcctgctgctacttaatgaactaaacttatctaatatcctaagacctttgttgtcatttcaacgacgttcacagtatcttccccaggagtagattccatctcaagaaaccactttctttgctcatccataaaaagcaactcttcttctgttcaaggtttgtcatgagattgtggccattcagccccatcttcaggctctacttctacttctagttctcttgctgtttcccccacacctgcactgacttcctgcactgaaatcttaaacccctcaaagtcatctagtggggctggaaacaactaagttcttccaaagccttgttcatgttgatattctgaggtcctcccatgaatcacaca

SEQ ID NO: 176294 - DNA, 629 bp, Homo sapiens
tgctaatgataatctaagccattaacaagtcataatctttttgctggtggagggtcttgccttgaggttgatggctgctggctgatcaggctggtggatgctgaagtttggggcggctgtggcaaggactgaaaataagacaacaatgaggtttgctgcattgatcgactcttcctttcatgaatgacttctctgtagcatgcgatgctgtttgatagcattttacccacagcagaacttctttcaaaattggaatcattcctctcaaatcctgctgctacttaatgaactaaacttatctaatatcctaagacctttgttgtcatttcaacgacgttcacagtatcttccccaggagkagattccatctcaagaaaccactttctttgctcatccataaaaagcaactcttcttctgttcaaggtttgtcatgagattgtggccattcagccccatcttcaggctctacttctacttctagttctcttgctgtttcccccacacctgcactgacttcctgcactgaaatcttaaacccctcaaagtcatctagtggggctggaaacaactaagttcttccaaagccttgttcatgttgatattctgaggtcctcccatgaatcacaca

SEQ ID NO: 176295 - DNA, 545 bp, Homo sapiens
atggcgaatagggaatcctttccagaaggtgtgcaatttactttgctcaggcccatcagaggaatcacagtctctggcagctatagctttacaaaatgtatttcttaagtagtaacacttggaagtcagaattactttttgctttgtaggctgcagagtggatgttgtgttggcaggtgtgaaaacaacattcatctcgcacatctccatcagcactcttgggcgatgaggtgcattgtcattaagcaggaatattttgaaagaaatcttttcttctgagaagtagatctcaacaggtaggcttaaaatatttagtaaaccatgctacaaacagatacgctgcgatacaggctttgtggttccatttacagagcacaggcagagtagatttagcataactcttaagggccctakgatttggggaatgctaaatgagcactggcttcaataaagttactaggtgcattactccctgacaagacagagagcctgtcctttggagctctgaagccaggcactgacttcttctctccagctatgaaagc

SEQ ID NO: 176296 - DNA, 573 bp, Homo sapiens
tgcctttgctgtaagagtgttggatgtggcacggtgctgtatctcatatcacagggcatctctcatgccctggagggaagaacttcaaggaaagcacagcgtatctatttcggctgctcagctactcacatgcagctcatgtgttctttctccaacacagggccttctacagggcagatttgatgctctgacaaatggagtgcacttagaaaggcttacctgcccccggaacagccttctcaagagaggggcaatgacatctacactgcccttgccttttaagcattttccattggctgtttcatgagaggaggtggataccatgactaagagaatgctgctgagaccacasaaatgacacaaagaacttcagcttataaagtcaaaacttggaaatggggttgactctttaaaatctttttatagatttaggggaatgcatgcagttggatttaggagtacacgtagatatactgtgtagtgctaagtcggtgctattagtgcacatatcacccaaatagagtacatatcaaaaacacacccacactcagacgttagccccggcactattca

SEQ ID NO: 176297 - DNA, 573 bp, Homo sapiens
tgcctttgctgtaagagtgttggatgtggcacggtgctgtatctcatatcacagggcatctctcatgccctggagggaagaacttcaaggaaagcacagcgtatctatttcggctgctcagctactcacatgcagctcatgtgttctttctccaacacagggccttctacagggcagatttgatgctctgacaaatggagtgcacttagaaaggcttacctgcccccggaacagccttctcaagagaggggcaatgacatctacactgcccttgccttttaagcattttccattggctgtttcatgagaggaggtggataccatgactaagagaatgctgctgagaccacacaaatgacasaaagaacttcagcttataaagtcaaaacttggaaatggggttgactctttaaaatctttttatagatttaggggaatgcatgcagttggatttaggagtacacgtagatatactgtgtagtgctaagtcggtgctattagtgcacatatcacccaaatagagtacatatcaaaaacacacccacactcagacgttagccccggcactattca

SEQ ID NO: 176298 - DNA, 525 bp, Homo sapiens
gtgtatgagcccaggtttgcaggctccgcatgactggtgctcaatgcagcaggtacagagtcaagagtgagtatttagaaatgttcacagtgcgctttgggaggccaaggcgagcggatcgcttgagtccagatgttcaaggccagcctaggcaacatagcaaaaccccgtttataccaaaaaaaaaagaaaaaagaaaagaaaaattgcccaaacatgtttgtacacacctgtagtcccagctacacaggaagcttgagcccagcaggttgaggctgcagtgagctgtgattgtgtcmctgcactctagcctgggtgacagagcgagaccctgtctcaaaaaaaaaaaaaaaaaaaaaactcatagtaattcgacatcgtcacatcacctaaacatatttttattgtattgtacaaaagtgttagtctacacagggttggaaattttttcttaatcacaggacgattaagaagattcaagctaggggaattgtgtcttacatcaaaatagcttagaactgctga

SEQ ID NO: 176299 - DNA, 525 bp, Homo sapiens
gtgtatgagcccaggtttgcaggctccgcatgactggtgctcaatgcagcaggtacagagtcaagagtgagtatttagaaatgttcacagtgcgctttgggaggccaaggcgagcggatcgcttgagtccagatgttcaaggccagcctaggcaacatagcaaaaccccgtttataccaaaaaaaaaagaaaaaagaaaagaaaaattgcccaaacatgtttgtacacacctgtagtcccagctacacaggaagcttgagcccagcaggttgaggctgcagtgagctgtgattgtgtccctgcactctagcctgggtgacagagcgagaccctgtctcaaaaaaaaaaaaaaaaaaaaaamtcatagtaattcgacatcgtcacatcacctaaacatatttttattgtattgtacaaaagtgttagtctacacagggttggaaattttttcttaatcacaggacgattaagaagattcaagctaggggaattgtgtcttacatcaaaatagcttagaactgctga

SEQ ID NO: 176300 - DNA, 540 bp, Homo sapiens
atatgtactctatttgggtgatatgtgcactaatagcaccgacttagcactacacagtatatctacgtgtactcctaaatccaactgcatgcattcccctaaatctataaaaagattttaaaaagtcaaaaccatttccaagttttgactttataagctgaagttctttctgtcatttctgtggtctcagcagcattctcttagtcatggtatccacctcctctcatgaaacagccaatggaaaatgcttaaaaggcaagggcagcgtagatgtcattgcccctctcttgagaaggctgttccgggggcaggtaagcctttctaagtgcactccatttgtcagagcatcaaatctgccctgtagaaggccctctgttggagaaagaacacatgagctgcatgtgartagctgagcagccgaaatagatacgctgtgctttccttgaagttcttccctccagggcctgagagatgccctctgatatgagctacagcaccctgccacatccaacactcttacagcaaaggcaacacactctg

SEQ ID NO: 176301 - DNA, 560 bp, Homo sapiens
ggagccagaaatcttggttttggcaaccacacagtcatttacttgtggtatagtcttaggctattagtaatatcttttcagggctcagtttcttcatttgtaaaatgacaatcaaaataaaaacacctatcttccagaaggmccatgataatttaatgggcaaatacaaaagccttttgcaaggtgtaaaggctatacaaatgttagccgttggtattactgccatgtttccaaatcttgtttcctccctagttgccacttgaaatatgacagccataacccggttctgtatacgccatggagataaggacagagtaagcaaggctgttcttcagggctaacaggggtaggggaggatgcttcctaccttccactagaaatctctgtaacaagaatttatgtctctctgacatctcatgccaacactgcatggcctgtggggaaaagggtcacagagagtacgcagataggttaacttattaccataaatgtgcttggaattgaagaagaaaatcaagtaagggcaaatgggaaaaaggtgctgtctgcagctggcattt

SEQ ID NO: 176302 - DNA, 582 bp, Homo sapiens
tttaattattttccttttcaatttcaatgtaaattcataaagagtttaagtaacatgcctaaattatttgagcagctgggattgtaacccacatctgcctgtttccaaggtcaattctctgaaccactattctattatacaatgagaatcccagaaggactgagctatcaggccttttggagcactaaaagttgtcatatttcaatgtcagctcctgtgctgttgtaatcaggttctatcatggcatctcccaccatttcccctgctaataccagttgcttctttttctcttcttctcataaaacttaccataaacttctaataacatttataaaacttatgataaaataactcatcaataycaaatatcagtagcctgatttttaatggattcagcagaaattcgacatcattttgaattccaaaagaacaaatttatctaatgtagaagataaacagtagcaagtgagtatttaattaggtttgttacttactatccatctaatttaaaaatgtactcttttacccctatgctttgaataatatgaataacaatgtgtacagaaaatatttgttatgctg

SEQ ID NO: 176303 - DNA, 560 bp, Homo sapiens
tatttatgtaaatatttctttaattaaacaatgcatgtctttagagtagggacttttactttttccctcctcagggtcctaatgccaggcacatggtggatattattgaatccatacagattgatcaaccagagaaggccactgcacagtctgttgcatagagaaggagaaatccatgctactaataatgtgaggggtcttaaatgttgataggttggggtaagccactgagtctagtcctgacacaggtacaaggacacttaggtgtagagtcagtggccttgtgacacctcttgaaatgaggaagagaaaaatgcatttgaacacatctgaaaaacatttactttcaatgtgcacacaggaatcaaatcatatgaaaaagttgaaacttttgagtcatagttgaaatttgaacttgaatctccatttgatttaattcagcaaatattgagggccaactaaatgtaatgatctgaactagtgacgggaaagtagataatatgtagackttgcctttaaagcacctatttagaagagaaaatatttatattcaaataata

SEQ ID NO: 176304 - DNA, 454 bp, Homo sapiens
acaaacctgttgacatcttgatcttcgacatcttacctccagaactgtgagaaaataatttttcttgcttaagctgcccagtttgtggtgatttgttwtggcagccttagcaaactcaggcatccgtccaactttttgcacctgatttcagatgcctggggtaactttatggttataatttgatccatgtctctgtccttatgggcaaagaatgcattgaccatatatcatgagaattctggcccacttggcagctctgtttcccactgtgagtttaactggcattctggttaatgcatctgtcttatgagcatgtataggatggctcattttgaatacctctcatacttgtgtgtgctggcaaaattgagctcctggacctgaataaccattttcacattgaaaatgttttagctgtaattcctattgtgtaacataaagtaagtatttagct

SEQ ID NO: 176305 - DNA, 299 bp, Homo sapiens
tttatttcattaccttggaagcaggattataagatgacagtttagtaatagtattttatcyagggcagtgaaaaaatattgtagctataacaaggatttgaacccacagttttctgtttccattatgatctggcccctcaacctgtgcaaagcaaggagacagctgagcagagttcagcctctgcctcagagctaaacattagtttggatcccgatagcctagcagatagtttctgaccatgtgaaatttgggcagatttcttattggtgttctttttttatgtcagtatatagtcttt

SEQ ID NO: 176306 - DNA, 553 bp, Homo sapiens
ggtgttctttttttatgtcagtatatagtctttgaaaacatatcattcaattcctgggccattatacatatattttccttctgaagggtgaaacaaatgcacagatttaagcatttttagtctttctaagttctccattacacgtgaaaagtttgctcatcactcatctaggtctaaattttccatcttctcttttctaaaatacaattttaatgaaccaaaatttattgaaatctcagctcctctaaaatttttcattatcctttctgagactttttcatgattttccttcaattttccaagtgttgtgatacatagcatctcataactataggtggattttgttttgatttataaaagatctcttatacttacagaatagaaagttggagttgcagatattcctcattcactgagatagtaaacaccatgaaccacaagaagagaatgggaggggccaaatgaaaggggctatagtgcwgattgtgactttttatttaacagactagctaactttaaggggagaaggaggagggaaagtagcttgcaacaa

SEQ ID NO: 176307 - DNA, 597 bp, Homo sapiens
tgaattccatcttgtctgatattaacattgagacctctactttctatttgtatttgcttgttatactgyagcttgtattttgtttccaattttgatcatatcattcttctgaacacttttatatataagcaatcgtatcagtcagggtttttggttgcaagcaacagaatccactttagtgattctgttagaaatttatttagaaaataagtttactaaagggtatttgatagctcacagtatttcaaggagagccaaagaatttgtccagggggctatgaagccaggacaatatccattcaccccacagaacttctctcaggcatggcccatcacacctgggcactgaccctgcagttcacacccctaacactgagcaatggaggactagatgagaacctctgccactgctattctgaaagctggatttctctccaccacaacacaccactccttccaggaagagactccacacagctctcctttcttatactgtcttcttccaaataaaagtctgactgacagaacccaggtcaattcctctgctctagcttctagggaggctggacattgaattgtagcttctagggaggctgg

SEQ ID NO: 176308 - DNA, 597 bp, Homo sapiens
tgaattccatcttgtctgatattaacattgagacctctactttctatttgtatttgcttgttatactgtagcttgtattttgtttccaattttgatcatatcattcttctgaacacttttatatataagcaatcgtatcagtcagggtttttggttgcaagcaacasaatccactttagtgattctgttagaaatttatttagaaaataagtttactaaagggtatttgatagctcacagtatttcaaggagagccaaagaatttgtccagggggctatgaagccaggacaatatccattcaccccacagaacttctctcaggcatggcccatcacacctgggcactgaccctgcagttcacacccctaacactgagcaatggaggactagatgagaacctctgccactgctattctgaaagctggatttctctccaccacaacacaccactccttccaggaagagactccacacagctctcctttcttatactgtcttcttccaaataaaagtctgactgacagaacccaggtcaattcctctgctctagcttctagggaggctggacattgaattgtagcttctagggaggctgg

SEQ ID NO: 176309 - DNA, 597 bp, Homo sapiens
tgaattccatcttgtctgatattaacattgagacctctactttctatttgtatttgcttgttatactgtagcttgtattttgtttccaattttgatcatatcattcttctgaacacttttatatataagcaatcgtatcagtcagggtttttggttgcaagcaacagaatccactttagtgattctgttagaaatttatttagaaaataagtttactaaagggtatttgatagctcacagtatttcaaggagagccaaagaatttgtccagggggctatgaagccaggacaatatccattcaccccacasaacttctctcaggcatggcccatcacacctgggcactgaccctgcagttcacacccctaacactgagcaatggaggactagatgagaacctctgccactgctattctgaaagctggatttctctccaccacaacacaccactccttccaggaagagactccacacagctctcctttcttatactgtcttcttccaaataaaagtctgactgacagaacccaggtcaattcctctgctctagcttctagggaggctggacattgaattgtagcttctagggaggctgg

SEQ ID NO: 176310 - DNA, 497 bp, Homo sapiens
aaagaaggcttatctatccattacggggaaaacttaaamgtggagtgttactacttcaagcagcactatccatattacaaataaaaacctaactaggaataagtgatttaaaaattcctattcaaagcaggcatatatcactacattgcaacgtgccacaaacaaaataaaactctaacacaggaaaattaattatgggatttaaaagttgaaaacacacctaaggaattcataattttatgaaggtttggcttataactgttattgattttagactgactatccctttactcttaggtaagtccaagctgatttatgaggagataaattattttgaaggttttactctttaggtagtttggtatttagtgccaaaatacccactttcaaaatagtggagaataaatgaatgatgttcagcagtatagaaaagtcctctacgttttcccttttcacctttagaacttaatcagcacttgggtgctaaatattttaag

SEQ ID NO: 176311 - DNA, 497 bp, Homo sapiens
aaagaaggcttatctatccattacggggaaaacttaaacgtggagtgttactacttcaagcagcactatccatattacaaataaaaacctaactaggaataagtgatttaaaaattcctattcaaagcaggcatatatcactacattgcaaygtgccacaaacaaaataaaactctaacacaggaaaattaattatgggatttaaaagttgaaaacacacctaaggaattcataattttatgaaggtttggcttataactgttattgattttagactgactatccctttactcttaggtaagtccaagctgatttatgaggagataaattattttgaaggttttactctttaggtagtttggtatttagtgccaaaatacccactttcaaaatagtggagaataaatgaatgatgttcagcagtatagaaaagtcctctacgttttcccttttcacctttagaacttaatcagcacttgggtgctaaatattttaag

SEQ ID NO: 176312 - DNA, 552 bp, Homo sapiens
atgctcattatttggaatcatgggaaagaaggcttatctatccattacggggaaaacttaaacgtggagtgttactacttcaagcagcactatccatattacaaataaaaacctaactaggaataagtgatttaaaaattcctattcaaagcaggcatatatcactacattgcaacgtgccacaaacaaaataaaactytaacacaggaaaattaattatgggatttaaaagttgaaaacacacctaaggaattcataattttatgaaggtttggcttataactgttattgattttagactgactatccctttactcttaggtaagtccaagctgatttatgaggagataaattattttgaaggttttactctttaggtagtttggtatttagtgccaaaatacccactttcaaaatagtggagaataaatgaatgatgttcagcagtatagaaaagtcctctacgttttcccttttcacctttagaacttaatcagcacttgggtgctaaatattttaaggaccaagaacaactgaatatgtgagagatct

SEQ ID NO: 176313 - DNA, 468 bp, Homo sapiens
tgaaggaggtctttgggatacttaagaatgtaagctctcttggataaagtctgagatgaactatccttatttcaaaatccacttacagagtatagtgttaaaggttagctttaagtgtattgacttcatcataatcttatacattaatatttaagtttctctggaaggattgtggagagacctttttctgctagaraaagtgtgcaacatggtaaagagaactgtaggaagagaaatggcagccctgcttgagcagtgagaataataaaatggtcatctggagagctccagagacagttggcaaggttcaaattcaagctttaccaggtaataactatataaggttgtcactgtgcaacggagataatatatagtacattcacctcatagtgttgttgtaaggattatataaatacaggtaatgtatctgacatgtagtaggcagtcaataaatgtttgctattatca

SEQ ID NO: 176314 - DNA, 553 bp, Homo sapiens
tacaggtctgttggagtttgctggaggcacgctccagagcctttttgcctggatatcaccagtggaggctgtagaacagcaaagattgccgcctgttcctccctctggargctttgtctcagaggactacctgccagatgccagccagagctctcctgtatgaggtgtctgttgacccctgctgggagatgtctcccactcaggagtcatgggtgtcagggacccatttgaggaggcagtctgtcccttagcagagctagagcactgtgctgggagatctgctgctctcttcagagccaacaggcaggaatatttaagtctgttgaagctgcgcccacagctgtcccttcacccaggtgctctgtcccagggagatggaagctttatctataagtacctgactgaggctgctgcctttctttcagtgatgccctggcccagagagaaggaatgtagagaggcagtctggctacagcagctttgctgagctatggtgggctccacccagttcaaacttcccagcagctttgtttacactatgagtggaaaacca

SEQ ID NO: 176315 - DNA, 553 bp, Homo sapiens
tacaggtctgttggagtttgctggaggcacgctccagagcctttttgcctggatatcaccagtggaggctgtagaacagcaaagattgccgcctgttcctccctctggaggctttgtctcagaggactacctgccagatgccagccagagctctcctgtatgaggtgtctgttgacccctgctgggagatgtctcccactcaggagtcatgggtgtcagggacccatttgaggaggcagtctgtcccttagcagagctagagcactrtgctgggagatctgctgctctcttcagagccaacaggcaggaatatttaagtctgttgaagctgcgcccacagctgtcccttcacccaggtgctctgtcccagggagatggaagctttatctataagtacctgactgaggctgctgcctttctttcagtgatgccctggcccagagagaaggaatgtagagaggcagtctggctacagcagctttgctgagctatggtgggctccacccagttcaaacttcccagcagctttgtttacactatgagtggaaaacca

SEQ ID NO: 176316 - DNA, 553 bp, Homo sapiens
tacaggtctgttggagtttgctggaggcacgctccagagcctttttgcctggatatcaccagtggaggctgtagaacagcaaagattgccgcctgttcctccctctggaggctttgtctcagaggactacctgccagatgccagccagagctctcctgtatgaggtgtctgttgacccctgctgggagatgtctcccactcaggagtcatgggtgtcagggacccatttgaggaggcagtctgtcccttagcagagctagagcactgtgctgggakatctgctgctctcttcagagccaacaggcaggaatatttaagtctgttgaagctgcgcccacagctgtcccttcacccaggtgctctgtcccagggagatggaagctttatctataagtacctgactgaggctgctgcctttctttcagtgatgccctggcccagagagaaggaatgtagagaggcagtctggctacagcagctttgctgagctatggtgggctccacccagttcaaacttcccagcagctttgtttacactatgagtggaaaacca

SEQ ID NO: 176317 - DNA, 578 bp, Homo sapiens
ctacaaagaaaaagagaagagagagtcatgggattcatctcacaaggtggaaatctttagatggttattaaaatattaaatgaataaaatggaaattaatggggttaaaacaaaagtctaaatacaacactatcaaaggctgagtagatcaaagggagacttgrctggtcccccaatactaaagggccccaaaccagtttgctctattttccccagtctgaataaatttaaaaagtcagaatattttaaaagattacaatgagaaacccatccgtggcattgtctggggtaatggctatactgattaatgaagataaagattgacagaaaggccagggtcccttggcttaatctctggctgagggcccaaagtctttcgcacaagagagggtaaaatagtctgcaagagaagaagagaagttcctgggacaagaacttaaaaatgtaaaaatggataggattataaaagttgatatatttgaacacacctcatgtgaagcagtttggtcacttttatctgattgtattatgggaatgagcgttgtatctgattgggaaattcatctacctagtactgt

SEQ ID NO: 176318 - DNA, 578 bp, Homo sapiens
ctacaaagaaaaagagaagagagagtcatgggattcatctcacaaggtggaaatctttagatggttattaaaatattaaatgaataaaatggaaattaatggggttaaaacaaaagtctaaatacaacactatcaaaggctgagtagatcaaagggagacttggctggtcccccaatactaaagggccccaaaccagtttgctctattttccccagtctgaataaatttaaaaagtcagaatattttaaaagattacaatgagaaacccatccgtggcattgtctggggtaatggctatactgattaatgaagataaagattgacagaaaggccagggtcccttggcttaatctctggctgagggcccaaagtcyttcgcacaagagagggtaaaatagtctgcaagagaagaagagaagttcctgggacaagaacttaaaaatgtaaaaatggataggattataaaagttgatatatttgaacacacctcatgtgaagcagtttggtcacttttatctgattgtattatgggaatgagcgttgtatctgattgggaaattcatctacctagtactgt

SEQ ID NO: 176319 - DNA, 401 bp, Homo sapiens
agggtttgaaatttggctttgttttttggttgccakgtaagcttaagagattcacttaatctgtctgtggtatatgaatttaattatttgtagtaatcataacttatgagtttatttcaagttttaacaagccagtacatttaaagtgaaattatgttatttttaactcaactgagatgcctttggtttagctgaaggaaagtaagagtcatgcttgataaagatattttaataaaaaggagagactgagtaattgccaaaaaaaaaaaaagagagagagacagaacattcgtcttagcaagagaagtttgataatgaaatagagataaagttaggtctgagtatttgtctgcatctgcaaggatggatgagtcatgtctaaagagggacaatagaggtac

SEQ ID NO: 176320 - DNA, 401 bp, Homo sapiens
agggtttgaaatttggctttgttttttggttgccaggtaagcttaagagattcacttaatctgtctgtggtatatgaatttaattatttgtagtaatcataacttatgagkttatttcaagttttaacaagccagtacatttaaagtgaaattatgttatttttaactcaactgagatgcctttggtttagctgaaggaaagtaagagtcatgcttgataaagatattttaataaaaaggagagactgagtaattgccaaaaaaaaaaaaagagagagagacagaacattcgtcttagcaagagaagtttgataatgaaatagagataaagttaggtctgagtatttgtctgcatctgcaaggatggatgagtcatgtctaaagagggacaatagaggtac

SEQ ID NO: 176321 - DNA, 401 bp, Homo sapiens
agggtttgaaatttggctttgttttttggttgccaggtaagcttaagagattcacttaatctgtctgtggtatatgaatttaattatttgtagtaatcataacttatgagtttatttcaagttttaacaagccagtrcatttaaagtgaaattatgttatttttaactcaactgagatgcctttggtttagctgaaggaaagtaagagtcatgcttgataaagatattttaataaaaaggagagactgagtaattgccaaaaaaaaaaaaagagagagagacagaacattcgtcttagcaagagaagtttgataatgaaatagagataaagttaggtctgagtatttgtctgcatctgcaaggatggatgagtcatgtctaaagagggacaatagaggtac

SEQ ID NO: 176322 - DNA, 401 bp, Homo sapiens
agggtttgaaatttggctttgttttttggttgccaggtaagcttaagagattcacttaatctgtctgtggtatatgaatttaattatttgtagtaatcataacttatgagtttatttcaagttttaacaagccagtacatttaaagtgaaattatgttatttttaactcaactgagatgcctttggtttagctgaaggaaagtaagagtcatgcttgataaagatattttaataaaaaggagagactgagtaattgccaaaaaaaaaaaaagagagagagacagaayattcgtcttagcaagagaagtttgataatgaaatagagataaagttaggtctgagtatttgtctgcatctgcaaggatggatgagtcatgtctaaagagggacaatagaggtac

SEQ ID NO: 176323 - DNA, 597 bp, Homo sapiens
caaattttaagtgtatgtacattttgaccataaacagattaaataaaggaagctacaagtctgtcatttctaaaatggagctgattaagaaatttaccttatggtactgcactgaggatttaatgaattcttatataaagcatactgtagaatacctggcacaaagtmaacactccgtaaatgctagttgaaacacagacatacattcgacacctagtcattttttctccctataaaatacagcctaaaactaaactcacttaccctatattggagtgaacttttcaaaattcatgtgaattacataacacatcttatggtcttatatggctggcctcaatgcaccttttgagtttaatctctcttcgttcgtcagtctcttatgcatgatttcactgaatatcctgtagaactacaagaactagaactactagaactagtacaaacttttccccctcttgccatttcctattatttgcccaactcctttacacatctaaagacagctgagtgtcacttcctaaataggtgcttctccagagacttgtagttttactgtcaggttccttcatagattgtgaactccttgaagaaatg

SEQ ID NO: 176324 - DNA, 597 bp, Homo sapiens
caaattttaagtgtatgtacattttgaccataaacagattaaataaaggaagctacaagtctgtcatttctaaaatggagctgattaagaaatttaccttatggtactgcactgaggatttaatgaattcttatataaagcatactgtagaatacctggcacaaagtaaacactccgtaaatgctagttgaaacacagacatacattcgacacctagtcattttttctccctataaaatacagcctaaaactaaactcacttaccctatattggagtgaacttttcaaaattcatgtgaattacataacacatcttatggtcttatatggctggcctcaatgcaccttttgagtttaatctctcwtcgttcgtcagtctcttatgcatgatttcactgaatatcctgtagaactacaagaactagaactactagaactagtacaaacttttccccctcttgccatttcctattatttgcccaactcctttacacatctaaagacagctgagtgtcacttcctaaataggtgcttctccagagacttgtagttttactgtcaggttccttcatagattgtgaactccttgaagaaatg

SEQ ID NO: 176325 - DNA, 375 bp, Homo sapiens
agttttactgtcaggttccttcatagattgtgaactccttgaagaaatgggttgtttttgccccattsccagaacatagaaagtctttataaatgttgacaggaatatgagtatttttctcacaaaattgattttagggtgattgctattctgtatctttagctacatttttaacctatcagaattataactctctgataagggaggggaattattaataacagaagaagcaggttctgtttcgaagagaagtgcctgttttagagaaagagcaaatcagacagagagacatatcatcatgtgaaattacttttatgataaactcttctttatctataagagaaattagaggactcattaactagaaacttgcct

SEQ ID NO: 176326 - DNA, 393 bp, Homo sapiens
aatctcagtatggtctttgaggacagtctcccctgtgccccacagttggctcagctgaggcygcttgtaattaattatccccaaattctggatgcatttcaaaatactgaaatgttctgatttttaaactctggcaatgacatttagctttacggaaacatttctttacactgttgcccagaattaccaactgccagaataaattatggacatacattataatcactgtccatttatggatggccacaaagatatctatgttgtggagtgacagtctttcctgtgctcatccaggtgcattgtacaagtatatcataaatgctttaagttaaatgatgttcatttctctgctttaacaccttagaattggacagaataaacaaaagggaattc

SEQ ID NO: 176327 - DNA, 424 bp, Homo sapiens
gaattcccttttcagtgtcctgtgccaccatgtttttgaagcatataccatctgagaagaatctcagtatggtctttgaggacagtctcccctgtgccccacagttggctcagctgaggctgcttgtaattaattatccccaaattctggatgcatttcaaaatactgaaatgttctgatttttaaactctggcaatgacatytagctttacggaaacatttctttacactgttgcccagaattaccaactgccagaataaattatggacatacattataatcactgtccatttatggatggccacaaagatatctatgttgtggagtgacagtctttcctgtgctcatccaggtgcattgtacaagtatatcataaatgctttaagttaaatgatgttcatttctctgctttaacaccttaga

SEQ ID NO: 176328 - DNA, 428 bp, Homo sapiens
atcagaattcccttttcagtgtcctgtgccaccatgtttttgaagcatataccatctgagaagaatctcagtatggtctttgaggacagtctcccctgtgccccacagttggctcagctgaggctgcttgtaattaattatccccaaattctggatgcatttcaaaatactgaaatgttctgatttttaaactctggcaatgacatttagctttacggaaacatttctttacactgttgcccagaattaccaactgccagaataaattatggacayacattataatcactgtccatttatggatggccacaaagatatctatgttgtggagtgacagtctttcctgtgctcatccaggtgcattgtacaagtatatcataaatgctttaagttaaatgatgttcatttctctgctttaacaccttaga

SEQ ID NO: 176329 - DNA, 440 bp, Homo sapiens
cctgtgccaccatgtttttgaagcatataccatctgagaagaatctcagtatggtctttgaggacagtctcccctgtgccccacagttggctcagctgaggctgcttgtaattaattatccccaaattctggatgcatttcaaaatactgaaatgttctgatttttaaactctggcaatgacatttagctttacggaaacatttctttacactgttgcccagaattaccaactgccagaataaattatggacatacattataatcactgyccatttatggatggccacaaagatatctatgttgtggagtgacagtctttcctgtgctcatccaggtgcattgtacaagtatatcataaatgctttaagttaaatgatgttcatttctctgctttaacaccttagaattggacagaataaacaaaagggaattcaagtga

SEQ ID NO: 176330 - DNA, 440 bp, Homo sapiens
cctgtgccaccatgtttttgaagcatataccatctgagaagaatctcagtatggtctttgaggacagtctcccctgtgccccacagttggctcagctgaggctgcttgtaattaattatccccaaattctggatgcatttcaaaatactgaaatgttctgatttttaaactctggcaatgacatttagctttacggaaacatttctttacactgttgcccagaattaccaactgccagaataaattatggacatacattataatcactgtccatttatggatggccacaaagatatctatgttgtggagtgacagtctttcctgtgctcatccaggtrcattgtacaagtatatcataaatgctttaagttaaatgatgttcatttctctgctttaacaccttagaattggacagaataaacaaaagggaattcaagtga

SEQ ID NO: 176331 - DNA, 587 bp, Homo sapiens
tgaagaaatagttgttctcccccacccccatggaaatccktatattcagatggagattagattacatgatatacgaatttccctctaagaagtgtataatctgtaacatgtaattgtgaattaataaatgagcaaatatattataaaaatgtaaccaagcatatactcagggagaaaagatacagagtctcaaattctgttaatacagaggtgataacaaaccaattatatgtagttatcaaaataattattctactgtttatcaaacttaattacatgacaaacagaagaagtacatgacaataataacatgattaattcaaattctagcagatcctttaaaaaatctagaatatagatgttttcagatattctagcagtattcagctatgcagatgcaatctcttaaacaagtggaatcaccatttaaaactagttatttgcttgggatgactgactagcagtcattgactataatcaatcttgtaggcttgatttatgaataagaattttgcggctgtgaaagctgaagttaaggaggtgggggagcattaaagaggatcatcaaaagttctcatacatgaatt

SEQ ID NO: 176332 - DNA, 450 bp, Homo sapiens
cctcactgagatatacacttgcctgcctaatcctgtctgtctatagagagcactggtgtgtagtaactgtgatcttgtttcagtgactgcaagtggttatgaaccaaactccctactctactgtccaagaacttctcaggtgatccgttcccttccacagatgacagttttacctttagatactgtataaacttattttgagtgttctcaaatgtagcataaattaataataaataaataaacaagcaactttgttttttgagtgcaaatttgaattttggacccagccagaatttatctgaagcacaatttggtgaataaccttctgaacamgcaggggtatacgttttaggggtcaaattgctctggggctttcaagaccttaagcaaatggcatatgcaaagcaagttctattcttctgaaatcacatgggttagtctttttgaata

SEQ ID NO: 176333 - DNA, 450 bp, Homo sapiens
cctcactgagatatacacttgcctgcctaatcctgtctgtctatagagagcactggtgtgtagtaactgtgatcttgtttcagtgactgcaagtggttatgaaccaaactccctactctactgtccaagaacttctcaggtgatccgttcccttccacagatgacagttttacctttagatactgtataaacttattttgagtgttctcaaatgtagcataaattaataataaataaataaacaagcaactttgttttttgagtgcaaatttgaattttggacccagccagaatttatctgaagcacaatttggtgaataaccttctgaacacgcaggggtatacgttttaggggtcaaattgctctggggctttcaagaccttaagcaaatggcatatgcaragcaagttctattcttctgaaatcacatgggttagtctttttgaata

SEQ ID NO: 176334 - DNA, 503 bp, Homo sapiens
gaaacgttcaaaaatgaggttggctaatgcagtgagaaaagaaatacaaattagaacaaaagaatactatttcccctaaaattgacaaaagtctacttaaccgacagtatctaatgtgagctagagtgtgatgaagcatacccttgtcaactttggtgataaggcaatttagcatttccacaaaaattttaagtgaaaatatcattagtcatagcaattctacttctctaatacaattataaggaagccatatcacaaacatatggagatatatacatactgacatgtacatatacacatacacatatatacactatgttacatacacccacattcattatatcattatgaaattaaagaacaactggaaaacaccttttggttcctaataagggaagatttaaatactttactataaagctatattattatactttatgcgaaaatcaaaaggaagatatattctatatttctagcaagaaaaraaagttcacatatgttgt

SEQ ID NO: 176335 - DNA, 595 bp, Homo sapiens
acatagagcatgatatataataatctcacagtaaatatttgttgaataaacaaataaatgacaaagtaaaacttcccataatttttcatataatttctgcaaacttctgacttttttaaagaaattgaaagtttaaagcctcctatttttcttgtaaagattgatacgcatgctttcaacatagataatttattagaattgcagccccgccgtgcttcacataccacctctaggacactgcttattaatgtcagaagagtaagtgacatgtcaagtttccagaaccatgccaatttctaaaaacccatttgttagctatggtacagaaacaaaatatgcccagcagttttcaactgggctaataaatttaattaaacattctcataaaagcaaagaaaacttttctatttaaactttcttacagaggaaaccacgtttgttgtcttgcttcttgatggaagaaacctaaacattakctacctaaaagacggatcatccatcttgtcatccatctgcaaagatattttttgaaaacatttccactgacagcttactttattttgccaatccatttaaagagacagcaccaaagttg

SEQ ID NO: 176336 - DNA, 546 bp, Homo sapiens
gcacagagcatctaagagataaattagtgtgaaaattgaaataaattgtagacacttagtgtccacagaaaattaaggaattgctagtggaaaacccatatatttggtttcagaagtgttaggagcaaagtaacagttattcctagtttttttttttttttttttcctttatggcacttgcttgtttgtacttcaatgtctcactgctttattctaatctcctatgtttccagtttgatcaatatctaagaaaaactcacttaccataagttcttccaattcaccttcaacattaggcagaaatacttttatataaatmgaattattgtgccacttattgataagttaccatacactatgctagtcttccatatatattgtttaatttagtgcatataaaaaacagtttgggatcacaccacatttgtcttttcataactggcttatttaacttagcataatgttctcaaagttcatcatgtcgtggcatatgtcagaatttcttttctttttaaggctgaataatattccattgtatgatacacc

SEQ ID NO: 176337 - DNA, 552 bp, Homo sapiens
gtatttatatgttatgaatattataacatatttatatgaatatatatttaccagttgttttggcttctctggataattatgattaatacacaggaatatcaactgacagtgtggctttagaaggcaaggcagaattttcagtttgaggacaaagaagaaggtatgaaataggcatctgggctgggcacagtggcttacgcctgtartcccagcactttgggaggccgaggtgggtggatcccaaggtcaggagttcaagaccagccaggccaatatggtgaaaccccgtctttactaaaaatacaaaaattagctgggtatggtggtgcacacctgtagtcccagctactcaggaggctgaggcaggagagtcacttgaacctgggaggcagaggttgcagtgaaccgagattgtgccactgcactccagcctgggcaaccgagtgagactcagtttcagaaaaaaaaaaaaaaaaaaaaaaaaattaaaaacaaaaagaaataggcatctgttacagtgaaagaattaaggtactgttaaatttacagaat

SEQ ID NO: 176338 - DNA, 552 bp, Homo sapiens
gtatttatatgttatgaatattataacatatttatatgaatatatatttaccagttgttttggcttctctggataattatgattaatacacaggaatatcaactgacagtgtggctttagaaggcaaggcagaattttcagtttgaggacaaagaagaaggtatgaaataggcatctgggctgggcacagtggcttacgcctgtaatcccagcactttgggaggccgaggtgggtggatcccaaggtcaggagttcaagaccagccaggccaatatggtgaaaccccgtctytactaaaaatacaaaaattagctgggtatggtggtgcacacctgtagtcccagctactcaggaggctgaggcaggagagtcacttgaacctgggaggcagaggttgcagtgaaccgagattgtgccactgcactccagcctgggcaaccgagtgagactcagtttcagaaaaaaaaaaaaaaaaaaaaaaaaattaaaaacaaaaagaaataggcatctgttacagtgaaagaattaaggtactgttaaatttacagaat

SEQ ID NO: 176339 - DNA, 552 bp, Homo sapiens
gtatttatatgttatgaatattataacatatttatatgaatatatatttaccagttgttttggcttctctggataattatgattaatacacaggaatatcaactgacagtgtggctttagaaggcaaggcagaattttcagtttgaggacaaagaagaaggtatgaaataggcatctgggctgggcacagtggcttacgcctgtaatcccagcactttgggaggccgaggtgggtggatcccaaggtcaggagttcaagaccagccaggccaatatggtgaaaccccgtctttactaaaaatacaaaaattagctgggtatggtggtgcacacctgtagtcccagctactcaggaggctgaggcaggagagtcacttgaacctgggaggcagaggttgcagtgaaccgagattgtgccactgcactccagcctgggcaaccgagtgagactcagtytcagaaaaaaaaaaaaaaaaaaaaaaaaattaaaaacaaaaagaaataggcatctgttacagtgaaagaattaaggtactgttaaatttacagaat

SEQ ID NO: 176340 - DNA, 622 bp, Homo sapiens
acaatatacccttataatttatcgggtattgtcaccattttttttcaaaaaaacattttttaatgattcttaattgtgaaataagtgttggtagtatttttcaacattaatggtaataaaaaataaaaagatctaagcttattagctatatataaagaaaacaaagtagaataaaaacaagataaattttattttcatttaagggattcaactcttaaaatgtttgcctctgacwttactgaaaaaaggaagttctgtatctgtttacataacagttatgctatattctgttaattcacaagaaattgaacatgaagggatgcatcaatagtccaaactccgtgtctaggggtgtatttaatgaagccacgcaagaaaggcctagaagctgcacaaatggcactagtttcaattgaaattcttagtaattcaggaggtctactttctacccaaataggtgtcacctttcatttcccaacaacaacagcaacagcaacaaaggtagaccttgttgctacaaataccttgaggtaggtatttgtttggttactcagtaagaacttactatgtatcatgcactactgtttcaaacttggaataaacagaacaaataagtactcct

SEQ ID NO: 176341 - DNA, 622 bp, Homo sapiens
acaatatacccttataatttatcgggtattgtcaccattttttttcaaaaaaacattttttaatgattcttaattgtgaaataagtgttggtagtatttttcaacattaatggtaataaaaaataaaaagatctaagcttattagctatatataaagaaaacaaagtagaataaaaacaagataaattttattttcatttaagggattcaactcttaaaatgtttgcctctgacattactgaaaaaaggaagttctgtatctgtttacataacagttatgctatattctgttaattcacaagaaattgaacatgaagggatgcatcaatagtccaaactccgtgtctaggggtgtatttaatgaagccacrcaagaaaggcctagaagctgcacaaatggcactagtttcaattgaaattcttagtaattcaggaggtctactttctacccaaataggtgtcacctttcatttcccaacaacaacagcaacagcaacaaaggtagaccttgttgctacaaataccttgaggtaggtatttgtttggttactcagtaagaacttactatgtatcatgcactactgtttcaaacttggaataaacagaacaaataagtactcct

SEQ ID NO: 176342 - DNA, 622 bp, Homo sapiens
acaatatacccttataatttatcgggtattgtcaccattttttttcaaaaaaacattttttaatgattcttaattgtgaaataagtgttggtagtatttttcaacattaatggtaataaaaaataaaaagatctaagcttattagctatatataaagaaaacaaagtagaataaaaacaagataaattttattttcatttaagggattcaactcttaaaatgtttgcctctgacattactgaaaaaaggaagttctgtatctgtttacataacagttatgctatattctgttaattcacaagaaattgaacatgaagggatgcatcaatagtccaaactccgtgtctaggggtgtatttaatgaagccacgcaagaaaggcctagaagctgcacaaatggcactagtttcaattgaaattcttagtaattcaggaggtctactttctacccaaataggtgtcayctttcatttcccaacaacaacagcaacagcaacaaaggtagaccttgttgctacaaataccttgaggtaggtatttgtttggttactcagtaagaacttactatgtatcatgcactactgtttcaaacttggaataaacagaacaaataagtactcct

SEQ ID NO: 176343 - DNA, 622 bp, Homo sapiens
acaatatacccttataatttatcgggtattgtcaccattttttttcaaaaaaacattttttaatgattcttaattgtgaaataagtgttggtagtatttttcaacattaatggtaataaaaaataaaaagatctaagcttattagctatatataaagaaaacaaagtagaataaaaacaagataaattttattttcatttaagggattcaactcttaaaatgtttgcctctgacattactgaaaaaaggaagttctgtatctgtttacataacagttatgctatattctgttaattcacaagaaattgaacatgaagggatgcatcaatagtccaaactccgtgtctaggggtgtatttaatgaagccacgcaagaaaggcctagaagctgcacaaatggcactagtttcaattgaaattcttagtaattcaggaggtctactttctacccaaataggtgtcacctttcatttcccaacaacaacarcaacagcaacaaaggtagaccttgttgctacaaataccttgaggtaggtatttgtttggttactcagtaagaacttactatgtatcatgcactactgtttcaaacttggaataaacagaacaaataagtactcct

SEQ ID NO: 176344 - DNA, 588 bp, Homo sapiens
cttgggaacttgttagactctcaggccccatccttcatcagaatattcatkttttgtaagatccccaggtgcttttcatacatattaaagtttcaaaatcatgggggaggacatctaatttttttaatgtattgggtaaggaagatattataagtcaatgtgaaatgctaaatttaaatcatgtggtttttagaggcagaagggttcctaatgtatattaaaaaaaacttcctttctataaaatagcagctcgtttgcaatttcttaatatcagtttttgatttctagtattaccatgatgtgttatgaggtctattttttaaagaaaatggaaaatggtaatggaaatgaaagtacctgtggctataaaaaatcatgaaacacaggtcttcatgactgatggagaaaattactccatctagtgttgtcttctgcaactttcagacataaggtaggaaaggacctaatattgttttgaggggccaattactgcagagtcaacatatttcaacaatggtaaatagtgcagtaagaaatatctctgaggttaaaccaaaactatgattatattatcatatatcatattgt

SEQ ID NO: 176345 - DNA, 588 bp, Homo sapiens
cttgggaacttgttagactctcaggccccatccttcatcagaatattcattttttgtaagatccccaggtgcttttcatacatattaaagtttcaaaatcatgggggargacatctaatttttttaatgtattgggtaaggaagatattataagtcaatgtgaaatgctaaatttaaatcatgtggtttttagaggcagaagggttcctaatgtatattaaaaaaaacttcctttctataaaatagcagctcgtttgcaatttcttaatatcagtttttgatttctagtattaccatgatgtgttatgaggtctattttttaaagaaaatggaaaatggtaatggaaatgaaagtacctgtggctataaaaaatcatgaaacacaggtcttcatgactgatggagaaaattactccatctagtgttgtcttctgcaactttcagacataaggtaggaaaggacctaatattgttttgaggggccaattactgcagagtcaacatatttcaacaatggtaaatagtgcagtaagaaatatctctgaggttaaaccaaaactatgattatattatcatatatcatattgt

SEQ ID NO: 176346 - DNA, 588 bp, Homo sapiens
cttgggaacttgttagactctcaggccccatccttcatcagaatattcattttttgtaagatccccaggtgcttttcatacatattaaagtttcaaaatcatgggggaggacatctaatttttttaatgtattgggtaaggaagatattataagtcaatgtgaaatgctaaatttaaatcatgtggtttttagaggcagaagggttcctaatgtatattaaaaaaaacttcctttctataaaatagcagctcgtttgcaatttcttaatatcagtttttgatttctartattaccatgatgtgttatgaggtctattttttaaagaaaatggaaaatggtaatggaaatgaaagtacctgtggctataaaaaatcatgaaacacaggtcttcatgactgatggagaaaattactccatctagtgttgtcttctgcaactttcagacataaggtaggaaaggacctaatattgttttgaggggccaattactgcagagtcaacatatttcaacaatggtaaatagtgcagtaagaaatatctctgaggttaaaccaaaactatgattatattatcatatatcatattgt

SEQ ID NO: 176347 - DNA, 588 bp, Homo sapiens
cttgggaacttgttagactctcaggccccatccttcatcagaatattcattttttgtaagatccccaggtgcttttcatacatattaaagtttcaaaatcatgggggaggacatctaatttttttaatgtattgggtaaggaagatattataagtcaatgtgaaatgctaaatttaaatcatgtggtttttagaggcagaagggttcctaatgtatattaaaaaaaacttcctttctataaaatagcagctcgtttgcaatttcttaatatcagtttttgatttctagtattaccatgatgtgttatgaggtctattttttaaagaaaatggaaaatggtaatggaaatgaaagtacctgtggctataaaaaatcatgaaacacaggtcttcatgactgatggagaaaattactccatctagtgttgycttctgcaactttcagacataaggtaggaaaggacctaatattgttttgaggggccaattactgcagagtcaacatatttcaacaatggtaaatagtgcagtaagaaatatctctgaggttaaaccaaaactatgattatattatcatatatcatattgt

SEQ ID NO: 176348 - DNA, 522 bp, Homo sapiens
tcacttgggaatcttgttcaaatgcagattcttacacaactggggtgggcttgagattccacatttctaagaagctctttggtgatggtggtgctgatgctttttgtctgcaaataacaatttgaatgttagggaggtataatactttcctcagttagtaagatggacccwggtaagtctgaccatcaatagacagatttgataatattgacctaaatggaccatgtttaatacaatccaaacttgatcatggtaataatgatgtggtggtaaagaatggaattatcttactaacaatacaagtagaatcagtacaatattattagtattggtttgcttatttttgagggaagcatattatgaaatatacttgtgtaaattataaaaagccatacgatttttaaattgcttttccaagccaaaaaaagaaaaacaagtattttaatatggaaacaactttacgtctgctatacacttactagcagcccttctagtaggtttgtatatattttcttgtttcat

SEQ ID NO: 176349 - DNA, 537 bp, Homo sapiens
agtctgtcttttgttctattcaggcctttgartgcttggacaaggcccacccacattatgaagggcaatctctttacttacaagccaccaattcaaacgcaaatctcatcaaaaaatgccctcataggaacatccagaataatgtttgatcaaacttctgggcactgtgtccagccaaattgatgcataaacctatccattaaaccctgctttttatttcatcaagaaaacagaaggcttccatgctgcatagtgttcatggacccttggtggtgtacatttcacccattattactctgctgtgtgcccaggaattagtacgctctatggacaacatcaatttgttctttcatcatttggctttcatttgagtttgctaaatgctaatctttggcagcagatagaagagggctggtagtgaggtcaatatatgtttatcctctatatatggtcaactagggatgccaggattttcagccaaagttcatagcttctctcaaggtgtgtctctttgtataactttcttctcttgaattc

SEQ ID NO: 176350 - DNA, 596 bp, Homo sapiens
gggaggtggaggcaggcgggccatgaggtcaggaaattgagaccatcctgccaacatggtgaaacactgtttctactaaaatacaaaaaaattagctgggcatggtggtgcacacctgtagtcccagctacttgggaggctgaggcaggggaatctcttgaacctgggaggcggagattgcaatgagccaagattgcaccactgcactccagcctggtgacagagcaagactctgtctcaaaaaaaaaaaagaaatacaactttatgtgatataatgaaactgttttgtaccatttattggacacgtactctatgtggagtgctgtgttggttttttttgcttrtattaccacatatctttataagaacttagtacggcactgttataatctctgacctacaggaaaatgtaatgaagttcattgaagttcgtatgcctaattttagccaagtagtaaaaaggagagactggatttgagggaagcttcattgggatttaaaatccagttataccactaaacaaaaatcttcttttatgaatttttcttatgccctgaatttcctcccattcacaatgaaagctgtactgttgttgt

SEQ ID NO: 176351 - DNA, 572 bp, Homo sapiens
ggaatttccctgtatgattgctgatgaactaactcttgttatttcaacctttccttgtgtcaaagttcagccttaaaatatggcactattcagctttgtagatgcatcataaatgatatgkttatttgatgtacaattttttgttgtgacttatttctaaacaattctgggtaatcccatgggcctgaatctgcactctatgggtctttccttcacaaataaacacactctgttaatgtcaccacctgcaaacatctgtggatgtactctgctcacagatgggtttgcagtgaaaagacttttatggatcctcttgatgctcagctgtaaaagaataaagaaaagtctgactaaatcttgcaaaagaaaaattgcacctgacaaaattaaactgctgtttatctgagaataccatgataagggagagaggacagaacacagctgatctcaactctgctgaaacaaaagataggcggcttgttagtcatgagggaaatattaaggcagtcttgccttataagacaagaaatataagacagtcaatgtctttgtctgtaagagactagtaatta

SEQ ID NO: 176352 - DNA, 510 bp, Homo sapiens
agcagttgatgaaggggtttcctgaatgacattctgtaaaaatctactttgattttgtatttacaaccatagtcagcaagagatgaatgaatgcaatggcatagaatactctgaaacaaattatagttccttaaaatagaaaaacaataaaakacctactgtctagaatggtaataactgaactctgctgtaaactgatttctatctctgtaacaatttttcaaattggagaactgggaaacactcagtaatggtagaactctgaaagataatattcaccaaaacaactgggattgctaaaatcaaaacatcaccactattaattttgctgagaaataaattggtttctcatgagtgttattgtttgttggaaaaatattcgtgcattttctctcttggggctttgcaacattgtaagaattcccctcaggctgagactcacagtcaggtttacaagttggacatacccagggagagatctttagctgtaacccagaggtaggttctcaa

SEQ ID NO: 176353 - DNA, 530 bp, Homo sapiens
caccacataaacagaattaaaaacaaaaattccatgatcgtctcaacagatgatgcattctctgttgaatgctcatcagaacaagcattctccaaaacccagcgtccctttatgattaaaaccttcagcaaaatcagcatacaagggacatacctcaatgtaataaaaggcatctatgacaaacccacagcygacataatactaaatggggaaaagttgaaagcattccctctgagaactggaacaagacaaagatggttcacttttaccactcctcttcaacatagtgttggaagtcctatccagagcaatcagaaaagagaaagaaataaatggcatccaaattggtaaagaggaagtcaaactgtcattgtttgctgatgatattatcatttaccttgaaaaccctaaagactcctctgaaaagctcctagaactgataaaagaattcagtaaagtttctggatagaagattactgtacacaaatctgtagctcttctctacaccaacagcgaccaagtggagaatc

SEQ ID NO: 176354 - DNA, 530 bp, Homo sapiens
caccacataaacagaattaaaaacaaaaattccatgatcgtctcaacagatgatgcattctctgttgaatgctcatcagaacaagcattctccaaaacccagcgtccctttatgattaaaaccttcagcaaaatcagcatacaagggacatacctcaatgtaataaaaggcatctatgacaaacccacagctgacataatactaaatggggaaaagttgaaagcattccctctgagaactggaacaagacaaagatggttcacttttaccactcctcttcaacatagtgttggaagtcctatccagagcaatcagaaaagagaaagaaataaatggcatccaaattggtaaagaggaagtcaaactgtcattgtttgctgatgatattatcatttaccttgaaaaccctaaagactcctctgaaaagctcctagaactgataaaagaattcagtaaagtttctggatagaagattactgtacayaaatctgtagctcttctctacaccaacagcgaccaagtggagaatc

SEQ ID NO: 176355 - DNA, 632 bp, Homo sapiens
tcaagtctggtaatgagctagtaaatttacagaattagtacatggcctactagaaatttaaatcccaaacactcttactctgaagcacatattaagttatgagtttctttaggaagtttctggtttagtgaagaattttggggggaaagagaaagcttccctcaagatccagtgttcagccataaggaaggcactgccagcacgctgagatgaaggcaaaggtgactcagtctacattatttgtccatgacatttgtcatacttggatattctaactttggtttgtgctctttcaaaagttataactctcttcttttyggatctcagacagtttgcataatctactggaataattatgagttcatgccttagcttatagctgtgcaaatacaagctagaaacacgttatttgaattactctttttcagtaaagaaacaaacaatgtagttttattatgagaaccagagaaaatagtctgtgtgagcacttctattctgctctaccattgtttgtcattaggctatgaagaaactcagattaaatatgattagtcacggcagaaatgtgattgcaattaggaccattcagtaagctaggtccggtgttgggaggagggatcgacaagctgata

SEQ ID NO: 176356 - DNA, 499 bp, Homo sapiens
gaggacaaacagaaaacaaggtaataattgagagccagggatgtgaccaaatggcaatggcaagcacactgcactctttcaaactcggagaagatgtttaaatttgcaataaatcagtatttttgataaccaaaggtgatattttttctcttttaatgtttactaataagtcagattttgaaatgagacacacagtctcttttaccataatatacacacaatttttatatttctctttttaggtaaacagcaaaaarcgaatgcatcacatcttatatccttttgagaagttaccttttattataatttattgagtcttccattctaactttgattgtgtatataatacaagttatgcattttaaacaagtttttaattttagataaaactatgaattagtaagaccaaaatattctccattttaccctctctttgaaagacttgttctatcatctggtagtttatatactttaccacatgtacacttgatgattaaaa

SEQ ID NO: 176357 - DNA, 500 bp, Homo sapiens
aatagactcattcttagtgagatggaaggtctcctgcacatttaccaaacagtgttaattaagaacatttgcaaatacatttcaatgattctttaaagttmttccattgtatcacctgggatttagggcccagcatgtggtcccagggttgaaaacaaacaaacgaacaaacaaaaaacacttctttaaactgagttatgcattcaccagatgttctcggggatatgtaaaaccacaggataaacaagcaatatcttcctgaagccttaatttaagtcaaaaatttgagggaaaatgtcatttttatattaaacacaaccactgatatactacagagtacgacattttaaaagtcaaaacacaaaatttcaaagagtttttatcttgatataggcagttgtatcaatcagtaaaggctaggttatgctgtgataacaaagaattccaaaatctcagtggcttaaaatgacaggtgtttatttctttttgttacaacattt

SEQ ID NO: 176358 - DNA, 500 bp, Homo sapiens
aatagactcattcttagtgagatggaaggtctcctgcacatttaccaaacagtgttaattaagaacatttgcaaatacatttcaatgattctttaaagttattccattgtatcacctgggatttagggcccagcatgtggtcccagggttgaaaacaaacaaacgaacaaacaaaaaacacttctttaaactgagttatgcattcaccagatgttctcggggatatgtaaaaccacaggataaacaagcaatatcttcctgaagccttaatttaagtcaaaaatttgagggaaaatgtcatttttatattaaacacaaccactgatatactacagagtacgacattttwaaagtcaaaacacaaaatttcaaagagtttttatcttgatataggcagttgtatcaatcagtaaaggctaggttatgctgtgataacaaagaattccaaaatctcagtggcttaaaatgacaggtgtttatttctttttgttacaacattt

SEQ ID NO: 176359 - DNA, 531 bp, Homo sapiens
ggactcagttgtagtcaactttgtgtcttcctcttcagtgcctgcctgtagtaaatacccactgataagaacaacaataatagcaacagcaataatgttaaatattgctgacacttactgataatttactatatgccaagcacagttctagtgatttgacrtatattaatttatttgtaccttgctataatcctcttaaataggaaatattattatcccactttgcagatgaggaaactgaggcctgagaagagcaatgaacgggaagaatcaggactggaatgctgcactcctgactccttcctggggctttctctctttctctgtgctcagagaggatgcacagccccactgtgaaggcaggagagaatttgttcaaaagtttctcaaacaatgtttctcatatcagcttctcagtacaagaaagtagcagtatgcttaacaaaagcaaaccaggataaaatgaaacatactggtctcctagcatgaatcatacaaaaatggagaagaaagattgattattgaatgtca

SEQ ID NO: 176360 - DNA, 579 bp, Homo sapiens
taagacaacacagtcgagatcaagaacatgtggcctgatttgatttaacccagagaagaaatgcctttttctttctgctgagctataacattatacatataaagatacatacatgcttgctctctgccagaaatgtcaactgcttttgatctctccctttagatattaaagtttcccctcctcacccctcagcctggtgggccccgtaagggctttcaaaccaataaacaagcctggagctgctgagatggtagaagctgtttgcctttctgagccagagcaccgtggcccaaaggtcgtgtttaatcagcctcaaggttttggttaacattgacttattgtttaaaatagcatttcaataacctcagacccttcctacacccccctcaacacccatgggaagaaggagacagaggcccttggrtttggggttttgtgtgtttgttgttaaggttctgaagcaaatgagctgtgcttggctggtggccatggtggagagctcgcctcctggcttcagggagggacctggcctgaatgccaggaccaggtcctgagggccccctgctaacaggacttaac

SEQ ID NO: 176361 - DNA, 485 bp, Homo sapiens
ttctgggcagctggtgtggaaaagcagaaaatttgaagtagagtagcagggagaggaagcaggatcaggccaaggagtcttctcaggcaggtaagggttgacattcaccctgaggcttggactcagagcagtggcattccctggggggcttggcttatgatggactgcatggaagggccatgggttagggtagaagctgctgcacctgattggctgtgcctaggctgggctcccactgggcttctgagtccagtgtgggagggaagaggtggggcaaatacctgcagggaagagaccctgggccccgccaggtactggagcccaaccagctttcaatccctgctaggctttytacagctgcccagagaagcagaaagcctccatccaaggttctgctggtccagccacttcccttctaagccccaacgtcctcactgcctaggctgaagcaccagggaagatgcagctgggagacacttctatct

SEQ ID NO: 176362 - DNA, 559 bp, Homo sapiens
tctccatttgtttgcagaggtggaaactgagacccagagacagtaagttctgggcagggtcagagctggtaaggtcagagggcaattgagatgtagtcctccctttgttcactcaagttcctgatatccctcccatctcaggagtcttctggctttctttgtgtccttccttccacaaactctggggctcaagccttcctgtggagaaaagagaccccagtctcgcttctgaatgaatctctgggaatctgatgtgctgctctgaccaggattggggattgggactgggacgatgcttaacccgcaggaatgaattgcaaaagtcagcatatcagtgaaggccgagagggagggagggaactctcacaggaggagagcagggcccttcctggtgctctgagatcacagctcccatctcttaggccccctctgccctccacctaaatggaggcgctaatttgttccccctgtttcttaacccattttctttctccgccggcccgccgccccacactmgaccaaaccctcagttctgaaatgttttcttgaaatactttgg

SEQ ID NO: 176363 - DNA, 455 bp, Homo sapiens
cccactgagacccagccgtgggaggaaatcagaggctcaaggggctggaagggagcagagggagtgatggccactctgctcatcccccactaaagggcagycttgattgacctcaagaaccccaaagaaggcttggtggtcccaaaacccttgtgtggggagaggctgagtccccaccttgctcaggcctattttatagcatctcctattcttccaagtgtcctagaaacttaacaggtgttccaagaaagtttttttttttaaagcggggacctcgggtgaaatgcttcctgagccaagccctctacatgtgttatctcatttaatcctcatgacccatctcaaagttgaggaagctgaggctgacaatggctaagtaacttgcccatagtcacaaaatactaggaagtgatggagcccagactcaaccataaatctgcctgactgtaaatgtc

SEQ ID NO: 176364 - DNA, 403 bp, Homo sapiens
atatatatatctcacacatatataataatgtatataccacagtttctgtatccattcacccatcgacagacacctaggtaatttcccctgtcttggctattgtgaacaatcctgcaatgaacacgggagtrcagatatctttacgaagtggtgatttcatttcctttggatatatacacaaaagagggattgctggattttacagtagctctgtttttaattgctttagaaacttccatactgtttcccataatggctgtacttatctgcatccccaccagtagtgtacaagagtacccttttctgtacacccttgctgacactggttactgcttgtcctaaacacaagatcccaaaatcataagactcctggaagaaaacctaggggaaaccttcttgatat

SEQ ID NO: 176365 - DNA, 403 bp, Homo sapiens
atatatatatctcacacatatataataatgtatataccacagtttctgtatccattcacccatcgacagacacctaggtaatttcccctgtcttggctattgtgaacaatcctgcaatgaacacgggagtacagatatctttacgaagtggtgatttcatttcctttggatatatacacaaaagagggattgctggattttacagtagctctgtttttaattgctttagaaacttccatacygtttcccataatggctgtacttatctgcatccccaccagtagtgtacaagagtacccttttctgtacacccttgctgacactggttactgcttgtcctaaacacaagatcccaaaatcataagactcctggaagaaaacctaggggaaaccttcttgatat

SEQ ID NO: 176366 - DNA, 472 bp, Homo sapiens
gcccaattttggcgtttatttattattaaaaactccatctctagctctgaatcctttgctgtgttttggctctcgcctgaagtctcttccacaacccagctcctctgatcatctgtgtcagaaggtttcctctcttgacccagggggaaacgagcccgttaccccacggagcttctcagcccggagaaaatggagcggaggaagtggtaatggattttgcatctgcccactgggctccctgctcctgagctgcatgaccttgggaaaggttctcgacctctctgggtttttgatcgttctattrtcaggtgggggtttgaagaaactcggagaaaacttactgtgattgtgagtggggaaaaatgtttgaaaaatataaaatgctataaagaagtaattaacaatgctgaattggtcagggccctgaaggaaacagacagcgcaaccaaactgagtaatgggaagtgagatt

SEQ ID NO: 176367 - DNA, 472 bp, Homo sapiens
gcccaattttggcgtttatttattattaaaaactccatctctagctctgaatcctttgctgtgttttggctctcgcctgaagtctcttccacaacccagctcctctgatcatctgtgtcagaaggtttcctctcttgacccagggggaaacgagcccgttaccccacggagcttctcagcccggagaaaatggagcggaggaagtggtaatggattttgcatctgcccactgggctccctgctcctgagctgcatgaccttgggaaaggttctcgacctctctgggtttttgatcgttctattatcaggtgggggtttgaagaaactcggagaaaacttactgtgattgtgagtggggaaaaatgtttgaaaaatataaaatgctataaagaagtaattaacaatgctgaattggtcagggccctgaaggaaacagacagygcaaccaaactgagtaatgggaagtgagatt

SEQ ID NO: 176368 - DNA, 375 bp, Homo sapiens
tgggcacaccacaagatcatatttcccaggctcacttgcagctaggcaagaccatgtgactaaattctggccattggaatgtgggcattaagcratgtgtgtcactttcagggttggcccatagaacctcaatgcaattctccctggagtggactcaggtcctggaggagggcagggccacatgctgggggagcttgcaatgaatgcttgcactgagcacagaaccatcctcatctccaacccctgtcaccatttcagatctcatgggtgagaaatggagctgcatcatcttaaggcacagagactttgaggtttacttgttatagcagctgatgtggtgtgccctaactcatacaataattctccagaaaggga

SEQ ID NO: 176369 - DNA, 375 bp, Homo sapiens
tgggcacaccacaagatcatatttcccaggctcacttgcagctaggcaagaccatgtgactaaattctggccattggaatgtgggcattaagcaatgtgtgtcactttcagggttggcccatagaacctcaatgcaattctccctggagtggactcaggtcctggaggagggcagggccacatgctgggggagcttgcaatgaatgcttgcactgagcacagaaccatcctcatctccaacccctgtcaccatttcagatctcatgggtgagaaatggagctgcatcrtcttaaggcacagagactttgaggtttacttgttatagcagctgatgtggtgtgccctaactcatacaataattctccagaaaggga

SEQ ID NO: 176370 - DNA, 582 bp, Homo sapiens
tggtgccagtgggcagaccacggacctagtgttttgatgcggcctctctctgcagtgcctccttgatggactcacctccctctcatgggctgttccctgtttgcccagcttaacacccccagactcctgcaccctctctctatgtccccttccccatcagttcctgaagcccctgacttgcctcatcmtaggaagcttcttggctccaagtcccctcccctggaactgcccctgcttggccagctctcttgagtgcctttgaagatttccggcttctctcatccggaagctgcacatggggtcaggcatttgagcccgctaatcgctccgttctgccaatgcccgagtgccacaaagcctctttttatgcctattgaaagcctctgaggagctttcaagtgctctttgataaatcatggtaagtgttattccggccactccagcacggtacctgcttggaggcctcccgcctccctgggccactgctctccatcactgcatttcaccggcgacagtaattcattccacttgagctgatgagcttagttcccatttatttgcacattatgagctgtgtcactc

SEQ ID NO: 176371 - DNA, 611 bp, Homo sapiens
tattgctgttttttaagcaggtatccttctttttgtttgtttgtttttgttttgttttgttttgttttgttttagagatggagtctcgctctgtcgcccaggctggagtgcagtggcrcgatctcggctcactgcaacctctgcctcctgggttcaagcaattctcctgcctcatcctcccaagtagctgggactacaggcgcatgctgccacgcccagctaattttttttttttttgtattttagtagagacggggtttcgccgtgttgcccaggctggtctccaactcctgagctcaggcaatctgcccgcctcagtctcccaaagtgctaggattacaggcgtgagtcaccgcgcccggccaacgggtgtccttctcgacccactgtcatccattaatctgttgcttaaaatccttctgtggcctcctattacctagaacaaggttagcaaattacagcctgggggttaatctggcctgcttcctcgtctcatagatagtctgattggaacacagcctcacccatttgtttgcacactgtccatagctagttttgcactaaacaacagagttgggtagcacagtcattgcaaaaaagactttatggcc

SEQ ID NO: 176372 - DNA, 611 bp, Homo sapiens
tattgctgttttttaagcaggtatccttctttttgtttgtttgtttttgttttgttttgttttgttttgttttagagatggagtctcgctctgtcgcccaggctggagtgcagtggcgcgatctcggctcactgcaacctctgcctcctgggttcaagcaattctcctgcctcatcctcccaagtagctgggactacaggcgcatgctgccacgcccagctaattttttttttttttgtattttagtagagayggggtttcgccgtgttgcccaggctggtctccaactcctgagctcaggcaatctgcccgcctcagtctcccaaagtgctaggattacaggcgtgagtcaccgcgcccggccaacgggtgtccttctcgacccactgtcatccattaatctgttgcttaaaatccttctgtggcctcctattacctagaacaaggttagcaaattacagcctgggggttaatctggcctgcttcctcgtctcatagatagtctgattggaacacagcctcacccatttgtttgcacactgtccatagctagttttgcactaaacaacagagttgggtagcacagtcattgcaaaaaagactttatggcc

SEQ ID NO: 176373 - DNA, 568 bp, Homo sapiens
gggggttagcatggcaggcccctggagtatctataagaaagcagccatcctggtgggaaggttgacccaaatagactgaactctacaccatgtggggctttattataatgaggtggggcctaggcaggggctgaggcaggacgtggcaatgtcctgcctcagagaatacttctgccctctgtgggcctgttctgcatctgtgccccaactgtgaagttgcaaccaggaggccttcattcataggaaagttctctatgcctttctcttgcaagaccagggtggagctgagctggatgttgagggatcccctcctggatcagggtcccagcctcaccaggcttggtctctcccccactgtgggacmcacacacacatctctcaagcccattctaaatcagagctgttggagtcagagcatgagccgtgagaggtagtggagtggacaggaaatctggctttgaaagccaccatcccactattcacaggctgctctttcagggctttctcttggctttcaatgcaggtctgcagttcctttgaccaacggcaaagcatagagtcagggtag

SEQ ID NO: 176374 - DNA, 475 bp, Homo sapiens
aagcccacagtatacattagcttgcttatgttttccccactggcagcttagaatcacatttctcaggtttggtaataagtgaggtaccagtctcttatctgcttatctatttccaaaatatctcccatggtcttttaccttgtgagcgtgtattaggccrttctttcactcctataatgaaatacctgagagtgtgtaattgataaagaaaaatggtttcattggctcacagttctgcaggctgtacagaaacatgatgctgtcatcggctcagcttctggggaggccttgggaaactgacaatcatggagaaggcaaagggggagcagacacctcacacagctggagagaaagagagtgctgggggtggtaacaggcacttttaaaaaacagatctgatgagaactccctcactatcatgagaccagcactaagaggattgtactaaaccattcgtgagcaacacctccatgac

SEQ ID NO: 176375 - DNA, 526 bp, Homo sapiens
cgtcctgcacttgcatattcaaagcctagggttgtagcagaacaagccgcagacaaaacccctcagacactgagttaaagaaggaaggactttattcggccgggagctttggcaagactcacgtctccaacaacagagctccctgagtgagcaattcctgtcccttttaaggggcttacaactcttaagggggtccacgtgagggggtcgtgattgattgagcaagcagagggtataggactgggggctgcatgcaccggtaatcagaacggaacagaacaggacagrgattttcacaatgctttccatacaatgtctggaatctataaataacataaccagttaggtcaggggtcgatctttaaccaggcccagggtgccgcaccaggctgtctgcctgtggatttcatttctgccttttagtttttacttctttctttggaggcagaaattgggcataagacaatatgaggggtggtctcctcccttaaggtggggaggccagtttttctgcgggctacttgaa

SEQ ID NO: 176376 - DNA, 526 bp, Homo sapiens
cgtcctgcacttgcatattcaaagcctagggttgtagcagaacaagccgcagacaaaacccctcagacactgagttaaagaaggaaggactttattcggccgggagctttggcaagactcacgtctccaacaacagagctccctgagtgagcaattcctgtcccttttaaggggcttacaactcttaagggggtccacgtgagggggtcgtgattgattgagcaagcagagggtataggactgggggctgcatgcaccggtaatcagaacggaacagaacaggacagggattttcacaatgctttccatacaatgtctggaatctataartaacataaccagttaggtcaggggtcgatctttaaccaggcccagggtgccgcaccaggctgtctgcctgtggatttcatttctgccttttagtttttacttctttctttggaggcagaaattgggcataagacaatatgaggggtggtctcctcccttaaggtggggaggccagtttttctgcgggctacttgaa

SEQ ID NO: 176377 - DNA, 443 bp, Homo sapiens
tacattatctaatactaagatactatctgaaataggcctttgtatatgtatatgtatgtatgtatatagatagatatgcatatgaatatatatacatataaatacgaattcacacatatatgtacaagcatayacatgtacactcatatacacataagcacacatgtataaagtgtttcgcactgatttttttcatcagatccaccactgagtaactctgtaaggtaaggagactcagtattactctctttgttccaaagatgaggaaaataaacctggagattttaagtgacttacccagtaacacacagccaataagtggcaaggccaagacccaagtccttatctcactgattccaaagtccacaaacactagatgctcaggggctgacaataatgactcccactagggtttttaaggtttattctgtactaggtacttt

SEQ ID NO: 176378 - DNA, 521 bp, Homo sapiens
caagtagtcaaccaattatcaaagtgaagacttattttactttaggatataaagtatgatgcagttaatacaagtacaggaaaaacatgaggatcatattttctgaaacctgagttacaggtgaacagagcaatattggatgagaagatgatgctctcaggccctagtgccaaaataaktcttcccaacacttcaaaaagagaagtgagcagggaaagatactagcaacttgctgatataccagcatatttctcagaaagactcctctgacctgtacaaaattgtttttgaactagaaaaactggactcttgccctgtcttagtcaccagtcatatctggcacacggtaaaacaagttatttcctttggctggaacttcatttgctaatctctaaaatggattcatcgagctaaatgatatcatgttttttctaactcttaactttctaggatcctaaatagaagaaatctttagtgtaaccatttgcacaagaattattttgtccaagaaccaaagaatg

SEQ ID NO: 176379 - DNA, 521 bp, Homo sapiens
caagtagtcaaccaattatcaaagtgaagacttattttactttaggatataaagtatgatgcagttaatacaagtacaggaaaaacatgaggatcatattttctgaaacctgagttacaggtgaacagagcaatattggatgagaagatgatgctctcaggccctagtgccaaaataagtcttcccaacacttcaaaaagagaagtgagcagggaaagatactagcaacttgctgatataccagcatatttctcagaaagactcctctgacctgtacaaaattgtttttsaactagaaaaactggactcttgccctgtcttagtcaccagtcatatctggcacacggtaaaacaagttatttcctttggctggaacttcatttgctaatctctaaaatggattcatcgagctaaatgatatcatgttttttctaactcttaactttctaggatcctaaatagaagaaatctttagtgtaaccatttgcacaagaattattttgtccaagaaccaaagaatg

SEQ ID NO: 176380 - DNA, 267 bp, Homo sapiens
acagactggagtttaaatccatttctgctactcactaatctgtgactctggcaaactaacctacctatgcctcagtttttgcattttacaaagatgataacaataacatctagattattagatttaacgagggtttaataagataaatgcataaaaagcacatggcrggttgctaataaataactgactcctgttcctctccattgtccttgtcctctttagttctgagattattttatcaattaggcccatcattcatctatgaaa

SEQ ID NO: 176381 - DNA, 593 bp, Homo sapiens
gctaggtgtcatttcctaaaactgcaaaaggttctctcacttctctgtgttggggctgtcagcaggagatgtttttatgtgttgtgataagtaaaatgattcttctaaattaggctcccatgcctcagcccagcaagacttaatcatctgagtttttatattgtgataatttttgttttaaatcctcttgttagatgtaagtattatgagtactgactgaatgaatgggtaaatgaatgaatgagagtaagcagtgctgaagggatgcacatctgtcttttctaacaagaatagcattaatttacagtgttaggtactaagtctcttgtctatgtcaacatggacctcaccctgtcctcaagctgcttatattttcatagtttactaatgtaaaacacgtaaaatcaggtgtgaggttctcaatgcagacttccaagaaatggcagctggctttgttttctctcctrtaataagactttaactgccaactcactgtgataatgaagtcattgttaattcttagatggtaatccctcaggcaaatctgtttaaagcactaatttctgagatagctcaaaacagacaacaaattc

SEQ ID NO: 176382 - DNA, 537 bp, Homo sapiens
ctgtctcaaaaaaaaaaaaaaaaaagaccataaataattatttttagtatttttgctgaactctaatgggatataagtcatgtaaatactgtgacactcaattggacctggtattaaaatattttttaatagacttggcacattgttaaggttatttttacctatttgctaatataatttagattcactgctagcaagaaaattataagatgaccagtggtaaaaatgcatgcttccttattattcaagatagtggctttcacatctgactctcccctaagacagtactttatacttccaatactttgcattgatgttgcatgttatcaaaaactagttttctttatctttctgtctctccttgagtttgtccattttttttttactttatctcattattggcctaccaagtaccaaraaactttcgtattatctcatttcatctccactgagaaagaactgttatgtctatttctactgcatgtttaagatcacatagacaatacaagaagagtctaagatttaactccaaatgtt

SEQ ID NO: 176383 - DNA, 541 bp, Homo sapiens
aaataaaaaataaattaataaaacaactccttccccccaccaaaaaaagacatggaatcaacctagatgcccattgacagtgggctagataaagaaaatgtggtacatatacaccctggaatactatgcagccataataaagaatgagatcatgttctttgtagcaacatggatggagctgaaggccattatcctaagaatattaatgcaggaatccaaaaatcaaatactgcatgttctcatttataastgggagttaaatgttaactacacatgtacacaaaggagacaacaaaagattctggagccgcttgcgggtgaagggtgggaggagagtgaggattgaaaaactacctatcaagtgctgtactcattacctgggtgacaaaattctttgtgtatcaaatccccacaacatgtaatttacccatgtaacaaacctgcacatgtatccctgaacctaaagtaaaagttgggaaggaaaaaaagatatatgcatacaaataaatattcatgtaataacaaaaactaaaccaaaaca

SEQ ID NO: 176384 - DNA, 458 bp, Homo sapiens
aactatggaaagattaaagtacgaccctgacaatatacaaaaatgtataaataaatatgcacaaattctgattcatcattcacctgagttcatttttctcattagagttctctttctgaagctaagggaaaaactgagcctaagacaagcagagaattaggyccatgggacacatcagttgaatggaaagaatttcataacatatgtacataattttttcttcctcatgactggaactactccattctttttctttcttaaaatgtacattaaaaaacagactaaaaacaaaaaataagcaaatttttaaaagacttgaagtcatcttttctctgttgtgtgataataggctgtaattcagaaattagtatttgaaagttgttttcttcttctgtttttttaacctttttaagttccctcagggagcaattcagcaggtgataaattagagaatgtgt

SEQ ID NO: 176385 - DNA, 586 bp, Homo sapiens
aagttggggaccctctgctgtgttgctggcatcaaatacactttccacttagaatattttcaacttacaataggtttatggggaggtaaccccttcataagtcaaggagcgtataatctattgatctgatccagaaacagtcagtagttaacttaatctgtatttcagacaccattaccttaaccttcatctccaccatatcctttttttctggccaaaattgctgatagctttgtggtgcctcttctattaaactcaatttctcctacttgactttcaagatttgatgtaattcatctctgccttttctatacaaatttctatacaatattacttaatcctcttcaaaatatgaargattgtatttaatgtttgcgggtcttgttttgtaagcagagtagaagatatttaattgcaccttgttctgctggctccacaactaacctaaccgaacagggactcctttattatgagagaagccatcacaataatagcagtaactcaagcattaacccacattcatttctcaggtaaaactaagcatgactgttttcagtgtcaggttcctgtagttcctgttaagttg

SEQ ID NO: 176386 - DNA, 501 bp, Homo sapiens
aaaatttcataatttgagggtaaaaatttgatttggatgaatcaagatataaaattcagttaaaagatggctgctgtgaaaaccaaaaggatattttcaatttccacaatatttcttatatttgactacatttacatacatgaagatttttctttgaaaagtcattaatggaaagagctaaatgtttgcagattttttagaagaaygaaagttggaaatttatttggaaagctcaacctcttggttttaattgcaagtaactgaatccgactgtttccattgtagttaaaacttaagaaaataatagacacataaaaatacaaatgagtgcccattcaagggttaactaatggataacctatttgagtatgagtctggtcatgtataggtatattagttttccctaggtttttcttgttcattgccttgtccagagttacacaaactgttcagatagtccagaactttctcactcattagcttcttctacaccaccctttt

SEQ ID NO: 176387 - DNA, 501 bp, Homo sapiens
aaaatttcataatttgagggtaaaaatttgatttggatgaatcaagatataaaattcagttaaaagatggctgctgtgaaaaccaaaaggatattttcaatttccacaatatttcttatatttgactacatttacatacatgaagatttttctttgaaaagtcattaatggaaagagctaaatgtttgcagattttttagaagaatgaaagttggaaatttatttggaaagctcaacctcttggttttaattgcaastaactgaatccgactgtttccattgtagttaaaacttaagaaaataatagacacataaaaatacaaatgagtgcccattcaagggttaactaatggataacctatttgagtatgagtctggtcatgtataggtatattagttttccctaggtttttcttgttcattgccttgtccagagttacacaaactgttcagatagtccagaactttctcactcattagcttcttctacaccaccctttt

SEQ ID NO: 176388 - DNA, 416 bp, Homo sapiens
gatttccttcgtttaactagtaataactaaacattattttcaaatatatttaaacgtgcaatagtaaaaataatgagttaatctgtgttagtcataatactgttattgataaacataaacagaatcacaacattttgccaggaatatgctaaatctggtatgtgaattatttcaattatgtactctaaaactaaataaggtgaagattaytgtgaactcaatttctaaatgtggtaatagaattagagaaggtaaatgatttgcccagattacacaaagaataaactggcatccaggattcaaaccaaggtagatcatttccagaatccatatttaatatattgtaatgaaactaacaccagaccatggctgggtatgtaacttttaaatatcttgaagaaaagttttaaaacttg

SEQ ID NO: 176389 - DNA, 572 bp, Homo sapiens
aaaacaaagggtaatacttgccaaatatcagcaattacasaaaggggagttacaaccttataagagtatgactattccttttgccctttttcaacatgattattttgcagtttaagttagcagctgtttaaataagaggctataaagtgaatcttctcatgctacacatgttaaaagataatgtctatacatataatcaataaggttttaaggtttttgattttcccagactgaaatcctactcttatcatatattagtgttgaatgctataaaatatttcacaaagttagaatttagagaaaacaatttttagcaagataagatgcattgctttttgattgttatttccattacatctttgctttataaattttccttctaagttatggcctcaaatggcataggttgtccaaacttttaaatagttttctgtttgttgatgaaatgtgttgagtgactaactcaaaagcattgtgcttgcagctataacagcctaagtgctattcaatatggttaaacattccacttttcacatgaaaaatataatagttaagtttatacattggctttg

SEQ ID NO: 176390 - DNA, 589 bp, Homo sapiens
atttattggagtaggttcaaaaaagaatgggaagagacaaattggagatagtgagtactgatgttaggttttgtccttgagagttatattttactcttttgaaaagatttacttgctattcgacattttactaaatgtaaaatgtacatggcaattaatttaataaattccttcctaacatctaatgaaayatctgtgtctttttgtcccctgcaatgattgagatgtatggcatgcaataaaattattaataatgttatccttttgaatgagaatctactcttcgattcacaccattaaataaccttcttatctgtgagccaaaatgtcagccaatacgttggactgggtcctaagaatattggtgggtaagaagaacattccttggctggtttatttttctttggtattagtgcttacttggctcatctcaacgtctgtagaaattgcttttcacccaggaatttgcaaataatttagctggaacatttctaaccatatgtatatatttttttttattaaatcctggccagattccatcagttctggagctgtattgttttacagatttcatgactggtttgtctca

SEQ ID NO: 176391 - DNA, 589 bp, Homo sapiens
atttattggagtaggttcaaaaaagaatgggaagagacaaattggagatagtgagtactgatgttaggttttgtccttgagagttatattttactcttttgaaaagatttacttgctattcgacattttactaaatgtaaaatgtacatggcaattaatttaataaattccttcctaacatctaatgaaacatctgtgtctttttgtcccctgcaatgattgagatgtatggcatgcaataaaattattaataatgttatccttttgaatgrgaatctactcttcgattcacaccattaaataaccttcttatctgtgagccaaaatgtcagccaatacgttggactgggtcctaagaatattggtgggtaagaagaacattccttggctggtttatttttctttggtattagtgcttacttggctcatctcaacgtctgtagaaattgcttttcacccaggaatttgcaaataatttagctggaacatttctaaccatatgtatatatttttttttattaaatcctggccagattccatcagttctggagctgtattgttttacagatttcatgactggtttgtctca

SEQ ID NO: 176392 - DNA, 510 bp, Homo sapiens
cttgcagctataacagcctaagtgctattcaatatggttaaacattccacttttcacatgaaaaatataatagttaagtttatacattggctttgccttaatatctatatcatgatttcattaattttttagtaaattacttcttccactacctttttaaacaaaattatactaaaaggagatggagaattctgaaaatgtagtacttccttctgaattatggtatatactcttacaatttagagtgcatatgtcttcarcaattgtcaaaatagttgtctggattaaaatacatacattttctgttcaaatatttaattgtgatacatgattatataacagaagatatatttgtattttgacatatagtcaataattatagtaatatatctttggaattaacagctagaaaccactagttctctctatattatatttaattttattaaaataatcacaaattctactctattgcttcaatatcaaaaggaaaaattacacagttaacag

SEQ ID NO: 176393 - DNA, 595 bp, Homo sapiens
tatgaagcattacgaaagttttcaaagttaaggtttatttgtacctttaatattttataagaaggttaagcttttgtttaaaattcctgtgtaaataccacattatggctgtaaacagtttaagattttaaatatatttacagttttaggacyaaattgcaaaatgactatacttgaaattattaacttatgtactcattgcataatttaaataacattatatcatttgaattaaattaatgtcttctgtaacaacctagatagtctaagaaattttctttgcatattacagtatacaaagaatttatgtactcagccaacaaatatttactaaccatctaccctgggcccaatatgttgatggggctagagagtatgatcaaaggtaccgccttttcttataacatgaagcctaagggaaagataaacttttcacaactaatatgtgaagaatattacaaatatatgatacacttagtataagaccatatcacagaaacatgtaattttctcttaaacttacatgataaattcggaatgtgaagatactgtgcaaacatatgggcctttacgtgtaaaggaatcaacatgtttt

SEQ ID NO: 176394 - DNA, 624 bp, Homo sapiens
aaatcttagaatatgtttcagatccagtggagttaagatggaaatcattaacaraagaaaaggtagaaatctaataaataatttgaattcataaaatgcatttacttataacttttaggtttaaagcaaatatagaaatgggaatgtgtaaatatgatatatcaaaagttgagagatacatctatatttcactgaaagaaaatgtagagccatacatgtgtacattaaaaagaagaaagctggaacattaataatccaagactatactaaaggtcatcagaaaaatcacagcaaattatgcctgacaataacaaaatatagaaagctttatgggaacaaacagatatgtttaaagcagaaaataaacctataagtagaggtgtaactaagtcagaaggtagttctttgcaaaaaccaatacaactgacaaacacttcaaacagctaggaagactaataaagaacgagtaactaataattaagtaatataataaatttgaaaatatataaacaaagatacatctaattttagagaaaaaaatagcatgtattatgaaaaagctaggtcaataattttgataatttaaatgaaatgtacaaggtctaaaaaaataaacctatcaaa

SEQ ID NO: 176395 - DNA, 567 bp, Homo sapiens
cagtaagggacaggccctgggaggtaattctttatcagactttaaagttgggctgggcatggtggctcacgcctgtaatccctgcactttgggaggctgaggcaggtggatgacctgaggtcaggagttcgagaccagcctggccaacatggcgaaaccccgtctctactaaaaatacaaaacaaaatcagctgggtgtggtggcaggcacctgtaatcccagctactgaggaggctgaggcagaagaattgcttgagtgggagggggaggttgcagtgagtggagatcgcaccatygtattccagcctgggcaacagaggcacaccccatctcaaaaaaaaaaaaaaaaattaaaagaaaaagaaaaaaaaagttggtacgtactcttatgctaatttttaaagtagttcctgctttttctcttgccctaaatcattaggtgagaacctaaatatctgataattcaatgcccttgggaaaaacaggagctgaaatgcatgagctttagaatcacatggacttgactgaccataccagtccctctaattactgacgatttcatccct

SEQ ID NO: 176396 - DNA, 576 bp, Homo sapiens
gggggatggtgcctggccattaaaaactccctcatgatccagtcacctcccaccagaccacacctccaacactcaggatcaygattcaacatgaaatgtgggtggggacacagagctaaactgttgcaggaaatcagggaccccgaacagagggaccggctggagctgcggcacaggaacataaattgtgatttcatggacatttatcacttaccaaataatactcttataatttcttacacctgtcttaatctcttaatcctgttatttttgtaagctgaggatgtatgtcacctcaggaccctgtgataaatgtgttaactgtacaaactgattgtaaaacatgtgtgtttgaacaatatgaaatcagtgcaccttgaaaaagaacagaataatgcgattttagggaacaagggaagacaaccataaggtctgactgcctgcggggtagggcaaaaaaagccatatttttcttcttgcagagaacctataaacagatgtgcaagtagggaagatattgctgaattctttccctagcaaggaatattgatattaatactctgggaaaagaattgc

SEQ ID NO: 176397 - DNA, 542 bp, Homo sapiens
tattcactatcatgagaacagcatgggcaagacctgcctccatgattcgattacttcccaccaggtccctcccacagcatgttggaattcaagatgagatttgcgtggagacacagccaaaccatatcactatgtcactaacccatcttcctattggtcatttgtgggacaatgtttcaaataaattactttcattcaaatcttttgtttcagggtctgtttctgggggatgctgaactaacgttgaatctgtgagactatgacttcttgtgaaaagctggtagagtttcaggtcttgacatcttgcaaatatgtgtacatttgtttcctcttccattcattgattcattttttttttaagtaaatgttcagtgtatttcttcaaggtccacacagtctctcaaacaacagccctccacgtttagtgagagaagcagaaccctgagaactccaactgcctgtaagtgtaaaattttcttgtgayctcactagctctggccacccactggctcagaatcaggaagtgcaaaagtttttatgaa

SEQ ID NO: 176398 - DNA, 424 bp, Homo sapiens
tttagtatattaggaaaggtatgagcctacacttatacgtcatcaggaaatggtcagatatttttctaagtgctttcaacacagtaattaatttaatcctcaaaataacactatgaaggaggtattattattatttcggctttacacgtgaagaaattgaagtaaaggatcatcaggaacttgcacagtgtcatgtaagtgtatcatatatgtttgtgayagaggcagtatttgtctcaggcagtccataacctctgtctttggaatggagcttttcctattaggacatagtagagttataaacatctcataaaaatgtcattaaattccatatgatagtattttatatatataaagggtgatatttttctccttcaagaaagagcagattggattttgccaggtggagaatacaggaagaatt

SEQ ID NO: 176399 - DNA, 438 bp, Homo sapiens
actttcatgtatttttagtatattaggaaaggtatgagcctacacttatacgtcatcaggaaatggtcagatatttttctaagtgctttcaacacagtaattaatttaatcctcaaaataacactatgaaggaggtattattattatttcggctttacacgtgaagaaattgaagtaaaggatcatcaggaacttgcacagtgtcatgtaagtgtatcatatatgtttgtgacagaggcagtatttgtctcaggcagtccataacctctgtctttggaatggagcttttcctattaggacatagtaragttataaacatctcataaaaatgtcattaaattccatatgatagtattttatatatataaagggtgatatttttctccttcaagaaagagcagattggattttgccaggtggagaatacaggaagaattc

SEQ ID NO: 176400 - DNA, 424 bp, Homo sapiens
tttagtatattaggaaaggtatgagcctacacttatacgtcatcaggaaatggtcagatatttttctaagtgctttcaacacagtaattaatttaatcctcaaaataacactatgaaggaggtattattattatttcggctttacacgtgaagaaattgaagtaaaggatcatcaggaacttgcacagtgtcatgtaagtgtatcatatatgtttgtgacagaggcagtatttgtctcaggcagtccataacctctgtctttggaatggagcttttcctattaggacatagtagagttataaacatytcataaaaatgtcattaaattccatatgatagtattttatatatataaagggtgatatttttctccttcaagaaagagcagattggattttgccaggtggagaatacaggaagaatt

SEQ ID NO: 176401 - DNA, 576 bp, Homo sapiens
tattttttaaatatacagggttcatgataaagaattaaatgctgcaagaccacaaaaatatttaaaaattgcaaagaagctcaaaaarcaaaagctgctgtgtgttactagagaaattaaaatagtggctcatttattgattaaagcttaacactttccaacaactgaaagtatgacatttaggattttgcaggtagtttctacaagagggaaattgtatatgaaagagttaacatagagttaaaattatctgcaatcataccctgctgaatgtttgagaatctgactcaatatttggaaccaattacattttcctatatatagagttgacattcctgcttaaaaaaatcaaagtgccctttttctttattgttttgctgcaggtagatttatgatttttagagggaaactatctctttccacacagggatttagattgaaaataaaatcttgaagtccaaatgacagcctttatatacataacatacaatcaaattcagtgacatggttgtttatttgaaaatagaatgaaaatgtgctttcttaaaagcaaaggtagtattcagttcacatttt

SEQ ID NO: 176402 - DNA, 576 bp, Homo sapiens
tattttttaaatatacagggttcatgataaagaattaaatgctgcaagaccacaaaaatatttaaaaattgcaaagaagctcaaaaaacaaaagctgctgtgtgttactagagaaattaaaatagtggctcatttattgattaaagcttaacactttccaacaactgaaagtatgacatttaggattttgcaggtagtttctacaagagggaaattgtatatgaaagagttaacatagagttaaaattatctgcaatcataccctgctgaatgtttgagaatctgactcaatatttggaaccaattacattttcctatatatagagttgacattcctgcttaaaaaaatcaaagtgccctttttctttattgttttgctgcaggtagatttatgatttttagagggaaactatctctttccacacagggatttagattgaaaataaaatcttgaagtccaaatgacagcctttatatacataacatacaatcaaattcagtgacatsgttgtttatttgaaaatagaatgaaaatgtgctttcttaaaagcaaaggtagtattcagttcacatttt

SEQ ID NO: 176403 - DNA, 446 bp, Homo sapiens
agagcacctctagcagcttggtctagtatagtcctaagcaatttctcacaacaagctctggagaggaggtttacaatcagaatatgtctaatttcatgaagtgccaggaataattaacactttgaagagagggacatttatataagaatggtttgtagtcagttactaccaagttatttacatccagcaaacacattagatacagaggtttctccatacagaagttccctgctttcagggtacatggtaaaargagggtctaggaccacagggaactggaaagagggaacataattaagaagtctaaacatatcccaaatctatcatttaataatgacagggattattcccattttccaagggaaaatggggcttagagacagtaagtacttgcccaagtatatgaagacaaaaagtgaaagagaatttgaaaccattcatcaata

SEQ ID NO: 176404 - DNA, 502 bp, Homo sapiens
gacagtgcttctccatgtgggcactatccatccctagggagtatattaacttgtcagagtttttttggtggtcacagtgcttggaaggacaccacttgcatttggtgggtaggactaagatggtagagtccctgcaaaataaaggatttgctgcatgccccacaacttttggacatcctgccagatatttgtatgtttataattatcatattaataattatctgaaaaacrtacttataattatcttaactaaaatccaaccccattatgcatacaaagtgttttcaaacagtcttaaaaagcactgaattttctaggagttcaggcatggtgtaaagtgaggaaagagtatactttctttgttcagaaatttactaagagctggttccaagttcagaaactagctgaagccatcactgtttaaggtattctggctgacaatccagccaactgagtcagtctgcctgtatagatgcctcattcagcatgtttttacctatag

SEQ ID NO: 176405 - DNA, 560 bp, Homo sapiens
tgcttacattcattacctcagtgtctgggcttggcacatgktggtgcttgataagcattcattgaattaaaaatgtgagcaggatgggaaaatacggcaaatgatggtcacatattctcttctattcatctacaacaaattgttcattctttgtccagcatcagagccattttaggaacctgcttagcaaattaggcacctttcagaattgcagaattttcattctatccttgccgggattacttccatgttgtgagcctttcttggcatttcacccttcgctcttacatagaaactcaaagtacctttgttaacattcatttatgctacaaggtagttggattaaaaatgtcaacactcccatgacacagaaagaagaccaaagctaccagtaaaatttcacgtggaggaaatatggaagtagattagcaaccccagtagtactgtggtattgttgcattgatcgtactattgaatagtgaagagcgaggtaccttattttataaatgccataagcaacataaaatcacccatgtacaaatataagacctttcacatga

SEQ ID NO: 176406 - DNA, 537 bp, Homo sapiens
tctgggcttggcacatggtggtgcttgataagcattcattgaattaaaaatgtgagcaggatgggaaaatrcggcaaatgatggtcacatattctcttctattcatctacaacaaattgttcattctttgtccagcatcagagccattttaggaacctgcttagcaaattaggcacctttcagaattgcagaattttcattctatccttgccgggattacttccatgttgtgagcctttcttggcatttcacccttcgctcttacatagaaactcaaagtacctttgttaacattcatttatgctacaaggtagttggattaaaaatgtcaacactcccatgacacagaaagaagaccaaagctaccagtaaaatttcacgtggaggaaatatggaagtagattagcaaccccagtagtactgtggtattgttgcattgatcgtactattgaatagtgaagagcgaggtaccttattttataaatgccataagcaacataaaatcacccatgtacaaatataagacctttcacatga

SEQ ID NO: 176407 - DNA, 560 bp, Homo sapiens
tgcttacattcattacctcagtgtctgggcttggcacatggtggtgcttgataagcattcattgaattaaaaatgtgagcaggatgggaaaatacggcaaatgatggtcacatattctcttctattcatctacaacaaattgttcattctttgtccagcatcagagccattttaggaacctgcttagcaaattaggcacctttcagaattgcagaattttcattctatccttgccgggattacttccatgttgtgagccttycttggcatttcacccttcgctcttacatagaaactcaaagtacctttgttaacattcatttatgctacaaggtagttggattaaaaatgtcaacactcccatgacacagaaagaagaccaaagctaccagtaaaatttcacgtggaggaaatatggaagtagattagcaaccccagtagtactgtggtattgttgcattgatcgtactattgaatagtgaagagcgaggtaccttattttataaatgccataagcaacataaaatcacccatgtacaaatataagacctttcacatga

SEQ ID NO: 176408 - DNA, 580 bp, Homo sapiens
tacctcagtgtctgggcttggcacatggtggtgcttgataagcattcattgaattaaaaatgtgagcaggatgggaaaatacggcaaatgatggtcacatattctcttctattcatctacaacaaattgttcattctttgtccagcatcagagccattttaggaacctgcttagcaaattaggcacctttcagaattgcagaattttcattctatccttgccgggattacttccatgttgtgagcctttcttggcatttcacccttcgctcttacatagaaactcaaagtacctttgttaacattcatttatgctacaaggtagttggattaaaaatgtcaacactcccatgacacagaaagaagaccaaagctaccagtaaaatttcacgtggaggaaatatrgaagtagattagcaaccccagtagtactgtggtattgttgcattgatcgtactattgaatagtgaagagcgaggtaccttattttataaatgccataagcaacataaaatcacccatgtacaaatataagacctttcacatgaatttgatggtgattatatgttgaaaccataata

SEQ ID NO: 176409 - DNA, 579 bp, Homo sapiens
ttacctcagtgtctgggcttggcacatggtggtgcttgataagcattcattgaattaaaaatgtgagcaggatgggaaaatacggcaaatgatggtcacatattctcttctattcatctacaacaaattgttcattctttgtccagcatcagagccattttaggaacctgcttagcaaattaggcacctttcagaattgcagaattttcattctatccttgccgggattacttccatgttgtgagcctttcttggcatttcacccttcgctcttacatagaaactcaaagtacctttgttaacattcatttatgctacaaggtagttggattaaaaatgtcaacactcccatgacacagaaagaagaccaaagctaccagtaaaatttcacgtggaggaaatatggaagtagattagcaaccccaktagtactgtggtattgttgcattgatcgtactattgaatagtgaagagcgaggtaccttattttataaatgccataagcaacataaaatcacccatgtacaaatataagacctttcacatgaatttgatggtgattatatgttgaaaccataa

SEQ ID NO: 176410 - DNA, 608 bp, Homo sapiens
caaacaaaactcaattgcatttcaatacactaataatgaacaatctgtaaaggaaatggacagatccaacaggcagaaaatcagcaaggactagtccaactcaacaacagtatcaatcaaatggatataagggcctctgtagactacatcatccaacaacaacgcagtacacaaacttctcaagctcacatggaatattttctaagagagaccacattttggggcataaaacatgctttaataaaaatgaaagaatataaattgtacaatgtcttctcataacacaatagaattaaactagaaatctataacagaaagatagctagaaaatactgaaatacttagagattaaacaacatacttctaaataacacctgggtcaaggaagaaatcacaagagaaattttaaaatactttgaagtaaatgaaaatgaaaacacgactcatcaagatttgtgggacgcaacaaaatcagtgcttagaggaaaatttatagcattgaaggcayatattggaaaagaagaaagaactaaaataaataatctaaacttccactttagggaactagaaaaagaagagcaatagaaatccaaagtaagcagaaaaga

SEQ ID NO: 176411 - DNA, 508 bp, Homo sapiens
cccagttgctgaagtcaaaaatggagaagggaggacttctggtttcaagattgctgagtaaagcaaagccctttctgcctttcttctttcaaaaactaccccctaaattactagaatagaacaaaacaaaggaatgcgaacctccattttaaataaaaccagaagtccttggtgattttgaaccatcaagtataaagatagaaagmagatgaagaggtgggaagaggcttagcagagtggatgcaagtgaaacctaagcacctgtagagagacagaccaaggaagagcaagctgggtgaccacatgagaccctgaagaagctccagaatgggaggcatacattatcactaaaggcagaagtagagcacagggttgcaaacattgcaattgaagatctgtataagcagtagttggacctccccctactatctcaactagactatccctctggtaaactcacagtagacaaaagttagagtccctggagagattgaactagaagcgtact

SEQ ID NO: 176412 - DNA, 316 bp, Homo sapiens
aagctttccagggagaagtgatgctcaaactgagtatggaataacaagcgattatttgggtagaaaagtggaaagggttcagtcagaagcaacaagaagccagcagagggaagagatcatagggtgttccagcagccgaggcatgatccttgaaccctccttctcctttacccccaacatycacctggacaccaagtcctgtccatgctacttcctcaccatcttccaacctgcccactcctttccacctctgccgccctctggatttcttgcctctcttactacaccagctttgcagtcattctcacacccctgc

SEQ ID NO: 176413 - DNA, 579 bp, Homo sapiens
ccatcttatctcctttctgacttctgctctctcatctggccactgtcccctgtttttctagattaaccactaaaagcttaaggtatgagcctttcaaaattgtttctttaataaaatacttgaaattggaaaagacttcaaaaatcattcatgatatggaattataggcaccgtgatagggagggagataaaaatatttttgaaaaaggtactagccayagcctcttaaatctcctacagtgatcaatgtctaccatttattgacattaccacacactatggtaagtactactacatgctttaattgaattttttctacaaacttagaaggttgatttaatgtttgtcttctctaacctttggacatctgaactgagaactattgctgggaaatctgccaagctgtctctctctcctttccttactgggtttaaaacatctgcttattttcctcaggcatcatagttgcattcttttctctccattccactgaactaaactggtgtttgagaacatctctgtctgtctgccgcctatctgcctacctatctagttctctgttcatgttcaaagtgattt

SEQ ID NO: 176414 - DNA, 617 bp, Homo sapiens
cctatggccttggtaatgccatctgccttatcaaacacattttaatgccgggacacttttatttttatttctaagttattatcattatattttatgttggagaacttatttaccaatatcacagttattttggatcaaatcctatcctccaggtttctaacaggaatgtcagagaataaagaaatacaatggttttgacaaaatccacacaatgagaatataggacatccttttcctatactatagagtttcaatacatttgctaagcrgaatgaacatttatggaacattaactctgtgctgagcactgttgtaagaacttacacatattagctcatttttttttcacaaaactcgtgtgagctgggtacttcactttacagttgccttacattgtgcacattatagttcttcacttgacagtagaagaaactgaggtagagatgactgtcatctggcaggcagctatctctgcttccggttttgactctgccatgacttgggacatgaatttgagcctcacagttctggactgtcagtttctcatctgtaagatggagatacttcattgaatcatctcaaaggactcctcttccttgaaaataccctgatttggg

SEQ ID NO: 176415 - DNA, 505 bp, Homo sapiens
atattagaatcacctggggaggcttaacatttacagccactcagaacacatcattaaagtaataaaatcatattctctaggggtgggactaggaatccgtacttttaaaactctccaggttataatgtgcagccaggattgtgaaccatttagacaacgaaatcaaagaaaatataataaccatccccacggaattaatcttttttaaaaaacccccaaagcattgaagtgaactactaaaagccagcatacacattacctttaaataggatgtataaattaggttagattgtaaaattcaaagaaacagaaagacctttgtataattaggtgccaatttaatggaatggtctatgtttttcaattattgtttgaccttctctaaaattttgtgatttttcactctgatttcctcagttttgaacaggtattatacacttagaatctktctgcttatagtcaaacatcttccttctctgtaaatgcgcacgtatgttcaagatct

SEQ ID NO: 176416 - DNA, 424 bp, Homo sapiens
aaaataaagaaaggtctttggtcatattccttcttctattcttgggcagtgacctccaagagggtatgggaaaatagttaggacttttagcaatgtttatgttttaattcagaggttggcaaactatggcccctgggctgaatccactctaacccccrtctttgtaaataaggtcttagtggaacacagccatgtccatgggtttatatgtcgtgaatggataatttcacactgcaaagcagagttaagtagtatgttaaagacacatggcctgcaaagcctaaaatattcactatctggtactctaaaaaggtttgctgacccccactttaatcttgtcttttaaattttttgaatgtttcatactgtaatttttatagtatataatgatagtacatgtatataatttgtaaataaaacatat

SEQ ID NO: 176417 - DNA, 424 bp, Homo sapiens
aaaataaagaaaggtctttggtcatattccttcttctattcttgggcagtgacctccaagagggtatgggaaaatagttaggacttttagcaatgtttatgttttaattcagaggttggcaaactatggcccctgggctgaatccactctaacccccgtctttgtaaataaggtcttagtggaacacagccatgtccatgggtttatatgtcgtgaatggataatttcacactgcaaagcagagttaagtagtatgttaaagacacatggcctgcaaagcytaaaatattcactatctggtactctaaaaaggtttgctgacccccactttaatcttgtcttttaaattttttgaatgtttcatactgtaatttttatagtatataatgatagtacatgtatataatttgtaaataaaacatat

SEQ ID NO: 176418 - DNA, 492 bp, Homo sapiens
ggcttgccagtggccacaaccccttgagccaattccttaacataaatagttctccytgtatatatcccattggctcagtttctttggagagccctgactaatacaggcaggaatgatgacctccacccaacagatgagcaagcagaggctgagagggtccatccacatcctcctaggagcccagactctaaaaccaaagctctttccgttgccttgccttgcaatattattaaaactcaagataggatattcacagtggtaattccattacagaatgttaggcatgtctaataaagtggccaagagatgattataaatatttcacttttttacttgatttcttattgaaatggaaaagaagctagttctttattttatttcattttattttaagttctgggatacatgtggtgaacttgcaggttttttacataggtatacatgtgtcatggtggtttgttgcacctatcaacccatcatctaggttttaag

SEQ ID NO: 176419 - DNA, 492 bp, Homo sapiens
ggcttgccagtggccacaaccccttgagccaattccttaacataaatagttctccttgtatatatcccattggctcagtttctttggagagccctgactaatacaggcaggaatgatgacctccacccaacagatgagcaagcagaggctgagagggtccatccacatcctcctaggagcccagactctaaaaccaaagctctttccgttgccttgccttgcaatattattaaaactcaagataggatattcacagtggtaattccattacagaatgttargcatgtctaataaagtggccaagagatgattataaatatttcacttttttacttgatttcttattgaaatggaaaagaagctagttctttattttatttcattttattttaagttctgggatacatgtggtgaacttgcaggttttttacataggtatacatgtgtcatggtggtttgttgcacctatcaacccatcatctaggttttaag

SEQ ID NO: 176420 - DNA, 516 bp, Homo sapiens
gaattgacaatcagttccagtaagcactgagagggctagaagccttatccaggaaaagagagagagagagagaaaaaaaaaaagagakccaggaaaaagggaccaaagtgggagggaggaagaaaggggagcataaaagtctcagaagttgccaaaccagccatcatcgttactgtgcactgaggaaatgggattcacactccatgtcaccaccaaagtcacctctgctgagtgtcacactgaagtccgcgctccagtgaaggccagccgaagccgattcttgtttcaggcaaaacctcccatttaacgctgagggagcacatatatcacacactattaaaactgccagtttccatccctttcacaccattagtagaatatatatatcattaaaggaagtgagttacaatataaaaatatggtaattcagactggcaggtcacaactgacagcacattcaggaggctgctttcccgagctgtctctagagaccctatatttagcaaaaagatgttt

SEQ ID NO: 176421 - DNA, 626 bp, Homo sapiens
tcactgtggtaaaagcacaggaggaagaggtggattggatgctaactgtgttttggaaggagactcaggcagcagtgggggaaagcctggagatgtggaggccagctttgcagtcccaaagagtgtctgggccttggtggcagcagcagaaatggagaggagagcccagacctgtgcctggtgacctgttgactgaggggccttacaggagagatataattttgacaagatttcgaacagatggttggtgataggagactaagctgcctaaaatatttataacaaaatttttatacytttagataatttggttttaagatatctgtgaaatatatacagatatctagttgagaataatagaatactagtttagtacttttttatacttaaatagtgttttagtacttaattataagttttaattaaagcttagcgcaggggtcagggctaaagatacggatttagaaatcagtcatcaacatgtaggtgagaaatgaggtcacaggataagtacaactctttttgaggcagcatctttctccgttgcccaggctagagtgcagtggtgcaatcatagcttgctgtaacctccaactcctgggctcaagtaattcttctgccttagc

SEQ ID NO: 176422 - DNA, 641 bp, Homo sapiens
tgtaatatcatctttaactacctttcatttggggtttttgaaaattaacttaggtgatgtattttcaaaaacattgtgaaaagtgcaaagcactattaaaaacaagttattatttccctctaggctgtcgagagaacaagaaactgggattggtcccagcagaagagagctgtgacccaaacagctccattcctggtgtcattacatgcctctttgagaaatgcacccttcagagtgctccaagacaaaaacatgctcaaccataaagattttattaataatttctagcaatttaatgtatctagcgttcactcagctctttgtatgcacaagacatcatgcttgggttgtggatgtgtcaagataactaaggcagagctctggccctggaagattttaagcctgtggtaagagacagagtccagtgcaaggtagagagtggacccatgtgtaatgggggtggcatctccactgtctagtgccactgaagtatcctgctggcttgcttcttccacttcccaccactgctgcttttgtsccccagcccccatttctgggagtcttaggtgcatcctgggtaatgagaggcagtgttgtacagtggtggaaaccagggacctgaagccagactgcccacgttt

SEQ ID NO: 176423 - DNA, 593 bp, Homo sapiens
aaaccatcagaccttgtgcaacttattcactccatgagaacagtatgggggaaaccaccctcatgattcaattctctctcaccaggtccctcccacaacacgtggaaattatgggagtacaattcaagatgagatttgggtggggacacagagccagaccatgtcactatgttaytattgccaaattattctccatagtggttacatcagtgtatactctcacagcgttatatgaaagtttccatttacccagatttttgccagctcatagtatatgtatgactttacatgtttgctattctgatagttataaaatggtatatatcatcataattttgagttttctctgatttcagtgtcttcaatctgaatctgttagagaccagtattagtggtttctaaaaggccttttgtttttgaactgaaaactttgtttaaccttttattgtgatatttgtcagtagtgatatgatctctattatatatccaacttatttttcagtttgctaatccagactttacacaacctatctcagaagttgtagatgaagtaattcagaattgtcctattgatgtcagacgtcctctctaca

SEQ ID NO: 176424 - DNA, 501 bp, Homo sapiens
aatcaaatctgtacaaagagaatcagtaactgtaaccacagaagtaaatacaaaagactatacaaatgtatttttgtttgtagctttctaaaaatcaactatagtatttaaatgacaatttaaatactttttaggtttaaaggacaatgaatgcttataatctttgttgagtacacagtgaataaatatagattttcatggcaataacagcataaagtaggagagaattaagttaaataggagaaaagttattgtatattattaaaattaagttggtattaattaaatacagattattagaaagtaacatgttaattgtattccccagggaaatagctaaaaatagatttaaaaaatctattaaaaacaagtaaattaaaatggtattgcagaagctgtttaatayaaaaatgtcacaataatatatgaataggggaacacagaagactaaggcgtatagaaaacacataataaaaatcagacacaaatctattagtgata

SEQ ID NO: 176425 - DNA, 381 bp, Homo sapiens
ttgaaaattctctgaagcaatataactcatctaatcatattattattattttgtgaaatattgttactattcataaaaatttatgtcagcatagtacacatttattactactatttaagtgatttcagaagtaatttttaaattctctatcttaatttctaatagagtaaatattaatctatcattttaaggtaatagtaacaaaactgcccttttggatctctatcaatatttagtgtgtaagtgtttcctaagaccaaagaataggatagccacttctctggagcatcaaacctcaaaycctagttattatgaattatatcttgtttaaattttggtttttagttccttcaaaattctgattttgagtttcctctttta

SEQ ID NO: 176426 - DNA, 236 bp, Homo sapiens
cataatatttagcttgatagatttcatattatgttttgtgagataatattttagacatacctttagccttaagttttacaaatgaataaaatacaatgtgtgtgtgtttgtgtgttatacacacakgagttcacttgcactgaagtattttttcattttagtggcaaactgaggtgtctttaaaattccagagtgaaaatcatgtgaatgtccttagtataatctgtagaaaataa

SEQ ID NO: 176427 - DNA, 236 bp, Homo sapiens
cataatatttagcttgatagatttcatattatgttttgtgagataatattttagacatacctttagccttaagttttacaaatgaataaaatacaatgtgtgtgtgtttgtgtgttatacacacatgagttcacttgcactgaagtattttttcattttartggcaaactgaggtgtctttaaaattccagagtgaaaatcatgtgaatgtccttagtataatctgtagaaaataa

SEQ ID NO: 176428 - DNA, 567 bp, Homo sapiens
ttacactgtgctatgtgcataaatttagtaaacatttataaaatgtgctgtgaattttaaagtatttttaaagaatattttatttgatatattcatgmgtttgaatcagtgttctctacataataactgagaagacgtagaaaaatagttactgaaaatattttactttcttagtttaaaaatggaatacatgtagtatacgtggctttttttcctcctattttttcaagatacatgtcctttccacattggctagctcaagtacaggtttgcctaaagaaaatttcactgaatgagaaccgcgcaatttataatattaactccttgagctgtatcctgtcaatgtcacaagcccattaaaattaataataagtaattaattaaataaataaatttattatttttattaatagcctatattttcaatcttcacaacttatttttacttaaacagtgtaaagatcttgtactcaatgaaacatggtaataaaacataaccaaagattagaagtgctctaatcctttaaagtagatttaacttaatctaacctaaatctaaaatataaa

SEQ ID NO: 176429 - DNA, 567 bp, Homo sapiens
ttacactgtgctatgtgcataaatttagtaaacatttataaaatgtgctgtgaattttaaagtatttttaaagaatattttatttgatatattcatgcgtttgaatcagtgttctctacatwataactgagaagacgtagaaaaatagttactgaaaatattttactttcttagtttaaaaatggaatacatgtagtatacgtggctttttttcctcctattttttcaagatacatgtcctttccacattggctagctcaagtacaggtttgcctaaagaaaatttcactgaatgagaaccgcgcaatttataatattaactccttgagctgtatcctgtcaatgtcacaagcccattaaaattaataataagtaattaattaaataaataaatttattatttttattaatagcctatattttcaatcttcacaacttatttttacttaaacagtgtaaagatcttgtactcaatgaaacatggtaataaaacataaccaaagattagaagtgctctaatcctttaaagtagatttaacttaatctaacctaaatctaaaatataaa

SEQ ID NO: 176430 - DNA, 561 bp, Homo sapiens
gggctatagagtaatatgagaaataccagcataaataaaagtatagaaaacatttattcagttttgatctctgcccaaggattttcatacattttattttctatttacttatttttttaatgtacacagtgtttattggttttttagatttttagaatcaactggtgaacaaagcatgaaagccttatgtttataagacagtatataaaaatgatcaactctgacagtataaaatttaaggtatggctgagagaaactaatctattatctgaaaacaatagaccaagaaatggatagayaagagattgcaagttagagaggcaaacaacagaaaactaaaaataacaatgtaactgtgaaaatttagctgatgatatagtgtcagtcagctaaagccttgtgtttcatggcaagcagtcaatagagcctcagttgaatatcaacatagagatgtaaggacgccatgtagaatgagggtgctagccaccagaagaacaaaatgcagaaatgctgaaaggtggtggcctctgggactatgggtaggacaagggaatggagtgg

SEQ ID NO: 176431 - DNA, 582 bp, Homo sapiens
gattcctattaaggctgaatatctctttgtaggtttgtcacttttcatactgcttcacttttctcttgaatctgtgctaattaatatttttcttttcccttgtaaactatttatattttatctaatttatttgtatattagagatttttctcttatgcagaattaaatattctaaatatagtttgcttactaattccaggtttttatggggctttccattatatgcattgtttcatctgtcaatttctgaaccaatatcacactttttagttaataatactacaatatatttttagatctgattgagctgttttcctgttgctcaatttmaataccttcaattcatttatttttcaaaaaataatgtttcaaaagaaaatgttctaagaacaaattattttttattaatttaaaacttttattctgtcatttaatagacttttagaggtcacttatattttctgcctttttttaagcttaatcttaatctttttatatatttgtatttctgatgtgataaattgttccaattgcatttacagctattgtggaatagaactattgatccttcttcacaaatta

SEQ ID NO: 176432 - DNA, 606 bp, Homo sapiens
acttcttggaaaacactgtgtcctctctagcacacacccttccagtactaaatttttcattttaaatcccgtagtttcataggcttgatgttgaacttggtacccttttatttattggttctcctcccagactatatatcatccgacctccacttaaaaacacatcttgaatatcatactgaacgatgaaccacatattattgtttcttattgtactaatatatggaaacrcaggtctcttaatcttgaatattttagctcatggctcagtttaattctgcaacattgctctttcatagtttgaatgatttcatttttctcatatatgaacatttaataggctagtgtggcaaagagtgggtattttgttatgaaaacaatttctctttctttttgacaaagagctagacaatatttacaagtcacctttatgtggacatgtggatgaattatggctaacagaatattagccgtaatgtgaaagacatttggtgtcacattgtatttcaaaaaataagtatactttcacattatatttcaaaaagtaagtgtacttttgtaacttgactacgcctaataatttatttcaagggatgaatgaaaggt

SEQ ID NO: 176433 - DNA, 392 bp, Homo sapiens
atctggtgactggccctggggcaattaaggcttgtacacactgacctgaagtgttacagacctgactgaatrtaatgttagagagttgatttaatcaacagatcaagaaagaaaattaaccagcctttaatcgtgcctcagtactaggttaaaatagcattaaaaagaaaaacacctctattttggtacctacaatgtactaaacacttggagaagcaaagaaaattggagaagaatttatacagtattataataaagtatgaaataaaaattataattatttgtaatcttttgaatgactttgtcagagtacactgatagattaaaaactatgtcaggaactccataatatgacgacacagggtccttacttttactcatttaagagcagt

SEQ ID NO: 176434 - DNA, 566 bp, Homo sapiens
ccaatggaacaagctatggaatgaagcttgttataaaagtggacttcagggtgcattaaaaatgattgtgtatagacaatagaacattaaaacatgttttcttaggaacagatgccagctggcagggaatagagcacttaatttaattttttaaccaagacagcttatgtgtactcctcaaatacactattacatataggacaatttattgccaccattgcaatggaaacaactcaaaactgtttgggtagacatattattttgtatttctattttgtttatagtaaagataaactgtttcatgcagtttatagtaaaacagcaattattagtagaatctggaggttgaaagcaggtgaactatccttctggatactggagtagccatttctgttctcctattcaatccggcctcccctcgttccttagcatgaycatgaaggacatcttaggaaagtgttttactcgatattttccccctcagctgtaaataggaaagcctcttgtttaattcatgccttattaatcatacataaaagtccaaatcctctgctagacaggaattc

SEQ ID NO: 176435 - DNA, 400 bp, Homo sapiens
caacctttcccttaagagagagaggaaaaaaaaagcaagttatggttgactaggcaataatgacattttttgcaagtaacaaatttgctgtgttagattttactttagcaagcactttgcaattktcagctggtattaaacctattaggaaatttattaacatgttaattaaaatggctgaagaagataagaattgatggactaaaagaggcagcggattttctgttacattacttcctggaatagaaattatttctccatgtgattttatgctgtttttctttttcattgattatttttaaaatttgtacacattgagttattattacttggcttctaattgcattttattattacttggcttctaattaattccagggcatgccaaagaatgacttca

SEQ ID NO: 176436 - DNA, 609 bp, Homo sapiens
ataaagaaatacttgagatggggcaatttataaaggaaagaggtttaattggctcacagttctggaggctgtacaaaaagcatagtgtacctgctcagcttcttgggagccctcaggaaatttacaatcatggctgaaggcaaagggggagctaacacttcacatggccaggagcagcaagaagagagcagggaggtgctacacacttttaagccagatcttctgagaaatctatcactatgcagtaccaagaggaaatggtgctaaaccatgaaaatctgtcaccataatccaatcacctcccaccaggacccccctccaccattggggattatattttaacgtgaaattttggcaaggacacaggtacaaacaatatcactctgcttgcttttattttcccagaaaataaacaatcttgtttcatcttcatttgtgaaatatttaaatttatattgaataacrcatttacaggtcatttttaagcactttaaagatggcattccattgtcttctggattgctaagattctgataagaagtctgttgtcattcttatcttgtttttccctgtgtacataatgtatatttttattggccattattaaga

SEQ ID NO: 176437 - DNA, 576 bp, Homo sapiens
ttttggcaaggacacaggtacaaacaatatcactctgcttgcttttattttcccagaaaataaacaatcttgtttcatcttcatttgtgaaatatttaaatttatattgaataacgcatttacaggtcatttttaagcactttaaagatggcattccattgtcttctggattgctaagattctgataagaagtctgttgtcattcttatcttgtttttccctgtgtacataatgtatatttttattggccattattaagagtttcttcctatgaattcttttcagaaattttattacttgtaccttaatatgtgtttggttgtcttcatctttattagaattctgtatgtttcttggatctttaggtttattttgtcattaagtttgaaaaaaaaarccattatttcttttctattttgttttccacattctctttcttttcttgcagggactttcaaacatatgcaagagcacttgatactaccatataggctattgaggtgttgcttttgtttgtttgattggctttttcctagatattttctttgtcagcctcattctgaatggtttaaattg

SEQ ID NO: 176438 - DNA, 360 bp, Homo sapiens
gagtagcttccatccagttaacctcaaaayatgtaagagaaccaagccaagagcagcaggtgatataatttatgcttgtgaagccatatggcatagtggtttcagagcatggatgctgtactcagactgtaggcccatgaataagcccaactgagaccagaagaatccctgagttgagaccataaaaaatatctaaagaaaccaggtaactgtgaacaagaataaatgctctttgttttagggcaacaagttttgggttggttatattacgtagcaacagatagcaggttgtcagctattcttcttttagaaatttacaaagtataaaataactaacccatggttccgaagctaacaagt

SEQ ID NO: 176439 - DNA, 577 bp, Homo sapiens
gaggcagcttgctagatatctactatcctgtcttccccagacataatcttagctattcctggttatggcagggaaaccagaataatgtggagaaaaacagaacaaaagaaaaatggttttaggattctgatggtctgtgtttgaatttcagtttgttcatctgtgcaacaagtgacagattgctttatatccttgggtctcagttttatctataaaataagatttatcaacctctttagataaggcataccatacttatcttactcatctgctaggattctcttttggtattcactcttacatttatgctccctctcaggtcttctttgtgaaacaggaggaggctctggacattgacacagagtcagtattgcatactttaatatggatgatgtgtagttaaatttttttttaatgaattgaagtttytctacccatattgacaatactttgtttacagttttgtatttggtcttttagcccttcctttgttaattatgacaacattactgtgaaccacattactctgttttctcctgagattccatgtatatatcctacaatattttactgtctc

SEQ ID NO: 176440 - DNA, 341 bp, Homo sapiens
tagtttctcgaggtgtaaagttaagttgtttatttgaaattttttttcttacggtaggcattcattactataaacttccgttttgaaactgtttttgctggatcccacratttttggtatgttgtatttccttctttatttgtatcagatttttaaaatttttcttttgatttcttctttgactcattggttcttcattggtgtgttgcttaatctccacatatttgtgaatttcccctctgttactgatttctaattttatagcactgctgtctgaaaagacacttgatataattgcactcaaatgcataaaaacttgtttggggcttaacatatcacat

SEQ ID NO: 176441 - DNA, 562 bp, Homo sapiens
ataaatgatactacataccacattaactcrtgcattcaacagatgcttactgatcatttattatatgtggaggcaccaaagataggtgataaacaagacagagataatccctcccctcataatgttcccagtgtattgagggagataggcaataaacaaattagcccaaaagaggtggtgatgagactttgcaggataatattttaagatactaatttagttttttaatgttatattttcccttttctcattaatgccctaggagaagtttgtgacaggaaaaaataggctaacatgaagtttcttccctggcttttgtttccaaatgccattggtaattgaggaactcatgctaggtgtttagaaggaaagaggaaaggatgtgcctctggaaagtcagggaaaataggcttcccttgagaattaaagaagttcccttaagttggaacttggattgacagttgttggtatataggaatgctagtgatttttgtacattgatttttgtatcctgagactttgctgaaattgtttgttaacttatggagcttttgtgttgaga

SEQ ID NO: 176442 - DNA, 586 bp, Homo sapiens
aacaagaagaggtttttctcttccttactctctactgtgagtttcagttcatgggaaactttagcaaatagaaaatagaaaaatttagtaaatagaaaatagaaaagagaaaatttgtctttctcttggagagtatctgctttctgaggcagctacagtcctgtatcttagtcagcacctattcctgtcttgatttctctttttctgtatcyatctagttcccctaaaacacacactgcagaacttagagaggagctgaatgaaatgactgtggggaagttaagctatgatagagagagatcacaggcagaactcatgaacagatgagacctaggagcggcagtacttgtggactgtaacttatcatacttgattccagtatcagagctccacatactaaacattcagttaggaattgtgcacatcaaaccgcttatgcagtaaaataagctttctaaaaatactcagtgctgatgagtatgcaatgaaatggcccttccagttaatttgtatttacaattataaaatggtacatgttcaagtacttctatcttaaaagcctggagacaaatgtatattaatattc

SEQ ID NO: 176443 - DNA, 572 bp, Homo sapiens
agcaaatagaaaatagaaaaatttagtaaatagaaaatagaaaagagaaaatttgtctttctcttggagagtatctgctttctgaggcagctacagtcctgtatcttagtcagcacctattcctgtcttgatttctctttttctgtatccatctagttcccctaaaacacacactgcagaacttagagaggagctgaatgaaatgactgtggggaagttaagctatgatagagagagatcacaggcagaactcatgaacagatgagacctaggagcggcagtacttgtggactgtaacttatcatacttgattccagtatcagagctccacatactaaacattcagttaggaattgtgcacatcaaaccgcttatgcagtaaaataagctttctaaaaatactcagtgctgatgagtatgcaatgaaatggcccttccagttaatttgtatttacaattataaaatggtacatgttcaagtacttctatcttaaaagcctggagacaaatgtatattaatattcattttttcttcagatgttagaaagtcaarataatgtgcacctaccagc

SEQ ID NO: 176444 - DNA, 558 bp, Homo sapiens
gtttgattcacatagctatatcgtacgctgaacgtactaaactagttagatctcccactctgtctgaaccataaaattagtgaactaaacaaactcaagaaacatcttacatgtgaaacacagaaactgtttttatacagcttaacatatactaacaaagagattgttgttattttaataggctaaactgtgatcctaaaatattagtaatcacyttaaggccctaattaacacctgcacatgtagaggctttttagaattatctgctttacttctcagtaggttgatgttgataattgaagtaaggcaaatgtcctctgttcatctttactgcaactcagacttttactatatatcctattcattaaaaagaataaggaagcaagaaagataaaggtaatcaatctaccttcacatctgtatcaatacctatatctatatagctttgtattttatatttgctttatagggcattcactttttatactcccattcgaaattctttacattttatgtatatccattttaagtgtatccagaaatatagaccaacttgac

SEQ ID NO: 176445 - DNA, 540 bp, Homo sapiens
aatgtagacaaaatgaaattggcatctcactgaatatagggttttagacagtccttttgaaaactctcattgtttgtgtggaatattggctagtttcggcataaaacaacaacaattaacaatacgaacatcaaaagctttatcttggtgttcaaaacatactgcttaaactatatgtagtgttttcaatgtgatattaaatttacctacattaccaaacaacacccactaagaagtgaatgtatcaagaagctatccaacataaagattcaatttgggtaacggaatgcacaacaaatcagcatgaattttgtgtactttctaccataataaagaattatctttcaaaaaagraaaactggcaaaacatttgttggaagagccctttaagctaagtgctaagtacaattcattccaacacatttcagtattcatctttttcaacaatctcatccaaataatcagctgtcattatatcagaagacaaatatatccatcaagaggatgttagaagaaaagcagagagcaagacaaatgtct

SEQ ID NO: 176446 - DNA, 568 bp, Homo sapiens
tcaaattatgccctagagatagagtacctttcttcatctcttcttctctatgtttgctttgctgtcttcattcttttatccagatattcccccaaatgatgctcctctgcaaccacagttaaaaagtattttcctaattattccagtaaacagtccttgcctggggtcctatatttctatttgggtcacctacacrtaatacacaggatggatagtcaggtctttatcacatctagctctggttgtggggttaggatcatccccaaccaaaatacaagagatgaaagtgaagcaatggttcattccacagttgaaaagtggtgcacttttatagaaggcaaaaagcatacctggtagaagataacaagggtctactgtattccatgccttggtagctcagagataatatgtccttgtatccataagacacattaaaaataaacccatttaatgcgataaaagtacttcacctaccactaaaaatgtacctaccttatattctcaaggagataacaataattctgcgcagatataagtccaaaatctttgagttaatgtgcctcgttca

SEQ ID NO: 176447 - DNA, 504 bp, Homo sapiens
actgcagtcatagctaagcctaaaagctcaaattatgccctagagatagagtacctttcttcatctcttcttctctatgtttgctttgctgtcttcattcttttatccagatattcccccaaatgatgctcctctgcaaccacagttaaaaagtattttcctaattattccagtaaacagtccttgcctggggtcctatatttctatttgggtcacctacacgtaatacacaggatggatagtcaggtctttatcacatctagctctggttgtggggttaggatcawccccaaccaaaatacaagagatgaaagtgaagcaatggttcattccacagttgaaaagtggtgcacttttatagaaggcaaaaagcatacctggtagaagataacaagggtctactgtattccatgccttggtagctcagagataatatgtccttgtatccataagacacattaaaaataaacccatttaatgcgataaaagtacttcacctaccac

SEQ ID NO: 176448 - DNA, 530 bp, Homo sapiens
gaacaaaacagttccaaacttggatcttctctctacttgaattatcattaaatatttgtattttcttagtagagcgatagatttgatattagatatgggaatctccaaaaacaaataatgctctttatattgagtcactaatattgcatatgtattagctctgaaagctatatttgtgtctaaaaatagaaagattctttattcgatgaatgataactttttttttcaacccactctgccaaaccacactctgggccttggggctgtggcygagaatgaagcacagagacaacaataaactactgtgtactgggggaagttattatcagtttcccatgagagaaaaaagatatcaccaaggcagctgggagattcatctgccttggttctggatacaagaaatcaaattgctccttagattttatgttaaccggtcaggatttaggtgaaattagacctgaatttacacggtatacaacatccatttaaagtggtcacttaaagtggaccaaatgacagaattaaagtaa

SEQ ID NO: 176449 - DNA, 530 bp, Homo sapiens
gaacaaaacagttccaaacttggatcttctctctacttgaattatcattaaatatttgtattttcttagtagagcgatagatttgatattagatatgggaatctccaaaaacaaataatgctctttatattgagtcactaatattgcatatgtattagctctgaaagctatatttgtgtctaaaaatagaaagattctttattcgatgaatgataactttttttttcaacccactctgccaaaccacactctgggccttggggctgtggccgagaatgaagcacagagacaacaataaactactgtgtactgggggaagttattatcagtttcccatgagagaaaaaagatatcaccaaggcagctgggagaktcatctgccttggttctggatacaagaaatcaaattgctccttagattttatgttaaccggtcaggatttaggtgaaattagacctgaatttacacggtatacaacatccatttaaagtggtcacttaaagtggaccaaatgacagaattaaagtaa

SEQ ID NO: 176450 - DNA, 541 bp, Homo sapiens
gtaggtacttctgtctttaactgctgtctgaaaggaggtgagactttttccctccaccctcctccccctacttaccaggatgaatcttagtgttacttgtttcaatggggctgaccatcagattggtagcatttccctcttgcccataggagtgttatgaaaaccagaccactgtctttgaacccacctccgtgaacttgtccygcaactatctccccaatttctccttaataacaggcaatgaaatgaagggccatttattgccaggttaaaacacagaaggtattaaaaactttgtaaggataaaaattgtagagagctgtcaaaagtacacacctattggtcatatgaaatgtcaagcccatatcatggtaataatgctctaccacggtctaaccagcgtatttgactcctcttctgtgaaaattgagacaaatttgaatttatgtgatgaagctatttcttttttcttaaactaaataatgttgcctactctgctcttgaagacaactcccattttatgttcttttgcttcctgtat

SEQ ID NO: 176451 - DNA, 611 bp, Homo sapiens
tctatgattttagggtagaaactgtcaagtttgtagtcagtaggtctagagggggcccaggaatgttctgccaaaatttttctgataycaaattctatcttactgttgacttttggagaaaagtgggtaagtaatcttccaattttttgagaaattctttttcaaactttgtccagatttctacttttggtgaggtggagggttagaggatctggaacagtgggcctgagaattttcagagcagcaattggcaggaactgagtgtggggagaggtggggttgcggggaggaatgcgttcttcagagacgtaagtcttttctagtttgccacggtatccacccttctctaataccagcaggtcacttgcctttgcaacccttacttgggctcccccagaacctttagaatttttctaaagatgggaacaccacagcgctctctagtggtatatatgtagtaaccagatctgaaaaagattgcaggaatttattcctaaatttcagaattggctcagcaaagcaatctgcaaaagaggacagtcttacaacttcagttctatctcagggttttcttttgtacactgacttgtcaggagttagttgtagaaaca

SEQ ID NO: 176452 - DNA, 611 bp, Homo sapiens
tctatgattttagggtagaaactgtcaagtttgtagtcagtaggtctagagggggcccaggaatgttctgccaaaatttttctgataccaaattctatcttactgttgacttttggagaaaagtgggtaagtaatcttccaattttttgagaaattctttttcaaactttgtccagatttctacttttgktgaggtggagggttagaggatctggaacagtgggcctgagaattttcagagcagcaattggcaggaactgagtgtggggagaggtggggttgcggggaggaatgcgttcttcagagacgtaagtcttttctagtttgccacggtatccacccttctctaataccagcaggtcacttgcctttgcaacccttacttgggctcccccagaacctttagaatttttctaaagatgggaacaccacagcgctctctagtggtatatatgtagtaaccagatctgaaaaagattgcaggaatttattcctaaatttcagaattggctcagcaaagcaatctgcaaaagaggacagtcttacaacttcagttctatctcagggttttcttttgtacactgacttgtcaggagttagttgtagaaaca

SEQ ID NO: 176453 - DNA, 595 bp, Homo sapiens
cttttcttcctcaggaacaccaattattcttagatttagttgtttaacrtaattccacacttcttagaggctttgctcatttttaaaaaaaattcctctttttttggctttgtcagattggattaatttaaaagccatgtctttgagctctgaaattctttcttctatttgttggcttgtattcttgaaactttccagtatattttgcctttctctaagtgtgtctttcatttccagaagttgtgattgttttctatttataatatctatttctctggagatttttcatccatatcctgtattattttttaattttttttgagacagagtctcactctgtcacccaggttggagtgcaatcttggctcactgcagcctccacctcctgggttcaagtgattctcctgccttagcctcctgagtagctgagattacagcacctgccaccatagccagctgattattgtatttttagtagagacggggtttcactatgttgaccatgctggtcttgaactcctgacttcaggtgattcacccacctcggcctcccagtgtgctcgaattacaggcatgagccactgtgcccagccag

SEQ ID NO: 176454 - DNA, 520 bp, Homo sapiens
gtgtttatgccctcaaacctagcctgtttctgaagttttcttataatgtctcctgtgctttgatgacctaaagccgtgttaatcatgcattgattttcagggctttcaagatcaaagggtgtatacatacaataggcctcaaagtctttcatgaaattgtgctggactcccttcttttccttgaatgacctcagacacttttttaacatttctggccttctgagctcccttctttaacccttccaggatgccaggggcatagttggtgccatttcctgccatgagtcttctcatattgggtcagacagaactttaggagccgacttcctttggcgggtggagtgggatcyttcattggctatctgtcccattgccactagcactgctgctgctgctgcctgtcctcttaaccactgtgcagggggtctaaaaccagctataaccaagtgtctatgtatgggaactgatctgggtgccctggtttacagattatcttgtgcaattcctttgaaacaaggga

SEQ ID NO: 176455 - DNA, 622 bp, Homo sapiens
gaagccgtggaggaacaagagggtggcttccctcacawgaagggcacctgggtaatgttttaaaatataaagatggaaccataggactgaaagaaaataagtttgacgatattgaaatttcttaatttttttctttcctgtatgaagagaaaattagcttattgataataagcaaacttatttctaagtactataaaggtgtattataagaatgattgaactaatatctaaaatttgtttaacaattataataagtttgcactgaagtaacacacatttgaaactgagttgtgtttgtgaatgctgattgcctgtactcaaccggttttctgcagaactcatttatattcattatactttagagttttctactttagggcccagaacttcgtgtcagttgtattatcaaagtacgatgtaatatttaaaattttccaacaggaagaagtaactgaatactgaagattgattttgcagtatttgttttcttgtgtctacatgtggaaacatctatgcaaatgtattgctttgtaattttgatacagagagtttgtacattggcctgccgtaaagcattttcaatttaagaaatgtagaactttaatttctgaaaagagtctgt

SEQ ID NO: 176456 - DNA, 628 bp, Homo sapiens
aggaacaagagggtggcttccctcacaagaagggcacctgggtaatgttttaaaatataaagatggaaccataggactgaaagaaaataagtttgacgatattgaaatttcttaatttttttctttcctgtatgaagagaaaattagcttattgataataagcaaacttatttctaagtactataaaggtgtattataagaatgattgaactaatatctaaaatttgtttaacaattataataagtttgcactgaagtaacacacatttgaaastgagttgtgtttgtgaatgctgattgcctgtactcaaccggttttctgcagaactcatttatattcattatactttagagttttctactttagggcccagaacttcgtgtcagttgtattatcaaagtacgatgtaatatttaaaattttccaacaggaagaagtaactgaatactgaagattgattttgcagtatttgttttcttgtgtctacatgtggaaacatctatgcaaatgtattgctttgtaattttgatacagagagtttgtacattggcctgccgtaaagcattttcaatttaagaaatgtagaactttaatttctgaaaagagtctgtgactctggaaagatct

SEQ ID NO: 176457 - DNA, 507 bp, Homo sapiens
ttcatggcaatcctcagtgtatcatcaaaaacactcagccattgtgttctgatccaaaggaaacagtccattatggacatttaatgcaaatccagtagagacagacagaaagcaaattcttgcttaaaatcaaaagtctttgtctacaacctgtattttgaaattgtatcacattatatattgctgatattagaacactgagattgattaatggtttattgttcaatgtcataaacacatgatacttgagaactcagggggacataaagatgactaagacaactctattctttcatagatgaacatatctttagactttgaaggctgaatggtccaaaagcacatagctaaagatattatctgatataaaatgattttttcccctaggccaaacataattataacrcatttagtcatacaactacttgttttctgttttggcctatttaaaaaaaattcaataggtttttggggaacaagtgatgtttggttacatgaatatgttat

SEQ ID NO: 176458 - DNA, 544 bp, Homo sapiens
cactacacaatcagaagtttacacttggggtttcttaaaagatactttatttcgcactccatttgaacaaaacaattctgcttttgcaacagtttggtgtcaccatgacaaaagtagcttgtagtaaagtgctctttaatttatccataaattgcagcttattaaacagctatgtacctagtggggaagtattgtaaactgcttggagaaaagaaataatataaggacttgtattcacaaaataccatgacatgcgcaagtctatacacagctcaaattctataaagttcatatcctgtcatcaaatggatccagtagttgaattgtttctcttaatgtgaggtttttacagttgccctttctacttctttctctcatcacctgtctgagacagttatayttcttacaattgacacttgaataaacatccctaactacaaattttgcaaaaatattctctcaaagtgttttttcctccatgcttaatctaccatgcttgagaaagtgagtaggctagttatattgcatggtaattagttatccc

SEQ ID NO: 176459 - DNA, 580 bp, Homo sapiens
attattattctacagtcttctacagtcttctttaacctggatattttatattaacctatattctagtacaccaatcctttcttctgctgtttgttcagcaattaaacccatctattaaatatattaagtacacacttcagcattgacatttttgttctaaaatttttatttggtttagtagataaagattattggtatctgttgaaattccccacccttttctttatttaaacatattaaccataaacatattaaccatacttatttcaaaactttttgtagaattctaatatcataatcatgcctgggtcattttttamattttttccttcttagttttagccaatgctcatttttaatcatgactttgaattactgattgaacattacataaaggagttgcagaggttcatgattgtgcaatctttcaaagaggggcaagttatttcttgcagacatatacagtgtggattacttaaatcagttggattctgttagcactagcttattttattgctctccttacttccgggaagtagctcttattcctggaatccggatctttctttacttactctcc

SEQ ID NO: 176460 - DNA, 311 bp, Homo sapiens
aaggagcatgccaagaaatctaacttatcagtaaaaaacacataaaaagagacagattgtatcacttggaacggtgtgatcaaaacaaggaactgaccattgtacawtaaattttctaataataagtatatgttaattgaaaaaagtttaacataaaaaagaaatttaaacaagaaaaggtacaactctaaagtaaatcttattctgagacacaaaaaccagatgctacagaatagtgggaaatctgtatgtcactggggttcccaaagcataaagccatgctacagtaaaaccattgtacttaattcaga

SEQ ID NO: 176461 - DNA, 599 bp, Homo sapiens
aatactatgcttaaaattggttagatttattcgggaaataattgttttctctttatggtgtgtagttggcttattccctctttcattgagtaatatttaaacattgcacaaagaacaaataaatttgcgcctcacccaaaattcatagaatcatagttctggaaataattttaagatgtaatacaattattgactgtgaaagctcatcttttagacttcagtttaaatctaagaaaaaaagcaaagcaactactttgtggtgtatcttgttaatatcctgtactaatctacaagcatatgtggtcaaaagtgttaatatgagggagaaaaygttgaaatagactcaacggctactcttataattgtgacatataattcaaaccctatcaccactacatgttcactatattatgtgtgaaataagcatcaaaatggtatcttcactaaacactactgtgaaagttgtatgatcaatgatcaataagatgtctcctagttatagattagagaaagtacaattaagttactgacagctcaaatttgctcagtggtctttattagccctctaactggacaagtcccataggcaaaccttaact

SEQ ID NO: 176462 - DNA, 516 bp, Homo sapiens
ttactccccacacccctcagtgcctcttcagattcagcctcacactggaacacacaccattatgagattaaaaaggataaagcagcatctggaaaactaaaatgtcgtaaaaagcttaaattacattttattcctcaggcttaaaacacaaattgagaattattcaaattaagcttacttacttcccatacctcaaattataatatgatagcacagggcaattgcaaacagaggtaaaatccaaaattttgcacatgggtagaaacagacagaaaatgtcatataacttttggggacactgataatgataaatttaaagagcaaaggaaaaastccggtgtcaactaattcctatttcatgtatttaagaatttcaatatttctgaaatatatagatgtggccagttttagaaaataggaccattatggtatgaattcttacttcaaggccaatagcaacaacaacaaaacattatctaaaacaatttgaaaaaaaaagccccacccaaattctca

SEQ ID NO: 176463 - DNA, 550 bp, Homo sapiens
ccacaaatttcattgaaaagtccaaaagatgtraaagccaaaaataataaataagtggaggtgattgttttaaaatccagtgttattgtgagaaagaaatgttaagcattcctagaaaagtatgtaactctgatttttagttctaaggtcttaaatacccatattcagtgagaagaaccttagacatcatcaagccttccacatgcagcaagttaactccaaaaattatagacattgatctaaaactaacagtaaactttccaggtattcgtatttccatgagcaggatgcacgattctgactgtccagctcttataagccaagagggaccatttttgtccacccagttgctgataggcagcaagtatgtaccatttctaggacgagttatttaaattttgatggggcttattgataaattagtcataggcaaattctcacttgttaatgtaaaggaggaaggattcaaggaaagaaaaagtttaatgtgtggatccaattaagagtatgcaactcctcggccgggcatggtggcttacgcctgcaatcc

SEQ ID NO: 176464 - DNA, 575 bp, Homo sapiens
actcaagttcctgataacatgtaatttccttgatatgacaaaatrtcattttggcattcatgtcatgccatggtgttcatttttcattttcctgtaagttaatgagttctagcaaagagcgccttcataaagttgtcgtttgccaaaagtccagctatggcatatggaaccagtgacaagctacagtattaaagagatttgttttaaaccgagcctctgaagtgtgcatggaaatactaaatacattcctgtgtattttgcagataatcctgatttgctgagccatgtcacagtgggtattagagttctggatgtcaatgacaatccacccgaacttgccagggaatatgatattattgtatgtgaaaattctaagcctggccaggtaagttaattgtttccttcctcctcatttgaatggaataaatgcaagcgcctttatttttattattcttaggtataatcccccaaagcccacagtgtaattttgtactcagtggaaataatttcataaagctttattttaagtaccagaataatttttggagaatcaaagcaattgaattttctttgga

SEQ ID NO: 176465 - DNA, 563 bp, Homo sapiens
atattaattaacgataaaaataaggtcaatattaagcaaaattatgtattttacaatrtatattataaaagaaaaacctttcacttggttattctctgaatcaatgttaaatatttaataaattgggagaaataactttccagataaatacggaggatttcttggcacaattttttctagccaccacaatttggtactaaagcaactaaagaatgaatgtcagagtatcttatactggagtacagaataaggcacagtgcttagtcattagtatgttctcatgagtgaattaaaatgccattgagtctcttctttgctacatttccctctctagatttttccaaccaagtaattgacgctgcattctgtcatctctatgttgttttaatctactacttactgaaaagtaatctctgagtcactctccctggtggaacagcctctatccttaaagtcaaaccatgttctaccacttttaacaatacaatttgtagtgatctctctaaagtagctcacatttcacctccatcaactgcaaattacataattacatttcatatcat

SEQ ID NO: 176466 - DNA, 563 bp, Homo sapiens
atattaattaacgataaaaataaggtcaatattaagcaaaattatgtattttacaatatatattataaaagaaaaacctttcacttggttattctctgaatcaatgttaaatatttaataaattgggagaaataactttccagataaatacggaggatttcttggcacaattttttctagccaccacaatttggtactaaagcaactaaagaatgaatgtcagagtatcttatactggagtacagaataaggcacagtgcttagtcattagtatgttctcatgagtgaattaaaatgccattgagtctcttctttgctacatttccctctctagatttttccaaccaagtaattgacgctgcattctgtcatctctatgttgttttaatctactacttactgaaaagtaatctctgagtcactctccctggtggaacagmctctatccttaaagtcaaaccatgttctaccacttttaacaatacaatttgtagtgatctctctaaagtagctcacatttcacctccatcaactgcaaattacataattacatttcatatcat

SEQ ID NO: 176467 - DNA, 516 bp, Homo sapiens
tttaaatgttaaacaaccagtcttcttttcctaggatrtccctcacttggtcataatgaatgtattatcaaagcctgagatagtcctggggctcagattatgtaagtctcttctcccagagagcattcttagcattatctattttcttttttatatattttattccattttacgatcctttgtgatggcaggccagttttaatcagttgctctttcctgactaaggtggattttttttttaagttctatttccaaaccagtcaaacttcttattgtaattatgtagtttatttaaatattaaacaaaataatgggatatacgcacagaatggattcagaatttgtgtaacgtactttaagttgaaagtttcccaagacttcataaaagagatttgctaaaattatgttccaattaaggagaacagttaggcaattataaaatctcaggtaattttatagaattagaagtgttgccacgcttagtgttttgaaagaatcttcaagttcttccctcac

SEQ ID NO: 176468 - DNA, 516 bp, Homo sapiens
tttaaatgttaaacaaccagtcttcttttcctaggatgtccctcacttggtcataatgaatgtattatcaaagcctgagatagtcctggggctcagattatgtaagtctcttctcccagagagcattcttagcattatctattttcttttttatatattttattccattttacgatcctttgtgatggcaggccagttttaatcmgttgctctttcctgactaaggtggattttttttttaagttctatttccaaaccagtcaaacttcttattgtaattatgtagtttatttaaatattaaacaaaataatgggatatacgcacagaatggattcagaatttgtgtaacgtactttaagttgaaagtttcccaagacttcataaaagagatttgctaaaattatgttccaattaaggagaacagttaggcaattataaaatctcaggtaattttatagaattagaagtgttgccacgcttagtgttttgaaagaatcttcaagttcttccctcac

SEQ ID NO: 176469 - DNA, 411 bp, Homo sapiens
cttatcatgaacaacaacatgcatctctttctctctctctttttttgaaaaatctgtttctgtgcccttgctttttgtcatatagcaatttgggagatgtcactaaaccaatagctttctgatcactcatcctggtttcggggctatgtctgatttctgttgtttctctcaatacagactttcakgtgagaagtaggcacagaaagtaataatttttttctagatttatttctttatattctgggggcttgtaaatgtcagttaacttacataggcacagaaaatgataaattttcttctagctttttttttttaatgttctgtgggcatgtaaatgtcacttaacttacataatacaaagcccaagcacacaagaccctgcagtccagcattttctgacccttattccac

SEQ ID NO: 176470 - DNA, 420 bp, Homo sapiens
ggaaaaatgcttttggcaggttgtcatttagtgacttgcatttgaaaatcttctcccggaagtgaagagaaagggaattcaatgtttacttcaaaatgtatgtgccactgttttctgcatgtgattctgaggcaagtgttaaattccaaatagcagcatattcagataaacataatcaaatatatagtttggacaaagaaaaagttgatcctaatcagaaaaytgcacataccatatggcttaatgtttccctaatgtatgaagaatgacttatatggaactttgagaaatgtaccaaagaggacatctaaataatgaagaaacttccgtagttactaaattatgggattatttttaaccacactatacagaaggctaaatgaaaatgattcaaaaatttccaaaatatgctgcatactt

SEQ ID NO: 176471 - DNA, 420 bp, Homo sapiens
ggaaaaatgcttttggcaggttgtcatttagtgacttgcatttgaaaatcttctcccggaagtgaagagaaagggaattcaatgtttacttcaaaatgtatgtgccactgttttctgcatgtgattctgaggcaagtgttaaattccaaatagcagcatattcagataaacataatcaaatatatagtttggacaaagaaaaagttgatcctaatcagaaaattgcacataccatatggcttaatgtttccctaatgtatgaagaatgacttatatggaacyttgagaaatgtaccaaagaggacatctaaataatgaagaaacttccgtagttactaaattatgggattatttttaaccacactatacagaaggctaaatgaaaatgattcaaaaatttccaaaatatgctgcatactt

SEQ ID NO: 176472 - DNA, 472 bp, Homo sapiens
tgggagataattgaatcgtgggggcggtttcccccatagtgttctcgtggtagtgaataagtctcacaagatatgatggttttataaggggtttcacctttcacttggctctcattctttcttgtctgcccccacrcaagacgtgccttttgccttccaccatgattgtgaggcctccccagccacgtgtgaatccattaaacctctttttctttataaattacccagtttcaagtatgtctttatcagcagcataaaaacggactaatacattttctttttcatataaacatagtagcaggattgctgcatcatagggagctctatgtttagcttttaagaaactgtcaaactgttctccatagtggttgtactaatttacgttcccaccaacaggatatgggggttcccttttctccacatcctttgccatcatttgttattgcctgtaattttgatataagccatttta

SEQ ID NO: 176473 - DNA, 472 bp, Homo sapiens
tgggagataattgaatcgtgggggcggtttcccccatagtgttctcgtggtagtgaataagtctcacaagatatgatggttttataaggggtttcacctttcacttggctctcattctttcttgtctgcccccacacaagacgtgccttttgccttccaccatgattgtgaggcctccccagccacgtgtgaatccattaaacctctttttctttataarttacccagtttcaagtatgtctttatcagcagcataaaaacggactaatacattttctttttcatataaacatagtagcaggattgctgcatcatagggagctctatgtttagcttttaagaaactgtcaaactgttctccatagtggttgtactaatttacgttcccaccaacaggatatgggggttcccttttctccacatcctttgccatcatttgttattgcctgtaattttgatataagccatttta

SEQ ID NO: 176474 - DNA, 472 bp, Homo sapiens
tgggagataattgaatcgtgggggcggtttcccccatagtgttctcgtggtagtgaataagtctcacaagatatgatggttttataaggggtttcacctttcacttggctctcattctttcttgtctgcccccacacaagacgtgccttttgccttccaccatgattgtgaggcctccccagccacgtgtgaatccattaaacctctttttctttataaattacccagtttcaagtatgtctttatcagcagcataaaaacggactaatacattttctttttcatataaacatagyagcaggattgctgcatcatagggagctctatgtttagcttttaagaaactgtcaaactgttctccatagtggttgtactaatttacgttcccaccaacaggatatgggggttcccttttctccacatcctttgccatcatttgttattgcctgtaattttgatataagccatttta

SEQ ID NO: 176475 - DNA, 519 bp, Homo sapiens
ccctttcaaccacagcatcctcctttggaggccagcatcttgcaagactacttattccttgaaatacactgtggaaaaaacactgatgtcaggggatattgaaataaactcactgcatgcggcatacccttcaaagacatttttcctccctttggaacagttgaaattcaaatgacatatcctagcatgatttgccacatgggttgtgttttgaaacccaaatctaacacaacaaatttcagatagagctttgtttagcccccaggccagtttttggtcccgtggataagggttggtatccagacctcttagagcttttctgcatcagctttccagggcttattcaaaccctccatgtgctgkaagtccctcaccctttatgaggcacaggaggcgatacgcttgcatctcgatctctcagcctcggctcatgctgttctctcctttctcatcctgtgttccagccataggaattctgttcattgtgtggaaggctacgcacccccacatccccaacct

SEQ ID NO: 176476 - DNA, 395 bp, Homo sapiens
catgaaaatactaccctattcttgaggttgatgacctgtatgtcatttaattcagcgcgctcagaaaaagttctgacttctttttatttatttatttatttattttgagacggagtctcgctctgtcacccatgctggagtgtagcggtgtgatctcagctcactgcaagatccgcctcccaggttcatgccattctcctgcctcagcctcctgagaaaagttcctacttcttaacagagactccaagattgactatcttaatttgttttgattatttacaaattsactttgacatatttcttgtctacctgattgtattatggacaattttaaacatatacaaaattataatataatagccactcatgttctgatcactcaacttcagaaaatc

SEQ ID NO: 176477 - DNA, 620 bp, Homo sapiens
gctacccaagtatgcaaatcacctaacagcttagttctgtcaacctaaataacagggagtggctctctaatagaaaaagatatttatttgggaatagagcagtttcatgggaatatgtgtggtacagcaaatgacatgcatattcaggcaggtaaaggaagacaaaggtttttaaaggaaaaaaataaggagggttgcgcaattgttttaaaataattatctttggctgcaaagatcaataacaagggtgacaccagtctgaggctggacgggcagttgatgagcagatgtccttgcagaagtatttttttttgtgtgtgtaaggttgtgatggctgttggtcaaggctgtggtttgtgcagtctttttgtgataatttttgttatcaggcataaaagcatgagaaccctcttttcatgaccttccccagctctatttgtcagtgtttttttcccttctcacattagtgactccattttgattttgataactttcacagttcccagaggaaactatcaaccaggcaaaagaaacaagcatgttatgtacctaaagasagagatgaaagaaagaggaagctgatgcccacggttcaactaaaaaggaaaatgtattaggtg

SEQ ID NO: 176478 - DNA, 422 bp, Homo sapiens
tgtggagcaagtggcaaacactggtcatggctcttggcattggggaatgctctagatcccttgagatgcatgcagggccatgaggcactggtccttgtggtaaggtgggacagcctggaggtaaggatggaggagagagagtacatggtgtgcaggagccttcttkggggatgcaggctgcctcctgcagtacacatgggagtttttgcaggcagttcatgtagaaatgaacttcaagggaagcctttcaaggtaaaaagaaattcagtttgctgtctgttatggtttgggtctgtgttcctgcccaaatctcatgtcaaattgtaatccccaatattggaggtggagcctggtgggaggtgattggatcacggaggcagaaatcccctttggtgctgttctcatgacagtgagtcagttat

SEQ ID NO: 176479 - DNA, 422 bp, Homo sapiens
tgtggagcaagtggcaaacactggtcatggctcttggcattggggaatgctctagatcccttgagatgcatgcagggccatgaggcactggtccttgtggtaaggtgggacagcctggaggtaaggatggaggagagagagtacatggtgtgcaggagccttcttgggggatgcaggctgcctcctgcagtacacwtgggagtttttgcaggcagttcatgtagaaatgaacttcaagggaagcctttcaaggtaaaaagaaattcagtttgctgtctgttatggtttgggtctgtgttcctgcccaaatctcatgtcaaattgtaatccccaatattggaggtggagcctggtgggaggtgattggatcacggaggcagaaatcccctttggtgctgttctcatgacagtgagtcagttat

SEQ ID NO: 176480 - DNA, 419 bp, Homo sapiens
aggtcaaggatggtctgtggagcaagtggcaaacactggtcatggctcttggcattggggaatgctctagatcccttgagatgcatgcagggccatgaggcactggtccttgtggtaaggtgggacagcctggaggtaaggatggaggagagagagtacatggtgtgcaggagccttcttgggggatgcaggctgcctcctgcagtacacatgggagtttttgcaggcagttcatgtagaaatgaacttcaagggaagcctttcaaggtaaaaagaaattcagtttgctgtctgttatggtttgggtctgtgttcctgcccaaatctcatgtcaaattgtaatccccaatattggaggtggagcctggtgggaggtgattggatcacggaggmagaaatcccctttggtgctgttctca

SEQ ID NO: 176481 - DNA, 591 bp, Homo sapiens
caagatactcaagactcaaagacctaaaagataaactaagatgtcaactgctatttctaggtgacaaaatataagcagtttttattttcaactctttactatctgtaatttctagatttttaagaataaccatccttagacctaaaataagaatctgaaaaagtcatatttttaaaatgtgcctcttaagtaaagctgtgtaattttatgcaaaatggtaggttatcagtaagtcgaccatatctgataatatatgtataaatgtattaactggaaacgttttacccaagagcatacagaattgtttttaaccatctgccaaacttactctccataactgcatgagtcattactatatttgttttgtagacaagaaagctaaggcccagggaaagtgattaacctgcccaggttattaagtggttgaaccagaacrcaaacacggtcctgacagagagcaaagcccagctgctgcatatacaatctcccaaatttcctcattcaaagggaccttcaccaagttctgaagtttatagaaagtccttttcaccaatggtcttagtgttacccagaagaaagaaagaaaaacta

SEQ ID NO: 176482 - DNA, 435 bp, Homo sapiens
ctacgacaacagtttccatttcttcccatctcccaagcagtgagcaacaaaggaaagacattctaagagcccatgaaacgttttttttttttattgaaaccctgttctccagagagagattgaggaggcgatttaagcaaccttattacaaaataaaaatgtatcctcctactccatggcaggaaatgtgagaaagagagacaagcccataaaaaagcaccaaaaaaaaaaaaaaaaaagtttgcacaaggactagaacaaaggagagacattaaataattatgtgcagaagaaacaaaaacarcatgagactcaaaaaggatcgttaaaaaaaacaatttacacaatattgccttaggcaggaacttctttgagatattatgcattatatttcaaattttctaattaaaaagattaatcaagctgtgcataata

SEQ ID NO: 176483 - DNA, 606 bp, Homo sapiens
atgagcttatatgtctgtccaatcatttagatacaaatatctataaactggggtcatactaaacattatgagattaaaaaattaaatatccatcagaaatataattttaatgtctgcatgacattttgttattgtagcaattatatgtaaatacatttactaccaaaattttgtagtaaactattgtataatgtattattagtctctactgttgataaatgtgggcaacttaaattcgttccaattaacaggtaaagtggtaaaatggtaagtccttaagttaccttagatccttgggaaagcacagtaatttgttgacgaagttaaggacaagtaaagtcaagtgggaaacagatgaaaatggcgagcggaaatagaagtttgggtgtctggacccatgaactaaggcctaaggcaaatgatgctgaacgcctctctgtccccgcccaacgttttacactcgggacatctagctaaaaatgaacatcaaataccaattcggatgataattaaaatgtactgggggaacgacaagcagtctggagaatgawtctgaacgtggctctgggtgcgtaaagaaaacatctgtacagacatgatataata

SEQ ID NO: 176484 - DNA, 608 bp, Homo sapiens
agttttttaaaatatgtcattccatattaaagatgtttggacgcattatttctgaagagaagtctgttgtctttctcacttttgtttctccaactatttttttctctcactacttaaaaaccttattatcttttatcactgatttttagaaatttgatcattttgtataccacagcatacttttatatatatatatgtttttttgcttcagatttgttgaactactgggatggttggtttcatagatttcatcaaatttatggtcattagtgctataatattttttctttctctccatcttttatgtggactgcaaatcatacatgcttggtttcctgatattgtcttatcactcactattactgctgcttttctgtgtattmgtttcgaaagtgtcttcaagtttattaattgttttcttctatgccatatcatctgctctctatcttccctaggcattttttccagatactgtatgttttaccactttaacttttattttgaatttttaatacattttatttttttctcctcatgttcatcctttcttctaccatcttgaattgttataacagttgtcttaatgccctgtctaccaattttatttc

SEQ ID NO: 176485 - DNA, 608 bp, Homo sapiens
agttttttaaaatatgtcattccatattaaagatgtttggacgcattatttctgaagagaagtctgttgtctttctcacttttgtttctccaactatttttttctctcactacttaaaaaccttattatcttttatcactgatttttagaaatttgatcattttgtataccacagcatacttttatatatatatatgtttttttgcttcagatttgttgaactactgggatggttggtttcatagatttcatcaaatttatggtcattagtgctataatattttttctttctctccatcttttatgtggactgcaaatcatacatgcttggtttcctgatattgtcttatcactcactattactgctgcttttctgtgtattcgtttsgaaagtgtcttcaagtttattaattgttttcttctatgccatatcatctgctctctatcttccctaggcattttttccagatactgtatgttttaccactttaacttttattttgaatttttaatacattttatttttttctcctcatgttcatcctttcttctaccatcttgaattgttataacagttgtcttaatgccctgtctaccaattttatttc

SEQ ID NO: 176486 - DNA, 340 bp, Homo sapiens
agaattccgacactctgaagtaattcacggggcttcactcactttcakgtctttccttttcagggcaatagtttttagactcagctggtgattaggtcctctctagttctaccgcagtcactctcactaggcctccttgaaggggagtgtctggtgaaatcagacaggaatagtcccagctctgctgctcactagcagagtggcactgagcaagttgcctggcctctttacagccttggagtgcccatatgtaaaacaagtataaaaatccctacctgggttttgctgtgaggattagaggtaatgcctatgaaggacttagcacagtggctggcactct

SEQ ID NO: 176487 - DNA, 482 bp, Homo sapiens
ttgtctgtttaccccgccaatccttttttttttttttttttttttttttttttttgagatggagtctcgctctgtcgcccaggctgcagtgcagtggcgtgatctccggtcactgcaagctctgcctcctgggttcatgccattctcctgcctcagcctctcgagtagctggtagctgggactacaggcgcccaccaccacacccggctaatttttttgtgtgtgtttttagtagagacagggtttcaccgygttagccaggatggtctcgatctcctgaccttgtgatttgccctcctcagcctcccaaagtgctgggattacaggcgtgagccaccacgcctggcctctgctgactattcttttgctgtgcaaaagctctttggttcaattaggtcccagctatttatctttatttttattgcattcacttttgggttcttggtcatgaaatccttgcctaagccaatgtctcgaagggt

SEQ ID NO: 176488 - DNA, 559 bp, Homo sapiens
actggctactcctttcattcttctatgctattccttcttatttttcaawatttaaagtttgagtaccccagaagtcaatccttgaattctttcttctctttatatttactttctgcattatccataactttaaatactgtctataagctgatgaattccaaagttttaactaaacctgatgtttcttctcaactctagtattatatatcatatgtccaactacctatctccaattggtatctcaaatttaacaagccccaaatttgactcttgatctccctaacatcacagttatacctcctactctgttcacagcttttgcagttactcaagacaaaaactttggattgcccttaattcctctcacatctcacatccaatctatcaggaaatcgctttggttctgcttttgagtcaacactcagtgactttcagcacctcatccactgctaccctggttcaaggcagcatcatcgtgtgcttggattattgcaatagtctcctatctggcatttctgcttctacctctgacccctgtaaactcttctttacacaacat

SEQ ID NO: 176489 - DNA, 585 bp, Homo sapiens
ctcctccaagtattatgaaattcctacacaagtagaagtcctaaaaatctagaaaaggacaggatagggcttctgaaaaaggacaatatgttctgattgtgtctctggaaaacagaggtcttaattcattactattgcagaaccttagttttcttatcagtaaaatggatggatttcagaattgaatacaaatacatatttaccaatttacaagagtatcactttatcaatactttactgctcatgcttctcttctttccaaagtcagcctctctaggaagccattacctgtccttgtgatttgatttatcaaggggaatggttaaacatcggaattgcttcagagcctcttctgagccactgtagaacagctgrggtagagatgcagtaatacataaataaataaatagagtcttatttggtggtggcttcctggtttcttgtcagaaatttggtacacagcaaacaggaaagggacacatatttcaacaatagaaaggacgatggaatagagagcctgctatgaacgaggtgggacagcgtaccagaaagacaaatgctaaggtcagaacaggatttgaattc

SEQ ID NO: 176490 - DNA, 499 bp, Homo sapiens
cctaacaaacatttacagcagtttctcaatctttcttaacccactctcttctaataaatattacattgttactcccgtctcctcccttccctcattagtttcacaaacactagattctgatatgtcattccacagagtgccctttccatttcctcctatatataatcccatctgccatgcccttccctttgtaaatgcgtgctgtaaatttaaccttgagattttgacatatatcctatttcttttttcacccttgataattactgatttaggaratttaatatttactgaatgtctaagtatgtagtggctctgttgtttaattctttacataatattgctctaaataccatagtgttattttgaagtagacatcttattttttatattatagatgaattaagactctgagacatatgataacttaaacttattgacaagcatttgaaatctagtgtgtcagagataaggctacatgtttactgtctatttcattttt

SEQ ID NO: 176491 - DNA, 462 bp, Homo sapiens
tgtgagggttagaaaatatgtatttgaagatatcaagtacccagaaatgtcatgcatcttttcctaagcagcagcaggaggctatgttccagcaaaacaggacaaataaatggaatccaggaagcaggcaatcccacacacaagaatgtcaaagcamagtcccaggattacagccgtgtgctggctctacagggcattcaaaaaaaaattgcataaggaaaggagaggattctgggatggagatctccaagacaaaactagtctcaacagaataaacactataatggaaattttttaaaacattaaggaatattcattgaaaataagcacagacagcaaattatgtgagtgactaatattttcatacctaatgatataaaccacgatttttgtcatgattcaaccaaaagcagtgatagaattttactgaaaagatggggaagtggggtaagtaggtaagaa

SEQ ID NO: 176492 - DNA, 465 bp, Homo sapiens
tgtgagggttagaaaatatgtatttgaagatatcaagtacccagaaatgtcatgcatcttttcctaagcagcagcaggaggctatgttccagcaaaacaggacaaataaatggaatccaggaagcaggcaatcccacacacaagaatgtcaaagcacagtcccaggattacagccgtgtgctggctctacagggcattcaaaaaaaaattgcataaggaaaggagaggattctgggatggagatctccaagacaaaactagtctcaacagaataaacamtataatggaaattttttaaaacattaaggaatattcattgaaaataagcacagacagcaaattatgtgagtgactaatattttcatacctaatgatataaaccacgatttttgtcatgattcaaccaaaagcagtgatagaattttactgaaaagatggggaagtggggtaagtaggtaagaaaat

SEQ ID NO: 176493 - DNA, 455 bp, Homo sapiens
aaatatgtatttgaagatatcaagtacccagaaatgtcatgcatcttttcctaagcagcagcaggaggctatgttccagcaaaacaggacaaataaatggaatccaggaagcaggcaatcccacacacaagaatgtcaaagcacagtcccaggattacagccgtgtgctggctctacagggcattcaaaaaaaaattgcataaggaaaggagaggattctgggatggagatctccaagacaaaactagtctcaacagaataaacactataatggaaattttttaaaacattaaggaatattcattgaaaataagcacagacagcaaattatgtgagtgactaatattttcatacctaatgatataaaccacgatttttgtcatgattcaaccaraagcagtgatagaattttactgaaaagatggggaagtggggtaagtaggtaagaaaattaa

SEQ ID NO: 176494 - DNA, 401 bp, Homo sapiens
gagattcaggcaatgggcaccaagaatgtaccaggtaatttgttcagcaggtagcagaacccagtcagcctctcaaatgggccctgaagatatactaacaagagaagggcagggtctttatcctaaagaaacagatctgccaaagcagattataaaaatgggatatgggcacaggaatactaaaatatccattattagagctaaggtatgatgtagagagtaaaataagttgagctcatgatctacagggtgaccatgtaaatttaaattacaaattaaaaatgaaggtattattaataattatgctggaacagcaggtataaaccaggaatttggggggcaaaatgggacacatgattaccccaattatacatcacytagagaatccacagacagaattc

SEQ ID NO: 176495 - DNA, 480 bp, Homo sapiens
agaacagaatgaaattgagactcaaaaaatacatacaaagtatcaatgaaagcaaatgtcggttctttgaaagaatgaacaagatcaatagacaacaagctaaattaacaaagaaaaaaagggagaagatccaaaraagcccaatcagaaatgacaaaggtgacattacaactgatcccacagaaatacaaaagattatcagagactgttattaacacttctttgcaaacacactagaaaatttagaggaaatgaataaattcctggaaacacacaatctgccaagattgaatcagaaaggaattaaaaccctgaatagaccaataatgacttccaaaattgaatgagtaataaagaaacctaccaaccaaaaagttgcaggccagatggattcacagccaaattctaccagacatacaaaaaagacttggtatcaatcctactaaaactatttcaaaaaatcaggaagcgtctcctccc

SEQ ID NO: 176496 - DNA, 629 bp, Homo sapiens
ttccaatcaaatgcatcagctaaaatgaatccattttctgaaacagaagtggctagtttgggtccagcacttataacgaaaggttcctggtgtcacagaccatgaaataagactgtttgaagttgttcccatggagaatcccagaggactttaaaacttctgagcaggaagatccttgacccttgcccaactcctttccacttaacagcgatgcaactgagctgaagagacttgtccaaagccactgagcaggttagttagtggcagggctaaaatctgtaatgaggggttggtcatgcgcaggttgcaaacagccttgtccaaggattcacacttggagtagatacattgcaccctcacttttgactaggcctaacttctggtacaaacctgtggagtcaaaatctgattttaaatattgtaaaaaacaaaaacaaacaacctctcatttttcagatctctcaatgaaaactttagggccaaatcaagaaatcataaggctatcataggcccttacataaaaatggccttaaaatatacacacaacctcyttttcatagaagacagagagccagagagatagaaatacagaaagagagggagaaagaatactttgcccctgacatata

SEQ ID NO: 176497 - DNA, 594 bp, Homo sapiens
cttatcccccttagtagatctaacaagcatctaaatcaccacaagagtatgattaacacatttccatatcctgaacccctgyaaggcaatgatcaaaatagtagctgatacctatcgatcacttattatgtgataggtgctttaccttcatgatgatctcattcaatccttatagcaaaccatattgtagtgaccaagacagattcagaaaacttgcccaaggttacaatgagtagtcagtggatctgagactaaaagtaaacaatctgactccacactacattacctaatgaactaaaaataaaaagagtatctgaggaactaagtctccacctgtaagactgctcacttagtttactcagcacgtttgagaaccatagaagagaaaagctaaagcttctcatttctctcactgtatagctggttagatagatgagtagatagatgagtactagcccatgatctagccagccacatacttcttaagaaaaataatggcaattaaattatcaccaagactcaacattgtagagagattttataactgaaaaaatttgtaaaaaaaaaaaatacaggcaactgggtgtgtttggt

SEQ ID NO: 176498 - DNA, 594 bp, Homo sapiens
cttatcccccttagtagatctaacaagcatctaaatcaccacaagagtatgattaacacatttccatatcctgaacccctgcaaggcaatgatcaaaatagtagctgatacctatcgatcacttattatgtgataggtgctttaccttcatgatgatctcattcaatccttatagcaaaccatattgtagtgaccaagacagattcagaaaacttgcccaaggttacaatgagtagtcagtggatctgagactaaaagtaaacaatctgactccacactacattacctaatgaactaaaaataaaaagagtatctgaggaactaagtctccacctgtaagactgctcacttagtttactcagcacgtttgagaaccatagaagagaaaagctaaagcttctcatttctctcactgtatagctggttagatagatgagtagatagatgagtactagcccatgatctagccagccacrtacttcttaagaaaaataatggcaattaaattatcaccaagactcaacattgtagagagattttataactgaaaaaatttgtaaaaaaaaaaaatacaggcaactgggtgtgtttggt

SEQ ID NO: 176499 - DNA, 577 bp, Homo sapiens
gtggcaatttagagactgcttggaattaggaagttttgatcatgtgagtcttttttgtatgactatattgagtatttggaatttaatcaagaaaacttgccatttaaaaaaaaacttcagctacttttttttwatgatagaacagcaaagcaccataaaccagacctatttatgaggcagagatttgcttaacaggttccttaggccaatgtaaagcagctaggcacctaataccctggataagcagaactgtggtatgaggaaaaatgcagaaaagtgtgcacagggacttaggagcctctggagagggagggattaagagctgtctcctttcttcttgaggttcaagttttactcatgaattgattaattttcacaaaagatccactgacccagaaaggactgaaggggagtctaccaagaggggaaggagagcctgactggcgaggtaggctcaacaataggacctaaataggcatgagaatgggcatgtggctgacattatcaactactccttagcctagaggagaacttcaggcacagtgactgggccttaaatgtagagtaaagaactatg

SEQ ID NO: 176500 - DNA, 577 bp, Homo sapiens
gtggcaatttagagactgcttggaattaggaagttttgatcatgtgagtcttttttgtatgactatattgagtatttggaatttaatcaagaaaacttgccatttaaaaaaaaacttcagctactttttttttatgatagaacagcaaagcaccataaaccagacctatttatgaggcagagatttgcttaacaggttccttaggccaatgtaaagcagctaggcacctaataccctggataagcagaactgtggtatgaggaaaaatgcagaaaagtgtgmacagggacttaggagcctctggagagggagggattaagagctgtctcctttcttcttgaggttcaagttttactcatgaattgattaattttcacaaaagatccactgacccagaaaggactgaaggggagtctaccaagaggggaaggagagcctgactggcgaggtaggctcaacaataggacctaaataggcatgagaatgggcatgtggctgacattatcaactactccttagcctagaggagaacttcaggcacagtgactgggccttaaatgtagagtaaagaactatg

SEQ ID NO: 176501 - DNA, 577 bp, Homo sapiens
gtggcaatttagagactgcttggaattaggaagttttgatcatgtgagtcttttttgtatgactatattgagtatttggaatttaatcaagaaaacttgccatttaaaaaaaaacttcagctactttttttttatgatagaacagcaaagcaccataaaccagacctatttatgaggcagagatttgcttaacaggttccttaggccaatgtaaagcagctaggcacctaataccctggataagcagaactgtggtatgaggaaaaatgcagaaaagtgtgcacagggacttaggagcctctggagagggagggattaagagctgtctcctttcttcttgaggttcaagttttactcatgaattgattaattttcacaaaagatccactgacccagaaaggactgaaggggagtstaccaagaggggaaggagagcctgactggcgaggtaggctcaacaataggacctaaataggcatgagaatgggcatgtggctgacattatcaactactccttagcctagaggagaacttcaggcacagtgactgggccttaaatgtagagtaaagaactatg

SEQ ID NO: 176502 - DNA, 615 bp, Homo sapiens
ctttaaaacaatcttgataaaagtaagtctttgtgattcatttttatgaacattcaattttatgaacactgactgagctcaggaagcaagtggaatccacrtgtctgttagggccttggcatgttcagctcctcttaaagtggtctgtgcttgagaagcaaagacaaaagtaactcagagtggccaccaacaggagacatgagatttattttcattctctttctgtaagcacgtttttgatcagaactgctcctctttgtgtctccagagaacagcctgtgtcttactcagatcccttattaaaatcctgacatccctgggtcttattaaggtaagaattcttgcttgcatctatctctctgtgtctagattcttgtaacattttacgtcagacagactttaaagagtgcaaggaaaatgtatatgtgtttgagtaacttctatgtatcaagcactgaatacaattattattttacttaattcccaaagtaaaaggaagtgatagctttattttatatagagaggtttattttatataggaggaagcgctggtagataggtgtcagggagctccaggagatgtagagaggtcaagcaacttgcccaagatcataa

SEQ ID NO: 176503 - DNA, 615 bp, Homo sapiens
ctttaaaacaatcttgataaaagtaagtctttgtgattcatttttatgaacattcaattttatgaacactgactgagctcaggaagcaagtggaatccacatgtctgttagggccttggcatgttcagctcctcttaaagtggtctgtgcttgagaagcaaagacaaaagtaactcagagtggccaccaacaggagacatgaratttattttcattctctttctgtaagcacgtttttgatcagaactgctcctctttgtgtctccagagaacagcctgtgtcttactcagatcccttattaaaatcctgacatccctgggtcttattaaggtaagaattcttgcttgcatctatctctctgtgtctagattcttgtaacattttacgtcagacagactttaaagagtgcaaggaaaatgtatatgtgtttgagtaacttctatgtatcaagcactgaatacaattattattttacttaattcccaaagtaaaaggaagtgatagctttattttatatagagaggtttattttatataggaggaagcgctggtagataggtgtcagggagctccaggagatgtagagaggtcaagcaacttgcccaagatcataa

SEQ ID NO: 176504 - DNA, 615 bp, Homo sapiens
ctttaaaacaatcttgataaaagtaagtctttgtgattcatttttatgaacattcaattttatgaacactgactgagctcaggaagcaagtggaatccacatgtctgttagggccttggcatgttcagctcctcttaaagtggtctgtgcttgagaagcaaagacaaaagtaactcagagtggccaccaacaggagacatgagatttattttcattctctttctgtaagcacrtttttgatcagaactgctcctctttgtgtctccagagaacagcctgtgtcttactcagatcccttattaaaatcctgacatccctgggtcttattaaggtaagaattcttgcttgcatctatctctctgtgtctagattcttgtaacattttacgtcagacagactttaaagagtgcaaggaaaatgtatatgtgtttgagtaacttctatgtatcaagcactgaatacaattattattttacttaattcccaaagtaaaaggaagtgatagctttattttatatagagaggtttattttatataggaggaagcgctggtagataggtgtcagggagctccaggagatgtagagaggtcaagcaacttgcccaagatcataa

SEQ ID NO: 176505 - DNA, 615 bp, Homo sapiens
ctttaaaacaatcttgataaaagtaagtctttgtgattcatttttatgaacattcaattttatgaacactgactgagctcaggaagcaagtggaatccacatgtctgttagggccttggcatgttcagctcctcttaaagtggtctgtgcttgagaagcaaagacaaaagtaactcagagtggccaccaacaggagacatgagatttattttcattctctttctgtaagcacgtttttgatcagaactgctcctctttgtgtctccagagaacagcctgtgtcttactcagatcccttattaaaatcctgacatccctgggtcttattaaggtaagaattcttgcttgcatctatctctctgtgtctagattcttgtaacattttaygtcagacagactttaaagagtgcaaggaaaatgtatatgtgtttgagtaacttctatgtatcaagcactgaatacaattattattttacttaattcccaaagtaaaaggaagtgatagctttattttatatagagaggtttattttatataggaggaagcgctggtagataggtgtcagggagctccaggagatgtagagaggtcaagcaacttgcccaagatcataa

SEQ ID NO: 176506 - DNA, 600 bp, Homo sapiens
ttatggagatggtgaatgtgttcaaggtatgagagagagtataataaaaatgtgatgctcaaaaagatggaatggagtagagagtagctaaatgttcacaagttccacttcctcttactggacaaacaggaagataacatttccaactcctcttctagttaagttgaaaccatatttctggcttctggttaatggcatgtggatggaagtgatgaatgccattcccaagmctggcctgctgttacccatgtgatcttgtatagggtctgtctctctcacccacacaatcgcaagtgaagtatgatactctgagatgaaaggagcctggatccttgagttgcctcatgggagacagctgcacaaatgaacactctccccacgtcagagtataacatgtgataaataggccttattctcttaagccactgagatttaaaggttgttgaagcaactagcattaattaccttagatttatgttttggataaaagcatacatctccaaacagctttccaagtaataacacaacaatgtcatataatatgagctattatgtacatgaaattttctttgtattgacagtttggggaattcattaatt

SEQ ID NO: 176507 - DNA, 450 bp, Homo sapiens
cacaaaaatagaaagcatcattaaagactactacaaacaactatataccaataaattagaaaacctataagaaatgaataaattcctggattcatacaacaaacaggcatagaaaaaaacatacctcaaataataaagaccatacataacaaacctacagctaatattgtaccgaatggaaaaaatttaatggcatttcctctaagacctgaaacaagacaaagatacctactttcaccattgttattcagtgtaatactaggagtcctggccagagcaactagtcaagagaaataaataaagggcatccaaattggaaaagaagtcaaattagctatgttcacagatgacatgatcttaaacttagaaaaacttaaagactccatcagaaaacygatagaactgataaatgaattctgtaacattgcaggatacaaaatcaacatacat

SEQ ID NO: 176508 - DNA, 576 bp, Homo sapiens
ttaataataatatcttataaggctattgtgaagattaagtgacaatgtaggcattccagaaatcccaaatcttattattgtgactctgttgctttgtgggatgaagaaataataatagttaggaatcataaagtattatacatattgttttaagaaagacagttttgatttcyatgccagtaaaattgcgtaaacatattaaattacaatgttatattttgttatgccaaggagtagtagatgagttcttaagaaataaaccccattcttgtggaagaatatgttgtaaccacatattctccttggacaagggtattgatataaccactttctcctctgtccctagacaaggtaattggtctcctgcctaagagcttatgtgttaaagtttgacaattgtttcctaattacgctggtgatggattgataagacctgacatacgctattccaattactgggcattgaaccttttcaaagagctggatattagagtaggaggtaagcttgggcaagtcacagagtttagattgatcaatcaaatgaccaattctgtgtttgaactccctcaacacacc

SEQ ID NO: 176509 - DNA, 533 bp, Homo sapiens
attgctgtaaaggaataccttagactgggtaatttataaataaaacagattcgtttgactcactgttctgcaggctttacaggcatggcactgatgcagaacagatgagccccaactttgcagcttagccaaggagggttcttggttttgcctaggaaagaattcaagggcaagccaatagtgtcagacaacaatcttttattgaatggcactgctccttgagaagcagggctaattcataggcaatacgcccagagtcaggaacatatgggctcttggcaactgtattggctcttggtaaacccaatttaaattgcatgcacattaaggggtatgtcaatgcaaattgagaggtgggtcatttcgaaattttttctagaaaaggggcagtaagttctggctcttaccatagcaaytgcaaactgtcatggtgctaatgggagcgtcttatgtcagtgaacaatgagagtacctagggattgctttcatcaccatttgctggttcctgatggtttcttcactttatcctgtct

SEQ ID NO: 176510 - DNA, 557 bp, Homo sapiens
tcatgtcaggggcagattgaataaggggcagaggctggcatgtcaggggctctcatcttgacatcccagatgctgatcttgtgacactctctcttgttgggcaaccctgaggtggcagggggcttaaagcagccattagtaattgtactttctggctgtttcttttggctttgtttttcacgtctttgcagtgtccctagtgtaaactttataggctacatttaagagctggctcataggagtytgaggtttcaatgctgctttttgtagcttcctcctcatgtcagaggcagattgagtaataaaataatttccagaagagagtgcccttctagggagtctgggtctgcattaatatatttcctgagtgcctcaaccaaatgaccctgaaactgagtgggattcttgtcttcttcctaaggtatttctctaaccttgctacaattgactggcttcgccacatactttttcctgtttttttatgccatggcacagcaagcagttgacaatacttgcaagtcatgaaaagttaaagaacatgatcaacttaaaaaacc

SEQ ID NO: 176511 - DNA, 557 bp, Homo sapiens
tcatgtcaggggcagattgaataaggggcagaggctggcatgtcaggggctctcatcttgacatcccagatgctgatcttgtgacactctctcttgttgggcaaccctgaggtggcagggggcttaaagcagccattagtaattgtactttctggctgtttcttttggctttgtttttcacgtctttgcagtgtccctagtgtaaactttataggctacatttaagagctggctcataggagtttgaggtttcaatgctgctttttgtagcttcctcctcatgtcagrggcagattgagtaataaaataatttccagaagagagtgcccttctagggagtctgggtctgcattaatatatttcctgagtgcctcaaccaaatgaccctgaaactgagtgggattcttgtcttcttcctaaggtatttctctaaccttgctacaattgactggcttcgccacatactttttcctgtttttttatgccatggcacagcaagcagttgacaatacttgcaagtcatgaaaagttaaagaacatgatcaacttaaaaaacc

SEQ ID NO: 176512 - DNA, 557 bp, Homo sapiens
tcatgtcaggggcagattgaataaggggcagaggctggcatgtcaggggctctcatcttgacatcccagatgctgatcttgtgacactctctcttgttgggcaaccctgaggtggcagggggcttaaagcagccattagtaattgtactttctggctgtttcttttggctttgtttttcacgtctttgcagtgtccctagtgtaaactttataggctacatttaagagctggctcataggagtttgaggtttcaatgctgctttttgtagcttcctcctcatgtcagaggcagattgagtaataaaataatttccagaagagagtgcccttctagggagtctgggtctgcattaatatatttcctgagtgcctcaaccaaatgaccctgaaactgagtgggattcttgtcttcttcctaaggtatttctctaaccttgctacawttgactggcttcgccacatactttttcctgtttttttatgccatggcacagcaagcagttgacaatacttgcaagtcatgaaaagttaaagaacatgatcaacttaaaaaacc

SEQ ID NO: 176513 - DNA, 557 bp, Homo sapiens
tcatgtcaggggcagattgaataaggggcagaggctggcatgtcaggggctctcatcttgacatcccagatgctgatcttgtgacactctctcttgttgggcaaccctgaggtggcagggggcttaaagcagccattagtaattgtactttctggctgtttcttttggctttgtttttcacgtctttgcagtgtccctagtgtaaactttataggctacatttaagagctggctcataggagtttgaggtttcaatgctgctttttgtagcttcctcctcatgtcagaggcagattgagtaataaaataatttccagaagagagtgcccttctagggagtctgggtctgcattaatatatttcctgagtgcctcaaccaaatgaccctgaaactgagtgggattcttgtcttcttcctaaggtatttctctaaccttgctacaattgactggcttygccacatactttttcctgtttttttatgccatggcacagcaagcagttgacaatacttgcaagtcatgaaaagttaaagaacatgatcaacttaaaaaacc

SEQ ID NO: 176514 - DNA, 569 bp, Homo sapiens
gggttggaattttcccaccctcccacctctaggaaggggagaggggaacagagattatgctctataaaagctcttaaatgagatttgatgagttcccaggttggtgaagatatgcaagtgctgggagcatggcamgcccagagacgacatggaaggtctatgcccacccccacccccatcctttgccctttaaatcttttccacatggctattcctgagctgtatcctttataacagctgctcaatacaagtatttctatgaattctgggagctgtcttagcaagttaatcaaactcaaggaggggtagtgggaaccccatttcatagctgttcagtcagaagtgtgggtggcttgggacttcccactggcatctgaagtggggcagtcttgtgggactgagctcttcatctatgaaatctgactctaactccacatagaaagtatcagaattgaattgaagtgtggacagccagttgctgtctgctagagaattgcttggtgtatggcccccacacatctggtcacagagtgttctgtgctgtgagagtataataggagaaaaacagt

SEQ ID NO: 176515 - DNA, 432 bp, Homo sapiens
gtatgatgaatgacccacagtgttacttcttgaaacttctctccaattttgagcctctcccttgcttcaaatccctcacctgctcctcctggacttacaggccacacagtctttatckttgctttacctcccttttcctccctgtttccagccctttatcccttttgcctcaaagtagcttgggaaccaagctggcaaacagaattcttagagaacaaggaagagagagaggcttagtaggcaaagataccattctgtttagctgtcagtgtctgtgaatgctcccatatgaatgattgttccgtacatcatatgtgtcaaaccattcatctggtggcaacttgcatgtatgtggcagccggacgtgatcattgttccctggggctaactcacccatctatcccagccccagtgttcctgactgagttgcag

SEQ ID NO: 176516 - DNA, 414 bp, Homo sapiens
tcggaggtgaagcacatctgggaggttccagggtcatggagagaggggtcctccatcggactttagaattacactaaaaaactaattctcaaatacatgccatggctaatggtataaaagacaaaaacaaacagccatgctgaaaccactggytaaataagacaaattcattccttaacagattgaggaaagtgtgaataagaccaacagctgttatttcttcccaaccccagacaaatatctagttaattggtgttgtcaagcaaacaaaattttcacctactctgccaagaatatggatggccccatggcaatgctcatcttggcccagcctgatgcagtcagaggaacccaatgttgagtatgaagaccaagtttgagtcccagcccagctacttcccagctctgaaattc

SEQ ID NO: 176517 - DNA, 517 bp, Homo sapiens
ggcagttaccccagaagaatgataatggaactaacaacagccttttcttcagcaatactaaaattttgaaaaaagtaatctttgctttcaaatttcctcagaaaaaatattttcaatacagaattcatgtaaagataattataaaaagaggtaattttcaagcccacaaagatttagtttttcttccacatagcctttaaaagaaagttataagatactccagcaaaacaaaattcttatcatactgtcctttractatttacttgtctgtatcctcattatactctaaaacctttgttcactttcaatccttggcacctgacaccaagtaggcactcaataaaaaagtactggcatagactgtcctcaggaatgtggaagactaacatagaatcccacatagtaatgaatccctaaatctaacctctgctgtctcaggatcatgatctcacggtgagacctcttgtctgcaaactctacctgttttaaaagtttagcgttcctcagctactataat

SEQ ID NO: 176518 - DNA, 524 bp, Homo sapiens
tcactgcttagaaaaattgtagctttttgtgggactgaagccaggaagtaactgcttacattcttagtttctttcttgcaaaaggaagaaaggggatacttggattgaaagcacaccaaagatggagagattgatgcatacaccacatttacttaaaggaatcttgctttatagttttcagccacaggataaagcagctgtcctccaaagtgtttggtttcaggaccctttgacccttgatgcatgttaacatcaataacatttttmaaatgttatttaaataatatggtaaaaattactatattttaccaaacaataatttagtgagcagagtggcattgtttcacatttcacaacttgctttagtgtctggcttaatagcagacagctgaattttcatctatgccgggtctgtcccacagaccctagtcgagcaacggatgaaaggagtactcagacacagataagcagtgtaacagcagctagggggctgcccagcactagtggccgaagaagagagcagc

SEQ ID NO: 176519 - DNA, 381 bp, Homo sapiens
gaattccattttcattatctttaggagctatatagccttgggtatgagacataatccycttgagcctcagaaaactaaaatgagggtgagactacttctttcattaattactctgaggattaaatgaagtatctttgagattaatgaagtatctagaactgtgtaaggcacattataggtttccagtagatagtaatagctaatacttattgaataattgctacgtgccaaacatttgataaatgttacatgaattatctccattaatcattaccagccctctgtgaagtagctattattattatctccattttactgatgggaaaataaatgttttaaatcagctaaataactttcccaaactcacctagctagttctca

SEQ ID NO: 176520 - DNA, 594 bp, Homo sapiens
catattcagaatgtactttttccctagtatgatgttgaccgcacagcttatcaaaaggaattttacattcttataaagaacaagtggaaattcttcttaaaaacaaaacaaaactttggtctgcaataaagagctctgaaaaattgaggaggagaaactcttccctaactcattctatgaggcccccaattatgctgataccaacacctggcagtgattaaaaaaaaaaaaaaaaaaaaaaataaaccttcaggccawtttgcttgatgaacactggtgaaacaaatccttaacaaaatactggcaaaccaaatcttgcagcacatcaaaatgctaatccacaaagatcaagtaggctttatcccagggatgcaaggttggttcaacaaacacaaatcaataaatgtgattcataacataaacagaagtaaagacaaaaaccacatgattatctcaatagaggcagaaaaggcttttgataagttttattacatctcatgataaaattctcaataaactaggtattgaaggaacataactcaaaataatgagagccatctgtaacaaacccgcagccaacatcatactgaccaa

SEQ ID NO: 176521 - DNA, 308 bp, Homo sapiens
ctttggcttgttttcttatgttcttgaaattgtcttatacagagtattaagttttgcttttaataaagtccagcttaccaattagctcatgtctttgatgttatattcaaaaagtcatcaccaaacccaaggccatcttaattttcttctatgttatcttgtaagaattttatagttttgtactttgcatttaggtcccttgtccattttgagcaatgttttgtgaagaatgtaagaactgtgtctggattttttttttttttttggcatacakatatccagttgttccagtaccatttgttaaaagt

SEQ ID NO: 176522 - DNA, 579 bp, Homo sapiens
ctcaccctatattctcaacataacagccaaagtaatcrttaaacacaaatcaaatcctattactcctctgatcaaaatctctcaatagctttcataacacttacaataaaagccaatttcttcaaaatagctttcaaagctccacacaatctagccttcctgatacttctctcttatctcttactactctcctatttactcatattatagtccatccatgctggcctccttaatactttttaaaaacattacgcaaagcatttccacagggcctttgcacttgtcatttgctctgcctagagtaatttttacacagtcacgcttatggctcatcttcaggccttagagatgtcaacaagccttgcttgtccaatctatttaaattttcatcactttctcttttcaaagagttatctccttaatttttttcctataacatttaccatcactgatatatttgtttgcttattgtccatcttgcctctggtagaatataaggtataaagggcatatattacttatatcatttatattacctaatagagaacttggcagaaggtaaatataactctgatattt

SEQ ID NO: 176523 - DNA, 583 bp, Homo sapiens
tgtatctaggaagtaactaacttgaattgattttacaggcttataagcagaagggacttgcctcrccttagacaagactttggaatgtagattttttagttaatgctgaaatgagttaagattttgagggactgttggtatggcacaattggttttgagatgtgaagacatgagatttgggaggggccaggggaagaatgacatggtttggctctgtgtccccacccaaatcttatcttgtggcttccataattcccatgtgttgtgggagggacctggtgagagatctctgaatcatgtgggtgggtctttcccatgctgtttttttgatagtgaataagtctcatgagatctaatggttttaaaagtgggagtttccctgcacaagttctttctctttgcctactgctatctatgtaagacctgacttgccccttcttgccctccaccaagattgtgaggcttctctagccaatgtggaactgtaagtccattaaacttctttcttttgtaagtttcccagtcttgggtatgtctctatcagcagcacacaagcagactaatatacccagtattatatgac

SEQ ID NO: 176524 - DNA, 582 bp, Homo sapiens
ttgggttgggttttaccatgctcctgaatctgatgatcttcattcctatccatattgtgaattctatatcaatcatttcagccatctcagccctgttaagaagccctgtttgagaactagtgtggtcagttggatgacataagacactggagatctgagttgccaatgttcttgtgttagttctttctcatctctttgtttgggtgtttctccaactgtgatgtagggtaagtacagtcagcagacttcttttctggatgttttcacagggccyaggcactgttcagggtctaaaagtatggaacatttcacagatttgtgtgacatccttgtgcagaggtcatgctcttcttctctgtatcattccaattttagtatatgtgctgcttatgcaagcactatagactttcatttgtttgaatttttacgtttaacatggtcaattaataaaaatatgcataattaacaaagtaatgtagtgatttgtttggcagaagaaagaatcccttgaggacaaatcaagcctcatcttgtaattattcattcaacctgatgaaatccgtagagtagcctcttttcttt

SEQ ID NO: 176525 - DNA, 358 bp, Homo sapiens
aaaggcgcttgccttgtcttaggtgagactttggacttggatgtttgaattaatgttgtaatgagttaaggcttttggggactgttgcaaatgcatgaatttgtttcagaattgaaggatatgagaccttggaagggccaggggcagaataatatgatttcactctctgaccccacccaaatctcatgttcaattggaattcccaatgttggggaaaggacctggtgggaggtgattggatcatgrgggcagattttcccttgctgttctcatgatagtgagtaagttatcacaagaactagttgtttaaatgtgtgtagcacttcccccttttctctctctcctgttgctatgtgaa

SEQ ID NO: 176526 - DNA, 408 bp, Homo sapiens
tctctttgaagtactgatctcatgtcctttggatatttacccagtaatgggtttgctggatcaataccatattgagcaatatggtagtcctactttcaattttttgtaagctccatactattttccataacagctctactaatttacattcttaccaaagtgcattaagcattctcttttctccacattctagccagcatttattttgtatcctttacagccattttgcctgcggtgaggtaatatctcagtgtggcattggtttgcatttccctgatgattagagatatgggacattttttgacatacctgttcgccattggtaggtcttcttttaagaaatgyctatttaggtttttgcttattttttaattgtgttatttggtttttactatcgagttgtttgac

SEQ ID NO: 176527 - DNA, 444 bp, Homo sapiens
ggaaatgtttgcagtggagcacagccaggagtgcctatcccccagtagcactgatatggtttcactgtgtctccacccaaatctcaccttgaattgtaataatccccatgtgtcaagggcagtrgggccagatgtagataattgaattctgagggccatttcccccatactgttctcattgtagtgaatgagtctcacaagacctgatggttttataaatgggagttcccctgcacaaggtcttttgcctgccacaatgtaaaacatgactttgctcctcatttgccttctgccatgattgtgaggccttcccagccatgtggaactgtgagtcacttaaacctcttataaattaccctgttaggaaaaagctgagtgttgggggaaaaaaagctgaggcagggcttgcttgtctgacataatgtccagggctcagggcataaa

SEQ ID NO: 176528 - DNA, 594 bp, Homo sapiens
atacagagctatgaggggaggtgaagatccagaggcaatagaacaaggagtgctcagtaaactagaagaagctcatcatttcagttggtggatatataaggaatgaggccagaatgacaagtcaagggcagatcaagaagaacgtgaaaagctctgctaaaaacccttcaaagggggaattttcaacgtattgggtaaggaatttggctagattatagctaagaggtttgaatgaatcaaatcttcaaagatgtaccaagttaaatgcagtttccccatcctgacactcaagactgtacaacacatctcagtctctcagtctaccccctagtcttttctcacttgctagtcttttttytctctctctctctctctctctctctctcttttgagtcagggtctcactctgttgcccaggctgagtgcattcgtgtgatcatggttcactgcagcctcgacctcccaggctcaagctatcctccagcctcagcctcctgagtagctggaactacaggcgcacaccaccatgcctgactgatttattttccattttttgtagagacggggtttcatcaggttgctcagactgatctc

SEQ ID NO: 176529 - DNA, 605 bp, Homo sapiens
tcttgttttacagatgaagactgagttgctacaaaaaagaaattcagtagtggatgtgaaagctcagtatgaatttggaaataccatcccaatgttagttattaagacactacataaactcttttaggaggtggagcctataagaaggcagcaggctatatttaaaaatccttatttggctgggcacagtggcttacgcctgcaatcccagcactttgggaggctgaggcgggtggatcacatgaggtcaggagttcgagaccagcctgaccaacacggagaaacccaactytactaaaaatacaaaattagccaagcgttgtggtgggtgcctgtagtcccagctactcaggaggctgaggcaggagaatcgcttgaacccaggaggcggaggttgcagtgagctgagatcatgccattgcactccagcctgggcaacaaaagcgaaactccatttcaaaaaaaaaaaaaaaaaaagcccttattttatctatgctgtttgcagaaataaaatcccacatatctaattagaaaaggtgcattactagttagcttttaaaataacatatttttaaataattctaatgttaaccaaaacagcaaaa

SEQ ID NO: 176530 - DNA, 515 bp, Homo sapiens
caaataaccatacagagaaatattttttctggctgtcctttgcacaagtggaaaggctgcagttcatgagatctgagtgaaggaaatcagaaggcttcttcttcccatttacttttgtcagtgcctgtcaagttacataatcaatttcccttcttgaaacacttatgtgtctgtccattgtaaggcattagtactttcacattatatatcagatgagctatcagagaagacaattcttaggaaacagggcacaaaatataaagttttaattggtttggagaataagagtcttttaagatatgtagaaacaggatgattgacaaggggattttgtgttcgtcatcacattatgatgttaggtttgcaatgcgggtagttagaaaacagttttcattgaggtccttagctggcaatgtactgtgcttcccttttggatagttagtacttatcaccaygtggcctaaaccaccaactggcctcttacataaggaatacttacagagatagggtggtgt

SEQ ID NO: 176531 - DNA, 493 bp, Homo sapiens
atagtgccctaaacataggcaccattcagccacaggcgcaagtagacagtcatttatctagtgttaccacccccaacaactagtgcccatctatggagctggaaagacaaaaaacagagaaagtcacagctcaacagaatcaaacaagaacttattgtaacctaagataattagataatagtaagataagaacttgttacatggaagctgtcactttcatcgttgtgtattgtttttactgggaggaattgtgagcgaggtgaaagagtgagtttggccacctttgattattctttatgactcttaaatttcaygatttaaaatgacctctgttcaaatctacagtgcttattctggctagataagtcatgattaacagattacaatttaatgagtgaatatttgttgtttgtaatagtgcacattgttgtgaagtgtatatcataatgtaaaatagaataattgatcaaaacctaaagaaaaatgggttaaa

SEQ ID NO: 176532 - DNA, 340 bp, Homo sapiens
ttgaatccttctttcaaggtctacttttgaagaaacctagactaagacttatcatactttttcttttctcatcatgcattttcttacttggtctaaccagaagcttagataattaagatctcttgatctttgatctcttgatcttgataaaccagtgttgaaaatctaaacactcacagagatgcagcaagttacctaaatgggagaagtgagctggatagatattatgctaaccagatggtacatactctgtctcaaagagccagctgcaactcagccccagccaattgttgccacatggaaaagkgggcccaatgtggtcacatcgagtttctcatga

SEQ ID NO: 176533 - DNA, 576 bp, Homo sapiens
aatataccctttaagtaatgtcttatcatccccccacccttctgagtctcctttgtctattattgcctatctatgtccatgtgtacatattatttagctcccacttataataaaaagatgtggtgtttttctgtttctgagttgtttcacttaaaatagtggcctccagtttcatccatgttgctacaaagacaggatttcatttcttattgcacatttcttatgtatggcttaagattacttctttttatatatatgaatttaagatatatatatgatatttaagatatatatatatatgccacattttctttatcgaatcatccattgatgggcacttaagttgatttcatatctctgctactgcgaatagcgccgtaataaacatttgagttcgtgtatctttttggtataatgattatactagacttcttttctcttgtttccttcctacagtcagcagaagggagaaattgctcacctcctgaacctgagaaattcaccaggcccttcccttygaagaaccaattggtcaatcctactcctaaaattaggcttataactcagagaacacag

SEQ ID NO: 176534 - DNA, 576 bp, Homo sapiens
aatataccctttaagtaatgtcttatcatccccccacccttctgagtctcctttgtctattattgcctatctatgtccatgtgtacatattatttagctcccacttataataaaaagatgtggtgtttttctgtttctgagttgtttcacttaaaatagtggcctccagtttcatccatgttgctacaaagacaggatttcatttcttattgcacatttcttatgtatggcttaagattacttctttttatatatatgaatttaagatatatatatgatatttaagatatatatatatatgccacattttctttatcgaatcatccattgatgggcacttaagttgatttcatatctctgctactgcgaatagcgccgtaataaacatttgagttcgtgtatctttttggtataatgattatactagacttcttttctcttgtttccttcctacagtcagcagaagggagaaattgctcacctcctgaacctgagaaattcaccaggcccttccctttraagaaccaattggtcaatcctactcctaaaattaggcttataactcagagaacacag

SEQ ID NO: 176535 - DNA, 542 bp, Homo sapiens
tagaaactgaaacaatattttaaaatatttattttaaggagagcaataaacatatgttaacatacatattttatgaacaataactacatttttgaaaacaaaccaaacagtgagaagattagcatgtgtgtgtgtgtatgtgtgtgtgtgcaaatctctttaatgtctggttttatagaagacaggtggatttgtatttctggttttgcatcgaattggttgtgatctgttgttttggttaatgtatacgaagaaaattgactttatacaaataagtcattagaaaaagaaggactcaacaaggacagcttttagaggttagttgccatgtagaatctgaaatatattaatgaaactttgcactgttatatttaaatccattggccaatcttgcatttgtgatggatcttttaccatgaatgatgtttttacattatgcattgatctcttggaaaataytggttcattgagttatacagacccttaaaataatacattgtattattcaatatataaagcaccatttttcagtattaccaaca

SEQ ID NO: 176536 - DNA, 643 bp, Homo sapiens
ttttcttaaagtaaaacaggttctgttccccaaatgttttctctatacaattcttttttgattaatttgttgcaataactgtgttccataccttgaaaaaaccatccacattatgttttaactgttggtttcatcatggtgtcatttagctactttccctaccacttgtatttcttacaaagttaactcacaagtcttgactaggttcaggtttacttattattatcattatcattattactatttggctggagccaaaaatgctttgtatgtggtactatatattttgcacttatgtccctcgggagacacatagtatctggtgtttctgtctgagtgatgctaagaccaatcagttggtgaatgtagtaacaacctgatgcctccattaaaaacttactatttttcccatcattaacctattgtttctcrgcttcaaacccacttctctctactgagttttgtgatgctggggcagaaattttgaaaatcacacttgacttttgtcatttagctttttatcgggttctgttaataagggggtctagagcaagagagaaaagggaaaatgccttgactatttcttgtttgcttgctgtttcttttagtgtcttcccagaaatggtcccttgccaatgaaaca

SEQ ID NO: 176537 - DNA, 528 bp, Homo sapiens
cttgactatttcttgtttgcttgctgtttcttttagtgtcttcccagaaatggtcccttgccaatgaaacagaagttgattccagaagcaactagcctctctaaccagctttatttttctttatcttttatttttgagactctcaggtccaactttgttgtgtctgctctatgacagcagtaccagatgggctgcgtcctctctccagaaattttagttttaatttcctaagagcccttctccaaacttctgaggtattagtaaccatttggcagtgcctcctccatagagtctgggtaccacttccaagctccctgattctaaaacccctaaccctctttttcattgcccttctatctgacacttgcagttactgtctctgtgctacttcaatgcctcttyttcatctccttcctcccatacctttttaaccaatttatcttactgttttattggattcacttactagaaactttctgtttactaactagaatctgcctaatacagttacttgataaaataaatagt

SEQ ID NO: 176538 - DNA, 369 bp, Homo sapiens
tctacaatgagaattactaaacactgctcagaaaaatcagagatgacacaaacaaatggaaaaacatcccatactcatgaataggaagaatcaatatcattaaaatggccataatgcccaaagctatttatagattcaatgttattcctatgaaactatcaataacattcttcacagaattagaaaaaactgatttaaaattcatatgaaactaaaccttctcaattagattaaaaactactgaaagtgaagtaattacttctttgctttatagatattcatacattcataaatatgtcataaatatatgtgcrtatacatgtatatgtatatgtgtgtatatattacgtatggatgtatgagggtgtg

SEQ ID NO: 176539 - DNA, 229 bp, Homo sapiens
aactacaataaaagtgaaataaaaattctagattttgagaaaattgaggactgcacaaatgaagattatatcctggccttttgttatgccttaatatttttcaattgtcttgaaaatattttataaatgtayggggtataaatgcaattttgttacatcgacacattacacagttgtcaagttagagcttttagaatacccatcacctgaacaatgtacatgatactca

SEQ ID NO: 176540 - DNA, 396 bp, Homo sapiens
tgtatagatgtcacattttctttattcaatcattcattgatagaaacttaggttgattccatatctttgctattgcaaatagtgctacaataaacacatgtgtgaagtcagctttttcatatgttgatttttttttcctttggctagatacccagtagagttattgctggatcmaacggtagatctacttttagtttgctgaaaaattgctatgctgttttccatgaaggttgtattaattatattcccaccaacagtgtataagtattccctttttttccacatcctcaccaacatctattgtgctttaactttttaatagtagccatcttgactgtggtaagatgatactaccttgtggttttactttgcatttctctgataattagtgatgct

SEQ ID NO: 176541 - DNA, 486 bp, Homo sapiens
ggttataaagtttaatctccaacatggtaactagatgtattagtcagttttcatactgctataaagaactgcccaagactgggtaatttataaaggaaaaaggtttaattgtctcacatttccatgtkgttggggaggcctcaggaaacttacaatcatgacagaaggagaaggggaagaaaggcaccttcttcacaaggcaccaggaaggagaatgaatgcaggaggaactactaaacacttataaaaccatcagctctcgtgagaactcactatcatgagaacagcatgggggaaactgcacctatgatccagttatcgctacctggtctctcccttgataacgtgggaattatggggattataattcaagatgagatatgggtggggacacaaagcctaatgatatcactagatcttcaggtaaatacattaatatatgctaggaagagaatcttggtttttatgtgttttttagtattttct

SEQ ID NO: 176542 - DNA, 486 bp, Homo sapiens
ggttataaagtttaatctccaacatggtaactagatgtattagtcagttttcatactgctataaagaactgcccaagactgggtaatttataaaggaaaaaggtttaattgtctcacatttccatgtggttggggaggcctcaggaaacttrcaatcatgacagaaggagaaggggaagaaaggcaccttcttcacaaggcaccaggaaggagaatgaatgcaggaggaactactaaacacttataaaaccatcagctctcgtgagaactcactatcatgagaacagcatgggggaaactgcacctatgatccagttatcgctacctggtctctcccttgataacgtgggaattatggggattataattcaagatgagatatgggtggggacacaaagcctaatgatatcactagatcttcaggtaaatacattaatatatgctaggaagagaatcttggtttttatgtgttttttagtattttct

SEQ ID NO: 176543 - DNA, 486 bp, Homo sapiens
ggttataaagtttaatctccaacatggtaactagatgtattagtcagttttcatactgctataaagaactgcccaagactgggtaatttataaaggaaaaaggtttaattgtctcacatttccatgtggttggggaggcctcaggaaacttacaatcatgacagaaggagaaggggamgaaaggcaccttcttcacaaggcaccaggaaggagaatgaatgcaggaggaactactaaacacttataaaaccatcagctctcgtgagaactcactatcatgagaacagcatgggggaaactgcacctatgatccagttatcgctacctggtctctcccttgataacgtgggaattatggggattataattcaagatgagatatgggtggggacacaaagcctaatgatatcactagatcttcaggtaaatacattaatatatgctaggaagagaatcttggtttttatgtgttttttagtattttct

SEQ ID NO: 176544 - DNA, 450 bp, Homo sapiens
aatttaactgcctctattagagtacacgcaaaaacaaaacaaaagaatcaaaaaccactttcctaatctggcccttttttctctattcaaattcatctattgactactattctccagtcagctccaccttatgccttcacagtacaaaaccgacaaatgaactccttgagtrtgccatgattctcagaactttgcaaaagttacttccctctgctaaggagggcccaccccttctttatctaacttgtccttcaagattcagcttcaatgctactgctttcagaaagccttcttggacaatttaatttgatggtgagcttattttacttacagtcacaggagctagattgtcttatcgtgtgcatagtctgttaagcttgtctaactcattgttttgcagacttctgtatcacaggtaaactaacatttactgcaagaaagaagagagaa

SEQ ID NO: 176545 - DNA, 615 bp, Homo sapiens
gaatggtgcaaatacatggagatacttattagaatatttaattatatcattacataagtttgtcttcaacactgtttgaaattgttcacaagttaagtatggagtttatactcaaacattttgataggaaacaatacaataattcatacaaacaaatgtaacattttcagaaaactgaaaattaaatatggccactgctaaaaaatgtaatgcagaagcctaaaatatgtgtaaaattatgtaaataggttgaaaaaagtattccagctaaacttgactactagttttctgaagtcttgccaaactccaaataaaagctgcattgactagaatattttgacatctggatactttttctttaagttctaagaaaatactctgcatttagtttgaaatgtggctgctgcctaagtcgctatttccactatagtcaaaatagttattctttgtaatttcctgtttgtcataktacttcttttcaaccacctgatgatcaaagatactctcaatatttttttaaactgtttttcctgtctaattttttagttagtgtttaaacaggcttgcattggcaagctaacttttcctttgacctattcaggctttcaatcttta

SEQ ID NO: 176546 - DNA, 678 bp, Homo sapiens
ccctttctttgacttggaaagggaactccctgaccccttgcgcttcccgagtgaggcaatgccttgccctgcttcggctcgtgcacggtgcrtgcacccactgacctgcgcccagtgtctggcactccctagtgagatgaacccggtacctcagatggaaatgcagaaatcacccgtcttctgcgtcgctcacgctgggaactgtagaccggagctgttcctattcggccatcttggctcctcaactcatccactttaatactaaggtacaattaatacttttcaagtagaaattcagtttatttatatacatcctcctccagattctcaccaagtgcttcccttgtttgttatgtcataacagatgtatgaaatatgaaaaagaaaatgtcaaaacagattttttattatttgatcaggaagatgattcagagaagcaaatgtccagtgtttaaactctgaggcctaaaaataagcatttcagaaaaactctcatattttgttgattgccagacataccacagaatctctctttctcaccattcaatccactattaagaaataaataatctcttgaaaagaatgctttctcagacaaagatggaaggtgtaccaaaataggcactttaacaatagattgattatgccataaaagcatcaaattgaaaggtaatagtc

SEQ ID NO: 176547 - DNA, 678 bp, Homo sapiens
ccctttctttgacttggaaagggaactccctgaccccttgcgcttcccgagtgaggcaatgccttgccctgcttcggctcgtgcacggtgcgtgcacccactgacctgcgcccagtgtctggcactccctagtgagatgaacccggtasctcagatggaaatgcagaaatcacccgtcttctgcgtcgctcacgctgggaactgtagaccggagctgttcctattcggccatcttggctcctcaactcatccactttaatactaaggtacaattaatacttttcaagtagaaattcagtttatttatatacatcctcctccagattctcaccaagtgcttcccttgtttgttatgtcataacagatgtatgaaatatgaaaaagaaaatgtcaaaacagattttttattatttgatcaggaagatgattcagagaagcaaatgtccagtgtttaaactctgaggcctaaaaataagcatttcagaaaaactctcatattttgttgattgccagacataccacagaatctctctttctcaccattcaatccactattaagaaataaataatctcttgaaaagaatgctttctcagacaaagatggaaggtgtaccaaaataggcactttaacaatagattgattatgccataaaagcatcaaattgaaaggtaatagtc

SEQ ID NO: 176548 - DNA, 678 bp, Homo sapiens
ccctttctttgacttggaaagggaactccctgaccccttgcgcttcccgagtgaggcaatgccttgccctgcttcggctcgtgcacggtgcgtgcacccactgacctgcgcccagtgtctggcactccctagtgagatgaacccggtacctcagatggaaatgcagaaatcacccgtcttctgcgtcgctcacgctgggaactgtagaccggagctgttcctattcggccatcttggctcctcaactcatccactttaatactaaggtacaattaatacttttcaagtagaaattcagtttatktatatacatcctcctccagattctcaccaagtgcttcccttgtttgttatgtcataacagatgtatgaaatatgaaaaagaaaatgtcaaaacagattttttattatttgatcaggaagatgattcagagaagcaaatgtccagtgtttaaactctgaggcctaaaaataagcatttcagaaaaactctcatattttgttgattgccagacataccacagaatctctctttctcaccattcaatccactattaagaaataaataatctcttgaaaagaatgctttctcagacaaagatggaaggtgtaccaaaataggcactttaacaatagattgattatgccataaaagcatcaaattgaaaggtaatagtc

SEQ ID NO: 176549 - DNA, 437 bp, Homo sapiens
acctgggggaatatattttttaagtatttgatttctttgtttctcctattctgtacttttttctgattgtctggtacttctaaaaagtatgacatccttgaactgccttaacttcactcatctttcaaccaagttccccatcatggccaagcccacaccaaaaaaaaaaaaactatccatcagggcagctgaytcagggggttcaaagcaaatggataaaaccaaaatatggataaaataagatttcatgttctctggtatgccttaaaataacagctttgtaatacgtagcctcaaaaatccaaagaaatgcaaataaaaacatgaaaatatattcctatccaatgggttaaaaatggtaaaaagaatcatattatctggtgggagagggtaggaaaaaacaagtactcccaaaaaactcctggaggcagtgtaag

SEQ ID NO: 176550 - DNA, 561 bp, Homo sapiens
ttcataagcaaaggagaaataatcttttacaaacaagcaaatgctgagggaatacattaccaccagacctaccttacaacagctcatgaaggaaacrctaaatatggaaaggaaagcattaccagcactacaaaaacacactgaggtacatagaccagtcacactataaaacaatcacataaacaagtctgcaaaataaccagttaacattatggtgacagtgtcaaatcctcacatatcaatattaaccttaaaggtaaatgggctaagtgccccaggtaaaagacactgagtggcaagctggattagaaaaccaagactcattgatatgctgtcctcaagagaccatctcttatgcaatgacacacataggctcaaaataaagggatggagaaaaatctaccaagcagaaaaaagcaagagttgcaatctcagtttcagacaaaacagactttaaaccaacaaagataaaaagacaaagaagggcattacatatgataaagggttcaattcaacaagaagatctaactatcctaaatagatatacacccaacacaggaa

SEQ ID NO: 176551 - DNA, 485 bp, Homo sapiens
ctcataaacaaaagcataaaggcagggatagaatggcatttcatggtgcagagagacttatctggctacaacggagaatgcgcatgcaacagattcaaattaaacatttcttgagtacctgccatatgccagggactaggctgagcatcttttacatggattatcttatttattctcacaataacccatgggtttaaatttattatgtctatcttatgatggagaaatacagaggttaagtaacatgcccattcacacagctgttaagcagcaaagccaacatattaagctgtaagtttgggcaatgatgcaaccacagtggattttagaggatttkggagcacagtttttgaagacctttttttgcctggccctgtccccaatttgagtgccaactgtctgccaattggcattggcaaatgtcgatttccaactttttatgaccaaccctgatcttcagttaagggtttttgaccaaagcctga

SEQ ID NO: 176552 - DNA, 534 bp, Homo sapiens
cttttaaactataagtcagaaattcgcacagtcaatgttagggtacagactaaactattgttaaaatacattccagtaattgggatttaaatacagatgagtgcttgacacaataacacatttgcatttatcttagaataaaaattctaaatatcctctacaattttaatttattttgcaaagatttactgagaactgtctctgtgctaggcaccaagttggtgataaagatacaaaggtagataaatacagtccctgccctcaagtgcttcactgtmtagaaggaaattgaactggacaaataaacaaatagctttaaaacaatgtgctcaattccacaagaaagattgaccctgaagttcccaggacccctaatgagaatgcaattaattcttgctcaaaggaccagaaaaggctgacattcaggcatagcaccaccaccatgctggttgtttacagccagtgttcattttgattgatcagggccatagcactcctgaatgcagaggtggaaggcaagactgaagaagggaa

SEQ ID NO: 176553 - DNA, 623 bp, Homo sapiens
ggctatatacagatgacttgcttgcattttttaagactctgggcagatttttcactgacaaaaaattgaactcaacatccaagattgaatggttttatcagcatgaaaagcaggctattgggaataggtactctgactgcaaacacttcacacttctctcatttatgttgtctaagtatcatctctacttccctttccaactacttatacacacattcatctgttcctactgcagggtttcccaagagccatgactgraagaggctgggggagagaacttggggtggaggtggggtgctcttcactcttctttgacccttagctttatttaaacaaagcttagggcttcacacacatatgtattccctcccaggacgtggtggaggccttacacaacaaaggtctgaataaatacttgtgttgaatttatttaaagccttggagctaattgtatatgtgtgtatgtacatacacacacacacacacacacacacacacacacacatgcatgcacacacactctccacccacacctctttaaagaattggcttggaagcatcaatgctttcctctgctctccaggtaaatatcactgcctttgagttaaacctgaaatcaaaga

SEQ ID NO: 176554 - DNA, 623 bp, Homo sapiens
ggctatatacagatgacttgcttgcattttttaagactctgggcagatttttcactgacaaaaaattgaactcaacatccaagattgaatggttttatcagcatgaaaagcaggctattgggaataggtactctgactgcaaacacttcacacttctctcatttatgttgtctaagtatcatctctacttccctttccaactacttatacacacattcatctgttcctactgcagggtttcccaagagccatgactgaaagaggctgggggagagaacttggggtggaggtggggtgctcttcactcttctttgacccttagctttatttaaacaaagcttagggcttcacacacatatgtattccctcccaggacgtggtggaggccttacacaacaaaggtctgaataaatacttgtgttgaatttatttaaagccttggagctaattgtatatgtgtgtatgtacrtacacacacacacacacacacacacacacacacacatgcatgcacacacactctccacccacacctctttaaagaattggcttggaagcatcaatgctttcctctgctctccaggtaaatatcactgcctttgagttaaacctgaaatcaaaga

SEQ ID NO: 176555 - DNA, 569 bp, Homo sapiens
gagaatgaatacctggcagtaagtactaaatctatgtgtggtgactgacagattaagcactagggatgttaaagattagaccacggatccccaaacagtgaatgtcagtgttattttccatcttgaaatggaatgaagttgccctcatgattcttaccacagccagcactgttatatcctcccaatttggttcttacattacttcactcttcagaacatcattcatttatttaaatggtatttcttgagctcttttcatrttatggcttggttctagctacagagaaggatataacaaaatgtgagacatggtctttggacccaagaagcttctatttcaagaaatggaaaaataaggccgtaaaagtcatgattacgtgcttaagttctatgattccatggtgaaaggatattttgaagtacagggaacagcacagaaaataatgctacctttcaggataagtctaattatacctcttttgttgtcagcctgtgagagctgagggtttgtggcttttaattctcctttaggctgtggaaggcagtgggggtgcggaaagagtgtgacc

SEQ ID NO: 176556 - DNA, 547 bp, Homo sapiens
tttgtgaaaaaaagagcctgtagctttcaataaaagggttggtggctcaatgagatttaggaatcttgaggcacatagaccagtaactgctttgtgaataaatgaataaatgcactcagagagaacagcttcagytcactgctaggcttgaccttccagatcaaactcttctttagaggtgatttcaagaagacagtgagagactggtggtgccagaccattattacacatctaagagtcagctgaccgtgtcacagtcctgcctcccacctcttacagcaaacattactttactcttcatcattttcaactcaaacagcccaaatatatagctaaaatcgcagctcttttccctaattttgaaaatcaattcaagtattagagatctatagcctcaatgccaggaaatataaatgtctaccgacaaaatgccaagggtacaggttctgaggatgatgaaagggcatataggagcaaaaatgggccaaaaaataaagtacattgggtgtagagagagggagaggacagaaaaaagaatgtagatctg

SEQ ID NO: 176557 - DNA, 547 bp, Homo sapiens
tttgtgaaaaaaagagcctgtagctttcaataaaagggttggtggctcaatgagatttaggaatcttgaggcacatagaccagtaactgctttgtgaataaatgaataaatgcactcagagagaacagcttcagttcactgctaggcttgaccttccagatcaaactcttctttagaggtgatttcaagaagacagtgagagactggtggtgccagaccattattacacatctaagagtcagctgaccrtgtcacagtcctgcctcccacctcttacagcaaacattactttactcttcatcattttcaactcaaacagcccaaatatatagctaaaatcgcagctcttttccctaattttgaaaatcaattcaagtattagagatctatagcctcaatgccaggaaatataaatgtctaccgacaaaatgccaagggtacaggttctgaggatgatgaaagggcatataggagcaaaaatgggccaaaaaataaagtacattgggtgtagagagagggagaggacagaaaaaagaatgtagatctg

SEQ ID NO: 176558 - DNA, 547 bp, Homo sapiens
tttgtgaaaaaaagagcctgtagctttcaataaaagggttggtggctcaatgagatttaggaatcttgaggcacatagaccagtaactgctttgtgaataaatgaataaatgcactcagagagaacagcttcagttcactgctaggcttgaccttccagatcaaactcttctttagaggtgatttcaagaagacagtgagagactggtggtgccagaccattattacacatctaagagtcagctgaccgtgtcacagtcctgcctcccacctcttacascaaacattactttactcttcatcattttcaactcaaacagcccaaatatatagctaaaatcgcagctcttttccctaattttgaaaatcaattcaagtattagagatctatagcctcaatgccaggaaatataaatgtctaccgacaaaatgccaagggtacaggttctgaggatgatgaaagggcatataggagcaaaaatgggccaaaaaataaagtacattgggtgtagagagagggagaggacagaaaaaagaatgtagatctg

SEQ ID NO: 176559 - DNA, 561 bp, Homo sapiens
gtgctaagggcactggaaggtttggactgggctgaattcaccacagcatggcaaagcagctgtggccagactgcttctctagattccacctcactgggcaagacatcttcgaaggaaatgcagcagccccagtcaggrgcttacagatacaactctcatcttcctgggacagagcacttagggggaggggtggctgtggttaagtccgcagtttctgtggacttaatctctcctgcctgccggctctaaagagaacagctgatcctgacaaggaggattttcccaacacagtgcaccagctctgctaaaggacagactgcctcctcaagtgggtccctgacccctgtgtctcctgactgtgagagacctcctgacaggggtcgatagaaacctcatacaggagagatccggctagcattagcctggtgcccctctgggacaaagcttccagaggaaggagtaagaagcaatctttgctgttctgcagcctccactggtaatacctaggtgaacaagttctggagtggacctccagcaaactgcagcagacctgcagaagag

SEQ ID NO: 176560 - DNA, 606 bp, Homo sapiens
tccccacagcagagctcagggatatccaaagggagctgttaggtgctttttccttgataaggatttggcttttyttccctggaagaggaacaaggcctagagatcaggatgagcattagttctgagcctgcctttctatcctatgagagaagaggaaggctttctccttcccctgctccagcctgttgccacagggtgacaccagagagaaaagcaactgttggccactgagaggcatttctgctgcagcctgagctatggcccggctgggccacggcagtggcactagtgcctcactgaggcagcgaggggcaagcctgaggagtgcaggcagaggggcctgctgctggctgggggctctctgaagagggagggtggctgtggggaggtgtgccctacccttagagagctatcagcaccaagataggaaaatcaatggagttaactacatgaggaacgagaagtccttctggggaagatgaggggctccctgatgttattctccccttgagactaagaacagaggtatttggggtagaggtgagaggcagaggagaaagaacgacgagggctggcagacaagaacaagcagaacctctggctttc

SEQ ID NO: 176561 - DNA, 222 bp, Homo sapiens
ttttgcggtgatttagaccttcctttactccagctgtcattcacctgttacacacatcccaagttcaggaaggagatgtgaactgtgtcctgaaagacagccctatggrgacaccagcctcagccagggtagggagggctgtgtgacgagcagctcatgggcatgggtccgagaggggggtgggggcgaggccagctgcgcagggtgggctgggaagggcct

SEQ ID NO: 176562 - DNA, 621 bp, Homo sapiens
agtgggctttcgggaaagagagagagagaaaaaggaatcttttctatgtggctggttttgaacccttgaaatcccagtgaaaataatcacactaaatactatttgtagcagcccagagacatggaacacgggctgaatcctttgcgtttctttgtaattggaaaaggatgtttttacatcttgacattttttgactctcagccacatctagatagaattagtgagaccccaagaagacattccatcaacgctgggtaactgcaagaactttaaacagatctgtcgtgatgtctctgagaatggcggcctgcagtgacctggaatcccacagtggctctgccaggtattccaggaacaggtcccagggacacgcgtctaatttattatttatggagcaaattatcrttctccacagcaagcagagaccttgacaaatgggccaccactgtggcttcctgattttcttttcttttgggggtgttgagggttgcaacagacgatgccctaaagacctccagggctgtgcctgtgctggacatctggccagccctcagggtcctggacttgtcctcatctctactgctcacctgctgcctgcgatgcagacctgcctcccctgga

SEQ ID NO: 176563 - DNA, 458 bp, Homo sapiens
ggaggagggaccatgcacacaaaaagaactgcaagatcttgcctgtttttgtcgacagaaacacagggaatatacgtggcactggctcctaagggygatggacccagggtggaagacgtggaaggttcggccaccggtgccctgactgcgtccgctggcttgtgttggtctgagtgaccatcagtggctctaacagttctgaaacacagacttgatggttgccatcgtaagatgaagccaaatgctaccaggaaagacaaacagctcaggagagggagctgtcgccgtggctgggtttcttacgcatgaccttctcacccaccgcgtcacttctcctccagagtccagaggaccccctccccacagcatggatgagaagagagcccccactgttagactccaccacagccgtgatctgaggccgccgtcaccgtgagagatgctgccattatctcaga

SEQ ID NO: 176564 - DNA, 581 bp, Homo sapiens
actgctttcctgctttaattggtagcatatctttgaaaaagctttaaacatcaatgtttgcattttgtctctaaaatatgaaaagctccaagaagaaaagagagatattttggaagatattttggattgaagttccaatattgaatacatatgtttaattgccatagcatctctaattttttcatgaagctctatatactctacaacatttacattatttatcttatttgcataagataatcagaatatctgaatactttaatcgatatttgatattttaagacacctctgaaggcactcactaatatgttaatttaagaatatgtcatcaaataatttaaactaactaaataaaaaggaaaattgaagattttattaaaaagytaagtataatgacatgttgatgtcctttctatgttctattccagttcttagcccttaagtcagataaataaaaataacaataacagctccatttcgaagaaatctgttttgatgctcgtcaaaaaatctgcacaatagaagtcttagccccatttcataaacaggagtttgaggctgagatgactaaagttacttgc

SEQ ID NO: 176565 - DNA, 377 bp, Homo sapiens
ttactttacacagaaagtggaaataaggttatccattctgtcattcttgaagtaggatagtgagagagccagcgtttaaacctattctattttgtgcctgtatctggcacacagcaggagcttaatacatgtttgttgaataaataagcctgttcctggcatataggtacctcccacctcatatgtttgctatctgcttaggttgacagtaagcattgcatgctctataattttctaccgcaattgtggtccatgaaccaaygccaccaggaaacgtgatagaaatgcaaactctaagtctccaccctggatctattaaatcagaatgtgcattttatcaagacccacaagagactaatgtacatgaaaatgtttga

SEQ ID NO: 176566 - DNA, 531 bp, Homo sapiens
atccaccctccttggcctcccaaagtgctgggattacaggcctgagtcaccgcaccaggccactttatttatttttatgatctagtattaagttaacaaattcaccagtattacatgtgagagakaaaaattgtattggacaaaagttttcatctccaacatagcagttttaatgagataattccttgagcagaaagggcgtgaccatttatctatgcagttttatccacaagggacagataaatgaacacattatgaaggaacatcatgttgttgggaaggtcattaaaggtccctggatagtggggaggaacagaataatggacaggtggggaaagatcgccagtaggcttgtgctattgtgaacatgttcaaagtggtaacagatgagaattgaaggaccgagtcctatatcaactctaagatcatggtgtttgtcatttgtacccattattttggccagaaataaaatatgctttcaatgataccagctcaggtgaggggaaaaatattaataagagaaacagaata

SEQ ID NO: 176567 - DNA, 544 bp, Homo sapiens
cgaggggacaaggagtttcgatgaaagaagtgaccacctggaaaaggaagaagagaaagagacttaataggtcaccaggcttgtgtttctcacatggctaggaggaaacaatgcagattatctttgaagcatgacattttcttaactatccttcataaggggctcttattagagagatacaaaaagtgcgggcatccttcaattcacgcaggctttaagcatctaagttccaatcttcggatccccaagagactaaccactggagctcctcaaagcaaaagctgcctggtgctcgtaaaagggttccacttagaaacgtgaagacttcttcctgggcacatgatcttatggaggactgccccccagccctctcatctgggcatatatatttatatatatatatatatwttttttttttgagatggagttttgcttttgttgcccagactggagtgcagtagtgtgatcttggctcactgcaacctaatatgcctatgttgatccttccgaatttttttcagtcttagactttatctactgaatt

SEQ ID NO: 176568 - DNA, 593 bp, Homo sapiens
gccaatccccatcttactgtgatatayttttgggtcctggaagccctcctgagtgtctctccagcataaggaagaagctgcaattatgactacaatggcactactttatctccctaggctgagcacagagatctcagggaggctgaggggcaggcggagcaatgcacgtgggcgtgggctgtgtactggaatgtgcaccataaaaaaggttctgtttgttttctttcttgatacagatgcaaatggaagcccttgaggcctttgttaaagcagacatttactcctggggttctctgggacactgcctccttctgctctctgtatgatgcctgaaacatgccacagaaacagtctttggcttttgattgtcttctgaaaacactccaacccctttatgtggatttttgagacctcccccaccaacccaactctggctctgataatagttagaatggtaagtctagaaagcgacaggaaaatctgttttctattcttacaagtggaaaggatcttgatttctcttatttccacagacctctcgcaaaatttctgtgacttctatttggagaccaatttctgtttatgatagctct

SEQ ID NO: 176569 - DNA, 593 bp, Homo sapiens
gccaatccccatcttactgtgatatacttttgggtcctggaagccctcctgagtgtctctccagcataaggaagaagctgcaattatgactacaatggcactactttatctccctaggctgagcacagagatctcagggaggctgaggggcaggcggagcaatgcacgtgggcgtgggctgtgtactggaatgtgcrccataaaaaaggttctgtttgttttctttcttgatacagatgcaaatggaagcccttgaggcctttgttaaagcagacatttactcctggggttctctgggacactgcctccttctgctctctgtatgatgcctgaaacatgccacagaaacagtctttggcttttgattgtcttctgaaaacactccaacccctttatgtggatttttgagacctcccccaccaacccaactctggctctgataatagttagaatggtaagtctagaaagcgacaggaaaatctgttttctattcttacaagtggaaaggatcttgatttctcttatttccacagacctctcgcaaaatttctgtgacttctatttggagaccaatttctgtttatgatagctct

SEQ ID NO: 176570 - DNA, 593 bp, Homo sapiens
gccaatccccatcttactgtgatatacttttgggtcctggaagccctcctgagtgtctctccagcataaggaagaagctgcaattatgactacaatggcactactttatctccctaggctgagcacagagatctcagggaggctgaggggcaggcggagcaatgcacgtgggcgtgggctgtgtactggaatgtgcaccataaaaaaggttctgtttgttttctttcttgatacagatgcaaatggaagcccttgaggcctttgttaaagcagacatttactcctggggttctctgggacactgcctccttctgctcyctgtatgatgcctgaaacatgccacagaaacagtctttggcttttgattgtcttctgaaaacactccaacccctttatgtggatttttgagacctcccccaccaacccaactctggctctgataatagttagaatggtaagtctagaaagcgacaggaaaatctgttttctattcttacaagtggaaaggatcttgatttctcttatttccacagacctctcgcaaaatttctgtgacttctatttggagaccaatttctgtttatgatagctct

SEQ ID NO: 176571 - DNA, 593 bp, Homo sapiens
gccaatccccatcttactgtgatatacttttgggtcctggaagccctcctgagtgtctctccagcataaggaagaagctgcaattatgactacaatggcactactttatctccctaggctgagcacagagatctcagggaggctgaggggcaggcggagcaatgcacgtgggcgtgggctgtgtactggaatgtgcaccataaaaaaggttctgtttgttttctttcttgatacagatgcaaatggaagcccttgaggcctttgttaaagcagacatttactcctggggttctctgggacactgcctccttctgctctctgtatgatgcctgaaacatgccacaraaacagtctttggcttttgattgtcttctgaaaacactccaacccctttatgtggatttttgagacctcccccaccaacccaactctggctctgataatagttagaatggtaagtctagaaagcgacaggaaaatctgttttctattcttacaagtggaaaggatcttgatttctcttatttccacagacctctcgcaaaatttctgtgacttctatttggagaccaatttctgtttatgatagctct

SEQ ID NO: 176572 - DNA, 594 bp, Homo sapiens
tggtggtcgctgttccatggagggaaaggagcgggcttttgacttttgagcgagttcgggggacgccaggagtgggggagttgcactcgagttttactgcccgtaagaacgactttttgagaggggacggggcttcttgctcccggacattgttctcttgggcggasgggaccacttcagagcttctctttgcacccgcctcttctgcccctcgtcttctaccactgaactgtttgtaaacaaagttccagtcttcccccgctctctccgcctccaccaaaccggtatttctcccaaattcgctccatcagtctgggatcgttacacagggcggatattcacaattttcacaagtgatcctgaaagaaggcctaggggaagcctcctaaacggtcccacattgcagcagggctggtgaggcctgggatccattctctctcttttctgcccttcccatcccggagtctcggggccggcggcgggaattccgcgcagccggaggggggtctgcgcccagcggagcgccgtgctggggcgaggtggctgtgggcagagcgtgcaccggggttggggggagaaggggattgaaggggc

SEQ ID NO: 176573 - DNA, 508 bp, Homo sapiens
tttcactttgctttataagttttgcaattgtgaagtaatttgaatgttaaatacaaaactgtttattaagtattcaggaaacttagaaaaggaatagagtattttctttggacacactggaaacagtagggaagagtagttgatttcattcaaaacattaaaatggtaacatttcatgatagggtgactagatgagaaaatagatgtaaaaccgtaaaatcaggtacaatccaaaataaaagtgtctcatgaaaagaactctrttttaggtatacttcataaaatacctccttccacatgattctgagttggaaagataccaacaggatgtatgtggtgcaagtgttcaagcattttaagtaggataaaatgatacaggaaatagcatcagcaatgaaagaatcgttggctatctcctcatatgattgatatgaagaaaaaaggtttagttaacttaaactaaaagtcagactgaattccaccattggattcctatttttatctcatt

SEQ ID NO: 176574 - DNA, 580 bp, Homo sapiens
tttgggggcaaaacagaagctgcctttgcttccaccaggttccctccctgctcttctaacccctcaatgaaaatctgggccaagctgtactccagcaccaaccccaacctcatccatcctaatactttttcccaaatctgtttaattccctggttaacttcattctggcccccagccctgcctgaacagtgcctgcccctaatgcccarctcagcaatgcatgccctggccttatgctaatcattactaattgcagctaacacttataaatgtccttattcacttatttatttaatctttacagcaatcctctgaggtagatactattattattcccattttacagatgagaaaactgagtctccaggagattaagtgacttgcccaaggtcacatagcttgcaaacaacagaatagatttgagcccagggtctgcactcctaacctctagcctgtaccaacactaaaagttttagtccctgccctcaagccagtgtcaatccaacccccagaccctgcagctctgatgggagcctgagctccttaaatccagctgagccccaccactctgccacccaaa

SEQ ID NO: 176575 - DNA, 536 bp, Homo sapiens
gattctcctgtgaacagactgaggtaagagcaatggtgtgtccattttgagcctaggcatcaagaagaatggctggtttctkcttactattctgacatcctgctcagttgccatggggggacctggtgatgcttggtgaaagatgggagaccatgtagataagaagtaaatcaccaactgaggctctaaagaccaggggtctccaacccctggaccacagacctgtactggtccatggcctgttaagaacatggccacacagcaggaggtgagcggcaagtgagcgaagcttcatctgtaattacagccactccccattgctcatattaccttctgagctctgcctcctgaatcaccgtggtatgcaatccaggtcgaggagtctaccaatgttgacaacaaggcaacaacacttgttttgtacaatgtatttttcgggaggatgtgcatgatgatatgttatgtacacgtttgttgccaaccaacaccacaactgcaaaactattcaagtctttgaatgattacatagcaggaaa

SEQ ID NO: 176576 - DNA, 536 bp, Homo sapiens
gattctcctgtgaacagactgaggtaagagcaatggtgtgtccattttgagcctaggcatcaagaagaatggctggtttctgcttactattctgacatcctgctcagttgccatggggggacctggtgatgcttggtgaaagatgggagaccatgtagataagaagtaaatcaccaactgaggctctaaagaccaggggtctccaaccccyggaccacagacctgtactggtccatggcctgttaagaacatggccacacagcaggaggtgagcggcaagtgagcgaagcttcatctgtaattacagccactccccattgctcatattaccttctgagctctgcctcctgaatcaccgtggtatgcaatccaggtcgaggagtctaccaatgttgacaacaaggcaacaacacttgttttgtacaatgtatttttcgggaggatgtgcatgatgatatgttatgtacacgtttgttgccaaccaacaccacaactgcaaaactattcaagtctttgaatgattacatagcaggaaa

SEQ ID NO: 176577 - DNA, 536 bp, Homo sapiens
gattctcctgtgaacagactgaggtaagagcaatggtgtgtccattttgagcctaggcatcaagaagaatggctggtttctgcttactattctgacatcctgctcagttgccatggggggacctggtgatgcttggtgaaagatgggagaccatgtagataagaagtaaatcaccaactgaggctctaaagaccaggggtctccaacccctggaccacagacctgtactggtccatggcctgttaagaacatggccacacagcaggaggtgagcggcaagtgagcgaagcttcatctgtawttacagccactccccattgctcatattaccttctgagctctgcctcctgaatcaccgtggtatgcaatccaggtcgaggagtctaccaatgttgacaacaaggcaacaacacttgttttgtacaatgtatttttcgggaggatgtgcatgatgatatgttatgtacacgtttgttgccaaccaacaccacaactgcaaaactattcaagtctttgaatgattacatagcaggaaa

SEQ ID NO: 176578 - DNA, 640 bp, Homo sapiens
taactcatatatgtatatatatacacatatatatacatatatatacacatatatacayatatacacatatatatacatatatatacacatatatacatatatacacatatatatacatatatacatatatatatacacatacacacacacacacacatatatatatatatatataaaaaaaatagcattacttctttctcatctcagctcaaatctcctctcttcaaattggcctttactcatcttatcttgggatttgcattatctgaatttttctttcttagattatttaattcctttaatacattttaaacaaacaattggaattttctgtattgatttctttatgagtttatttaactttctctttcttccctagaaaataagtgctatgaaagcaagattccagttctgttattattattattctattctaaaaactcagcaccaaaagtaacaagtaggctttaaataagcctttgggtatgaatgaatacattttggctggttccccctaaaatgctacactttttgattaataatttcctcagcataatttattgtagactcatataataattatcattggtatatttttaatgagtaaatattgtgtaattaaggaactaaaaatccatta

SEQ ID NO: 176579 - DNA, 640 bp, Homo sapiens
taactcatatatgtatatatatacacatatatatacatatatatacacatatatacacatatacacatatatatacatatatatacacatatatacatatatacacatatatatacatatatacatatatatatacacatacacacacacacacacayatatatatatatatataaaaaaaatagcattacttctttctcatctcagctcaaatctcctctcttcaaattggcctttactcatcttatcttgggatttgcattatctgaatttttctttcttagattatttaattcctttaatacattttaaacaaacaattggaattttctgtattgatttctttatgagtttatttaactttctctttcttccctagaaaataagtgctatgaaagcaagattccagttctgttattattattattctattctaaaaactcagcaccaaaagtaacaagtaggctttaaataagcctttgggtatgaatgaatacattttggctggttccccctaaaatgctacactttttgattaataatttcctcagcataatttattgtagactcatataataattatcattggtatatttttaatgagtaaatattgtgtaattaaggaactaaaaatccatta

SEQ ID NO: 176580 - DNA, 560 bp, Homo sapiens
ttaaatagttgcttttatcagtttatcagtgtagctctaaagtattttttaaaataatgtattggctagtattgttatgaaatttggcttatagtgctaaaactcatggctcagaggttccaaacttataattatgtcatttagttagttatgatggactccttagtagaaaatgcactcctactgttatgcatttttcttctttgtgagtgctatttttcttctttgcgaatgctaatartcatgggagatttaaatacagaggtgaaaacaaaagcaaaacacaggaagtctggatgatataacacaagttattactatcattaaaagtaaagttttatatcctattcaaataagtctaatcaacagctttgccattggatatgaaagattctataacacattaataaagttaaagataaaatatgtaaaaatatacacatataaatattcaagtaaaatacataaatatatttgcatgtataagaatgaaaacttagttaccaaacattgagtgaatttggcttctaatctacaataaattttgtgaattctgttca

SEQ ID NO: 176581 - DNA, 587 bp, Homo sapiens
tgaaggaggcaacaataaatgacatccaaagaaatgttaagcatttctgttcatttcaaactatacttacgttgttcattagaaagaaagctaagggaacttgttaacttaagctttaatattcagaaccaaaagagtttgtcacctagcattatagcaatataagctctcttagccagaggaaaatgatgcctaattcaaagaggagaatcaatagcattattaaagaattctacttcatgtgtaattataagctgcttttgtaaattaatctacctattatttttaagtaataaatgaaagggtcaccttaattatgactgaagaaaaatgtcctgtaatataattttatttttctgttgtgcctttttttcctagacgtgtgccaccactattgtgtgaattctgaatcatgtaccattggggatgatggaagtgttgaatgtgtctgtccaacrcgctatgaaggaccaaaatgtgaggttgacaagtgtgtaaggtgccatggggggcactgcattataaataaagacagtgaagatatattttgcaagtaagtggacacccagcttaatttataaaagcat

SEQ ID NO: 176582 - DNA, 523 bp, Homo sapiens
catttccgattatccttacacataaaaagccttttcttaagtagttccatttctacttaaactgttatcacaaagagaaaatttcaggaatttagaaagtgaactctttttccttatatggggatgaacctgggaagaagcagcaagtagtagttcaacgtgctttacttgctaggagttccacaaaccatgagattgttacactttttgtggaagaagcagacaagtacattttggcaaaaatagaaattccctaacaacagaaaacatcatcccagtgagacacttcattagagtattccacttcaaccagagtgttcagacccagrgaaggtgatttctagtgactccatttcatttatctcctatacagatcctcaaaggtaaatttgccatcttgtttgacttccacataaaatctgtatatggactagcagaaatgaaaattttgacagttcatttcacagctctttagggaacaatgtcagaaaagaggagaaggagaactgcaacaactaaactg

SEQ ID NO: 176583 - DNA, 575 bp, Homo sapiens
atcgtgaagtatatttaatataatgcaataatattataactaattctaaaattatttaaataatttaaatgaatctgtaataccagtcattaaatgtcrttatatagtataaactatttttattaccatctataaattcatatatttatgtgtttatgtttttatttctaaaacctgttatttttactctatctcaatttcaaatttataattgtattcagcttctcctacttgctcatcacgtgaatatatatgtgccagtgatggatgtatttcagcatctttgaaatgtaatggagaatatgattgtgctgatggttcagatgaggtaaaatatattgtttaattaaaatatttgaattacatgaattaggtttgggcaaacaaatgtaatgaaaataaagagaaagaatcttgattcttagcatggtttaacatgttagatatgtacattgaatgcaatcatttcagcaaatacctgaattttcatgctgtccatatactaaagctcattctcatttgtagaagttatattcattaagacaaaatgaaagaaagcccatggtataataaag

SEQ ID NO: 176584 - DNA, 563 bp, Homo sapiens
acaggataattaaagccctcaccaatcagtgaaacaaaacacacaaaaataattgcaaacgttaactttagccttttagccttataataaatgggaaatttttttaagttataaagtatttctacctgtgtttataccaatcataataactgttacatagaaaataatattaccttttagaatgtaatgcaaaattctgagtatacaattagtggaatgtgacatgtgacttgctaaaaatcggtggatcatacaggcagtgtaggaaagcaataggtgaatctagaagtaagacacatggttcttttcaaaattagtcacccgaagaaaaaagtgatwtttttttccttaataaaactaaacacagcctcatcaatctaaaattaaaacatccagggtagattagccaaacatataatcatgtacaccttactagaaacatgaatctaaactcagaatattttaatattaatctttttccaaagtatctcacagaaaataattaaactatcaccttcacaaataatattttaaatagtcaattaatctttatatggtggtaa

SEQ ID NO: 176585 - DNA, 605 bp, Homo sapiens
  misc_feature (1)...(605): n = A,T,C or G
tgtgaggtctttttgaaaacttcattcatgaatgtttacccattctcttggaacttacacattttgtctttaatgagagcaacgtattttgaacctctagtggagcactccttttaaataaaaaatgtattaaaatagatttatatcaatcctttctcctccagattttaatgctcatgatacaggtcctgttttattcatttttgtatttttactttctagcacaataatggcaaaaaataatagtacctagtaagtgtgttgaaaaaatgaatrgattcattttgaatgaatcatttgtgttctaatctgacaccaactcctccactcatgctcatgagcccatttattctcttctacttattcaggatgacacttgaacaattgtctcctctgattattgtacttcatgtatcatttttcttttctccaccagattatttcctttagcattaaacttgctgtagcatttcccatctttaacaagtccaccccttatcatacttaccctcgagctatcactctattcctttgctctcttctaaaacacaactagaaagaattgcntaaaggtgtctctaattcctttcttgctattgtagctt

SEQ ID NO: 176586 - DNA, 629 bp, Homo sapiens
taaaaaataagccaagggtagaaagatatgaataattaatttattatctatatataagtttgagatagtgctgagcatgtattaaatatgatcttttgcatcacaggaaagaatatgcttttcgacttcttatctcaactcttcccctcacccctgtgttactttaaataagttacttaatgtatccataacttagtttattcacctwtagctgcttaaaaccagctaatacatttgaaacactgacaaataaattgactatctctctctgtgcatttgtgtcgatacagtatgaaaataacaacgtgaagtacttatacatgaaagtccctatttcattaaccatacttaaaatcagtatgtgtacatatagagatcaaactaaatatgcgctttcatccagtacatggtagctgccataccattgaaaccatttactaacaggcttatgattaatgcacgtagatgtaattctgtgcttaaaaaagaaaaataaatattaggaaaacaagcaaaaactgacattatatgacatactgcatttggaaatcttgaaatggatttcaatatttatcagaacttcaggcctgaaaatttagcttagttatttttgtttgtgtgttgtttag

SEQ ID NO: 176587 - DNA, 629 bp, Homo sapiens
taaaaaataagccaagggtagaaagatatgaataattaatttattatctatatataagtttgagatagtgctgagcatgtattaaatatgatcttttgcatcacaggaaagaatatgcttttcgacttcttatctcaactcttcccctcacccctgtgttactttaaataagttacttaatgtatccataacttagtttattcacctttagctgcttaaaaccagctaatacatttgaaacactgacaaataaattgactatctctctctgtgcatttgtgtcgatacagtatgaaaataacaacgtgaagtacttatacatgaaagtccctatttcattaaccatacttaaaatcagtatgtgtacatatagagatcaaactaaatatgcgctttcatccagtacatggtagctgccataccattgaaaccatttactaacaggcttatgattaatgcacrtagatgtaattctgtgcttaaaaaagaaaaataaatattaggaaaacaagcaaaaactgacattatatgacatactgcatttggaaatcttgaaatggatttcaatatttatcagaacttcaggcctgaaaatttagcttagttatttttgtttgtgtgttgtttag

SEQ ID NO: 176588 - DNA, 589 bp, Homo sapiens
cagaggtaaaattacattatctgtattgttctcagtattttacrtgcattatgtcatttaatccttacaaaaatcccattcaattgcttctattctgacctccaatttatataagagaaaactcaggcccaggtgagaaaagtggcttgcccaaggccagacaacaataaagttctagagtagagtaggatttgagcatgcgctctctttcctttctttctctttctctctccagtgatttgtcctttctttctgtccaacttaattttaaacaacttgtacatattatatacacctgcatcttgttttttcaaatggaattaaattttggaattattttctatcaacttatccagatctacctcatttcataacaactacatggaggaatcataattcatgcaaaatatacagagtagcagcatagtgttgtgttttaagacacagactctagagttcaagttctgggttttgggtcttagcactgcactcacatcaccattgcccttactagctctatgatcatggtgcaaaacgggaacaataatagtaatagctcacaaggttattatgaaggttaaacaaatta

SEQ ID NO: 176589 - DNA, 589 bp, Homo sapiens
cagaggtaaaattacattatctgtattgttctcagtattttacatgcattatgtcatttaatccttacaaaaatcccattcaattgcttctattctgacctccaatttatataagagaaaactcaggcccaggtgagaaaagtggcttgcccaaggccagacaacaataaagttctagagtagagtaggatttgagcatgcgctctctttcctttctttctctttctctctccagtgatttgtcctttctttctgtccaacttaattttaaacaacttgtacatattatatacacctgcatcttgttttttcaaatggaattaaattttggaattattttctatcaacttatccagatctacctcatttcataacaactacatggaggaatcataattcatgcaaaatatacagagtagcagcatagtgttgtgttttaagacacagactctagagttcaagttctgggttttgggtcttagcaytgcactcacatcaccattgcccttactagctctatgatcatggtgcaaaacgggaacaataatagtaatagctcacaaggttattatgaaggttaaacaaatta

SEQ ID NO: 176590 - DNA, 589 bp, Homo sapiens
cagaggtaaaattacattatctgtattgttctcagtattttacatgcattatgtcatttaatccttacaaaaatcccattcaattgcttctattctgacctccaatttatataagagaaaactcaggcccaggtgagaaaagtggcttgcccaaggccagacaacaataaagttctagagtagagtaggatttgagcatgcgctctctttcctttctttctctttctctctccagtgatttgtcctttctttctgtccaacttaattttaaacaacttgtacatattatatacacctgcatcttgttttttcaaatggaattaaattttggaattattttctatcaacttatccagatctacctcatttcataacaactacatggaggaatcataattcatgcaaaatatacagagtagcagcatagtgttgtgttttaagacacagactctagagttcaagttctgggttttgggtcttagcactgcactcacatcaccattgcccttactagctctatgatcatggtgcaaaacgggracaataatagtaatagctcacaaggttattatgaaggttaaacaaatta

SEQ ID NO: 176591 - DNA, 633 bp, Homo sapiens
aggcagaaataatatcaaatataaggcaaaggataattacttgtttggtctatgtataatttggcagggggaagtcatagtaaacaggtccmaaattgacaaaaagattcctaagggaagctgttgatggcaatttactgtaagggtagtataactcacacttgttctaggcttatgactttgagagcaaagaaaattattgtcaagtttaagatgagaaacaagtggaaataataaaatttggagacagtgagacaatttagaggactgttataataacttggtgtgttagattatgcaggtctgaactcaaataaatacagaaaggatgaagaagagaacgtttacctggcacttcaatactcagaaaacagaagagactacctacatcttaaaaagcaaacaaaacaaacaaacaatgaaagaaaacagaatacagagaagatgaaaaacacttacactacagaactagtgaccaactgaattttggaagaagaaaaggtataggaagcaaggataatccctatgcttctgacttagaaaatgttggtattactaacagaataaagaataatggtagacttttaggtatgagaggaaatgattaatgcataaacacacataaatataaaa

SEQ ID NO: 176592 - DNA, 476 bp, Homo sapiens
atgtattagtttgttggctttttcagtaagagagagcaggataacaaaatagcaagaactgttacattgaaaagagtattttatgcagcatgaatactttccctcctccctttcagtaatgggtaggtgaagtcaagtgttcctacttcctcaccactttactcctaaactcagaaagccccgttgaattctcataagtcttcayaccactgatggatgttgcaatatgggcatgtaaaataaagaagagaccgtgacactgagtgtgcagcaattgtgatttccacctcgtggtgtagcaagggtcgatgtgtttctcagaggagcagaagaggtgagcttgcacaaagtatctgcaacaagagggtatgggatagaaggaaagttgtaaaaatgtggtataaagagcatttcactttgctaagctcactcaaatcagagaacagtacagggagcagtgttgtgggacagcctga

SEQ ID NO: 176593 - DNA, 476 bp, Homo sapiens
atgtattagtttgttggctttttcagtaagagagagcaggataacaaaatagcaagaactgttacattgaaaagagtattttatgcagcatgaatactttccctcctccctttcagtaatgggtaggtgaagtcaagtgttcctacttcctcaccactttactcctaaactcagaaagccccgttgaattctcataagtcttcataccactgatggatgttgcaatatgggcatgtaaaataaagaagagaccgtgacactgagtgtgcagcaattgtgatttccacctcgtggtgtagcaagggtcgatgtgtttctcagaggagcagaagaggtgagcttgcacaaagtatctgcaacaagagggtatgggatagaaggaaagttgtaaaaatgtggtayaaagagcatttcactttgctaagctcactcaaatcagagaacagtacagggagcagtgttgtgggacagcctga

SEQ ID NO: 176594 - DNA, 316 bp, Homo sapiens
agatgctaaggtatatgctaagaaaactaacataaggaaattacaaaatgattcttcttttttatgttatgtcttttctacttattttttggttaaaaatcagaataaaactggttttagttaaaccagttaagccattccatagtcataaaattcctatgtcagaggtttaaaaagtactggagaaatgtttaattgaagaaaataaatattgtccacaagggaataggatttgaaaaaraaaaatatattctagtggagtgatcttggagatgtcatagtatttttcctcaaaagaatgctctgctgagtgaaa

SEQ ID NO: 176595 - DNA, 433 bp, Homo sapiens
ttaaataatacaaactgtattacagaaaattaaccatgcctgtggtgtgtaaattctatgtagaattaaactatatttaaaaagctgaaggagtaaactgagttaagggttctcatgaacttgcactgtttggaaagtaataactgtactaatttatgttagatttctctaaaatttttgttaaaatttctagggtaactactcaaagaagagtaaaataacactaacaagctaaaagaagaaaaatatcaaatggtaaaatactttaataacacaaaagaaggaattaaaggaaggaaaataaacatagamtgggtggtacaaatacacaaaaaaaaaaataaggtggtaatttcaaacccatacgtgaatatatcattatttccattaaatgtaaaaccagtaaatactccagttgcaatatagtggtaat

SEQ ID NO: 176596 - DNA, 433 bp, Homo sapiens
ttaaataatacaaactgtattacagaaaattaaccatgcctgtggtgtgtaaattctatgtagaattaaactatatttaaaaagctgaaggagtaaactgagttaagggttctcatgaacttgcactgtttggaaagtaataactgtactaatttatgttagatttctctaaaatttttgttaaaatttctagggtaactactcaaagaagagtaaaataacactaacaagctaaaagaagaaaaatatcaaatggtaaaatactttaataacacaaaagaaggaattaaaggaaggaaaataaacatagactgggtggtacaaatacamaaaaaaaaaaataaggtggtaatttcaaacccatacgtgaatatatcattatttccattaaatgtaaaaccagtaaatactccagttgcaatatagtggtaat

SEQ ID NO: 176597 - DNA, 611 bp, Homo sapiens
atttatcgtttctcttagttttatgttgacacttattcaagggtaatgtttccttatgtttttgaytatcactgtctgttagactttatgcttagaataaaatacttttggaaataattaaatgattgttttaataatatcttccttcagatagtttcgtttggtgcaatatgttgttaccattctttgctcccttaagccaaatataatgtttgagagttcctgagccactcacataacttaatgacaagaaggcaggatgcaaatccttgaatgggctacttgatttgtctttgcactgatatcccatgaagacacacacacatataaacacactatatatacacatatatatgtatatctgtgtgtatgtatatatatgtatacatatacgtgtactttatgtatgtatatagtgtgtgtatatatatattatatagtgtatacaaatatatataaactgtatatagtgtgtgttttatatatatatatataaaatatatatatgagaccaataattcatgattggttgccaatatatatattggagtataatgatacatatatatctgtatgtacatgtatatatatgtatgtattcacataatata

SEQ ID NO: 176598 - DNA, 611 bp, Homo sapiens
atttatcgtttctcttagttttatgttgacacttattcaagggtaatgtttccttatgtttttgattatcactgtctgttagactttatgcttagaataaaatacttttggaaataattaaatgattgttttaataatatcttccttcagatagtttcgtttggtgcaatatgttgttaccattctttgctcccttaagccaaatataatgtttgagagttcctgagccactcacataayttaatgacaagaaggcaggatgcaaatccttgaatgggctacttgatttgtctttgcactgatatcccatgaagacacacacacatataaacacactatatatacacatatatatgtatatctgtgtgtatgtatatatatgtatacatatacgtgtactttatgtatgtatatagtgtgtgtatatatatattatatagtgtatacaaatatatataaactgtatatagtgtgtgttttatatatatatatataaaatatatatatgagaccaataattcatgattggttgccaatatatatattggagtataatgatacatatatatctgtatgtacatgtatatatatgtatgtattcacataatata

SEQ ID NO: 176599 - DNA, 430 bp, Homo sapiens
gaattcaagacagtagtctttctggtgatttgtcattatctttgcccttgctgatgttatagacctctctgaagctagtcacattttctacccagcttctggctactttgctttatcatgagctctatggaatttaccacatctgtcactatggctatgctaggcaagtctttaggctcttaattcaacttcattttgcctctgcagtggagtatgtagaaatttctggcaactttcatgccaaaagtttgctagggaggctcaaaacagcaaatgcaggccagtccctctgtgacccagcataatccactgccactttttactatactccagctttcctatgcttgcatcagaccaccttgcaaatataatccagtcagcttcaagatayggagagcgggcacaaacccttttttttgcttttggttta

SEQ ID NO: 176600 - DNA, 580 bp, Homo sapiens
tttaaaaaaaaattacatatggttgcagtcgttaaaagccatggaatgtagcaataaccatggtattattcttcagtgtccacctgcagagctgactctaccagagaagagttcacccctccttagcaaagtgccccacgcagctgccacaccacactaattggagtgtgtatcaatgtcaaaagccatcccattgctaatatcatagtttctcactttgaaggaggagcaagctaattccacagtcttctcctgtaggacaaatgctaggtaaatattttatgtcattaacagtcttcacttttaatttcacattttacaagagtgtgacttggagtgaaagctttcatttatctcaccagaagacataacattcttcaaaagaagagaaaataaaaatgaaatgagcatttgctcttatttgtccttatattttaattctcttcctagtaagcccaaggaaaagcaagtgtctacacattccaaccaagggttctaaatctgggcsttccaaaatactttctcccagtggaatcacggacctcgaaattactggtaggcaaagaatccacataataca

SEQ ID NO: 176601 - DNA, 610 bp, Homo sapiens
agaaccaaagaaagagtcagacaaaaaagaacaataactaattaaaataagctgtgattatagctagagttattatattaataatttgataatttgtaattgcttgtaaattgtctcagtaagaaatatgtaggttaaactgctctawctttctacataaaaagtcattaattaactgagcaagcataagagaagtacctgaatgaggaaagagaaccatggaacatgtaagatataatttgggaaacactgctatggtcatcttgcttctctgagggcggtataaggtgcttgttaagtttaatttcaatgatgatcctaagatttcttaacaaacatgattcagagacaatagaggtctattacatactttctttcaaaattcagaagttaaaagcttaaataaatttgaaataaaaaaattgtattttaattacacagtatatgcggacttcacagaattttccattttgcctgaaccagtgcaagccaagcacaatgtgactcacacagctgtctacattggacatcaaccacaaacagactcatagcccaaggcccatttggaagaggtctggaaacatgtcatgcctatatgttatcaccacac

SEQ ID NO: 176602 - DNA, 555 bp, Homo sapiens
cccatccatgcatgaatgagtgaacaaacaaatgtatgagtaaatgaataaacaaaagtccagaaatgcagaagcctattctgctcctaaaatggaaaatgtattagccatccccatttgtcatctcttcctctcagcctgccacccattccacaaatcccaaccacatagtgtatagaccttcctcacaagagttttgttcttgactttgtgagcttagtttaataacccagactttagagaatcagtatcactagtctgttgttgtactcattcccttggcatatgtgatattttagtgcaaaagaagtcatttctgtgccaattatatttgtagctattagtaaaytggaccgtacttcagggaatttagaggaaagggcacttaattaagaatttgggactatccaatccatagttcttgaataagctcttggcaaggtgcttgattgtgttgccctgggaggctgtatgatatttcctcattaaataaatgtatttttcacaagattcttggttactttttattagataaaaagaatggcaagcagtgct

SEQ ID NO: 176603 - DNA, 508 bp, Homo sapiens
ggctgtcagcttattttcttctcatgatgcactttcttccaatttcatgaactcacttcactttctcacctatttactgaccattcccaattcagttcctccaacccatttcacttatctggaccccaggcccctaatgtctgtactcaaaaatcaacctgagtattttctagacaactcaaatgcagtatgtccaataacataacacatgattctttcccccatatcctcttgttctccrcttccaattttcccagtttggaacattgtatgactgtgtgctaatagttcttgtcagaaaattcagaatcattcttgacttgtctctgtcttgcaacacctacatccaatcagttaccaagttgacttctctcttaatccaatgctgttctcatggtaagatctgtcatactctctcacatgggttattagaaagatttaccattctctccaattgttttaagtaagtttttgtcagtgaatttttgaaaatgaaagacacatgtgt

SEQ ID NO: 176604 - DNA, 508 bp, Homo sapiens
ggctgtcagcttattttcttctcatgatgcactttcttccaatttcatgaactcacttcactttctcacctatttactgaccattcccaattcagttcctccaacccatttcacttatctggaccccaggcccctaatgtctgtactcaaaaatcaacctgagtattttctagacaactcaaatgcagtatgtccaataacataacacatgattctttcccccatatcctcttgttctccayttccaattttcccagtttggaacattgtatgactgtgtgctaatagttcttgtcagaaaattcagaatcattcttgacttgtctctgtcttgcaacacctacatccaatcagttaccaagttgacttctctcttaatccaatgctgttctcatggtaagatctgtcatactctctcacatgggttattagaaagatttaccattctctccaattgttttaagtaagtttttgtcagtgaatttttgaaaatgaaagacacatgtgt

SEQ ID NO: 176605 - DNA, 508 bp, Homo sapiens
ggctgtcagcttattttcttctcatgatgcactttcttccaatttcatgaactcacttcactttctcacctatttactgaccattcccaattcagttcctccaacccatttcacttatctggaccccaggcccctaatgtctgtactcaaaaatcaacctgagtattttctagacaactcaaatgcagtatgtccaataacataacacatgattctttcccccatatcctcttgttctccacttccaattttcccagtttggaacattgtatgacygtgtgctaatagttcttgtcagaaaattcagaatcattcttgacttgtctctgtcttgcaacacctacatccaatcagttaccaagttgacttctctcttaatccaatgctgttctcatggtaagatctgtcatactctctcacatgggttattagaaagatttaccattctctccaattgttttaagtaagtttttgtcagtgaatttttgaaaatgaaagacacatgtgt

SEQ ID NO: 176606 - DNA, 452 bp, Homo sapiens
tctgctatttgaaaatcttgtaaaactaaatctctctctaggggtctcagcagtcccctttagaagaagcgtggggcatcacccaagtcttcagcaccatcaaggacgccaacccagacagccaacttcaccatccatactacttgtcttgccttmtatagcctttggcttttaaagcttttccagaccattagaaactggcccttttctaatttgtatcctccttgcagtaaatgacacttcccaaaacaaaatatgcaaacaaaaccaaccagcaaaacaaccaccaaaatggcagctcctttcaatcctaagcatctctggtcttttttgtccctgcctaggacatggagtttgtgacactgctctgattgctctctgctccttccctccaattaacagaaggaaagagagtgagcaacagtttgcaccaatcttttcacattttccaa

SEQ ID NO: 176607 - DNA, 470 bp, Homo sapiens
agcttcagtttgaccccagggggagacctctggtgcatagattacttcccacgaaaggtaaggaggctgggctttcacactccttcacctcacaatcattggttagtagctgtgggataggcaccctgggctctctaagcttgtgaggccaatatctccggtagcaaaaacagtccacacaaatatagcatctggtgttggtctttgaaagcccctgagaggtgggcagggggcagcattcataaaggcaaaatgggatcttaagagcgcccaaggaagcacagcactttcagtgtttgctagaagaaacaaaatcatcctctggaggaaagcaaagggaagaggcaccaaacatgggtgaacaaaaatacagtctactagaktcagcctagagtcaataacatttgcttctatttctctgacacgacaaaacaacacaatactcctatccaatccctgcttcaagttca

SEQ ID NO: 176608 - DNA, 439 bp, Homo sapiens
aacattcatgtgccattggctttaccaaatagtacagccatgcccgcatttaatagggtagggagacttagtcttccagagggaggcacacatggagtgcagggagcaccaattacaggaggcagtacaacaatgttccacagtgaccacatctcttagaccaaaatccatttagcagctcaggattcactcatatctcacagatcacactggggacattattttaagaaacaagtaagtatgtctttaatagaaatgccatacacayttgtgcttcagaggactcaaaaaaacatatgatgaccatggatcccaattggctctcataataaaactgcctagtggatacatgtgagcccaaacctgctatctatatcatgtgtggccatttttatcatgatgagttccactccatttgattttccataaagaagcctgc

SEQ ID NO: 176609 - DNA, 643 bp, Homo sapiens
ctctaattccagataaggccttacccctggagtggaaaggaataggatagaacttttccactattattttactgctatgtggcctctctagacaaatgtctgcacttggttttgagaggctagcacagctcaaataattataaggaagtgaactaaaaatgaaaatctggtcataggcttaagaaataggccaagtttgaagtgaatctgaattctataaatagttaagaataaaatgtaagcatcatgatatagacttctgggattattagtccatggcttttggagttctccaacattttgggttcaagtattaaggcaatattttataaagttttgcaaaatcttaagcacagattgaaaaacacgcagtcttactggcttgtcaatgttacctcaagcaaattattttcaatagtcaattgcactcaaaaggccagggtagaaatctaaaacaagtccagggttgtgcatagataaactagaatttacaaatagtaaattccragacaaacaatatcatgccaaagtgtaatgtgctgctttcattttggtacgttcttttcttacgtggtggaagatttatttgctactcctgtgctttgcttgacttgggttgtataaaccacatgagaaacacaaa

SEQ ID NO: 176610 - DNA, 552 bp, Homo sapiens
agatggagtgggaaggtggattttccctagagtcaggcggcctggactctcctcccaccgccccagccaaactccacgttgttctgccggtcgatggcctgctggcctgccggcgtctgttgatgtgctcttacgctgcagtgtgcctcttgacgtctagctgcttgtgtcttcttccaccaatgtgttcctctcaaagytcagccacttgtgaccccgcctactagggtctctgggattttataagtacagaataggggcgtgacaggccagggtggtccgggaaatacctgttctcacctaggtctgtgggcacaggcctgggggtggagccgtagccagggaccacgccctcctctacccagcacttctctgctcccctcccatatcaataatactagcagaatacctatgcctttaaaataaatatgcatgcatatattaaaggctcaaaacattttaataatgaagcacagtatcacaaatgtttggctatcacttccttcagaattccattatgcagccatctgcacatatagatttgagaataca

SEQ ID NO: 176611 - DNA, 588 bp, Homo sapiens
gaggccgaggcgggtggatcacaaggtcaggacatcacagccatcctggctaacacggtgaaaccccatctctactaaaaatacaaaaagaaattagccaggtgtggtggtgggtgcctgtagtcccagctactcaagaggctgaggcagtagaatggtgggaacccaggagatggagcttgcagtgagctgagatcataccactgcactccagcctgggtgacagagcaagactccgtctcaaaaaaaataaaaataaataaataaattcctggacacatatcacctcccaagactggaacaggaagaaattgaatcctttaagagaccaataatgagtttcataattgaatcaataataaaaagcctaccaaccaaaaaaagcccgggaccagacagattcacagccaaattttagcagatgtataaagaagagctgggcctattmctactgaaactatttcaaaatttgaaaagaggggactgatgcctaactatgagtccagcatcatcctaataccaaaacctgtcagagacgaaaaaaaaaaaaaaaaggaaagaagaaaaataaagaaaatttaaggccaa

SEQ ID NO: 176612 - DNA, 609 bp, Homo sapiens
aagagatagtataaaatgagatgtaacaggaagaactagcacaatatttcagtggataatatgtcaaaagagactaaaaatttttaaaataaataagagtttgtagaacttccaagaattggccatgccctcagcttacttttaagactggttaaaagtgagtctaaaacactcagattgaagatctgtgattctgtcatactgccataccataaagatcagtgccttaaacttagagaaacccaacggccaatgagattatcttaagatatctgcccaataggagcagaccatattgaatgatacctaattgatctaattaatttctctcaaatgatgttacataacatgacatcaataaataaagactcataataacatagatatggtagtagaaacaaaatgtatagctatacagagacagaaaataaaagaaacagaaattgaaaaatgagagaaatccagagatggactgagtcaaaagaaagtagttactggaataagagcacaccaactttctagcaaaagayctcatgtccaggcacctgcatggccatttggaaattagggctgccattatttccaaaatgataatctgtgccatgagca

SEQ ID NO: 176613 - DNA, 597 bp, Homo sapiens
tctagctgagttgcggtgggctctgcccagtttgagcttccctgtcacttagtttacttactgaagcctcagcaatggtggacacccctctccccgccaggctcctgcctcgcaggttgatctcagactgctgcgctagcagtgagcaagcctccctgggagtgggacccatggagccaggcacagggtggaatcccctcgtctgctggttgctaagactgtgggagaagtgcagtatttgggcgagagtgtaccgttcctccaggtacagtctgtcatggcttcctttggcaggaaagggaaatcccccaaccccttgcgcttaccaggtgaggagacaccccagcatgctttggctcaccctccatgggctgcacccactctccaaccagtcccaatgagaagaatcaggtacctcaattggaaatgcagaaatcacccatcttctgcgtcgatctcactgggagctgtaggctagagctgttcctattctgtcatcttggaagcgacttygaaattattatatacgtaatttatctcctttattctcttaatgtgactaattatatcgattgattttcacatgttcaactgacc

SEQ ID NO: 176614 - DNA, 657 bp, Homo sapiens
ttataagctggcacctcctaaatctgaaaactgtgtaaagataaggaataggaaggcttgaagctggatgctatcatgtgatatttagaggttatgattagtgtagttgatgctgtggtgtgccaccaagattctcctttatgatgaaaatattcacttcccagctgccatgcaagttgcatgctgatgactccattattgcattcctctctgaaatttaccctggctggctgtatgtgcttcttcatccaaatttacaccccttctcaggggcacattcaatcrcttgtcagtgaaggactacaataatacattttatatacggcagtgctatgttctagggataaatcaatgaacatgatggcgatgatctctgtcctcaggacccagaggtagttatataagtaattagaataaaatatgttaagtgatgtgataggagcacacacaaatgagacttaacttggtcttctgacaggctcagggaaggcttcctagaaaacacgtctaccatgattttatatttagaaaatcccatcgtctcagcccaaaatctccttaagctgataagcaacttcagtaaaatctcaggatacaaaatcaatgtgtaaaaatcacaagcattcctattcaccaataacagacaaacagagagcc

SEQ ID NO: 176615 - DNA, 657 bp, Homo sapiens
ttataagctggcacctcctaaatctgaaaactgtgtaaagataaggaataggaaggcttgaagctggatgctatcatgtgatatttagaggttatgattagtgtagttgatgctgtggtgtgccaccaagattctcctttatgatgaaaatattcacttcccagctgccatgcaagttgcatgctgatgactccattattgcattcctctctgaaatttaccctggctggctgtatgtgcttcttcatccaaatttacaccccttctcaggggcacattcaatcacttgtcagtgaaggactacaataatacattttatatacggcagtgctatgttctagggataaatcaatgaacatgatggcgatgatctctgtcctcaggacccagaggtagttatataagtaattagaataaaatatgttaagtgatgtgataggagcacacacaaatgagacttaacttggtcttctgacaggctcagggaaggcttcctagaaaacacrtctaccatgattttatatttagaaaatcccatcgtctcagcccaaaatctccttaagctgataagcaacttcagtaaaatctcaggatacaaaatcaatgtgtaaaaatcacaagcattcctattcaccaataacagacaaacagagagcc

SEQ ID NO: 176616 - DNA, 592 bp, Homo sapiens
aattctttgaggaggagtactactatctccattttacagctgagaaaattgagttttatagagattgatcaatagttccaaggtcagacagctagcaggctttgggtaagaggaaacatcatgttagttttcctagaacatactatagtgcttatcacataataaagcttaataattgtgtgctgactgaataaatgtatgaacatatttaaaaattcagtaagataaagataattgttatcaaaataagtttcattttagttatccttattatgaaaatttcaaataaacctccaaatatattaccaactaggaattctcacataacatgtgaaaagtgatgaaatcaagtacttaagyagtcaaatgtgaaatcaagcatattttgaggcattacaaactaaatatctaaatacagtataactaaaaaatcctttaggttgagttccatggcaaactccaatcaagaactcaagctttataagctattttcattctttgactcaggaaagtcaaccacaattaactaaatgaaactatagtttctatgcatagagcattttttacttctgatttacagatttatacttaa

SEQ ID NO: 176617 - DNA, 592 bp, Homo sapiens
aattctttgaggaggagtactactatctccattttacagctgagaaaattgagttttatagagattgatcaatagttccaaggtcagacagctagcaggctttgggtaagaggaaacatcatgttagttttcctagaacatactatagtgcttatcacataataaagcttaataattgtgtgctgactgaataaatgtatgaacatatttaaaaattcagtaagataaagataattgttatcaaaataagtttcattttagttatccttattatgaaaatttcaaataaacctccaaatatattaccaactaggaattctcacataacatgtgaaaagtgatgaaatcaagtacttaagcagtcaaatgtgaaatcaagcatattttgaggcattacaaactaaatatctaaatacagtataactaaaaaatcctttaggttgagttccatggcaaactccaatcaagaactcaagctttataagctattttcattctttgactcaggaaagtcaaccacaattaactaaatgaaactatagtttctakgcatagagcattttttacttctgatttacagatttatacttaa

SEQ ID NO: 176618 - DNA, 532 bp, Homo sapiens
ttaagaaataaagtttctactttttcttacactaagataatattatttggttaataatattaccaaataatattgtgctgctgggctttagctagaataatttattgggataaaatatttcccaagcttcttgaagatagagctaatgtcaaaactaattagcaaaatgtgaaataaaatttaatttcacatcattcattcattcatcaaattgctattgagcatctactatgttctaggcactagytaaggatataaaaaaaccaagcttttaccttcatgaagtttacgttctagggggaagccagccaataaaatatatatatgtatatataaaacacacacccacacacacaccatatttgctgatagactggatgtttagtattatgagagaaagacaggagtcaggaacaatttgagttttttttagtcagagcaactgcaagaatggaaaaaaatgattttccagatgattacaagcagctttccaacctgtctatgtgttatgccaaagcttttacaatttgct

SEQ ID NO: 176619 - DNA, 532 bp, Homo sapiens
ttaagaaataaagtttctactttttcttacactaagataatattatttggttaataatattaccaaataatattgtgctgctgggctttagctagaataatttattgggataaaatatttcccaagcttcttgaagatagagctaatgtcaaaactaattagcaaaatgtgaaataaaatttaatttcacatcattcattcattcatcaaattgctattgagcatctactatgttctaggcactagctaaggatataaaaaaaccaagcttttaccttcatgaagtttacrttctagggggaagccagccaataaaatatatatatgtatatataaaacacacacccacacacacaccatatttgctgatagactggatgtttagtattatgagagaaagacaggagtcaggaacaatttgagttttttttagtcagagcaactgcaagaatggaaaaaaatgattttccagatgattacaagcagctttccaacctgtctatgtgttatgccaaagcttttacaatttgct

SEQ ID NO: 176620 - DNA, 529 bp, Homo sapiens
catctgaaaatagaaataattttacgatgtagttttatgagttttcttaaataagattttcagtaaaattattatttcatatgatgagtgttcagttttcaattgctcctacagtgatttgttcgtttgattgtttcttttcttcgatttgtatattctgtgttattttcaatgagaatcttgaggcgggttaagggagatgtgcttagcagtatatgcacaaacgagagaagaggcttttgaatggtacttggagaacaatgtggagatgtttcaaaggtagcgtatttcaaatggaagaggaaagcaatcatgattaaagagttcattccttaggtcactattttttttctattaayattaacaatgcttttgaaaccagagctaaaattttggggaaaaaaatgaatggaagatcaggagtagagggactcaaagggtcatttgagggcttaaaaaaaatacttattgtgatacaggaaaaaaaaaaagcttccatgtctaaaaggatgtaagaatagtacttata

SEQ ID NO: 176621 - DNA, 327 bp, Homo sapiens
gttagatatcctaatactcaacaaaacttagaaaattgaatctaacaatatacaaaaagaattgcacggcatgattaactgggattttcttcaggtaggtaaagttggtttaacacttgaaatcaatcaatgttaccttccatgtcaacartcttcagaataaaaattatattattcggtgtagaaaaagcatttgacaaaagtcaatatattttaatgataaaaacagtaagttaggcatgaatgaaaactactttgacttgataaagaacatctacaaaatccctgtaacgacattatctttaatgtaaaatattaaattattta

SEQ ID NO: 176622 - DNA, 559 bp, Homo sapiens
tcggtggtgttagtgggaaaaggattttgttaagacagtagaagatgtgagaaaaatatatatgggtttgtggacatgagtgagatgcaccaaatgaaatttgtggaaggattatagtaactggagaatgacaattctatgatatgacgttgagaacatatggtcgaaagtgattgatggacaccaccatttaaggagagttgaaggaaatgagagactagagtgttgggaggatcacccatgtgtattatcaaaaccactgagaataaaggtaggagtcatattagaaagacagtgatccagaaacaaattcttgagaaattaagaagaatgactcaatgatagttaaygacaacactgaagggaagtctaacgccaggcttttaggtagcacaatattttagttggactaaaattattgggcatattttaacgcccctccccaatctctcattatctgaatatccttttactagctcccacccccgctccatttctcttctttctttttaacaaaaataaacttaccagagtttagctttattccccacccaaaact

SEQ ID NO: 176623 - DNA, 473 bp, Homo sapiens
gagaactggtagctttaaaggatggggaagagagccctgagctagcatgttagcacattcggcccccttgccatgtgatgccctgcacctgctcagaaccccttgagtctccacyagcaaaaaggttctcagcagggttagcccctcaaccttggactttgagcctcaaaactgtaaaaatacatttattttctacagaaattaccatttcagatattctattataagcaacaaaaattggattaatacaatgatccttttataatgtttttaccattctttccctcatcttcctatttatgcctctctgtaggcctttagaatgctttcagttatgcttctgacctctgacaacatacggttttgttggtgtttccttgtggaattcaaagatgttttcactatttcatgcattttttggtgggtttactgattccactacttcctcttcagttatttctgtattaatgtta

SEQ ID NO: 176624 - DNA, 473 bp, Homo sapiens
gagaactggtagctttaaaggatggggaagagagccctgagctagcatgttagcacattcggcccccttgccatgtgatgccctgcacctgctcagaaccccttgagtctccactagcaaaaaggttctcagcagggttagcccctcaaccttggactttgagcctcaaaactgtaaaaatacatttatyttctacagaaattaccatttcagatattctattataagcaacaaaaattggattaatacaatgatccttttataatgtttttaccattctttccctcatcttcctatttatgcctctctgtaggcctttagaatgctttcagttatgcttctgacctctgacaacatacggttttgttggtgtttccttgtggaattcaaagatgttttcactatttcatgcattttttggtgggtttactgattccactacttcctcttcagttatttctgtattaatgtta

SEQ ID NO: 176625 - DNA, 497 bp, Homo sapiens
ttatgtgaaatattgttttaatcaggataaaataggtttatgttacatttggattacacacacacatgcacacacaagcatatacacacagaaacaagttcatttctagcttacatgaaatcctttataggtgtcatgaatgyagaaagcagctgaccttcatggagctgttcagtggtctgagctgctgcagttttgtcctgctgacaatggccactcatgcctctgaaggcgaagaaacagagaatggtgcactaatgcctactgctgtatactttcgtcttggagaaggcactctgaacttctgttgtcagctcattggctctgccatgtatatatgaggaatgaaaggaagcaggcactatctgaggagcggccataagcactttgtgtgaatttaacgttcgtaacaacccagcataagaaagaaagaaagctacctcaacgagtcaagaaagtttacgattaaagacacgcaatttcagttttgtatcttc

SEQ ID NO: 176626 - DNA, 364 bp, Homo sapiens
attaataacagtagcattcctgagggtcatagaatgtgratatatttggttttgtaaaataatagctaattattactgtaatggagcaatttacaatttcagcagccatagtgtagacataagtaccaatactcggccttcattgttaaatgttttaatatttcccaatcttgtgaatataaataatatcttatttgtttatttgtatttctctatatgttaatggttaattttttaatgcattttctgtcacttcatgtatctttctataaagcacacagtcaagctttttgcctacttttcaagcctttaaaaatattcaggaaatacattcttcgtcatgtttatgtgctgttaacttatc

SEQ ID NO: 176627 - DNA, 517 bp, Homo sapiens
gtcattgtggtgacaggaagggacggccccttgccccatattaggacattttggtagggccatctcagtcccaaagctcccactgggatttgctgaggtctatgttagaactgtatcaaaattctgtaacrcagttttttcctctgaccaatcctgcttccttaattggtaactaacaatagtattccttaatctatataattaaaataaaggtgaataatcagaatgttgagggttatcagccatgccaattaaaaattaaaatcactgtcttgagtgaaatctcagactccaaagctattgactgaaagagagggcagattcccatgggaagatgaggtggggttcccttgcaacaatataaaatgattatttaataataattccccaagccctaccttaaagaatcctattcaggcaatcatacacaaggaaaggggaatactcagatattttgagaactgttaaatagagagtgcatatagacatggacatttgaggagagaaaatatcatta

SEQ ID NO: 176628 - DNA, 517 bp, Homo sapiens
gtcattgtggtgacaggaagggacggccccttgccccatattaggacattttggtagggccatctcagtcccaaagctcccactgggatttgctgaggtctatgttagaactgtatcaaaattctgtaacacarttttttcctctgaccaatcctgcttccttaattggtaactaacaatagtattccttaatctatataattaaaataaaggtgaataatcagaatgttgagggttatcagccatgccaattaaaaattaaaatcactgtcttgagtgaaatctcagactccaaagctattgactgaaagagagggcagattcccatgggaagatgaggtggggttcccttgcaacaatataaaatgattatttaataataattccccaagccctaccttaaagaatcctattcaggcaatcatacacaaggaaaggggaatactcagatattttgagaactgttaaatagagagtgcatatagacatggacatttgaggagagaaaatatcatta

SEQ ID NO: 176629 - DNA, 517 bp, Homo sapiens
gtcattgtggtgacaggaagggacggccccttgccccatattaggacattttggtagggccatctcagtcccaaagctcccactgggatttgctgaggtctatgttagaactgtatcaaaattctgtaacacagttttttcctctgaccaatcctgcttccttaattggtaactaacaatagtattccttaatctatataattaaaataaaggtgaataatcagaatgttgagggttatcagccatgccaattaaaaattaaaatcactgtcttgagtgaaatctcagactccaaagctattgactgaaagagagggcagattcccatgggaagatgaggtggggttcccttgcaacaatataaaatgattatttartaataattccccaagccctaccttaaagaatcctattcaggcaatcatacacaaggaaaggggaatactcagatattttgagaactgttaaatagagagtgcatatagacatggacatttgaggagagaaaatatcatta

SEQ ID NO: 176630 - DNA, 517 bp, Homo sapiens
gtcattgtggtgacaggaagggacggccccttgccccatattaggacattttggtagggccatctcagtcccaaagctcccactgggatttgctgaggtctatgttagaactgtatcaaaattctgtaacacagttttttcctctgaccaatcctgcttccttaattggtaactaacaatagtattccttaatctatataattaaaataaaggtgaataatcagaatgttgagggttatcagccatgccaattaaaaattaaaatcactgtcttgagtgaaatctcagactccaaagctattgactgaaagagagggcagattcccatgggaagatgaggtggggttcccttgcaacaatataaaatgattatttaataataattccccaagccctwccttaaagaatcctattcaggcaatcatacacaaggaaaggggaatactcagatattttgagaactgttaaatagagagtgcatatagacatggacatttgaggagagaaaatatcatta

SEQ ID NO: 176631 - DNA, 368 bp, Homo sapiens
gctctctgtggatatgctccctattgaagcaatcataactggaaaaattagtatacatatataaattttgttataggtgtatatctatatacaatatacacatataaaagtctttggaaattttgtcctaatttagacasgagatatgagatatagacaggagacctggcctcttcaatttctaattgtaaagacaggcgatctaatgatagagtttgagagacctggcctcttcaattcctgtgtggtgacctgggattcaatctgtgaggtggagggcctactatgaggactccatctcactttgctgcgtttttttttttttcccttttcgtccaaaaattatgctcctcaaccttttatgtgtc

SEQ ID NO: 176632 - DNA, 368 bp, Homo sapiens
gctctctgtggatatgctccctattgaagcaatcataactggaaaaattagtatacatatataaattttgttataggtgtatatctatatacaatatacacatataaaagtctttggaaattttgtcctaatttagacacgagatakgagatatagacaggagacctggcctcttcaatttctaattgtaaagacaggcgatctaatgatagagtttgagagacctggcctcttcaattcctgtgtggtgacctgggattcaatctgtgaggtggagggcctactatgaggactccatctcactttgctgcgtttttttttttttcccttttcgtccaaaaattatgctcctcaaccttttatgtgtc

SEQ ID NO: 176633 - DNA, 368 bp, Homo sapiens
gctctctgtggatatgctccctattgaagcaatcataactggaaaaattagtatacatatataaattttgttataggtgtatatctatatacaatatacacatataaaagtctttggaaattttgtcctaatttagacacgagatatgagatakagacaggagacctggcctcttcaatttctaattgtaaagacaggcgatctaatgatagagtttgagagacctggcctcttcaattcctgtgtggtgacctgggattcaatctgtgaggtggagggcctactatgaggactccatctcactttgctgcgtttttttttttttcccttttcgtccaaaaattatgctcctcaaccttttatgtgtc

SEQ ID NO: 176634 - DNA, 514 bp, Homo sapiens
tagttgggcaaatttgagtctacttctgggttctctattctgttttattgacttatgtgtttatatcattgccaatattgccccgtcttgattaatatagctatgtaakaagcattaatatagagtggaaggatttcttctgttattgttctttgtccagattgttttaggtatatttcataatataccaaagatctgtatattttataatggttagaaaaagcttttgtatatgcacaaaaacctggctggaattttgataaaaatttcattaaaactgtagattaatttgtagagctttgacatctttactgtgaatctttgagtcttcctgtctatgaacgtagtatgtcttttcatttacttaggtcttctttcagttcttgagcattttataattttgagtatatatgtatatcctgtacatgtttattaggtctatttctatgtatttcatttctctgaagcaactgtaagtggtactatatatttaattttggtttctacatgttct

SEQ ID NO: 176635 - DNA, 514 bp, Homo sapiens
tagttgggcaaatttgagtctacttctgggttctctattctgttttattgacttatgtgtttatatcattgccaatattgccccgtcttgattaatatagctatgtaagaagcattaatatagagtggaaggatttcttctgttattgttctttgtccagattgttttaggtatatttcataatataccaaagatctgtatattttataatggttagaaaaagcttttgtatatgcacaaaaacctggctggaattttgataaaaatttcattaaaactgtagattaatttgtagagctttgacatctttactgtgaatctttgagtcttcctgtctatgaacrtagtatgtcttttcatttacttaggtcttctttcagttcttgagcattttataattttgagtatatatgtatatcctgtacatgtttattaggtctatttctatgtatttcatttctctgaagcaactgtaagtggtactatatatttaattttggtttctacatgttct

SEQ ID NO: 176636 - DNA, 594 bp, Homo sapiens
ggttgcataaagaggagtttccctgtacaagctttctctctttgcctgccatcatccatgtaagacgtgacatgctcctccttgccttctgycatgattgtgaggcctacttagccacgtggaactgtaagtccattaaaactctttttctttccaatctcaggtatgtttttatcagcagcatgaaaacagactaatacaatatatattttttttgttttttgcttttttaacttctatataaacaagcattctgcctaaggtaggcatgtttctcctcttgctttcaggaatgccctcctctatggagtagccattgtttttgtttctttatttctcgaataaacttgctttcacttaactttgcagcccagccccaaattctttcttgtgtaagaaagatccaagaatcctctcttgggacccctttccagtgactattatggtaaatacttagcatgacagttgtgccaggggaccaaaaaacttttactatggcacttgttggaaaattatgaaaagcacaaactccaattatttggaaaaaacccatctaatcctataatattatgtgataacataattgctacaatt

SEQ ID NO: 176637 - DNA, 543 bp, Homo sapiens
gtaatgaaattaataaaaaacgaagtgtgatttttatacttttattatcagggtaaattatgtaaaaataataaacaatgacttagaaaactgagggcaattaatctttcctagcaagagtaaaattatttcaatataattaagttacaaaggaaaagaaaaataaaaaataatagcatgttcctaaatagtgaataattatgtaaaatattaatatattttttaaaatatgaaaaacttragtagctatttctaaaatacttgagaaaagttaaatttatttacaacagaaaggctaaaattaaccctttcttgttttcaaatatattttttctgtgtatttaaaaaccgtgtaatataaaaaatttaagaaataataagtaaatactttggtggactatatataaataaatatgcatataaatatttttgtcccattgcagtattttcttttctttaatcatccactctgcaaggattgctagtgtagtattaaaaattatacagtattaaaatatctgtccattatacagcattaaatat

SEQ ID NO: 176638 - DNA, 627 bp, Homo sapiens
aagaacgcacttttactgctttgagttgctccatttaggcctacttgagtgttgtgttctgttttggatatcatacatttgaaaagaaagacaaactggagtaagttcaaaggaaagcaaactgaactgataaaaggtttggaaataagacagacctgtgaacaatgggcatgttcaggctagaggagaaacaattgaaagtgagacatgttaattgtctacaagcatttagaaatatgttatgggaagagaaaggataagttatgttaatgattaggaaaagaataagaaaccataaacttaccatattcatgggaagtgcttggaataatttatttatttattttgctctcaaggtaatttatctaactttccaacttgaratcactcaagttcaagtacatagacacaaatggatgtgcttttagccctgagggtacaaaaagaccacaaatcaatgtttgtgggtaaaagctgattgaaaagaaatgtgtatcctttaccttttgacacaagtagcctgaagtgatctgtgtgaccccgatgccatttaagatacctcagagtgacagtaagttttagcttattagggagagttaagaaaggaaaaaagaatgattttcccac

SEQ ID NO: 176639 - DNA, 502 bp, Homo sapiens
ttgatttccactatggtagaaaaccacaggacacataacccatcagatgagaccagaagcgctgggagactcatatgtctagttgttctttggctaatgtcaatggtaagatkttggactaagtttatgggaggtggaactgattacattaccaggctactcagatacaaatatatcagatattacataaactgttagtgatatgccctccttcttctccgtgctttggtgctgctctatagatctcaatggaatagacattattagcctcactgttaacttcaggagaaacttctaagttaaacgctcagacatcttccttcagctatttcaaaaggaatccagtttctgattgattctgaaaaaaagtggatgcgggaaatggatgcagttgcatgagcctcactgagacatacactctttgcctgcttctagttatctaagacagatggtgatacgtatgaaattatcattcctttgtgtctaagttttgctatccata

SEQ ID NO: 176640 - DNA, 523 bp, Homo sapiens
tgatattagataggtgtgatctttgtcatcagactttcaaaagagcaaattcattaggaattaaaccatgacatgaaattaattttaaataccctacatcctgtctagaaaattcacctcaccagtagtaatttaaataaaatcctgttgtttatcataattcctttcagcaatagagcaaccttgacagatccaattttgtaatggacaatttactctggttagtaattaggtgagtggttaaaacattgtttctgtataataggatacatttcttttaagtggccccagtattattgtcttggtctagttcatgaattagcctttgtaatgtccatagacagaactttttaatagattatytagcctcagaagatgtttgatatggtttgaatgtttgttctctccaaatctcatgttgagagataatcctcagttttggaggtggggctgggtgggaggtgtttggatcatggtggggatcgttcattaatggcttagcaccatctccttggtgatgagt

SEQ ID NO: 176641 - DNA, 546 bp, Homo sapiens
tcaacaaagcaatctcagcaatttggaaggccgaggtgggcggatcacctgaggtcgagagttggagaccagtctgaccaacatggagaaaccctgtctctactaaaaatacaaaaaattagccaggtgtgatggcacatgcctgtaatcccagctactygggaggctgaggcaggagaatcacttgaactcaggaggcagaggttgtggtgagccatgataaaaaaaaaaaaaattatcacacataatcccaggctttaagagtaaaatatctagaaggagaaataatataaaatatgtatccaaatatctatagtgtagaaaatggtgaaaagtgccacgagaaagatatgcttcaattatagttttcaaaatgcagagattgttttcaatctattttatgaggaaacagtatcaagaaatctgggccccagtaactgatgcaataaaaacctaatatgtttaatatgtgcagtggttaattttatgtgtcagtttgatggggttaagggatacccgaatagttgatagaacattattttatgt

SEQ ID NO: 176642 - DNA, 497 bp, Homo sapiens
ttctccagcttcatctaataatctcacatacgtatcagagtctaacctgatttttgtagcttgacaacttaatgtaagatgaaacctcttaagtttcactattcacagtctatactaaattgtatgtttaaatagcttcatttagttatcgttgcacatatttaaattatgtaatttgatwagttgacatatatttaataaatcataacttactatcaaaataattaatatacccattacccccaaatatttcctcagcccctttgtaattcctccacacctacttgccctcttcttttttttcttctttatttcttctaaaaaaaaacaacaacaacaaaaagcgggatatgtgtgcagaacatgcagggttgttacataggtatacgtgtgccgtggtggtttgctacacctattgacccgtcctctaagtttcctcctcttgccccctaccccccaataggccctggtgtgtgttattcacccctctgtccatg

SEQ ID NO: 176643 - DNA, 384 bp, Homo sapiens
tcgtcagaccacaaaaagttgggatcatcattgggttaagcatccaaaagttatatttcttatccagaacaaccaccatgagggaataaactttctcatgggagcttacttataacgaagctccaagtttctgtggcagaacttgtcaaaatcatcttratatctgcttttaggtcttaaacctaaaaggccatgaaagcaaagaaaattaaaatgtcgtcaaaatgtagattacctttgtttttttctgaaaaattcactcttagagcaaatgttaataattgtcctcgttcagtttgaaatagcttatgcttaaatgacaatctaccaaaacatcactatgtaaaaggaaacaataaatatctgataaaatgtcctgggctc

SEQ ID NO: 176644 - DNA, 384 bp, Homo sapiens
tcgtcagaccacaaaaagttgggatcatcattgggttaagcatccaaaagttatatttcttatccagaacaaccaccatgagggaataaactttctcatgggagcttacttataacgaagctccaagtttctgtggcagaacttgtcaaaatcatcttgatatctgcttttaggtcttaaacctaaaaggccatgaaagcaaagaaaattaaaatgtcgtcaaaatgtagattacctttgtttttttctgaaaaattcactcttagagcaaatgttaataattgtcctcgttcagtttgaaatagcttatgcttaaaygacaatctaccaaaacatcactatgtaaaaggaaacaataaatatctgataaaatgtcctgggctc

SEQ ID NO: 176645 - DNA, 543 bp, Homo sapiens
tcttgactccaaggcctggctcatggataacatctttggacccacytggggccaggaggaaccctccacccagaaaataaggacaaaagcctggctgcatttgccatctgttgattgtaaaggcctaaggccttaagtaaacataggtggtagccaggcagtggtcactgagggctttgggtgaaacccagtgctatgctggctttacatctgacccagcacagtcccagtagtgatgaccacaggggtacttgtgtcatccgtctcccatctccaggaaattcaacacacacacacacacacacacacacacacacacacagagagagagagagagaagccagagactctgtttgagaggaactaagggaagagaacaagagaatctccctggtaatccagggaattctggatcttacccaaggccaccaaggcgttacttctactagtctgcaagagccacagtattgctgagcttgggatgtcccctaaagtagatatggctgtggtgaccaaagatctagatcacaacacccaagtttc

SEQ ID NO: 176646 - DNA, 494 bp, Homo sapiens
tttttttactacaaactctgaaccaggcactattccaaataaaaactgctcacctaactataaaaaaactagggtcatataaactgtaataaacctgatgaaagtaattttgctataaaatgttactagatctgaataatcagaaagccacattatttcaccaggtaacacygtacatagtgggacatttaggaactgtcatgtttatcatagagcttatcacagctcttaaataacctgtacaaagactctgcacaaaggattagctttaaatgatgcaaaagaagatgaaaatgaatacagtagactgttcatgtttttataggcttcttttgacttcatgtctaagtttaaacttgtaaaagagttctcacattatatctgcacataagaaaactttctgaatgtatccagaaaatatttctgaagacaatgatattcattattattgcttcataattacattttgtaagttcctaattggaatttgatgt

SEQ ID NO: 176647 - DNA, 506 bp, Homo sapiens
aaggaagaatgattaaaggagagatattttataattccaaagacacattcactatatactgcaaatattacagcagaatagattgacatcatcttatatttgccttaaatctgttatctttaagttaatagatatctatcattatggaaatttgaaaccctagcataagatattaagctggtcacttggtttgcaactggaactctttaatctaatttggaatggtagttattattttatttccacaataacagaaataattctgaaacatacacatacccataataataatactaataataatamtaataataatttgataggatgtcagtctttcttcagtactgctaaatccttcaaataaaaacgaacttaatcatttcacttctagtctggcagaaacagatttatattcaaattattatgaattatagactgctctggtaatttacataggagggtcttggtgacaagaataagaaattctcatctgccagttcaattta

SEQ ID NO: 176648 - DNA, 552 bp, Homo sapiens
aggaaaaaaaaaaaacaaaaaataccccgtacactttaaatctatttttccctacatgctgaattgttgatgtcataatttgtagttttatattacctatctcttaaaaaattattgtaattactattgtttaaatatttcatcttttattctttttcccaaacaataaagtttttgcatgactgagtttgtgacatgagatttgtgtccactgtgattccaataggtgcaaaccattgaagccatttaccaggattggaaagcctaaacttaaggactgtgaaacaytaacaacttggagataagtgtaataatgagaaattgaaaaatattttaattataaattatgcagtgctggaagatacataagaggacagtgaaacacttaacaacttggagataagcacaataatcagaaatggaaaatatcctaatcataaattatgcagtgctggaatacatagaattagagagactctataagatatctttataagaatgaagtaagataatagagaaagagattatgtgttgctaaaaacaatgcaggaa

SEQ ID NO: 176649 - DNA, 266 bp, Homo sapiens
aacagtgccactccagacgtatattgaatcagggttgatgatagttaggctatggatataagtgtttgtaaccaaggagtgatctagaataattgtgagaacacagagaaaacacagtggaacagtactarcccatccaggcaatctgacaataaaagtactgctagagagacttcctatttcagctccacatgtaaaaatcttgatattcatcactcctgggcacaagaaagaaaatgctgtaaaaaatgaaaatcaatgagttt

SEQ ID NO: 176650 - DNA, 588 bp, Homo sapiens
atttctatcaagcaatttatctttctatttattgctttaaactgtaaatcaacaaagaatacttaataattctcttgcaattagaaggtaaactttttttagataattttacaattgttttaaagttataagttgtatataaatttgaaagtaagaattttatgtttcaactttgaagtaagttgcctttattgtaatcatctgatccacaggtgagtatctgctggtgttggcggtaacataacttgaattctgaagttgtttcatttgtgattttttaatgacctgtttgcctcttagatttagtatttttagactcacctgcaatatttcaaaaaatccaatttgattagtcatgtataccctattctaaaaatgttcacttttttattattcaagataggcagggttaatgaaactcttctaggatatcttaaagtttatgtacataataatgattcatcgayaaaagttagaaatgttgcacatttttcaggacaccgacttttaaaaaattatacaaaggagataacagaaataatattacaaaccgatttgcctgaataagtcctactacatagattgtca

SEQ ID NO: 176651 - DNA, 589 bp, Homo sapiens
cacctgtaatcccagcactttggaaggccaagatgagaggatcttctgaggctgggactttgacaccagcctcgacaacataacaataccacaccccaagggaaaaaaaaccctgtgtattgctttagacagcatgaacattttaacaatattattttatatcttctgattcaggagtataggatatcttttcacgtatttgtgtctccaatttctttcatccatgttttatagttttcagtatacagatctttcacttccttggttaaatttattcctagatatgtcatttttatactattgtaaatgagattttttcttaatttctttcaattaggtcactatttgcgtataaaaatactactgatttaaatatgtcgattttgtgttctgcaactttactgaattcatttatgagttctaacagggttttttgtgtggaatcgttgggcttttttacatacaggattatgtcatctgcaaataaacataatgttgcttcttttcttcctattggaaataataraaagcattgcattttgtctctttttcttatctagttgcccatttcttgctttttggaatctta

SEQ ID NO: 176652 - DNA, 532 bp, Homo sapiens
atggcttttgagattttccatgaccctccctaaataattttctcattttatctctcactaatctttcttaagcaccctatattccacccatcttgagtttcttggcttttctctagcatgtttaaattgtgttttcttcatattttargacttgtgttctgtctctggtatgtttaaattgtattttcttcatattttaagacttatattatggcttctgccttaaatgtccttgtccccaatctctaaaaaattctactcattctccaagaaccatctccaaaagtgcccccttggagtacaaatctttgtactcttcttgaagcacgaattactctaaatcataattattttacttatagcatcatctttcacactgaactataaactatctatagaagagttcgttggtccatatataagaattcatttaataaacagattttaagtcttttactactcagcacaaggcttttagcatagcagaggctcagtaatgtttgatgaaccaaattgaatttctgcaaggata

SEQ ID NO: 176653 - DNA, 532 bp, Homo sapiens
atggcttttgagattttccatgaccctccctaaataattttctcattttatctctcactaatctttcttaagcaccctatattccacccatcttgagtttcttggcttttctctagcatgtttaaattgtgttttcttcatattttaggacttgtgttctgtctctggtatgtttaaattgtattttcttcatattttaagacttatattatggcttctgccttaaatgtccttgtccccaatctctaaaaaattctactcattctccaagaaccatctccaaaagtgcccccttggagtacaaatctttgtactcttcttgaagcacgaattactctaaatcataattaytttacttatagcatcatctttcacactgaactataaactatctatagaagagttcgttggtccatatataagaattcatttaataaacagattttaagtcttttactactcagcacaaggcttttagcatagcagaggctcagtaatgtttgatgaaccaaattgaatttctgcaaggata

SEQ ID NO: 176654 - DNA, 350 bp, Homo sapiens
ctgtaactggtcacattgtcgtagttggtatttataactacctacttccatcctttattctatttgccttccgcatatacctctgctggtcatgtttctttacctggtggggtaacccaaaccttcawgacgggtctgggccgttagtgatcctgcctggagtggtcattgtagtattctgttgaccttaattgcagggcatggtaatactaagagttgccctaaatgatcgcctgtactccagaagtactcttccttagttccattgtgcagtagtcgtccaatttgcccttgttagtcaggatcaatcactctagccagaactgtaactccctttttgcctggtggtt

SEQ ID NO: 176655 - DNA, 350 bp, Homo sapiens
ctgtaactggtcacattgtcgtagttggtatttataactacctacttccatcctttattctatttgccttccgcatatacctctgctggtcatgtttctttacctggtggggtaacccaaaccttcatgacgggtctgggccgttagtgatcctgcctggagtggtcrttgtagtattctgttgaccttaattgcagggcatggtaatactaagagttgccctaaatgatcgcctgtactccagaagtactcttccttagttccattgtgcagtagtcgtccaatttgcccttgttagtcaggatcaatcactctagccagaactgtaactccctttttgcctggtggtt

SEQ ID NO: 176656 - DNA, 469 bp, Homo sapiens
taattcattgccctgtttctaggtaattccttgcatgcaggaggcagactcatgattgtgttttaaaaaagaacatgcagtaccaaaaccatccgtgaaaggtataaatcatcacagcatactactccaaactttagggcctaactcacatgtattctgtgtgatattggcctaaaaaacatatcattgtgacctttaattaagtatcacctrcttctataagttctacacagataggtctatcattctagagacaaaaattataagtcctgagactttgctgaagttgcttatcagcttaaggagattttgggctcagacgatggggttttctagatatacaatcatgtcatctgcaaacagggacaatttgacttcctcttttcctaattgaatgccctttatttccttctcctgcctgattgccctggccagaaattccaacactatgttgaataggagtggtgag

SEQ ID NO: 176657 - DNA, 407 bp, Homo sapiens
taaacattacgaagaaggagctgtgtcccattcctattctrtctcaggtacatacctggaagtggaatgctggaccatgtaggaactaactttttgaagaactgtcaaactgtttaccaaagtggccgcatcatttcacattcccaccagcaatgtatgaaggttccagtttcttcatttcctcaccaacacatctgattgtcttttttattttagccatttaagtacatgtaaagtgttatatcattgtggtttttgacttgcgtttctctaattgctgaaccatgttgagccacaatattttcatatgcttatagaccatttacatgtcttttttggagaaatgtgtattgtaatcatttgcccatttttaattggatcgtttccttttagtgttgtaagaattc

SEQ ID NO: 176658 - DNA, 577 bp, Homo sapiens
gtcagtgtgaccatgacgcttggcattcctggggtcatggcactgcttcacctccctggaccctgatgggacctattgagtctttctatagacttgatcttggattttcagcttcctcctagtggggatgaggatgcagttctgacctactgcctaaagccactatgagtttcctggaaactctttcttccccactctaggtccctctgtaatatcagccayggactctggacacggagcctcatgtctagctgggagcaaacttaatcctacactgactgccttaatgcttctagggtggttcctatatgccatttacctcccactctgtaagtctaagagaaatttcatcctttattggtagtaaggacacattgtttttcggggggaaaacacatgaaaccattgcttttattgaccttcttgaatttctaacggcatgacaagctgggaccacagctctcttgagttggcagggaggctagtgagtgagggccaggcccagtcatgtgtgtaggggctcaggatggagtttggaggaactttcctgtatgagaatctggacctgggacaaggg

SEQ ID NO: 176659 - DNA, 560 bp, Homo sapiens
tttattcgctaactttttcagtttacaagattatgatagcttttccttttaggatcatgtgttattataaactaaaaatataaaaagcaagctaagcactattttaaaaaacatcctaaaggtacaatgcaagggaccagttacaaatgcccagaacctgctagagatttgtaagaaatcatttaaaagagactggaaatacattatttgcctgttgaacacctcagttcttcctttccatgctgctatttgcatgaaaatttgctgcttaggtcagggcttatgataggttagaaaagtttccaatagccgaacacaaacccaggaatcaaagtcccccaaatatacacaaaggaaaaaacacacacacaacctacctaatctgtagctagagtgcttctgggccatggaaccaccccattgtgccttggccactccagctcagaaaccagagtgttgccatggtggcagggacccaaccgtgagggctggtttcaatacccagcagctgttcacttcagaaaaagcaggatggcagccsacttctgaatgcgcatttt

SEQ ID NO: 176660 - DNA, 547 bp, Homo sapiens
tttggtggacctgtccctcatcttcaggaccaagaacgtcactgcaggcacagctgttagtgttctcaacctacgttaattttgkttggattcattcaaacactgaaaaacctttgcatttgaaagtaggagcccttcttttgtttttctttgtttatttacttatcagactatgccttagtcccaaaatgatttaaagtcacactaacactattagtacaaagtaggtacctttcctgatcctttaattgaaattctttcttagttctggaaaatttattttttaaaaagaatgtattcatgttgtccaaagatgacatgcattcattttttttttttgagttttgcttcacttttatcatatttttgtcaaatttcagtactggagtcactgaaacttgttgtattctgcattgcttcagagagattattgtggcactttccatagaaggacacccttctttatttctttatcgtagagtttttactccagctcctctactccaccaccaaaataaaaaggctaggagaggaaatagacaggatt

SEQ ID NO: 176661 - DNA, 602 bp, Homo sapiens
caatgcctttttttgcacagctgctaaaattactgttattttatcctctcacaagaaatacctcactggatgcaaacaataacctggtggcaggttggattatctccaagttactcagcaattactgcacaatattgtgatctggctgctttcttttctgagtttattttctgctctcttcctctgtctccccttgctctagtcgcattgaccttttagcttcttttcccagctcargaagtttgcttgtgtttttagatctatctgaaacatttttcacactctccctttgcctaattcctactcaactattagattttcccttccatatcacttccttgaagtttttcttgaaacttctactaggtcctgcatgcccgccagtcctgtatagggtgcctgtcccacagcggcccttacatttactatatggctcttaccatagtgattaatgtaattgtttactggctatctttctgttgaccctgatgtctaggtggaagaaaacctgcctgtgtttttgtcaacacctagcaattccaatcacatagaagatactcaataaataggtattcagtacatgaatggctggtatctatgct

SEQ ID NO: 176662 - DNA, 602 bp, Homo sapiens
caatgcctttttttgcacagctgctaaaattactgttattttatcctctcacaagaaatacctcactggatgcaaacaataacctggtggcaggttggattatctccaagttactcagcaattactgcacaatattgtgatctggctgctttcttttctgagtttattttctgctctcttcctctgtctccccttgctctagtcgcattgaccttttagcttcttttcccagctcaggaagtttgcttgtgtttttagatctatctgaaacatttttcacactctccctttgcctaattcctactcaactattagaktttcccttccatatcacttccttgaagtttttcttgaaacttctactaggtcctgcatgcccgccagtcctgtatagggtgcctgtcccacagcggcccttacatttactatatggctcttaccatagtgattaatgtaattgtttactggctatctttctgttgaccctgatgtctaggtggaagaaaacctgcctgtgtttttgtcaacacctagcaattccaatcacatagaagatactcaataaataggtattcagtacatgaatggctggtatctatgct

SEQ ID NO: 176663 - DNA, 427 bp, Homo sapiens
cgtgggtctcacctttaaataatccgatttagaaagtctggggctaggcaacgtggttcatgcctataaactcagcattttgggaggctgagatgggcagtttgcttgaggccaggagttagagactggcctggtcaacatggcaagaccctgtttctacaaaaaaaagtacaaaaatttgccagacctggtggtgcacccctgtagttccagctactcaggaggctgaggcatgagaattgcttgagcctaggagttcaaggctgcattgagctatgattacatgatcacgccatcctgggtgtcaaagaaccagtctcaaaaataaaaaacaacaacaacatagaaagtgtggcataaatcccatggatstggacttttattaacctaccctggtgaatttaagacagctgtcttatgggtaagc

SEQ ID NO: 176664 - DNA, 584 bp, Homo sapiens
gaggcatttgcatctttattttattctgttatttgaatcaataatcagaagtaaagtctaaaattttagctagagataaactgttctctccatttaattattttttagggaccttaagtgataagcttattcatattgcataactcatacataaataacttgataagctcaatacacaaatgagttcaattatgatgctgttgttatgatcagtttatttgcctgttcattcagaactatttttttytcctgtgcctagcataggtatcacaaaataggcaatatgatttcattggtcatctgttgcagaataaattatattgatatgattaggtatcctgtagttgacaaattaatggtcactcatcatgatgcacaatttatatgtatttgggaatgcagaagcttgtgatttctgataaacattataacttttaaagttgacatattttctgataataaatatcttgttatttgcttatatttattttgttcattttaggactattaaaaagtcctcgggcataatttttaaataaaaatataaacatttaacactgagtcatgcactgaagttagagaga

SEQ ID NO: 176665 - DNA, 518 bp, Homo sapiens
tagctagagataaactgttctctccatttaattattttttagggaccttaagtgataagcttattcatattgcataactcatacataaataacttgataagctcaatacacaaatgagttcaattatgatgctgttgttatgatcagtttatttgcctgttcattcagaactatttttttttcctgtgcctagcataggtatcacaaaataggcaatatgatttcattggtcatctgttgcagaataaattatattgatatgattaggtatcctgtagttgacaaattaatggtcactcatcatgatgcacaatttatatrtatttgggaatgcagaagcttgtgatttctgataaacattataacttttaaagttgacatattttctgataataaatatcttgttatttgcttatatttattttgttcattttaggactattaaaaagtcctcgggcataatttttaaataaaaatataaacatttaacactgagtcatgcactgaagttagagaga

SEQ ID NO: 176666 - DNA, 388 bp, Homo sapiens
tcattacacatcatattctatgggacgaattgtcaacactatggaagataaccccaatagaccaagcatcatgaaactctggaaatgctacaccattgatgatgccatcrttgttatagaaaaagccatgaaacccatcaagctaggaagaagatattcttgttggagaaactgtctccagatgttgtatgacttcacaggattgacaacagatccaatcaagacaatcatgaaatgagtgaagggtatcaagacacggatcttgatctaattaaacaccaaatagtcatcacatcagaggaattaaccaaagacatcttaatggagatgagtgcttctaaaccagtgccagacgaggtagaaatataaaagaagcaatgccagaaaa

SEQ ID NO: 176667 - DNA, 361 bp, Homo sapiens
gggatggtggggaaagtgatctccaaagagagtagaaaatacttaggaggagagcaaatagataaaggaccaacattaatagcaccatcattatggctagaagtttcttgattttcttgaaaaatactcagttkccttgaatgtgtatctgttagttataaactacatataaaatcctaatcccccccccgcccccgccaaccaacagaatagataccctcttggccaaggggatcccagagaaaccttaaaaactgagttttcagtcataatgggaatggaggtcggacaaacctcattatactccctccactttagagtttaggagcaacaacttcccagcattaatgttaaaatagag

SEQ ID NO: 176668 - DNA, 361 bp, Homo sapiens
gggatggtggggaaagtgatctccaaagagagtagaaaatacttaggaggagagcaaatagataaaggaccaacattaatagcaccatcattatggctagaagtttcttgattttcttgaaaaatactcagttgccttgaatgtgtatctgttagttataaactacatataaaatcctaatccccccmccgcccccgccaaccaacagaatagataccctcttggccaaggggatcccagagaaaccttaaaaactgagttttcagtcataatgggaatggaggtcggacaaacctcattatactccctccactttagagtttaggagcaacaacttcccagcattaatgttaaaatagag

SEQ ID NO: 176669 - DNA, 619 bp, Homo sapiens
acacttcagctgtttactatgtaagtgggctgtgttaaatgctatatatatattaactaaattctcctgcaacctatgagctaggtattttatgattcaattttatagctgaaaaacctgaggcttcatagcttatccaaagtcacataggatgcatatggtggagctgggacttggattatgtttctttgaaaccaaagcttrtagtcttaaatgctctgtgctggtttttactcttgatgatacatattcatatacatatccatttatatttaacacagtgactagaagcagagtacatgctaaataaatggtagcttaaagacatgaaaagtaatacaggttaattaatactgtcacatatttgaacattgctgggctagctctcatggtggaaaggggaaggctagaagagtcacagaggagctggactcacctttggaacaggataatcataaaaggggtcagaccaaacttctaagaaccaaaaaccttgctagctaggaggcaggcaaatagcatcagtaatgccttggataaaatgaaacaaggctgcaataatgagattgtgattcaggaacatagctctggttaccagttgcgggagactgacaaggac

SEQ ID NO: 176670 - DNA, 563 bp, Homo sapiens
gcgttaatgggtgcagcacaccaacatggcacgtgtatacatatgtaacaaacctgcacattgtgcacatgtaccctagaacttaaagtataatatatatatgtgtgtgtgtgtatatatatgtatatatacaaatatatgtagatatacacatatatgtatatatatacacacatatagaaagagtaactagtccatacttttgaatccatgggtctttttagtggattttctttgcctataggacaaagtccaaactctaccttacaaaactgattctcggtaattgagcctttactactggtctagacttatttttcatagggttctataccaccactttgaactycagctcaatgaagctgtttttagtgtcatgttttcatgacttttttcaagctattgcctctccctggaatgatttccccttgccccttggactcagcatcaccttccaaatctctcattcttttccaggggaagttgacaacatcctccttagcatctctaccagaaatagttattcttggttcctattgtaatcttaattccattgatacaaa

SEQ ID NO: 176671 - DNA, 572 bp, Homo sapiens
atatacaaatggctatatatatatatattccacagcaaatatcatactcaattaatggaaaactgaaagccctttctctaacatcagaaaaaaggcaaggatacctgctttaacctttctattcaacatagtacagaaagytccagacagaaaaaaaataggtaagcaaaagaaataaagtcattcagattggaaagcaagttaaatggtctcttctgaaagactggcaaaaagaacagaatatcaaaggactgtgaggcaaccacaaaaagtataacatatatttaataactataccagaaggagaagatagaaggatagaagttttgaaagaataatagctgagaatttttccaaattaatgtcagacaccaaatcacagattcaggaagctcagaaaacatcaactgggatcaataaacaacaacaacaaaaaaccccaaaaccttacacctaagcatattattgtcaattacataaaaatcaaaaattaagaaaaaattctgaaagaagccagaggggaaaaacgaaagtaagaattattttagctatgacgaaaaaaataagaatta

SEQ ID NO: 176672 - DNA, 578 bp, Homo sapiens
tacagacaccaggtatttgccatattttagttactcttccacctgggaggtagccaaacaagtgtacacaaaggcagaaatggcaaaagaggcaagagattgctcttgaagagctgatgaattctagtaagcttcattggaatcaggggatttaaaaaaaaaatggtaagcctaattaacctaagagcaaattagaccttacagtcagctggctccaaatccattcatctctgatcttccaattttgttaccaaggggaaaatggctgaatcaaagaatagcctctagtagcaaaaatgtttgttctaatgcttaatgtctaaargctaaaacaggtaagccaggatacttgcttttaaacttttataaaccaaaagctagtaagaaatgcatttatatctggacccagaatacacacatatacttaactgaataaaaagtttcacagtatatactatttgcccttactaagtgtgaaacaatttgatgcattgtattctattcaaaattaccttttaaaacccaagaacagtgcagttgtctatcccaggctgcaatctatgtttgtgaatgacagt

SEQ ID NO: 176673 - DNA, 564 bp, Homo sapiens
tttcagtttaactcacattaggtattcacgaagtcttctcagacaacttaacctcctcctattttacctcaacccagggctagattaattctttcaatttttatgttttcaacataccctgggcatttctccctcagtgcttttaccacatgacattaagatgacaatgataactacaacaacgacaatgatgatgatgatgatgataatgatgatggtgatgtgtatgtatgtttccttcactgatctatgcgtttctcaagacaggaaataggtcacaaggaaagacttgttaaatattaattttatgacaataaaattattataaaatagrttgaagagaatgaactatattctggtagccagtctaaactaaaaaagaagtttttttaaaatttctattttacacttattccttatagtctacccaattcccctggctgtaagctggctgctacatatgattctttgtgactgcaaatactgtgtataagaaaggatctatttcagcaaatcctgagaggattatttgtgtatccaaaacattagtcaagctaacacata

SEQ ID NO: 176674 - DNA, 564 bp, Homo sapiens
tttcagtttaactcacattaggtattcacgaagtcttctcagacaacttaacctcctcctattttacctcaacccagggctagattaattctttcaatttttatgttttcaacataccctgggcatttctccctcagtgcttttaccacatgacattaagatgacaatgataactacaacaacgacaatgatgatgatgatgatgataatgatgatggtgatgtgtatgtatgtttccttcactgatctatgcgtttctcaagacaggaaataggtcacaaggaaagacttgttaaatattaattttatgacaataaaattattataaaatagattgaagagaatgawctatattctggtagccagtctaaactaaaaaagaagtttttttaaaatttctattttacacttattccttatagtctacccaattcccctggctgtaagctggctgctacatatgattctttgtgactgcaaatactgtgtataagaaaggatctatttcagcaaatcctgagaggattatttgtgtatccaaaacattagtcaagctaacacata

SEQ ID NO: 176675 - DNA, 596 bp, Homo sapiens
caaaaaaaaaaaaggggaatatgagtaaggatcttgcaatactattggcacaagccttatttaccttaatttttaaaatttagatgataaattttaatcagctgtagaaaagcactttgctaaaacctctcaagacataaaacctgcagttttatggtaacatgtaaacagtaatgtatggtgtggtccaaatgaattgttaacatggggaagaggatatgcttgtgttcacattccctcaggtcctctttggattccagcacgacacatcaaacgataccattgcatggctaggacccaacccggtaccagtaataaagaaaatgaccctacaggaccaacaacaccaggcaatgcggcttcctcaggtgacacaggccccagacatgatgctgaaaaagacaagtcagaagactgagcaaatcctactccagacacagacaccattcactccagataatttgctccttgctatgctttattcatccttttaaattctctcattctrcctgcaaccagtacctgctacactctattgggaccatcttctaaatctgcctttcttctgtcctgttacttagacaaacacccccttc

SEQ ID NO: 176676 - DNA, 620 bp, Homo sapiens
ctacggtggccaatacttttcttgagcacttggagaagtctctaaagaatagcctgtaagtaggtatgcattcactttgtatatgcattctccttcccagaggatctatattctgtcgttagtacataccccacctatcttagtacattttgtgttaaaagttcattttgtgtacaaagaataccacagattaggtaatttatattttaaaaacaaacagaaatttattttcaaaccgttctagaggttggtaagtccaagatcagggcattagcttctggtcagagccttcttgctgcatccctaatatggtgaaaggtgaacaggcaaaaagtcatgagaggaacaaactggactttttataatggcattaatccacctataagggtagagctctcatggctcaattgcttcccgaaggccccaccttccaacaccaacacaatggcaaccacatttcaacatgaattttggaagggacaaacatcaawgtatagcattatggagaagaatttctcaaaatatttagctgaccactggtgtctgtcccagataagcaactgcttgatctgcatctgtccttagatatacttgtctttccatggatttggagttacttg

SEQ ID NO: 176677 - DNA, 620 bp, Homo sapiens
ctacggtggccaatacttttcttgagcacttggagaagtctctaaagaatagcctgtaagtaggtatgcattcactttgtatatgcattctccttcccagaggatctatattctgtcgttagtacataccccacctatcttagtacattttgtgttaaaagttcattttgtgtacaaagaataccacagattaggtaatttatattttaaaaacaaacagaaatttattttcaaaccgttctagaggttggtaagtccaagatcagggcattagcttctggtcagagccttcttgctgcatccctaatatggtgaaaggtgaacaggcaaaaagtcatgagaggaacaaactggactttttataatggcattaatccacctataagggtagagctctcatggctcaattgcttcccgaaggccccaccttccaacaccaacacaatggcaaccacatttcaacatgaattttggaagggacaaacatcaaagtatagcattatggagaagaatttctcaaaatatttagctgaccactggtgtctgtcccagataagcaactgcttgatctgcrtctgtccttagatatacttgtctttccatggatttggagttacttg

SEQ ID NO: 176678 - DNA, 406 bp, Homo sapiens
ggagaacatttgcagagctattttgataaatgtattttgtatttcaaagacatttaacctttctcctgactatctgatttatctcatccatgtttattaatgtcggtggttaygataatctccttaagtgccacataatgatttattaatgacctgttctgtgcccgtacacagagatttgagaaaaattaaatgacaccttccaggagattataatttatctgaagcttgttttctcttaatatatttatttgcatagtttgtttcctgagtgctattataaattagataattatttattctgttgtatgatttttctgttgtagaaatggaagtttaaaacttggaaatgttggtaagtggaatagatttgaatattttaaatcattaagaaatagttgaattc

SEQ ID NO: 176679 - DNA, 411 bp, Homo sapiens
gaattcattttaatttgatagtttactgtttttttggaggagaaatgggagaacatttgcagagctattttgataaatgtattttgtatttcaaagacatttaacctttctcctgactatctgatttatctcatccatgtttattaatgtcggtggttatgataatctccttaagtgccacataatgatttattaatgacctgttctgtgcccgtacacagagatttgagaaaaattaaatgacaccttccaggagattataatttatctgaagcttgttttctcttaatatatttatttgcatagtttgtttcctgagtgctattataaattagataattatttattctgttgtatgatttttctgttgtagaaatgsaagtttaaaacttggaaatgttggtaagtgga

SEQ ID NO: 176680 - DNA, 541 bp, Homo sapiens
aagtcagacaatttgactgctctctgttatgatggtacctatgcccaccttggctttgttagtcaagtgctgccacttggtccccaccaccaggtaattatttactccgtttgcatttaagtttcccaattcaatgactggagttcaagggaagagtaatcatatgctcttcaaggatgctgtggcttccctcataaatttatttcttagagtagtgatagaagatatgtcttctcaacccatgcagtgtgggttagtagggcttaagtgacaaatccactgtaacacaccaatttccctaaactttgaatccttcctttacataaaatcagagaaggtctgacatatctaattcacttactgtgggccagcttttgatttatgttttagacaatcaacraaacaaactcagagtccttcctaattctccaatgtgcaagattaaatgcagaatacttgcttatggactttacatcaataaatttggcctaatccaactttatgtttcttctaccattatctcaaaccctccaaatgaatt

SEQ ID NO: 176681 - DNA, 597 bp, Homo sapiens
caaagtggtcgaaagcaaaaatgtggacatatgtgacttcaaagatgtgaggaaggttgtttattcactcattcagcaaacactttgaaaacctagagtmtgaacaatagtttctacagtaattataatgacaagaaattaaggttttcctataagcgtttctacaagtatgttcatttatttagtaagtaatggagaggtactgctgctacttggagaaaaaatggtagaagaaaagctgggagaggaggagacagaggagggcaatggggacgaggagaaggaggaggaacagaggaaactctgaagttagggcctagaaatatatattttaatcaggcctccaaatgattctgatgtatgataaaatttgagaaccactgattgaacttaaaggaaaaaccaaacaaatatgttggtgaattcaggtgactgacccagctttgacaagaaagtattctagtaatgattggctgagggaaaataaaactgggaaataatataacttacataattcagcttattttttgtataaaaacaattttttctttttaaaaattaaacagtatatgagataatttcaatatacatttatta

SEQ ID NO: 176682 - DNA, 597 bp, Homo sapiens
caaagtggtcgaaagcaaaaatgtggacatatgtgacttcaaagatgtgaggaaggttgtttattcactcattcagcaaacactttgaaaacctagagtctgaacaayagtttctacagtaattataatgacaagaaattaaggttttcctataagcgtttctacaagtatgttcatttatttagtaagtaatggagaggtactgctgctacttggagaaaaaatggtagaagaaaagctgggagaggaggagacagaggagggcaatggggacgaggagaaggaggaggaacagaggaaactctgaagttagggcctagaaatatatattttaatcaggcctccaaatgattctgatgtatgataaaatttgagaaccactgattgaacttaaaggaaaaaccaaacaaatatgttggtgaattcaggtgactgacccagctttgacaagaaagtattctagtaatgattggctgagggaaaataaaactgggaaataatataacttacataattcagcttattttttgtataaaaacaattttttctttttaaaaattaaacagtatatgagataatttcaatatacatttatta

SEQ ID NO: 176683 - DNA, 597 bp, Homo sapiens
caaagtggtcgaaagcaaaaatgtggacatatgtgacttcaaagatgtgaggaaggttgtttattcactcattcagcaaacactttgaaaacctagagtctgaacaatagtttctacagtaattataatgacaagaaattaaggttttcctataagcgtttctacaagtatgttcatttatttagtaagtaatggagaggtactgctgctacttggagaaaaaatggtagaagaaaagctgggagaggaggagrcagaggagggcaatggggacgaggagaaggaggaggaacagaggaaactctgaagttagggcctagaaatatatattttaatcaggcctccaaatgattctgatgtatgataaaatttgagaaccactgattgaacttaaaggaaaaaccaaacaaatatgttggtgaattcaggtgactgacccagctttgacaagaaagtattctagtaatgattggctgagggaaaataaaactgggaaataatataacttacataattcagcttattttttgtataaaaacaattttttctttttaaaaattaaacagtatatgagataatttcaatatacatttatta

SEQ ID NO: 176684 - DNA, 597 bp, Homo sapiens
caaagtggtcgaaagcaaaaatgtggacatatgtgacttcaaagatgtgaggaaggttgtttattcactcattcagcaaacactttgaaaacctagagtctgaacaatagtttctacagtaattataatgacaagaaattaaggttttcctataagcgtttctacaagtatgttcatttatttagtaagtaatggagaggtactgctgctacttggagaaaaaatggtagaagaaaagctgggagaggaggagacagaggagggcaatggggacgaggagaaggaggaggaacagaggaaactctgaagttagggcctagaaatatrtattttaatcaggcctccaaatgattctgatgtatgataaaatttgagaaccactgattgaacttaaaggaaaaaccaaacaaatatgttggtgaattcaggtgactgacccagctttgacaagaaagtattctagtaatgattggctgagggaaaataaaactgggaaataatataacttacataattcagcttattttttgtataaaaacaattttttctttttaaaaattaaacagtatatgagataatttcaatatacatttatta

SEQ ID NO: 176685 - DNA, 440 bp, Homo sapiens
atttagataaagcaaatttccttttgttaagatagtaaaatttagtrtaataggaggcaagttcttaataagattttatacaaaatatctagctttaataactatttgtttgtctaggtttttacttaacctctttaaacctcagttactccatccataaaataatgtattggtgtcttccactaaatgctgttgtgaagaagagtatcagttcattcaaaatacttagccctctgtctggcacttacattctcaagaatattaaggaggtcccactaattcaacactgaggacatctaagagagttctcattgtagctgcaaatattatttaatttctttacataatgaaatttcttctctaaactgaacttgtggtgggcaggattaatatctttctgatataaacatgtatatttcaaaggaaaacatttggaaaag

SEQ ID NO: 176686 - DNA, 535 bp, Homo sapiens
ttgaatgaccactgggtcaataaagaaattaagatggaaataaaaatttcttgaaacaaaaaaaaaataacatactggtaagaatatgtagaaaagggaattagtgcattgatggtaggtaggtacataagtcaaccagtatggaaaacagtatgaagacttctcaaaaatcttaaaacagagctaccatatgatccagcaatcccactactgaatatttgtccaaaggaaaagaaatctgcatatcaaacagatacctgtgtatttatcacagcactattcacaatagcaaaaatatgccatcaacataaatgtccaaaaccaggtataggacctaatagaccaagtggttaaatgccccaaaacaagcaaggttaagtgcccaaccaagccgagtcagttttgccacatcagagctccaattaggaaaaccttggtttctgacatgtgaaatggagcagctatccaaagagagttgaggcagaacctastgagaaaagggttatgctatagtagatgcgaagatgtgccactc

SEQ ID NO: 176687 - DNA, 485 bp, Homo sapiens
tggaggtttggaaacatttactgggcagaagaaggaaatggaacccagtggaagatsacatgttgcaggagaaattgggaggattctcaaagaagcctcagaattttcgttggtagttaaacctgaaaataacatgaaatagcagtagtatatgtgttcctttccagggtcagggacttggaatgggattgcttcctctaaacaggagattgccctggacactgaaagccaaatggaaaaagaaaaaagaccccttggctagaatgctaagaggacctatcaaatgccagctttgatgccctgagttaagagtcacaaagcagcgttgggcagtattgatcagaatgaaaactgtttgagcatgaataaaggcatcaaggtgatagacgtgaacaaaactctggagtgttggctgtgtgtgttcatgtgctggctagtgtgtgatgctttggtgtgtatgtgtgtatttgcgtgaattgttttaa

SEQ ID NO: 176688 - DNA, 455 bp, Homo sapiens
agcaggaagagcccctgcagccaggagtttgctcctttgagcaaatcaatcggctttttaaaacccaggctttaattggttatgccctgggagatggtttttgatacatgccccatctggcaggactaattgttctttgctttcagtgactagrttggtgctctgaacccgggaagaaagtctggaaggtgttcatgcctgtcaatgtcactgctcatggctcttggatgatagtatatcttttttgacacctgtttcttgcaaatgattcacaggacatgtcttataagtgagcagctgccacagagctcctggaatggcagagagttgaggtgcccttgtatgtccagggcatgtgatgaagagacacctcatgttgcttgtctggcttctgactccctagtgacaacgaccccacctggaccagggagagaagtgatttggactagagatga

SEQ ID NO: 176689 - DNA, 466 bp, Homo sapiens
aggaagagcccctgcagccaggagtttgctcctttgagcaaatcaatcggctttttaaaacccaggctttaattggttatgccctgggagatggtttttgatacatgccccatctggcaggactaattgttctttgctttcagtgactaggttggtgctctgaacccgggaagaaagtctggaaggtgttcatgcctgtcaatgtcactgctcatggctcttggatgatagtatatcttttttgacacctgtttcttgcaaatgattcayaggacatgtcttataagtgagcagctgccacagagctcctggaatggcagagagttgaggtgcccttgtatgtccagggcatgtgatgaagagacacctcatgttgcttgtctggcttctgactccctagtgacaacgaccccacctggaccagggagagaagtgatttggactagagatgaccacctctctctgg

SEQ ID NO: 176690 - DNA, 455 bp, Homo sapiens
agcaggaagagcccctgcagccaggagtttgctcctttgagcaaatcaatcggctttttaaaacccaggctttaattggttatgccctgggagatggtttttgatacatgccccatctggcaggactaattgttctttgctttcagtgactaggttggtgctctgaacccgggaagaaagtctggaaggtgttcatgcctgtcaatgtcactgctcatggctcttggatgatagtatatcttttttgacacctgtttcttgcaaatgattcacaggacatgtcttataagtgagcagctgccacagagctcctggaatggcagagagttgaggtgcccttgyatgtccagggcatgtgatgaagagacacctcatgttgcttgtctggcttctgactccctagtgacaacgaccccacctggaccagggagagaagtgatttggactagagatga

SEQ ID NO: 176691 - DNA, 455 bp, Homo sapiens
agcaggaagagcccctgcagccaggagtttgctcctttgagcaaatcaatcggctttttaaaacccaggctttaattggttatgccctgggagatggtttttgatacatgccccatctggcaggactaattgttctttgctttcagtgactaggttggtgctctgaacccgggaagaaagtctggaaggtgttcatgcctgtcaatgtcactgctcatggctcttggatgatagtatatcttttttgacacctgtttcttgcaaatgattcacaggacatgtcttataagtgagcagctgccacagagctcctggaatggcagagagttgaggtgcccttgtatgtccagggcatgtgatgaagagmcacctcatgttgcttgtctggcttctgactccctagtgacaacgaccccacctggaccagggagagaagtgatttggactagagatga

SEQ ID NO: 176692 - DNA, 581 bp, Homo sapiens
ctggcatctctgctttcaggatcgtgagcttgctaagtccccttctactcttgatagcctctgcctgcttctggtgatggaggcttcctgccactggagcaccccttccatggtagggggagcctatgttttggaagcctccctcttttgttcccaggcagtctcctctctctcagatgggcttttaggagagcaccgcatgaggaggtggcagtccatagccccagcactccagccttgaagacttcagaaccctagctccttactcatctccagcctgtacctaggtgtgtcatacacccattgactccatacaggccaacaaggggatgtgggcaggtgtcccaagcctgcctctcctgtccctgacctgcttctgttttttctgatcactgtctcattccaggctcctggctccatctcttacttccctcatgaatttgtgagcatagacgaccctgtccagtgggcttgccaattctgtccaatttctctgatttctgacctcaaatgattcacctgatggcctgtcccagggaagtaattccaaagtcctrgactatcagcccatgtcctggcaa

SEQ ID NO: 176693 - DNA, 493 bp, Homo sapiens
ttgcaatttgtatgatgggcaaagtattaccatctctaatgtgtaaagatattctaaaaatagagagaagactaacamccctataggaaagtgggccaaagatacgaacagcttacagaaaaaagaaatgcaaatagccttaatcatatgaaaatctcttcaacctagttcttaataagagaaatgcaaattaaaactaccctgaaaggcctttctcatcggtcagattggttaaaaaaaatattccacaacatactttgttggtatggctgtgagaagacaggcaccttcatcattcctggtgggaaaaatattacccctctgaaatactacccctctggagggatatttgatgatgtctagcaaagttacgtatgcatttaccctttgacttcgcaattccatttctaggaatctatccaaaagataaccaataaaaatatgaaaaaagtatgcaaaagactattaattatagcactatgctctcaaaagg

SEQ ID NO: 176694 - DNA, 640 bp, Homo sapiens
gggatagtaaaaaactaattggtcccctttggagggtggttgagaatcaattcattattttgaaagctattatagaaagaactatttatcctgacttttccaaatgaatttatttgtacttctgggcaaccaaggaatggattattgtaaatgtctctacaagaagtatttcagttaataaatgaggaaagagaaataaaattaaaatattactatttggtaacccctaaggaattactgaatctaggcaataatcagcaatgatggttagcatcacaaatgggaacacaagtagacatcgtgtacctcatgatggaggaacacacatactgtctatgaaatattcttgctacaaaattaagcctaagtctctagatttaactaccaatttagatgaaatgtatgggacagaaggacctgttaaatgacatcaggggaatgtaatcaagaaaatctagactgtgagaatctctgcaggaaaaatgacctgatctcttcaaaaacgaaattacaagagkgggggaaaaagagatggagaaagatattcagtagattatggagactggaaagacaaattaaccaactgaatcttgattcaagcaaagaaattgtatatcaaaacaaaaacttatgagagaat

SEQ ID NO: 176695 - DNA, 573 bp, Homo sapiens
catatgagtcatcatttatgaaccctatgttttacaaaattgcatatttaccgcaacgcacaagtctctaaaagaccttgatgattagcagttccttagttttggaattgtgccctctggtcaccagatatagtgggaaatagctggttttcttgatggtaggttatgttggtaaaaaattagatttgtattgtaactaagtacaaataaattgaataagggagtgttgtgagtctgggaatcgttgcaggatgctggataattaaaagagcaatgaaatataaatagatttttttgttgaatgttaattcagttataaatatatatttcttctttgatatgttctttagttgatgcaggccagttaaaatgagtgacttcaagttttagagaaatacataacaatgtcagtttataattattttgttttttatacaatttactattttagaatctcattcatattccattgtatttccatgaatgatactttgggcggcatacagcktctttccattaggaaataaagtcaaaatgcttagaaattttattgttatccttcttaactgaagg

SEQ ID NO: 176696 - DNA, 598 bp, Homo sapiens
tatgattgagaatgaattgttgaaaaactgaatatatgtgtatatatattgtatatatatgtatatatatgttgtatatatacatacactgataatagtcatagttatctaactaatatactcatatctaatgtttattgagtattcagtgtcaggtgctgttataaatgcttcataaagagccactctgttatttcmtacaacagtgttctgagataagaaaattttttttcttctattttgtagatcaggagaataccctcaaatgattagttaacttaccccaatcacttaattattaaatggcagagcctgtatttgtaccaagacagtgtggtctattctattttactcagttcttttattatgcagcctaagagatttaagcatttaaatatctctttgcaaacatatagaaaagaatggaattgggtttatttgaaaataaatttgattccatgatattggtatagtaaggaatcatttcattagtttaatattgagaaaatgaactgtcgaataaataaagataaccacacttacataaagtcgaatttcttctattaatttctatgtttcattattttgctgaattcta

SEQ ID NO: 176697 - DNA, 633 bp, Homo sapiens
ttaaaaaagagtaaaaaaaatatttaaaattccattgattcattttggattaactagaaagagaaaaataatttcaaatataatctctcctttgtaaatagtaataaattccagtcctcacaaaggaaaataatagactgatgtttgcagatgtattaatatattgtcttacggtgttacgtgtattactgaaacattttattttttttcaacttgtgaaatgttagagtttctgattaaactytgaaataaaaagaataaagagaagcaagtagagattaaagaaacacattacaaaagctttcttgatttacaaaacttttcttaaaggaaagcagaaagctattataatggttaaagacagagcccttttatgtgtgcacatgggaagtacttctagagagggtcgtatttccctaggctagagaccaagaaaacttcacggccccaggccttgagttttgtagtgagaacaattcattcattgagcactaagattcagtaatcaaagtatgaggacaagggtgtgattttcatcttatctgagggcaagggaaaaccaattcaaaagaaacaaatggcagtaagaaaatggaatctcccatatggctaaaacattttaatgtatgggcc

SEQ ID NO: 176698 - DNA, 574 bp, Homo sapiens
cactgcgctacagtctcaccactatccaatcttggtaggctcaagtgctcaagtgaaatttgaacaactcattgtgaatatttgtgaactacatacaatgcctttacctacatgaatcatagaatctcagtgcggttaggggcttgatagatgtgtgatctgcacttttttgttttagaaattaataaattaaggctcctcgggggagaggagcatgccacataaatagtaataataataataataataataatgtcagcaatataataatgatgttagcaatggctgatgctaattgaacatttwctgtgtaaggaaccttagtaagtaacaattcatttaatactcataacaagtctatgacaaagtgaatgtattggttttgattcacaggtgaggaatttgtaggatgcagtggccaagctagaatatagaactccagtatgtaaagaacactcctctaccaagttgcctgcctatctggtcttaacatagtgttcataattctaaatacacaagtatcatgatataattaatatttcagactcattctattgtaacataagtgagaaat

SEQ ID NO: 176699 - DNA, 469 bp, Homo sapiens
tattactgtataaaatgatgtcctgtaaaaagtgaacttttaaaataaatctatcatttataggttattttaaagtgtataaaatgcaaacatacagtaagttactgactttaagttagaacatatgattttagccatttgacttactttggtgatacattttaaaatgatctaccagactttcaagtccactgaatattaactatttaaatgttgattctaatgagaacacatggacacaggttggggaacaacacacatcaggtccagttgaggggcagagaagggcaaggggaaggagagcattaggacaaatagctaacgcgtgtggagcttaaaacctagatgtcaggtcgataggtgcagccaaccaccatggcacatgtatacctatgtaagaaacctacacactctccacttgtatcccagaacttaaartcaaattaaaaaaaaattgatccttactgat

SEQ ID NO: 176700 - DNA, 526 bp, Homo sapiens
tgtaaatttttataattctacaaagatggtaaaaatgcttttagaagttcaagtacaagatagttaatatttcattcttgtcagtttttaaattctaccatgtaaataattgcagtcatgtgattatgtgattaaataatagttaagttcaggattttagcttattttagcatagttagatatcatgcttagaactaaaattatagttcaattgtattatatttatcatacactattcaagtgaatattaatttagtatygttttagtggcagtcactattctaggtgctggggtgacaaaagaacaaagcagattcaaatccctgctcttactgtttatagtaaagaggaggagcatacattaaataatataaataagtaaaatggatggcatgttagatgctgaagaagcaaaatagagcaggaagaggggataaggaattccaagtaccaggatatttattccgttttaaataaggggatcaggataatcatcattgagtatgtgacatttgagtgaagatct

SEQ ID NO: 176701 - DNA, 573 bp, Homo sapiens
attcgtttagacatggcccctccagctgcatctatgttgagcaattaaaaaaggttaagatgagctaagtgaggtggtatgcatctgtagtaccagctactcaggacrctgaggcaggaggatcacttgagcccaggagttcaaagccagcctgggcaacatagtgagaccccccccatctcttttaaaaaatatttcagatgataaattttatgctgtatgtattttaccataatacaaaattggttgaagaggagtacatataaacacaacaacgaagtgtttaactcatcaatttcagatacacagtaaaagaatgtatatgagaattggtcaaggacattctgaggctttaagcttcaagtcaagaaaaacaactgcctttctgaaaacttacaccgctcacagagtctggtgggctatgaatttgatggtacaacttctaacttgacagtgtggagatcaagggtataggaatgtaaaaagctttgaaaagtttgagagtggagtttgcacagctggacacagggcaccacaaacacaggtggtgcatttgtgcctttggtggacaaa

SEQ ID NO: 176702 - DNA, 560 bp, Homo sapiens
attcagctagtgtttgctttcaactactttggcttttttagtgatgaagttcatcttttcttmtcttcaaagtctcagagctggttgtaccgtggctgtagacaatcttagattctgagatagtttcgcatggcagaggataagggaaggtcacacgttacaaaagcggttctcaaagtgtggtccagggattgctcatggatcttcaagaccctttcgggaggtctgtgagatgaaagctgtttttacagcatactaaggtgtttggctttttcccttttagtcttcaacaaattgtcagtgggattttctggaggcaatatgatgtgatgatgccattgctctgctgatcactggaatatgtacttgggtattcctgtgttcaaacatttctcagttttaatttctaatatgaaaaaaatgataggtataacccattttagaaaaaaacaaaaaacaaacacaaaaaaacctctttgggtcctggattgtaaagggactctgagaccaaaatgtttaagtattgctgctttacgacacctttttgacacattctggct

SEQ ID NO: 176703 - DNA, 560 bp, Homo sapiens
attcagctagtgtttgctttcaactactttggcttttttagtgatgaagttcatcttttcttctcttcaaagtctcagagctggttgtaccgtggctgtagacaatcttagattctgagatagtttygcatggcagaggataagggaaggtcacacgttacaaaagcggttctcaaagtgtggtccagggattgctcatggatcttcaagaccctttcgggaggtctgtgagatgaaagctgtttttacagcatactaaggtgtttggctttttcccttttagtcttcaacaaattgtcagtgggattttctggaggcaatatgatgtgatgatgccattgctctgctgatcactggaatatgtacttgggtattcctgtgttcaaacatttctcagttttaatttctaatatgaaaaaaatgataggtataacccattttagaaaaaaacaaaaaacaaacacaaaaaaacctctttgggtcctggattgtaaagggactctgagaccaaaatgtttaagtattgctgctttacgacacctttttgacacattctggct

SEQ ID NO: 176704 - DNA, 560 bp, Homo sapiens
attcagctagtgtttgctttcaactactttggcttttttagtgatgaagttcatcttttcttctcttcaaagtctcagagctggttgtaccgtggctgtagacaatcttagattctgagatagtttcgcatggcagaggataagggaaggtcacacgttacaaaagcggttctcaaagtgtggtccagggattgctcatggatcttcaagaccctttcgggaggtctgtgagatgaaagctrtttttacagcatactaaggtgtttggctttttcccttttagtcttcaacaaattgtcagtgggattttctggaggcaatatgatgtgatgatgccattgctctgctgatcactggaatatgtacttgggtattcctgtgttcaaacatttctcagttttaatttctaatatgaaaaaaatgataggtataacccattttagaaaaaaacaaaaaacaaacacaaaaaaacctctttgggtcctggattgtaaagggactctgagaccaaaatgtttaagtattgctgctttacgacacctttttgacacattctggct

SEQ ID NO: 176705 - DNA, 449 bp, Homo sapiens
ccttctttgtggccattagtgtttactagagaataatatcatatttaattttctaattatgtgcgaaccttggagtcaggattagttgatatttttacaccttcaaatttataaacctagtatgaagtcccatctagactaacaaatgttttataatagaaatttaaatagtactccagttttgtttatgcatttgctgatggtctttcttgctatgaactttagaaactttaaatgtccrtttactcacaatacacacacagcctcaatgacctaataagcagatttgcagagccataaccttgctggcttatgtcagctcgaagtaaaaggggaggtggtagtggtgaatctgtttttattactcagtgtttaatcataatgaatcagaggcttttatgagaaaccttctacatcccatgaaagatttgctgatcaaagatgtagag

SEQ ID NO: 176706 - DNA, 449 bp, Homo sapiens
ccttctttgtggccattagtgtttactagagaataatatcatatttaattttctaattatgtgcgaaccttggagtcaggattagttgatatttttacaccttcaaatttataaacctagtatgaagtcccatctagactaacaaatgttttataatagaaatttaaatagtactccagttttgtttatgcatttgctgatggtctttcttgctatgaactttagaaactttaaatgtccatttactcacaatacacacacagcctcaatgacctaatargcagatttgcagagccataaccttgctggcttatgtcagctcgaagtaaaaggggaggtggtagtggtgaatctgtttttattactcagtgtttaatcataatgaatcagaggcttttatgagaaaccttctacatcccatgaaagatttgctgatcaaagatgtagag

SEQ ID NO: 176707 - DNA, 605 bp, Homo sapiens
tttcgtttatgtgcctttctcatcttgggtcaactcagttccatgcactttaaaattattttaggaaagagccacatcttttttttttccttctttctctttctttctttctttctttctttctttctttctttctttctttctttctttctttctctttctttcttttttgtgcatgcatgcgtgcatgcrtgtgtgtgtgtgtgtgtgtgtgtgtgtgtgtgtgtgtgtctcactctgctcgcccaggctggagtgcactggtacaatcttggctcactgcagccccgacttcacaagctcaggtgatcttcccacctcaccttagcctcccaagtagctggaattacaggcacatgtcactacactcagctattttttttttttttttttttttttgtatttttagtagagatgggattttgccacattgcccaggctggtcttgaactcctgggctgaagtgatcctcctgcttcaaaagtgctaggattacaggtgtgagccaccatatttggccaagaaccacatcccagtgctgtagaaaactccaaaaatttattttgcaattcaaaatataaaagtttgttagtagacatttagtt

SEQ ID NO: 176708 - DNA, 542 bp, Homo sapiens
cttctctttgttagtttacaactaacaaagtcccatttctggtttgaaagtcagatggaccttggcttatatttatttaacaaagacgtggaatttctctaacagactgaaagtttattagaataacatctagcattaggcctggcaaataggaggtcctcgttaagagatctgatcagatttgacttctaatcccagatatawggtgtttattctttttgagccactatttcctcatctataaaataagaaatattcataactattccataatatgtattcttatatcctgtataataaaataactaatataggaatataataaataactaggaattataaataatataagattgtaataaatatccaaaatcaagggcctccttgaatttgttatatattgatttgttgattttttgagggcagtaatcaccacgtctgtccagatcagcgcggtgtccacgccccactcagcactgtgccttgtccatagcagatgctcagtcaatatttatctaatcagtgctgtttgtattcaaaga

SEQ ID NO: 176709 - DNA, 542 bp, Homo sapiens
cttctctttgttagtttacaactaacaaagtcccatttctggtttgaaagtcagatggaccttggcttatatttatttaacaaagacgtggaatttctctaacagactgaaagtttattagaataacatctagcattaggcctggcaaataggaggtcctcgttaagagatctgatcagatttgacttctaatcccagatataaggtgtttattctttttgagccactatttcctcatctataaaataagaaatattcataactattccataatatgtattcttatatcctrtataataaaataactaatataggaatataataaataactaggaattataaataatataagattgtaataaatatccaaaatcaagggcctccttgaatttgttatatattgatttgttgattttttgagggcagtaatcaccacgtctgtccagatcagcgcggtgtccacgccccactcagcactgtgccttgtccatagcagatgctcagtcaatatttatctaatcagtgctgtttgtattcaaaga

SEQ ID NO: 176710 - DNA, 438 bp, Homo sapiens
gtcaggcaggaagaaaaagataccaatgacaaatgtttcatttatatttgcaaagcatagacttctgaattrttatgagtttcagttagtttaagagaaaatagaaagaagtttcctatgtccaaaaaatcaaccattaaaatatcagcaatattccaaacaaaagctacagtcattcctcatcagttccttcagtcctgtgtaattcttgctctgcttcctcttggcttaacagtttcatgcatacatctgcctctccaaacagggctctggaaatcctgactcagtctgctggtatggtctcaaggttgtgtaagtgacggcatcagaagcttctgccccaaatgaaaagtacctggcatagagctttgccatggggctctgagataatcctttgttaagacaaagcactacagctagatttgtaagagctttcag

SEQ ID NO: 176711 - DNA, 438 bp, Homo sapiens
gtcaggcaggaagaaaaagataccaatgacaaatgtttcatttatatttgcaaagcatagacttctgaattgttatgagtttcagttagtttaagagaaaatagaaakaagtttcctatgtccaaaaaatcaaccattaaaatatcagcaatattccaaacaaaagctacagtcattcctcatcagttccttcagtcctgtgtaattcttgctctgcttcctcttggcttaacagtttcatgcatacatctgcctctccaaacagggctctggaaatcctgactcagtctgctggtatggtctcaaggttgtgtaagtgacggcatcagaagcttctgccccaaatgaaaagtacctggcatagagctttgccatggggctctgagataatcctttgttaagacaaagcactacagctagatttgtaagagctttcag

SEQ ID NO: 176712 - DNA, 637 bp, Homo sapiens
cacatcacactaacactaatgtttcattgattcattctatcccttcccaggaatcaaattctgattaagagaaagaccctaagtggctgaaggaacaaaaagagttattgcaaaaaaaaaaaaaaaaaaaaaaaaaaaaagctgatgcagttaggaaagggaagcctgagctattaaaaaaaacacattgcttcttacatggtagtgctaaaggccaagcctgcatatccctgcaatctataaagtctgttttctctgacagtgtcagagttggaaagatcaataggtgtcactcacaccattcatcatctcagaaatgagaagatttaggaaaggagattgaaatgacttatgtggggtcacagaactagttattgttgagaccaaatttagagtcttgttcctggatctcagtattatacyttaattatttcttttttaacatgtaacccaatttgctcctaatagacttggaatacacagtgcctgaaatgtaaagatgacttactcttggccttaaggcatcaaatctgccacacgaaattttaagataagcataatacatcattggaattactcctgcttcttgtacctctttcacatgagttaccatgaagtgaactctatcttttatgga

SEQ ID NO: 176713 - DNA, 637 bp, Homo sapiens
cacatcacactaacactaatgtttcattgattcattctatcccttcccaggaatcaaattctgattaagagaaagaccctaagtggctgaaggaacaaaaagagttattgcaaaaaaaaaaaaaaaaaaaaaaaaaaaaagctgatgcagttaggaaagggaagcctgagctattaaaaaaaacacattgcttcttacatggtagtgctaaaggccaagcctgcatatccctgcaatctataaagtctgttttctctgacagtgtcagagttggaaagatcaataggtgtcactcacaccattcatcatctcagaaatgagaagatttaggaaaggagattgaaatgacttatgtggggtcacagaactagttattgttgagaccaaatttagagtcttgttcctggatctcagtattatactttaattatttcttttttaacatgtaacccaatttgctcctaatagacttggaatacacagkgcctgaaatgtaaagatgacttactcttggccttaaggcatcaaatctgccacacgaaattttaagataagcataatacatcattggaattactcctgcttcttgtacctctttcacatgagttaccatgaagtgaactctatcttttatgga

SEQ ID NO: 176714 - DNA, 572 bp, Homo sapiens
gtatactccggagaatgttcctatttaagcttattattgtcttgagcattaagcatctcacatcagttgttacatctggctttaagtctccaatgagccctggggaactcaatcccatcaaaggaatttcgagaggagttcacagctcctatctaccatagaagggagaaacaggataaggaatagatccctgataaagcacatgaacaaattaaatccattgttaatttgagtgactggcatagagaggtggcccctacaaaattgtcactttttagagtcacggtggttcacagaagaatagaaatcatcttttcctcttaacattatttccatgtactacagttccctctccctaaagtggtctacttgcatttgtcaacactgaaagcaaaaacaaagttgaatatacacccatggtgcatattgttaataaagaagatggaggcaattcagtggtattctaattgtaatgataaaaacttacctatttcatcagttcctctcctttgcccctaaaccccaaayactcactttgtctcttagatatcttgaagtagagttaataacta

SEQ ID NO: 176715 - DNA, 545 bp, Homo sapiens
agatatcagtgtttctattttgtaaatgaggaaaacaagatccagcaatttaaaataacttgctcacagtcgtacagctcttaagtagcagacctgggcttaaaaccaggttatcctgggtycaaaatcttaggttctttcacatatcctattcttcctcctggggctaaggtcacgcactatattttgtcactgaaacatacattaatgcacaatctctgagagagtattcctttgtattagcattatattaatatttatattagtgtgcatattatatgcagaaaacctcaagtccaaatatataagtaaaaaagtagagataatataaaaattattcctaatttccttcattaatccattggagatacataatttatgaaactctccttaagcctaatttatgttattagcctatgtcctttcttggtataataatttccataattttctacctgttaaataaagtggtactccttttaatttaaaaaaatcctttgagcatcatgggtgttacctggagtgacagcatagggaacgagatc

SEQ ID NO: 176716 - DNA, 545 bp, Homo sapiens
agatatcagtgtttctattttgtaaatgaggaaaacaagatccagcaatttaaaataacttgctcacagtcgtacagctcttaagtagcagacctgggcttaaaaccaggttatcctgggttcaaaatcttaggttctttcacatatcctattcttcctcctggggctaaggtcacgcactatattttgtcactgaaacatacattaatgcacaatctctgagagagtattcctttgtattagcattatattaatatttatattagtgygcatattatatgcagaaaacctcaagtccaaatatataagtaaaaaagtagagataatataaaaattattcctaatttccttcattaatccattggagatacataatttatgaaactctccttaagcctaatttatgttattagcctatgtcctttcttggtataataatttccataattttctacctgttaaataaagtggtactccttttaatttaaaaaaatcctttgagcatcatgggtgttacctggagtgacagcatagggaacgagatc

SEQ ID NO: 176717 - DNA, 545 bp, Homo sapiens
aagacttttttttaatcaaacagatcagtcaacagatactcatgaaccaatcactttggacaattgggaggatacaacaaaagtgaagacttggcctactttctgagagcttagaatctaaataaggaaatgaaacaagcacaaataagagagatcctacaacagaayggtggtggcatggaataagaaagggaacttgcaattaggaaactgacaagcctgtttgtaaccttacatttattgccagtgtagatttggtaaatctttaaaaatctctgaaccacatattcctcatccatagaagggagttaataaaagctctcacggtgttgtgaggtttacatgaataaccaatgttaatattttttctgaatataatggaggatttaaattgaaataatttggtaattgagtaagacagacatttagttccatcagtattcagtgaaagaagagatagtttctggaagatttcttctcatcgcatctaatgtttgagcagtttatattttagtattttctttcttttttctttacgaggcttg

SEQ ID NO: 176718 - DNA, 598 bp, Homo sapiens
atattatgtgccatatattatatgttatctattatacattgatacctataatatattatttattatattttattaatgtattatctattatatatgagggcatattgtatatgcatggttacttttattgttgttatttgatataattatagtatatttttcggrcaatctgaccatgagatgagggaaaatgattttaaagtagcttttactttttaaaataataatactatttctcagcaaactatcgcaaggacaaaaaaccaaacaccgcatgttctcactcataggtgggaattgaacaatgagaacacatggacacaggaaggggaacatcacacaccagggcctgttatggggtggggggagcggggagggatagcattaggagatatacctaatgtaaatgatgagttaatgggtgcagcacaccaacatggcacatgtatacatatgtaacaaacctgcacattgtgcacatgtaccctaaaacttaaagtataataataaaaaaaagacatagtggtaagttatacttttcatgaattaaactacagtaatagaaaaaataataataatactattgttgagataaaaa

SEQ ID NO: 176719 - DNA, 377 bp, Homo sapiens
aacagagcttgaccaaaatgtcagctgggcctctgactagctggatagctctaggaaagttgatttacttcactaaggcttggctttctcttctgsaaactggagacaaaactgcttacacctcattagatggcttggaagattaacagggaccatgtacgtaaagcattcaacataagacttggcacgtaacattgccaagtaaattgtagctttctaatcttccactacctggctttgtgactctaatcaagtaacttaaccccctctgagcctgggttgaagcctatgagctgacccattggctcttctgcttctgttttcctagttatgatactgggtcctaatgtatctgtggccactgccttggcccagtc

SEQ ID NO: 176720 - DNA, 421 bp, Homo sapiens
caatcctataggttgtaaataaatcagccttaaaastgttcacaacttaagcctcttttatcctcagctgagaaagccttctgtgatttcccgcccacggtgttgttagtaagggtggcagttctggactttgggggtgggagttgttaggaaaggtggcagttcattcggtattgtggggctcaaacttcaatactacaccattggcttaggagaaagaggggcctatgtcaccttttacttgcagcaaaaagacaaaagatccccatcatgtggtagaagctgttctgagttctgcagctcttggagtcccttagagatctcatttgatctcaagtctttaagtccatctctacacattgatgacatcctaatttatatctccagccaggacatcttcctgaattacatgctcataact

SEQ ID NO: 176721 - DNA, 421 bp, Homo sapiens
caatcctataggttgtaaataaatcagccttaaaagtgttcacaacttaagcctcttttatcctcagctgagaaagccttctgtgatttcccgcccacggtgttgttagtaagggtggcagttctggactttgggggtgggagttgttargaaaggtggcagttcattcggtattgtggggctcaaacttcaatactacaccattggcttaggagaaagaggggcctatgtcaccttttacttgcagcaaaaagacaaaagatccccatcatgtggtagaagctgttctgagttctgcagctcttggagtcccttagagatctcatttgatctcaagtctttaagtccatctctacacattgatgacatcctaatttatatctccagccaggacatcttcctgaattacatgctcataact

SEQ ID NO: 176722 - DNA, 487 bp, Homo sapiens
tatcccacccctggacactctaccctgtaactcggatccatcccctggtctccccacactagctcttggtctctttctttccttttaaaaaaaaaaatccttaatagatcctcccatataaaaactcatcctacctcttactgtcctttcaagaatcttttccatgggaagaaaatttaacctaatgggcattaatgggtgggaatgagtttgttgaattgccttccctggtgccatatttaaatattcacagttgatttctggagactatgtctccccaaaggagtgatkgcagtttttgaattaataaggtcagtgaagatatttgggagtggatgggcctttaaatgtccctcagtcaagccctgtgtgttggtaacttcctgctagtctggtcccaggctagaagagagggtagagatgaagcaacttgctctttctgattctctattctctcacctcccacttggacctgaaacccagttgg

SEQ ID NO: 176723 - DNA, 535 bp, Homo sapiens
accttttcacttaaaggtagcacagcayttcaagccttctctttggcacaacgaaatttccagcatcactacccttgtgctttggggtcactattaagtgcaataatggttacttgaacagaagcacaacaataccatgacagttaacgtgataactaagatagctaccaagtgaccaatgggtgggtggcatctacagaaaaaatacactgggaaaatggaggattcatgttctgggcagaatttcatcacactactcagaatgacatgcaattgaaaacttaaggattgttcatttctggaacttttcatttaatattttcagactgtggttgaccacaggtaactgaaaccatggataagtggggggctactatatactaatagtacttacttgcctacaacaaattgttttgaggatcttgtttaattagagagcagactaaaggacttaacactgtgtctggcaagtggcaagcttggctcaataaatggaaattggtattcattttaagacatgggatgtgggaaaggc

SEQ ID NO: 176724 - DNA, 535 bp, Homo sapiens
tctagagcatctctctgcatcaygcaagcaattcatcgtctgggacaatttccaagaaaggctcatctgctctgagcagcagctggctttggcacctgcacacctcctaccttgttcacagactttcagaaacaaaagcaaagagaaactgcaggcttcacccccaaactagaaatgatctctcccaagagtgtagctgccagccacgtctcagggacaggcacgattggggcatttggtagagaaaataagggattgtggacaggtgcaaatggattttccgcatcgaggtcacaggaggggaaatcccaccaatacagacaaatgaaatatccaacccattcccttggcctgtcacccaacacagagacaaggcttttataaatgctgcctgtcttcccatctggcacatcgctataaaaatttaaataaaatatcaaacacacacagcaccaacattatcatcgtcatcactcttctcgtggaaacaagaaattcaactaaatgaactctgtgctgtgaaccgcattttaat

SEQ ID NO: 176725 - DNA, 535 bp, Homo sapiens
tctagagcatctctctgcatcatgcaagcaattcatcgtctgggacaatttccaagaaaggctcatctgctctgagcagcagctggctttggcacctgcacacctcctaccttgttcacagactttcagaaacaaaagcaaagagaaactgcaggcttcacccccaaactagaaatgatctctcccaagagtgtagctgccagccacgtctcagggacaggcacgattggggcatttggtagagaaaataagggattgtggacaggtgcaaatggattttccgcatcgaggtcacaggaggggaaatcccaccaatacagacaaatgaaatatccaacccattcccttggcctgtcacccaacacagagacaaggcttttataaatgctgcctgtcttcccatctggcacatcgctataaaaatttaaataaaatatcaaacacacacagcaccaacattatcatcgtcatcactcttctcgtggaaayaagaaattcaactaaatgaactctgtgctgtgaaccgcattttaat

SEQ ID NO: 176726 - DNA, 450 bp, Homo sapiens
cacacattctaaaaataggggctaggccattctcatcagactggctaagaggtgaccaagagcagccctggggctcctacctctagagtgaagaaaggaaacctgggatggttaaaaaaggtgatcctcctggagccactcgggaggctgccttcacgaagagaggttggcgtcctattcccaactggtggcttaattgtccctgtgggaactcagagtgcccctcccccacctkgtgctttctcttgggggatggaaggacaagtatcctcaggagcttgagggttcacccgatgcagagagacactggccggaaggagatagtagatgcccctgactacagaggaaggagggcaggtaccgtgagagagcacaacccccctcctaccaatcgtatggcaaatggacagctaatgggagccaggctaagccatctcaaaaggaccccag

SEQ ID NO: 176727 - DNA, 587 bp, Homo sapiens
agatctcacatctagtgtatggcagaaaaagtgctcaaatccaggcctaagtgccctttgcacacagccatttgtggaatgggtcctcctctgtctacactctccattccaagctagcatactcctttctgatcctcagmcacaaaataaacaggtaagggatcagacccacttggccagagactgggcagccttgccgcattctgatgcaaaaacctgttttcaagctacttcaaacttttgatggttcttgaagtcatagagaggctttcagctgaatccaaggcaagcgaacagatttcccatctgcagggtattttgaaaccactcgcttcttactcatgtttcatttgtttgtttttctattacaaaaataatgcatactaattgtagagaatttggggagaaatacaaatcacccataattccaccacccagaaataaccattgttactattttggtatattgagatagttatttggggatattacttagaaattgctataatatataattgctgtttattaatttatgcaaatacatgaatatgattaacttgtatatatttagcttgttgtaaaactta

SEQ ID NO: 176728 - DNA, 459 bp, Homo sapiens
atatggttacaaaacagtttatcaatttaatgacagaatttcaggaagacaaaaaaacaaacaaaaaaccaaccaaccaatcaaacgaacaaacaaaaaaaacctcccagcttaaccagaggcagattgtaggagctatcctgactttaccaaaggaaaaatgggaccacctgcatgatttttaatcaaggaaataaattcaatcagtggttacaattcrgagtgatctgtgctgtgatgtggagagtgctggggaaggtgtggttgattctgccttggaagggaggtcaggaaggtcagggccctggaaaaaggacatttgaggaggagtacgccaggctgacaaagcgggaaagggattcccagcagtgggaatggcatggtcaaaggaacagggcatatccatatccacaatagcaagagcatgtgtaggtgagcctggatagacagcatgcaaat

SEQ ID NO: 176729 - DNA, 259 bp, Homo sapiens
actaatccattccagggtttctgtgaggcccaggttcttgtgttctttaccctcatttgaatctccccaataactcttaccgcagctgaggagagctgctgctgtcctctgaggcaattcttacttttcaaaatgcctcaaacccaaacacaagagtccagctcacccagaaccacagtgtcctgaaggcactgatgttaaccccattcctttccatattgctcaaactgwggccagctcctgtcacttcagttttcac

SEQ ID NO: 176730 - DNA, 574 bp, Homo sapiens
gtactaatccattccagggtttctgtgaggcccaggttcttgtgttctttaccctcatttgaatctccccaataactcttaccgcagctgaggagagctgctgctgtcctctgaggcaattcttacttttcaaaatgcctcaaacccaaacacaagagtccagctcacccagaaccacagtgtcctgaaggcactgatgttaaccccattcctttccatattgctcaaactgtggccagctcctgtcacttcagttttcactggacattgacaagctggagtatgttctgaggaagagtcctgggagttatgctgtatagaggactttggggcagagayaaggaaaagataagagttcagacttcaattctgtcttcaaatgcctgaagggtcaatatgtagagatggcactatattttgagaggatgcctctaaagggcagatacaggactgaaaaatggaatgtttgtggaggtcagtttcagctttctaactggaagtactctttaacactagaatgtgttacttcattaagtggtgagctccccatcaaagagggcaagcagaacaggat

SEQ ID NO: 176731 - DNA, 562 bp, Homo sapiens
tccagggtttctgtgaggcccaggttcttgtgttctttaccctcatttgaatctccccaataactcttaccgcagctgaggagagctgctgctgtcctctgaggcaattcttacttttcaaaatgcctcaaacccaaacacaagagtccagctcacccagaaccacagtgtcctgaaggcactgatgttaaccccattcctttccatattgctcaaactgtggccagctcctgtcacttcagttttcactggacattgacaagctggagtatgttctgaggaagagtcctgggagttatgctgtatagaggactttggggcagagacaaggaaaagataagagttcagacttcaattctgtcttcaaatgcctgaagggtcaatatgtagagatggcactatattttgagaggatgcctctaaagggcagatacaggactgaaaaayggaatgtttgtggaggtcagtttcagctttctaactggaagtactctttaacactagaatgtgttacttcattaagtggtgagctccccatcaaagagggcaagcagaacaggat

SEQ ID NO: 176732 - DNA, 556 bp, Homo sapiens
ggtttctgtgaggcccaggttcttgtgttctttaccctcatttgaatctccccaataactcttaccgcagctgaggagagctgctgctgtcctctgaggcaattcttacttttcaaaatgcctcaaacccaaacacaagagtccagctcacccagaaccacagtgtcctgaaggcactgatgttaaccccattcctttccatattgctcaaactgtggccagctcctgtcacttcagttttcactggacattgacaagctggagtatgttctgaggaagagtcctgggagttatgctgtatagaggactttggggcagagacaaggaaaagataagagttcagacttcaattctgtcttcaaatgcctgaagggtcaatatgtagagatggcactatattttgagaggatgcctctaaagggcagatacaggactgaaaaatggaatgtttgkggaggtcagtttcagctttctaactggaagtactctttaacactagaatgtgttacttcattaagtggtgagctccccatcaaagagggcaagcagaacagga

SEQ ID NO: 176733 - DNA, 352 bp, Homo sapiens
cctggttgctcctactcctttgtgtttgctgacccggctatgcccacccattcacagaatgaactgagttccctgtgcagcctgtttccatctctttggcaggttggaaatgcatttcttacttaacctgcatgtgaaggactttctgaagcatcactttccagcttttgatggcttgataaggatttcctgtcacttaaatgtatttttggtctaatagcataatactttaaaaaatagtatatgtaaaattgtatgatgattttacgaagagtacaggaggctgcaattaaagagacaaggaattttttwaaaaatcctgaaaatccaatgtacatttataatacaaatt

SEQ ID NO: 176734 - DNA, 506 bp, Homo sapiens
acaatttccctgtaaagggtcaaaaccaatgactgataaactccctgaacaagtaaaatctatttcctataagaagagatktttttcttatgattgtaccaataacattttctatggcattggcattgacagtctacaggatattttcacagatattattaatttttattccatttaattttcaaaatggccctgtgaattaggttaacctgcattttaaatataaggggaaactgatgctctgggagggattatatgtctgatatcacacaactaataagagaccaagtggagtcttcaatcctgctcttccggctctaatgttttttccactatttgccctgccttcaactggatacaactgctggggctttatcaccaagttgtttgcttgcaaaatggggctgttgtcttgggtagtggttcccaagagaaaactcagggactcatcctgatcaaagggagcgactaagaggctggtggttctctcagaagtcagaatagtg

SEQ ID NO: 176735 - DNA, 592 bp, Homo sapiens
ttggttctgccatttgctctgtgactccaggcaaccttgttaaatggaaccttttatgatataatttgtaattccactgtgatgccaaatctctcccaggatccagtgagatgaggttataatctgccttcgttttaagtccaagttaccttcttctcctgaggctcatrgggatgtctgagcattaaatgagataatatgaattaaacatttagcacaatgcctggcaaatcttcctctaagccttgttgggaagtttaaaagagataaggcacagtgccagaaacctcacaagtgctcagcaaaatgatagttattattattaagcaggtatttatttagccaaattctgcttcctctctctccctgaaacacagtgatgttctgtgtccaggcccacctagagacaacagatgtaaatgaaattaccacaaacatagtagtttaaaacaacactgttataaagataccccaaaaacaacagatgtggttagagaaaagaagctgcttcatattcttcactctctactctagaagacaggctggaatcaggcctcatgcatattgcatataaaataagacaatatttaaa

SEQ ID NO: 176736 - DNA, 572 bp, Homo sapiens
tgtgagaagaagagggccactgtcctccagatcccagaatgacagatccattgacagcttgcaccatgtacctggaaaagccacagaaaatcaacaacagcctggccgtgaaagcagctgggagtggaactgtacccttcagagccacaggggctgagctgcccaaggccatgggagcccacctcttgtatcagcatgacctggatgtgagacatggagtgaaaggacatcattttggaactttaagaggtaatgactacccagccagattttagactttcatgggacctgtagcccctttgttaaggctaatttctccaatctgaaacaggagcatttacccaatgcctgtacccacccccgctcaattatatcttgtaagtaactaactggcttttgattttacaggctcttaggtagaagagacttgccttgtctcagatagacttggacttttgggttaaygctggaatgaattaagactttaggaaactgttaggaaggcatgattggttttaaaatgtgaaagaaacatgagatttggaaggggccaggggcagaatgatatggtt

SEQ ID NO: 176737 - DNA, 533 bp, Homo sapiens
ctcatgagatctggtggttttataagcatttggttgtttmtcctgtgttcattctccttcctgccacctcgtgaagaaggtgccttgcttcccctttaccttcaactatgattataagtttcccagccacaatgaactgtgaatcaattaatcctctttcctttataaattactcagtcttgaacagttctttacagcagtatgaaaatggactaatataggttgcaagtgaaaaatacccatctttcattagcttaagggaaaaggaatttatctgttcatgaaacagcttaaatatggctggatctaagacttcagcccactgggaaatattttttatctcttcatttcatctgaactcaggatcttaacctcattctctcctactctaatcaatttggatatttcaggtagctccgaatttatatatatctagtaacagaacccctaaggcaagaggacatgttccccatattgatttcagtaggaaagtgccaaggagagctctcatagagccaaacagaattacattc

SEQ ID NO: 176738 - DNA, 533 bp, Homo sapiens
ctcatgagatctggtggttttataagcatttggttgtttatcctgtgttcattctccttcctgccacctcgtgaagaaggtgccttgcttcccctttaccttcaactatgattataagtttcccagccacaatgaactgtgaatcaattaatcctctttcctttataaattactcagtcttgaacagttctttacagcagtatgaaaatggactaatataggttgcaagtgaaaaatacccatctttcattagcttaagggaaaaggaatttatctgttcatgaaacagcttaaatatggctggatctaagacttcagcccactgggaaatattttttatctcttcatttcatctgaactcaggatcttaacctcattctctcctactctaatcaatttggatatttcaggtagctccgaatttatatatatctagtaacagaacccctaaggcaagaggacatgttccccatattgatttcagtaggaaagtgccaaggagagmtctcatagagccaaacagaattacattc

SEQ ID NO: 176739 - DNA, 346 bp, Homo sapiens
aggccaaggcaggtagatcacttgaacacargagtttgagatcagtctgagcaacatggcaaaaacccatctctacaaaataaaataaaataaaattagccgggcatggtacatgcctgtagtcccagccactcagaaggctgaggtgggcagatcacttgaaccctggaagtcaaggctgcagtgagttgaggctgtccagtctgggcaacagagtgagaccctgtctcgattttaaaaaaagggtggggggcagagattctccaacggaaaactgtaaggtggctactggtattggaagaacaggaatagggaaaagtactaagtctccacagaagattgctac

SEQ ID NO: 176740 - DNA, 532 bp, Homo sapiens
ctttcctgtagaacacataaacctgtgaatattttgtccagccttccaatttaagatgattatttatgtctgttctctgcaaagaaataaaccacttttcctcctaggttttaaatgtactkataattctttcttctggacgttttagctcattgctatgttatcttgagtgtgccacagaagataccttaaaagaatcagtatatcctaatttcttcctcatccttaaggcttcttgccactgtaaagctttacttggagattttcctgacttactgacttgtacagaactataagaaataccaccttttaaattttaggtcattaaaaatccatacgattgcctttgctctaaatatataaaaagatatctggaatgacagtatagtatagttcacacactgaaattcatattttcttatttaattaagggatatccattgattcaagcttgccagcttttcttgaggcataactatgagaataaatatccagaccacccacatcacatagaatacattgtaaaacatct

SEQ ID NO: 176741 - DNA, 518 bp, Homo sapiens
atcaaagactatgcccagaaagaaaagcttgggaatatttcaaaaatacacctaagacaaatacatttgtctaactaaataaagtctctcctggtctgttttcaattgcacaaagarggcaggtgagaaggagaagagcaagtcttcaccaccccccttctctgatcctctgccacaatgaggctttcccctagacgggacagagaaatgttctccaattttcaaacacctgctttatctgtgcctcagtgtaactgctctaatgctcttggggccttctgcaaagcacagttctgtactcctccctcaggcagttccagttccctacttgtccacaattccccaaatgatgctagtgacaattataatatcatactgaagtgtgaaaggaggaagggaatgcttcaaaagggccatctaccacctgattagaatgtgcagaagagagaagagctgcagcccctcaagacccagggcagtgtcctttaccttttgaaactagtatgtgagcacccagt

SEQ ID NO: 176742 - DNA, 518 bp, Homo sapiens
atcaaagactatgcccagaaagaaaagcttgggaatatttcaaaaatacacctaagacaaatacatttgtctaactaaataaagtctctcctggtctgttttcaattgcacaaagagggcaggtgagaaggagaagagcaagtcttcaccaccccscttctctgatcctctgccacaatgaggctttcccctagacgggacagagaaatgttctccaattttcaaacacctgctttatctgtgcctcagtgtaactgctctaatgctcttggggccttctgcaaagcacagttctgtactcctccctcaggcagttccagttccctacttgtccacaattccccaaatgatgctagtgacaattataatatcatactgaagtgtgaaaggaggaagggaatgcttcaaaagggccatctaccacctgattagaatgtgcagaagagagaagagctgcagcccctcaagacccagggcagtgtcctttaccttttgaaactagtatgtgagcacccagt

SEQ ID NO: 176743 - DNA, 526 bp, Homo sapiens
tggcttgttacctgtcttaatctgtcttgtgctgatacaacaaaatatctcagactgggtaatttataaaagatagatatttttctctcaaagttcctgaggctggaaagtctgagatcaaggcaacagcaggtttagttgtttagtgagggctgcatccattakaggggagtaacattatgctctcacatggaggaagggcaagagacaaaagctttgtgaagcctcttttataagagccttaatctcattcatgaggggaggagccctcatggactaatcacctcttaacaatcccacctcttactaccatcacattggcaacatctgagatttggaggggccgctttcaaatcatagtactacccatgctcttgcaagtccctcccaggaactggaacactaccagaaaatccccacgccttgacagacatgctacctgtgaacacatccccagatggtgaacatctgcctcatctgccaggaggcatacctgtgccctgtttctgttgagacattaaggagc

SEQ ID NO: 176744 - DNA, 595 bp, Homo sapiens
cttctttgttaattgtacctatagcagttttagtataatttctcaattgaatttactaaatgaaataacattctatatcttgattataagactgtcttaatttggtcccttttrgcaatgaattttaattcaaggaacaatttctcattgaactacatgaatgaatttcctaattgtacccatcatagacaagctcatattaggccttcacctggggcatataagtatttttctagggagcttaatggcttgctggttgaatgagtattttttgccttgttgagaattgaggtttactttatcactaaaacccactggctttcttaatctcctttttttgtcctcctgtacctattaatcacacagaactgcttattcttcatcatcttggctttgatggatacttcacgtaataagtcccaaccttcagcactgagtaattacttggggactcctacttataaaagttcaataactatacaacagcgatactgttgatatatgagctctttttctttcttgctttctcaactacatgtaccgaaatgacagaatgtctttattttgcctctgtaatttgcaattgcttatgtta

SEQ ID NO: 176745 - DNA, 595 bp, Homo sapiens
cttctttgttaattgtacctatagcagttttagtataatttctcaattgaatttactaaatgaaataacattctatatcttgattataagactgtcttaatttggtcccttttgrcaatgaattttaattcaaggaacaatttctcattgaactacatgaatgaatttcctaattgtacccatcatagacaagctcatattaggccttcacctggggcatataagtatttttctagggagcttaatggcttgctggttgaatgagtattttttgccttgttgagaattgaggtttactttatcactaaaacccactggctttcttaatctcctttttttgtcctcctgtacctattaatcacacagaactgcttattcttcatcatcttggctttgatggatacttcacgtaataagtcccaaccttcagcactgagtaattacttggggactcctacttataaaagttcaataactatacaacagcgatactgttgatatatgagctctttttctttcttgctttctcaactacatgtaccgaaatgacagaatgtctttattttgcctctgtaatttgcaattgcttatgtta

SEQ ID NO: 176746 - DNA, 595 bp, Homo sapiens
cttctttgttaattgtacctatagcagttttagtataatttctcaattgaatttactaaatgaaataacattctatatcttgattataagactgtcttaatttggtcccttttggcaatgaattttaattcaagraacaatttctcattgaactacatgaatgaatttcctaattgtacccatcatagacaagctcatattaggccttcacctggggcatataagtatttttctagggagcttaatggcttgctggttgaatgagtattttttgccttgttgagaattgaggtttactttatcactaaaacccactggctttcttaatctcctttttttgtcctcctgtacctattaatcacacagaactgcttattcttcatcatcttggctttgatggatacttcacgtaataagtcccaaccttcagcactgagtaattacttggggactcctacttataaaagttcaataactatacaacagcgatactgttgatatatgagctctttttctttcttgctttctcaactacatgtaccgaaatgacagaatgtctttattttgcctctgtaatttgcaattgcttatgtta

SEQ ID NO: 176747 - DNA, 595 bp, Homo sapiens
cttctttgttaattgtacctatagcagttttagtataatttctcaattgaatttactaaatgaaataacattctatatcttgattataagactgtcttaatttggtcccttttggcaatgaattttaattcaaggaacaatttctcattgaactacatgaatgaatttcctaattgtacccatcatagacaagctcatattaggccttcacctggggcatataagtatttttctagggagcttaatggcttgctggttgaatgagtattttttgccttgttgagaattgaggtttactttatcactaaaacccactggctttcttaatctcctttttttgtcctcctgtacctattaatcacacagaactgcttattcttcatcatcttggctttgatggatacttcaygtaataagtcccaaccttcagcactgagtaattacttggggactcctacttataaaagttcaataactatacaacagcgatactgttgatatatgagctctttttctttcttgctttctcaactacatgtaccgaaatgacagaatgtctttattttgcctctgtaatttgcaattgcttatgtta

SEQ ID NO: 176748 - DNA, 551 bp, Homo sapiens
gcaacttttgcctgcctcttcaactacaaaggtataattcctgaaatattaaaaaaatttacagtgagtatgtgtcaaccatttatttaactcattaatkaggaaacccatggggtaacaaagttgatttaaagaaatacgtaagacacaaatacatttaagatgaatagaaaactaaaagcaaagaaagcaggaataagaatgaaaagttagttaaccaaatgaaaatgttggttatgtactacagagaaatttaaaatgtagcctttgggattatctgctctactaaccaaaaaccagtttatccattttctataaattaatatctaactctacaaagatgtaaaatgcctgggctttaattgatggataatggtaagtgagtaacagtccccaagaatcagatgattcttgggcagcttgctagatcacgtcctagatgactgagaacatcacagtcttctttatgccttatattcttaattatcaaaactcatagcactctaccctttggtcaccagggctctcactacattgctctcttttccact

SEQ ID NO: 176749 - DNA, 551 bp, Homo sapiens
gcaacttttgcctgcctcttcaactacaaaggtataattcctgaaatattaaaaaaatttacagtgagtatgtgtcaaccatttatttaactcattaatgagraaacccatggggtaacaaagttgatttaaagaaatacgtaagacacaaatacatttaagatgaatagaaaactaaaagcaaagaaagcaggaataagaatgaaaagttagttaaccaaatgaaaatgttggttatgtactacagagaaatttaaaatgtagcctttgggattatctgctctactaaccaaaaaccagtttatccattttctataaattaatatctaactctacaaagatgtaaaatgcctgggctttaattgatggataatggtaagtgagtaacagtccccaagaatcagatgattcttgggcagcttgctagatcacgtcctagatgactgagaacatcacagtcttctttatgccttatattcttaattatcaaaactcatagcactctaccctttggtcaccagggctctcactacattgctctcttttccact

SEQ ID NO: 176750 - DNA, 373 bp, Homo sapiens
gcatgagaatccctgaatattcagggggcagcagtacaaggctttataacaaatgtcaacaagtgaaaagcagacacttagaattaaatgccacaaaggcaaacattccattttccattttttttaagaaaaacttgagggtggtcttgtagacagagtaactgattkcaagacaagaataggatattttaccttcctttgtctcatatatggcacagagaaaatgccattgcaccagtagtcaaggagctgcttctagtttcagttctgcctctagtttaacttgtaaccttggagaaagcatcttaatattctgaccttagttttcattttttaaataaagacattagactagatgctctgtaagtccctt

SEQ ID NO: 176751 - DNA, 591 bp, Homo sapiens
atgtaacattatatattatcaagcatttactatgctctagtcatggtcttatgtgtctattacatgtatattattctacttaattctcatagcaattgcctgccataggtatgaatactttgttgaagaagttaagtgactttcctatggtcacacaggcagaaagtggcaatgcttcagagcattgctctgcaatcatgtgccacaggatgctaagtcttgggccagtattccagagtaaatttcatgtacaaaactagacatgctcatgtacaacactgactgctgtcatcaataaggaataagagacaaatgacaactgcaaattcataaatcatggttttaaagaaaatttgtcctttctattttagtttgtttccaaaatggccctagctctatccacaatgtgtttatcaggtgactggctaggtctggttcatgaaggggtgaaaaaasaggattttgtaatagccaagtgcacttgaataccaaatgtgggttcttccaagtcagtcattagttaattggtctttccctacctagtaatctggtctagtgtttccatctacatttaaataacgctacttgtcc

SEQ ID NO: 176752 - DNA, 359 bp, Homo sapiens
acattgttgctcctctgagatcagttaactgccttctacaagtcaatcaccagcttccataaattctaataatctatcaaattctttctgttgtaatatcattttgttcaaaattttaccaattaccattcagctgtaggtatgaaaactgaaagtattcttactattcaccaatcacagaacaagaataggtttcaacaggctattaacaaatgggaaaaacaaagataaaagtcaaagtatgactctattagaccagatgcatgaagtttgatctacaaayatatttattatattgtctaggatggggaaaatattgcaagtcacatttggtaaataagattcatttcaaattgtaa

SEQ ID NO: 176753 - DNA, 486 bp, Homo sapiens
ttatacattgtagaatgtaaaatggtacagccactctggaaaactgtttgaccatttcttacaaaatgaaagatgtacttactatatgacccagcaataacaaccttgggcatttaccccagagaagtgaaaacttacacacacatacacacacacagacacacacctgtacatraagattcatagcagctttattcacaatagcaaaaactagaaataatccaaatgtccttggataaatggttaaacaaattctggtacatccataaaatggaacactgctcagcaataaaaagaaacaaactatatgtgcagcaaactgaatggtattcaagtgcatcatgcttaatgaaaacaaccggtctcaaaaagttgcatactatatgattccattcatataatattctcaaaatgacaaaattacagaggctaagaacatattagttgttgtcagggtggatgggtggagtataaaaaaatgacatg

SEQ ID NO: 176754 - DNA, 321 bp, Homo sapiens
ctggcacctcctcctcactctcttgttccctctctcgccatgtgacctggctgctcccactttgccttcygccatgattggaggcttcctgaggttcttacaagaagcagacaccagtgctgtgcttgcacaacccacagagccgtgagccaaataaacctcttttcttcataaatgacccaacctcaagtattcccatatagcaaaacaaaatggactaatacaggccaggcgtggtggctcatgcctgtaatcccagcactttgggaggccgaggtgggtggatcacgaggtcaggagttcaagaccagcctggccaag

SEQ ID NO: 176755 - DNA, 496 bp, Homo sapiens
tacattccttggcttgttgtccctttctctattttcaaagccagcagtctaaactcttttttattgacctcctgcctccatcttttaagratgcttgtaattatgttggacccacacagagaatcaaggataatcccaatatccttaatttcaacacatacgcaaattccttttaccatgcaaggagacataatcacaggctccagggattaggatgtagacatcatgggggcagggaggggcacacattttcaaccacaaatgggcaatgttcctccctatttgttaagataacagcaaacgaaccaaactgaaaggccacaaaatgagcaagagtactttatatactgtaaagtattttgctcagagagccccatgatgatgaagattattcctttctttttttttggccctgtctccttcctgtggaaatcagatagattctttagacattctcttgattccctagacatcgtaagagcaaaccacatactaa

SEQ ID NO: 176756 - DNA, 496 bp, Homo sapiens
tacattccttggcttgttgtccctttctctattttcaaagccagcagtctaaactcttttttattgacctcctgcctccatcttttaaggatgcttgtaattatgttggacccacacagagaatcaaggataatcccaatatcsttaatttcaacacatacgcaaattccttttaccatgcaaggagacataatcacaggctccagggattaggatgtagacatcatgggggcagggaggggcacacattttcaaccacaaatgggcaatgttcctccctatttgttaagataacagcaaacgaaccaaactgaaaggccacaaaatgagcaagagtactttatatactgtaaagtattttgctcagagagccccatgatgatgaagattattcctttctttttttttggccctgtctccttcctgtggaaatcagatagattctttagacattctcttgattccctagacatcgtaagagcaaaccacatactaa

SEQ ID NO: 176757 - DNA, 355 bp, Homo sapiens
ctgtgggaagtgaaataaccaatagttgatgattcaaagattggtgatagtgcccaacgaaagtcactacctactatgtgccagctcctttgtctatgttttctctaatcctcatgtcaaatcagctaattttgcaactgatgtgcaggctgattargtaatttctccaaagtccaatggtaataagcagcagagttgagagactgaaatccagacatttctaatgccaaactccacataccttctactctgtcacactgcctccttaaagttgaaatggagtgttttgcctgccctgctgcccatgtccctaaaactgccactaaatatgggccttctgggactatcagtcaca

SEQ ID NO: 176758 - DNA, 622 bp, Homo sapiens
ttgaggtacattttttattgtcaacccaaaacttcaaaatggtgttttattaatataaaagttataagaataggcatacctgactcccaaactagaaatgtggctgatcaacctcacaggcatgaaatatagatggctgtgtgagcacttgtacttcatcagtgacaacagtgttagttccctgtgcttttactcttagaaacatctgttagattttggccaatgatacaaactgacagaggaaaattatgcatagtactgtaggtggactcctgacaagatctggattagcaatatgctgcaatcatttttttaagtatacatgtaaatacatatatccctcatgcacaagcacacaaagatatacatgcaatattttgaatcagatagctatgggtattgactcaatttatatcatttattaactgtaatttacaatgaactgataggaaatataatccttcccattgttgtgaattttaaattagatgatacatgtcaaccagttcccacaatcaacacgtgaacaagcatktttggatattcacactcacacatgcacacacacacaatcctaaacagcatacccttttctagggaagaaaaataaagaatttccaat

SEQ ID NO: 176759 - DNA, 615 bp, Homo sapiens
gagtttttttggatagaaaaataacttgattttttttgtgtgactgctacaaataaattatctttaagcaaaggaaggcacttagctgtatttaactttgctctgaagttagaaagtgaggatacattgaattttaataaatcaacgattataattcaaccaagaaacagttttataaagggatgaatatttgttatgatggaaagaatccctttgtagtacaaattacgacacatggcgtgtgttttgcaaattaaaatttacaaagttttttagaagygtagaacatcagtactcaaaaaccatttttttttcaataattcactctggaacaccaaaggaatgcatgtaaatttattatttgagagtcacttttatggataggtacagtgttgtgtttgagaagggaaactgctcctttggaagaggaataaggatgaacaggacatagcacttacctttcagtggttcacaaagtaagtgaagacatagacacgtacataaacaacaataccaccaccaggctatgaaaagaatcataagaatattttgtttgctggaagggagaagagaataaattaatgttggctaattcattaactttgcatctgaaag

SEQ ID NO: 176760 - DNA, 615 bp, Homo sapiens
gagtttttttggatagaaaaataacttgattttttttgtgtgactgctacaaataaattatctttaagcaaaggaaggcacttagctgtatttaactttgctctgaagttagaaagtgaggatacattgaattttaataaatcaacgattataattcaaccaagaaacagttttataaagggatgaatatttgttatgatggaaagaatccctttgtagtacaaattacgacacatggcgtgtgttttgcaaattaaaatttacaaagttttttagaagcgtagaacatcagtactcaaaaaccatttttttttcaataattcactctggaacaccaaaggaatgcatgtaaatttattatttgagagtcacttttatggataggtacagtgttgtgtttgagaagggaaactgctcctttggaagaggaataaggatgaacaggrcatagcacttacctttcagtggttcacaaagtaagtgaagacatagacacgtacataaacaacaataccaccaccaggctatgaaaagaatcataagaatattttgtttgctggaagggagaagagaataaattaatgttggctaattcattaactttgcatctgaaag

SEQ ID NO: 176761 - DNA, 615 bp, Homo sapiens
gagtttttttggatagaaaaataacttgattttttttgtgtgactgctacaaataaattatctttaagcaaaggaaggcacttagctgtatttaactttgctctgaagttagaaagtgaggatacattgaattttaataaatcaacgattataattcaaccaagaaacagttttataaagggatgaatatttgttatgatggaaagaatccctttgtagtacaaattacgacacatggcgtgtgttttgcaaattaaaatttacaaagttttttagaagcgtagaacatcagtactcaaaaaccatttttttttcaataattcactctggaacaccaaaggaatgcatgtaaatttattatttgagagtcacttttatggataggtacagtgttgtgtttgagaagggaaactgctcctttggaagaggaataaggatgaacaggacatagcacttacctttcagtggttcacaaagtaagtgaagrcatagacacgtacataaacaacaataccaccaccaggctatgaaaagaatcataagaatattttgtttgctggaagggagaagagaataaattaatgttggctaattcattaactttgcatctgaaag

SEQ ID NO: 176762 - DNA, 285 bp, Homo sapiens
gattggtagcctattttcagcatccttaaagaaaataaattttaaccaataatttcatatcctgcyaaactaagcttaaaagtgaagtgaagcaaatgctaagggaatatgtttcaactagactagccatacaagaggtccttaagggagtgctaaacatggaaaagaaagaatgacagtcataccacaaaagcacatttaagcacatagcacacaggcactataaagcaaccacacaatcaagtctacataacaatcagctagcaacgtgataacagaattaaa

SEQ ID NO: 176763 - DNA, 285 bp, Homo sapiens
gattggtagcctattttcagcatccttaaagaaaataaattttaaccaataatttcatatcctgccaaactaagcttaaaagtgaagtgaagcaaatgctaagggaatatgtttcaactagactagccatacaagaggtccttaagggagtgctaaacatggaaaagaaagaatgacagtcataccacaaaagcacatttaagcacatagcacacaggcactataaagcaaccacacaatcaagtctacataacartcagctagcaacgtgataacagaattaaa

SEQ ID NO: 176764 - DNA, 403 bp, Homo sapiens
tggaatcatcatcgaatggaatcaaatgaaatcatcatcagatggaatcaaatggaatcatcactgaatggaatcgaatggaatcatcgaatggactcgaatggaatcatagaatggattagaacggaatcatcgaatggactcgaatggaatcatcatccaatggaatyggatggaatcatcatcgaatggaatcaaatggaattaatgaatggaattgaaaggaatcatcttcgaatgaaatcaaatagaagcatcgaatgaaatcgaatggaatcggagaatggattcagatggaatcatcatcaaatggaatcgaatagaaggattgaatgaaatcaaatggaattatcatccaacggactcgtatggaatcatcatcgaattgactcatatggaatca

SEQ ID NO: 176765 - DNA, 403 bp, Homo sapiens
tggaatcatcatcgaatggaatcaaatgaaatcatcatcagatggaatcaaatggaatcatcactgaatggaatcgaatggaatcatcgaatggactcgaatggaatcatagaatggattagaacggaatcatcgaatggactcgaatggaatcatcatccaatggaattggatggaatcatcatcgaatggaatcaaatggaattaatgaayggaattgaaaggaatcatcttcgaatgaaatcaaatagaagcatcgaatgaaatcgaatggaatcggagaatggattcagatggaatcatcatcaaatggaatcgaatagaaggattgaatgaaatcaaatggaattatcatccaacggactcgtatggaatcatcatcgaattgactcatatggaatca

SEQ ID NO: 176766 - DNA, 496 bp, Homo sapiens
tccactcaattccatatgatgatgattccattcgattccattcgatgattccattctattctattcaatggtgattccattcgattccattcaatgatgattctatttgtgtcccttagatgattccacatgattccattagatgatgatactatttgagcccatccaatgattcccttcgattccattcgatgaggattccattcgattcaattcattggtgattctattcaattcaattctttgattcmattccattccattcgacaatgattccattcgatttctttcgatgattccactcgattccacttgacattgattccattcgattccattcaatgattccatttgattccagtggatgatgattgccatcgattccattcgatcactccattctgttccatttgatgatgattacattcgattccatttgatgattccatctgattctattcgaggattccatttgattccattcgatgatgattcc

SEQ ID NO: 176767 - DNA, 496 bp, Homo sapiens
tccactcaattccatatgatgatgattccattcgattccattcgatgattccattctattctattcaatggtgattccattcgattccattcaatgatgattctatttgtgtcccttagatgattccacatgattccattagatgatgatactatttgagcccatccaatgattcccttcgattccattcgatgaggattccattcgattcaattcattggtgattctattcaattcaattctttgattccattccattccattcgacaatgattccattcgatttctttcgatgattccactcgattccacttgacattgattccattcgattccattcaatgattccatttgattccagtggatgatgattgccrtcgattccattcgatcactccattctgttccatttgatgatgattacattcgattccatttgatgattccatctgattctattcgaggattccatttgattccattcgatgatgattcc

SEQ ID NO: 176768 - DNA, 558 bp, Homo sapiens
ccttgaatgatgattccacttgagttcattcaatgattctattcgattccgttcgatggtgattcaattctmttatattggatgattccactcgattccatttgatgattattccattggagtccacttagtgaatcccttagattctactcgacggatgattccattcgagtccattcgatgataccattcaattccattcgttgatgcttccattcaagtgcattcgatgatatcattcgattccatttgatgataattccatttgattccatgcgatgattctattcgattccattcaatgataattccattcaattcagtgattcctctggactccatttgatgatgattccattcaatgattccattcgattctattcgaaaatgattccatttgaatccattggatgatgattccattagattccatttgatgattccattcgattccattcgacgatgattccattcgattccgtttgatgattccattctattctattcgatgatgattccattcgattccattcgatgatgattggattcgattccatt

SEQ ID NO: 176769 - DNA, 558 bp, Homo sapiens
ccttgaatgatgattccacttgagttcattcaatgattctattcgattccgttcgatggtgattcaattctcttatattggatgattccactcgattccatttgatgattattccattggagtccacttagtgaatcccttagattctactcgacggatgattccattcgagtccattcgatgataccattcaattccattcgttgatgcttccattcaagtgcattcgatgatatcattcgattccatttgatgataattccatttgattccatgcgatgattctattcgattccattcaatgataattccattcaattcagtgattcctctggactccatttgatgatgattccattcaatgattccattcgattctattcgaaaatgattccatttgaatccattkgatgatgattccattagattccatttgatgattccattcgattccattcgacgatgattccattcgattccgtttgatgattccattctattctattcgatgatgattccattcgattccattcgatgatgattggattcgattccatt

SEQ ID NO: 176770 - DNA, 349 bp, Homo sapiens
cattcgatgattccatttgagcctgttcgataattccatttgagtccaaccaatgattccattcatttccattcaatgattccattcgagtccatttgatcattccggtagggtccattcgatgttgattccattggagtgcattcgatgattccattcgagtccattttaggatttgattcgagtcctttcgatgattccattcgattccactcgatgatgatttcattcgagtccattcgacacttccaatcgattccatttgatgwttccattcgagtccaattgatgattcaattcaattccattcgatgatgattccgtacgataccattctgtgatgattcca

SEQ ID NO: 176771 - DNA, 349 bp, Homo sapiens
cattcgatgattccatttgagcctgttcgataattccatttgagtccaaccaatgattccattcatttccattcaatgattccattcgagtccatttgatcattccggtagggtccattcgatgttgattccattggagtgcattcgatgattccattcgagtccattttaggatttgattcgagtcctttcgatgattccattcgattccactcgatgatgatttcattcgagtccattcgacacttccaatcgattccatttgatgattccattcgaktccaattgatgattcaattcaattccattcgatgatgattccgtacgataccattctgtgatgattcca

SEQ ID NO: 176772 - DNA, 349 bp, Homo sapiens
cattcgatgattccatttgagcctgttcgataattccatttgagtccaaccaatgattccattcatttccattcaatgattccattcgagtccatttgatcattccggtagggtccattcgatgttgattccattggagtgcattcgatgattccattcgagtccattttaggatttgattcgagtcctttcgatgattccattcgattccactcgatgatgatttcattcgagtccattcgacacttccaatcgattccatttgatgattccattcgagtccaattgatgattcmattcaattccattcgatgatgattccgtacgataccattctgtgatgattcca

SEQ ID NO: 176773 - DNA, 382 bp, Homo sapiens
aaggtggatttgttctatagagcatcaagtgatgttcagaaccagtgttgaaaatggctaatccaaacagttttaaaatctcacctgaatacatttgaactagtttcctttagaaaacagtaaagtgttcaagcagggtctgagtragtaactacttggcagagatgtggtagaagggacacatcagatgggtcactggacagtattgccattctatacaatcacaaaaaaatctgagataaaaggcaccttaaaagatatcaaatgaatttttcaaaaggaaaacacatctttacaatgactaagtggcaacgtgctcctggatgtgactgctactcatgatggtgcccattgaagcatcaaagcacttcttttttttttg

SEQ ID NO: 176774 - DNA, 382 bp, Homo sapiens
aaggtggatttgttctatagagcatcaagtgatgttcagaaccagtgttgaaaatggctaatccaaacagttttaaaatctcacctgaatacatttgaactagtttcctttagaaaacagtaaagtgttcaagcagggtctgagtgagtaactacttggcagagatgtggtagaagggacacatcagatgggtcactggacagtattgccattctatacaatcacaaaaaaatctgagataaaaggcaccttaaaagatatcaaatgaatttttcaaaaggaaaacacatctttacaatgactaagtggcaacgtgctcctggatgtgactgctrctcatgatggtgcccattgaagcatcaaagcacttcttttttttttg

SEQ ID NO: 176775 - DNA, 595 bp, Homo sapiens
aatcgcaggtgtctttatgttagattagctcaatttattttggtcattttggcatcttgggtttgcaccattaactgttgtctaaaacatgaaaaatctaatgtcatgatggctaaggataagctgagacccccataagaaacctttatttcccatcatttattatgttcattctcctatttaatgaagctagcttttatgtaatattggatcmagtgtgagaaaatgtattactgcctgactagagtagctcaggctttttacacagcataagtgcactaaaatccaagcttcaaactaggattctttctctgttgggtaaactttaattattgatcctatttagggttcacctttttggtgagaccttgtatctcccatctgctctcaaaatgaatcactcttcttctgtgtgattcccagggcactattacgttttttttttaaatgtcataatcattatttttagcagttttgggttgatagcataattgagtggaaagtacagacagtccacatccatagacagcctcctcagctatccacatcccacatcacagtaatgcaacttgttataatcaaaccttcattgaca

SEQ ID NO: 176776 - DNA, 579 bp, Homo sapiens
aatggaatcattgaatggaatggaatggaatcatcaaagaaaggaatcgaagggaatcatcgaatggaatcaaacggaatcatcgaatggaatggaatggaatcatcatcgaatggactcaaatggaataatcttcgaaaggaatcgaatggaatcgaatggaacaatcaaatggactccaatggartcatctaatggaatcgagtggaatcatcgaatggactcgaatggagtcatcatccaatgaaatcggatggaatcaatgaagggactcgaatgaaatcatcgaatggactctaatggaatcatcatcaaatgaaattgaatgggatcatcatcaaatgtaattgaatggtatcattatctaaagaaatccagtggaatcaccaaatggactcgactgtaatgattaaatggactcgaatggaatcatcaaatggaatcgaatggaatcatcaaatggagtcgaatggaagtgttgaatggactccaatggagtcattgaatggactctagtagaatcattatgaaatggaatcaaatggaatcatcaaatggactcgaatggaatcattggat

SEQ ID NO: 176777 - DNA, 579 bp, Homo sapiens
aatggaatcattgaatggaatggaatggaatcatcaaagaaaggaatcgaagggaatcatcgaatggaatcaaacggaatcatcgaatggaatggaatggaatcatcatcgaatggactcaaatggaataatcttcgaaaggaatcgaatggaatcgaatggaacaatcaaatggactccaatggaatcatctaatggaatcgagtggaatcatcgaatggactcgaatggagtcatcatccaatgaaatcggatggaatcaatgaagggactcgaatgaaatcatcgaatggactctaatggaatcatcatcaaatgaaattgaatgggatcatcatcaaatgtaattgaatggtatcattatctaaagaaatccagtggaatcaccaaatggactcgactgtaatgattaaatggactcgaatggaatcatcaaatggaatcgaatggaatcatcaaatggagtcgaatggaaktgttgaatggactccaatggagtcattgaatggactctagtagaatcattatgaaatggaatcaaatggaatcatcaaatggactcgaatggaatcattggat

SEQ ID NO: 176778 - DNA, 579 bp, Homo sapiens
aatggaatcattgaatggaatggaatggaatcatcaaagaaaggaatcgaagggaatcatcgaatggaatcaaacggaatcatcgaatggaatggaatggaatcatcatcgaatggactcaaatggaataatcttcgaaaggaatcgaatggaatcgaatggaacaatcaaatggactccaatggaatcatctaatggaatcgagtggaatcatcgaatggactcgaatggagtcatcatccaatgaaatcggatggaatcaatgaagggactcgaatgaaatcatcgaatggactctaatggaatcatcatcaaatgaaattgaatgggatcatcatcaaatgtaattgaatggtatcattatctaaagaaatccagtggaatcaccaaatggactcgactgtaatgattaaatggactcgaatggaatcatcaaatggaatcgaatggaatcatcaaatggagtcgaatggaagtgttgaatggactcsaatggagtcattgaatggactctagtagaatcattatgaaatggaatcaaatggaatcatcaaatggactcgaatggaatcattggat

SEQ ID NO: 176779 - DNA, 518 bp, Homo sapiens
ttttgtaattggcttaagtttacatttcttcaaataatatttataaatgcccaataagcatatgaaaagatgctcaacatcattaatcattagggaaatggaaatcaaaatcacaatgagatattacttcatgcatactaatatggttataataaaaatatttaattaagaaacagaaactaacaaatgtccagaatgtgcagaaattagaatactcataaattgctgatggaagtgtaaatagygcagttgctgtgaaaagtagcttgatggtgtctcaaaaagctaaatacctctacacaattaccatagaacttgataattccactttcagatatatatccagggactcaaacagatacttttataccaatgttcattgcagcattatttacaatagccaaaagattgaaataacccaaatgtccatcaacagaagaatgtataaagaaaatgtggtatatgaatacaatggaatattattcagtccaagaaagaaatgatgttctgatacatgc

SEQ ID NO: 176780 - DNA, 561 bp, Homo sapiens
agttagtacaattttcattgttctcaacatagatcaaatgaattttttaagagctggatcttatgggtgcggatcattccagagatgctgcagtgttaaagtttgcctttttacttgtgtacttagtcacttagtattatccagtggtgctggatgggattaatgatgagtatgaggctgctttgcggatttatgcccttgtggtatcrtagtataagaattcaagttttagcttcattgaaaatcagaaggcattataatttattttaaacctgtagccattcaaaatccctttagagttatctttcattcagtagttaggtcatatcttagtaaacctatatttttgtttgtgttagttttgagtgtgtgtgtgtgtgtgtgtgtgtgtgtgtggtgatgggatccaaatataaatagttacattttcctgtaactatgatccttatctcaaaataataagagacgtatattatttttgttgtctgtttcaacatttcagtcatattatatttgatttattgcatatctagtaaacaaatttaatcattattataccca

SEQ ID NO: 176781 - DNA, 477 bp, Homo sapiens
acacttcgtttcgaaaggggctttggagtggtacaattcattctctgcaaacctgtggcatttaggtttatttctttctgattttggaattaggaaaattgatcgtggtacaaccatgtgcaacttattttcctaatacaaatgaacaagatgttcaatacaattccaattcattttcagttgtcagctagttactcacacactcactgaagctgctgtttttggatggctatgccaaatttytaataattattccagaataccaaccaaatgccagtgtcgattttggattagtgtagagaggtaaagagaaagaggcagcttcattcttctcattgcttataacaaaaggtccataaagaatacacgttaggtatatgccaaccttgctgatagcaaaaaaaaaaaaaaaaaaaaaaaaatcgaaattggggatgggttggctaaatccagtttatagtacacatgagaaaaaca

SEQ ID NO: 176782 - DNA, 598 bp, Homo sapiens
cctttacttctttaagcatggtttcctttaattccttgaacatataagtgctttaaagtcattgtttgctaagtctgatatctgwgccctcaagtagtctgttgattacttttccctctccttatgttatgttatgagtcacataacatttcctgtttctgtgaatgtctcgtatttttgttgttgttgaaaactggacatgttatataatatagcaactctgaatactgatacttccaacccaggacttactgtttttgtttatttctttagtgatgtggctagtttattttagtgaagtctattttcctgcagtgtgaaatctcttaacgttgctcctcaaaaggtacagggttggtcatgtgcacagccccctcgggatggcaatcattttagcaaagctctctttgactgtctctttccctgctctctctctgttacgttctctgcctctgttggtataagccctaggtgttaggctcctctagttgctggtcattctattgttttcaacaatgccctagggtgtaaattgttccacattgtgttccaattaaatttaagcatctttgctggggtagtttttgaggtcagtcct

SEQ ID NO: 176783 - DNA, 582 bp, Homo sapiens
gctgacccatccaccagcaccccactcctgtgctaacaccaccactgatgagaatgtatgcacagacactgggtgagmgcaacacccccatgctgtgctgccaccactgcaaatgctgcgaatgctgcaaatgctgcaaacactgccaccactgtgaatgctgtgaatgctgccaccactgctgcaaatgctcacatggaggctctcaccctggcacctgctagcactctgccacaggtgactagcacgcaccctgccatgctgccactgccactgccactggtatgggcgaatgaggatggattctgctgtcaccaccctataaagagctttggctggcagcactcatgggagtgttgtgactagcagtgtgggagcacctcaacctctctggtgcagcccattctcaaacataaggggtcagagaacaatgagaggctgattctactcccccagagttagaccatgcagtccagggatattgagctgagccttggctccctaaaatcttcaagaaaggaaacctgtcaactgaacccaccttatatcatagtcaaacacccaaatacaataaaaggaaaa

SEQ ID NO: 176784 - DNA, 207 bp, Homo sapiens
caatagtcttacttctggaaaggggactggaattggaggttggtcaagagagcacaattacattatatagcttaatatttaaaatatgagactgtattcayatattaattatacaattaataaactcataaataagagcaatacatactataaaaagacgcaaacagaaagtacagaagtgtattaaatagaaagtgaacgtttccc

SEQ ID NO: 176785 - DNA, 438 bp, Homo sapiens
ctcttgtctcacaaccaagatgaatgatgtgcgtggacatcacggagtgagtaacgcagagaagtattttattgagtgacagaagaaaagctcacagctgcaagagggaaccccaaaagcagacatagctgcctgtgaggctgagtctggggtttttatgggcttagaatgagggagtgtgtgctgattggtccatgggcaagcttggaaaaagcacaatttgactggttaaaagacattatccagaaggaaccaatggagggagaaggtaagacaggaatagaagttctcacttcagtcgtgggctctatcctgaaccagcctctcagttttcaaattttaaactggctttggcttgaaggtctggtttcaccagggacccatccctgtctgcctargaatttgtctgtctcatgtcactatcactactactgcagc

SEQ ID NO: 176786 - DNA, 488 bp, Homo sapiens
gtaacaattattatttttaacatttgtttctatttttactgacatcttaaaccttaatgtatcagggtaccaccctaaaagatatgggcatttttctacctaactataatactattactgtacctaactcagtaataatttattttcaataataattaatttagtatccaattcatatccaaaattacctaaggtcctcaaaatatctatctatttacagttgaatttgttcgaattagtattaaaagtacacctattacatctagtttttgccttttaagtctcttttaattcataacacttttaatgtctatagttttccatttgaagaaagagctgcacttttttattaccatgtctataatttctttcattgaatgttaacttcttcatttgtgaaaatgatcatatctgcgaattattttctgaaaaaatgacagtaaggtcttccatctatamataaatttatatcacacaccatggcatat

SEQ ID NO: 176787 - DNA, 587 bp, Homo sapiens
aactaccactgatagtttcactatgggggtccttatgggttgcttctaatgattcagggaaacagacaatttccaatatttagaaatactttttaatctggagaaaaaaatacttccactgagtgacagccttgctccaccagaatcagcacatctcttcaatttccatgtgggatgattctgtgcctccgtgaatacaagccasgttggaaaggtcagtgtatagagaggaatgaagtttagaaatgacacatttcaggtattggcaatattctgctggaaccccaagatctgattggatcatgaagtttaagcaggaaacacctgcgtttaatgtctggtgactttccgtggctgcaagcagtgtagaattttatgtccccagtggctgtgtgtttgtagaaaattgtgtgggagaaagttacttaacctgtgctttgtttttaaggaaagtgatttctccacaaactttcaaccatcagctctgagtgttctcagtagaagggtggccagaagggacataatggggcatgctttgggatttgtctcccttctgctcagaggctggaaatgcagggcagcacatg

SEQ ID NO: 176788 - DNA, 589 bp, Homo sapiens
gcaacaaaaagagaccctctcatgacaaaatatttaaaaagtagcttggtgcggtggtgtgcacctgtagtcccaggtactagggaggctgaagtgggaggatcacttgagcccaggagttcgaggctgggaggctgaggtgggcggatcacctaaggtcaggagtccgagaccagcctggccaacatggcgaaatcycatctccactaaaaatacaaaaattagcctgatgtggtggtgcgtgcctttagtcccagctgctcaggaggttgaggcaggagaatcccttgaacccaggaggtggaggatgcagtgagccgagatcgcaccactgcactccagcctggacaatagcacaagactctgtctcaaaaacaaacaaacaaacaagatttctaattagatgctataggtgggcctgtatttgtgaatagagaatttcatttctttctatgatgtacattgtagattaagagtacatataaacagaaggaaaatccctgtgtagcaggaggaaaataatttcatagagagcacagtatgctgaagctgagcttcctgctcccaagtagcaaagaaatggttacaa

SEQ ID NO: 176789 - DNA, 558 bp, Homo sapiens
ggcactatttctaaagctgacatgtaaacccccagtctccaaaaccctaagagtgtacctttctcattaatttctgagttcatcctttttgttcatattataactgtgatcttttctcccttcatattttctgtttgggaagcgatttctttgtaataattggcctgttagagttwatttctcttctggtgttcacctttgtataagagttattgttaagtaatatatggtaacttagtggcagtgaaaccaccactcaaaccaaaatctagggccttgtccaaaacatgctacaaatgaacatacactcctctccgtccaatctgtccataccactttatacacaatctctccttatgctgaatcttatattcagtcttgctgccctctatatatgggtctattgcatctgtgtgtgctcctaaaaagtttgcatgtgtgtctggaaataaaccattagattaagaatattcactttttagtttttattttttgttttgttttgttttgctcatctcttttcttcttctcacactctaacaatgatatcttcaaaca

SEQ ID NO: 176790 - DNA, 558 bp, Homo sapiens
ggcactatttctaaagctgacatgtaaacccccagtctccaaaaccctaagagtgtacctttctcattaatttctgagttcatcctttttgttcatattataactgtgatcttttctcccttcatattttctgtttgggaagcgatttctttgtaataattggcctgttagagtttatttctcttctggtgttcacctttgtataagagttattgttaagtaatatatggtaacttagtggcagtgaaaccaccactcaaaccaaaatctagggccttgtccaaaacatgctacaaatgaacatacactcctctccgtccaatctktccataccactttatacacaatctctccttatgctgaatcttatattcagtcttgctgccctctatatatgggtctattgcatctgtgtgtgctcctaaaaagtttgcatgtgtgtctggaaataaaccattagattaagaatattcactttttagtttttattttttgttttgttttgttttgctcatctcttttcttcttctcacactctaacaatgatatcttcaaaca

SEQ ID NO: 176791 - DNA, 473 bp, Homo sapiens
aaacttactcactgtcacaagaatagcaagggggaaatccacccccatgatccaatcacctcccaccagacctctccttcaataatggggatcacaattccacacgagagttggggggggacacagagacaaaccacatcagcgcaacaccacagtgctggtagcagcaggactctgctattcatcaaaggctgaaagggagagaagagggaacagctggagaaattttaaaggaaaaagggctgtgtagacagagccacctacctggcattgtatctttagtttatgggtccagcttttccctgtgactccaaaaagagggacccaaggaaataagtgctacaactttactgtctttcttcctgctgatctcctgccagtggtccccttgtactatgcccatctggaagcaatgacatakcccctacagatgagcctcccagggcacacagcacgtgaagaaaggtagagac

SEQ ID NO: 176792 - DNA, 470 bp, Homo sapiens
caagaatagcaagggggaaatccacccccatgatccaatcacctcccaccagacctctccttcaataatggggatcacaattccacacgagagttggggggggacacagagacaaaccacatcagcgcaacaccacagtgctggtagcagcaggactctgctattcatcaaaggctgaaagggagagaagagggaacagctggagaaattttaaaggaaaaagggctgtgtagacagagccacctacctggcattgtatctttagtttatgggtccagcttttccctgtgactccaaaaagagggacccaaggaaataagtgctacaactttactgtctttcttcctgctgatctcctgccagtggtccccttgtactatgcccatctggaagcaatgacatatcccctacagatgagcctcccagggcacacagcasgtgaagaaaggtagagactggattggagaggc

SEQ ID NO: 176793 - DNA, 473 bp, Homo sapiens
caagaatagcaagggggaaatccacccccatgatccaatcacctcccaccagacctctccttcaataatggggatcacaattccacacgagagttggggggggacacagagacaaaccacatcagcgcaacaccacagtgctggtagcagcaggactctgctattcatcaaaggctgaaagggagagaagagggaacagctggagaaattttaaaggaaaaagggctgtgtagacagagccacctacctggcattgtatctttagtttatgggtccagcttttccctgtgactccaaaaagagggacccaaggaaataagtgctacaactttactgtctttcttcctgctgatctcctgccagtggtccccttgtactatgcccatctggaagcaatgacatatcccctacagatgagcctcccagggcacacagcacgtgaagaarggtagagactggattggagaggcgct

SEQ ID NO: 176794 - DNA, 515 bp, Homo sapiens
atgtttaaaaattacagttttgtgagacttaagggtctttttaacctaggtaagtttatatgacctaacttaattgtagccatattctggtaccttccattttgaaaagtagaggttgcttaagcaagcaatggataataagagacttttcctgaggcrcctgtttggaatctggttttctcagcggcagcttgacatgtgcacccttttgtattaaacactgcaagggtgatgcaggggagcaggaaagccatcctaaactcactactgagtacgattcagtatgttcctgtggatgtctgctgtgactaatataaatttcttgcagaatcagctacacttaattatgttgctgatagacaagcatccacgcttcagctggcactaagtgttttcattgtaggatcagcagcaggttaaagactgaacggttagtgaagacaaatgtcttaagaggctgcgatgtctaggttgggcttgtgacttcttagtggcctagccttcttgatggcacc

SEQ ID NO: 176795 - DNA, 629 bp, Homo sapiens
atatcaaaatttgtgggacacagctaaagatgagagagaaatttatagcactaaatgcccacattagaaaaaaaggagaagtctgaaataatctaagcatccaactcaagaacttagaagagaaagagtaaaatataaaataaacccaaaacaagaaaaagtaaataaaaaagaacagaaattagtgaaactgaaacaaaaataatggagaatwtcaataaaacaaagagctgattctttaaaaataataaaattgataaaatctctagcaagactgacaaaaaagagtgagagaagacacaaactaccaatatcaggaataaaacagggtcagcactgtagactctacagaactcaaaaggatatagcaaaatactgtaaagaactctacacatgtaataaggccaggcacagtggctcacacctgtaatcttagcactttgggaagccgaggagggcgggtcacctaaggtcaggagttggagaccagcctggtcaacatggtaaaaccccatctgtactaaaaatacaaaatcccagctactaaaaatacaaaagtagctgggaggccaggtgcagtggctcacgcctgtaatcccagcactttgggaagacaaggcgggtgggtc

SEQ ID NO: 176796 - DNA, 399 bp, Homo sapiens
gctatcagtttggtatatatcttttcagacttcctttctttttatttacatacaggcatgcatatataaatgtatagttttgctcttttttaaaaaaagtaaatgtaatcttacatgtgttgtttttcggctctcctttttttttaaaaaacaacattatctcttgtagttgtaggtctgcacgtgtagatagacccacctcttttttaaaaaatgctgtatggtatttcatagaatggatataccatgatttcctttacagttagtttctttctaatattttattattacaaacagtgctgcagtgaacagcctgaccatgccctcttatgctcatgtgtgactgtktctcacatatgtattggaatttcaggagcaaacatttaaattttaataatg

SEQ ID NO: 176797 - DNA, 399 bp, Homo sapiens
gctatcagtttggtatatatcttttcagacttcctttctttttatttacatacaggcatgcatatataaatgtatagttttgctcttttttaaaaaaagtaaatgtaatcttacatgtgttgtttttcggctctcctttttttttaaaaaacaacattatctcttgtagttgtaggtctgcacgtgtagatagacccacctcttttttaaaaaatgctgtatggtatttcatagaatggatataccatgatttcctttacagttagtttctttctaatattttattattacaaacagtgctgcagtgaacagcctgaccatgccctcttatgctcatgtgtgactgtgtctcacatatgtattggaatttcaggakcaaacatttaaattttaataatg

SEQ ID NO: 176798 - DNA, 398 bp, Homo sapiens
ctaacagttgtagtataacgatataatggaaaaatacacaagttaaaaaaaaaatccaggaaaaaattccaatgaacctgggctgggtcaggtgcccacctctggatcattcaaccatgtctaggaatatatttgtttgaaaaagggactccctgtggtttggaaaggagaagggaraagtctgaaacaaaattttaaagtaacgttttcattttgaaatagtttaaatttcacaagaagcttcaaaaatagtaccaagagttctcatgtacccttcacccagcttcccccaatggcaatgtcttacataactatagtacatgtcaaatccagaacattaccattagtattatacaatactgtaaacttaggtacagaccttatttggatttccccag

SEQ ID NO: 176799 - DNA, 533 bp, Homo sapiens
aagcttgagtaagagcatcccagtcagtaggaatcatccaactggagacagcaacattctttaacagtcccattacaaaaggagaacttggtccatactgatttatagcttgtttaaattctttgagtaatttaaaaggaaaaggctcaaatgtagctataatatttccctgttgatctggggggggtgtattctaacagggaactgccaagcctctatattaccctctcatctagcttgctgaattcctgcctaaatacaactgagagtggtagctcaagrtgctgctcgaacagtcactggggcaactactttttgcccagtgtcctctggaaaagaaagatctggagggtcaggccaatctttttcttcaaaataatgaaggggtgcagaaaggtagggacaaacctctcccttctttgccgctttagctttagctggcaaacaaacctgctctgttacctcttctgttacttcattatactctccttcctcctcatcatcagtgtgaaaaggttccaaggtggaaccaa

SEQ ID NO: 176800 - DNA, 562 bp, Homo sapiens
ctacaaaaagacttgtaacaaaaacgttcatagtggctttatttttaaaaaccaaaaaatgtctgtcaacctaagggataaacaaattgtagtgtgttcatacgatggaatactactcaatcataaaatgaaccaaccactgatccatgcaacagcatgcatctcacaggcattatgttaaacaaaaaaagccaggccaaaacagtataaactgtatgactgtatttatataacaggcaaaactaatctatggtaatacatgttggaatattggtyacctttgagtggagggccacattgcctgggaagcggcatgaggccaccttctgtagttatggaaatgttttttatttcgtcacagatattgtattttttagttctggaattgccacttgattgccatctctatttctatgttgagattttaccaccttttcattcattagaagtttaatttcctttatttcttgagcatactaacatacttataatatttaaagtccttgcctgccatttctaacatctgggtcatcttggggttggtccctccttgttgatttct

SEQ ID NO: 176801 - DNA, 562 bp, Homo sapiens
ctacaaaaagacttgtaacaaaaacgttcatagtggctttatttttaaaaaccaaaaaatgtctgtcaacctaagggataaacaaattgtagtgtgttcatacgatggaatactactcaatcataaaatgaaccaaccactgatccatgcaacagcatgcatctcacaggcattatgttaaacaaaaaaagccaggccaaaacagtataaactgtatgactgtatttatataacaggcaaaactaatctatggtaatacatgttggaatattggtcacctttgagtggagggccayattgcctgggaagcggcatgaggccaccttctgtagttatggaaatgttttttatttcgtcacagatattgtattttttagttctggaattgccacttgattgccatctctatttctatgttgagattttaccaccttttcattcattagaagtttaatttcctttatttcttgagcatactaacatacttataatatttaaagtccttgcctgccatttctaacatctgggtcatcttggggttggtccctccttgttgatttct

SEQ ID NO: 176802 - DNA, 562 bp, Homo sapiens
ctacaaaaagacttgtaacaaaaacgttcatagtggctttatttttaaaaaccaaaaaatgtctgtcaacctaagggataaacaaattgtagtgtgttcatacgatggaatactactcaatcataaaatgaaccaaccactgatccatgcaacagcatgcatctcacaggcattatgttaaacaaaaaaagccaggccaaaacagtataaactgtatgactgtatttatataacaggcaaaactaatctatggtaatacatgttggaatattggtcacctttgagtggagggccacattgcctgggaagcggcatgaggccaccttctgtagttatggaaatgttttttatttcgtyacagatattgtattttttagttctggaattgccacttgattgccatctctatttctatgttgagattttaccaccttttcattcattagaagtttaatttcctttatttcttgagcatactaacatacttataatatttaaagtccttgcctgccatttctaacatctgggtcatcttggggttggtccctccttgttgatttct

SEQ ID NO: 176803 - DNA, 562 bp, Homo sapiens
ctacaaaaagacttgtaacaaaaacgttcatagtggctttatttttaaaaaccaaaaaatgtctgtcaacctaagggataaacaaattgtagtgtgttcatacgatggaatactactcaatcataaaatgaaccaaccactgatccatgcaacagcatgcatctcacaggcattatgttaaacaaaaaaagccaggccaaaacagtataaactgtatgactgtatttatataacaggcaaaactaatctatggtaatacatgttggaatattggtcacctttgagtggagggccacattgcctgggaagcggcatgaggccaccttctgtagttatggaaatgttttttatttcgtcacagatattgtattttttagttctggaattgccacttgattgccatctctatttctatgttgagattttacyaccttttcattcattagaagtttaatttcctttatttcttgagcatactaacatacttataatatttaaagtccttgcctgccatttctaacatctgggtcatcttggggttggtccctccttgttgatttct

SEQ ID NO: 176804 - DNA, 622 bp, Homo sapiens
aggatgagaaggatggtggagatcagagaaaggggtaggtgcactaaagaaaggtgagaatatttaaaggmacagtatgaaggagcacaaaatattttggaaaggcaagtggttcagggtggctaatatagaaaagcgcgcgaagagtaacgcagaggatggagttactctatgcgcgactatgttgagcctttagaaattcccgctggggacacagagttaatgaaggttagccccaatagccccgtgtttctatgagattcgcaaagaactctcttacctaagaataaacccaactggggatagagtctgatacaaggaaacccagttaggaggcacttatgaccatggtttaagagcctgaactacagtagctgtaacagaaaaaggtctgatatgggaactctgggcagtaatatagatggatttgtgttgggtgaagaagagggaggctgagcttgattcagatgtctttagtctgggaaattagatagaggatggtagcattaactgacataactaatacaagagacgcaccctcttttttatttggttgtttggagggaaagtaagatgagttgaattttggatatgaacttgaaatacctataagttatccaag

SEQ ID NO: 176805 - DNA, 622 bp, Homo sapiens
aggatgagaaggatggtggagatcagagaaaggggtaggtgcactaaagaaaggtgagaatatttaaaggcacagtatgaaggagcacaaaatattttggaaaggcaagtggttcagggtggctaatatagaaaagcgcgcgaagagtaacgcagaggatggagttactctatgcgcgactatgttgagcctttagaaattcccgctggggayacagagttaatgaaggttagccccaatagccccgtgtttctatgagattcgcaaagaactctcttacctaagaataaacccaactggggatagagtctgatacaaggaaacccagttaggaggcacttatgaccatggtttaagagcctgaactacagtagctgtaacagaaaaaggtctgatatgggaactctgggcagtaatatagatggatttgtgttgggtgaagaagagggaggctgagcttgattcagatgtctttagtctgggaaattagatagaggatggtagcattaactgacataactaatacaagagacgcaccctcttttttatttggttgtttggagggaaagtaagatgagttgaattttggatatgaacttgaaatacctataagttatccaag

SEQ ID NO: 176806 - DNA, 586 bp, Homo sapiens
tgtaatgtcagccacatatgtaattttaaattttctagtagccacaatcagtgacgaaaaaagaaacaggtgaaattaattgtaataatacgttttatttaagcccaaatatccaaatagcattttaacatgtaatcaacataaaattacttattttattttatttttttggaaacagaatctcgttctgtcacccasgctggagtgcagtggtgcgatcttggctcactgcaacctccgcctcctgggttcaagcaattctcgtgcctcagcctcccgagtagctggaattaaaggtgcgcaccaccatgcccagctaattttttgtatttttagtagagacagggtttcaccatgttgcccaggctggtctcgaactcctgagctcaggcagtccaccctccttggcctcccaaagtgctatgattacaggtgtgagccaccatgcccagcctgtaatcaacataaaattatgaataaaatattttacattattgttttcattttaactctttgaaaatcagtgtgaacttttcatctcccagcaaacctcactttagactaatcatgtttcaagagcacaata

SEQ ID NO: 176807 - DNA, 616 bp, Homo sapiens
tgtaatgtcagccacatatgtaattttaaattttctagtagccacaatcagtgacgaaaaaagaaacaggtgaaattaattgtaataatacgttttatttaagcccaaatatccaaatagcattttaacatgtaatcaacataaaattacttattttattttatttttttggaaacagaatctcgttctgtcacccacgctggagtgcagtggtgcgatcttggctcactgcaacctccgcctcctgggttcaagcaattctcgtgcctcagcctcccgagtagctggaattaaaggtgcgcaccaccatgcccagctaattttttgtatttttagtagagacagggtttcaccatgttgcccaggctggtctcgaactcctgagctcaggcagtccaccctccttggcctcccaaagtgctakgattacaggtgtgagccaccatgcccagcctgtaatcaacataaaattatgaataaaatattttacattattgttttcattttaactctttgaaaatcagtgtgaacttttcatctcccagcaaacctcactttagactaatcatgtttcaagagcacaatagccgcttgtggctctagtggctatcatatc

SEQ ID NO: 176808 - DNA, 484 bp, Homo sapiens
gatgcataattttccttcacaaccaactaatggagaamtaaaagtctaaaatggaggaaaactagaatgtcacagtatcttcttagtgtgcctttggctgattttcctaatttatattgcacttacaacacctgacacgaaatccttggagccttaacattgaatatataaaagctcgtggaaaaaatgtgctatcaaattcaaaagcatccaaaatacacgttcacagccagctacaggagcgtttgggtcagcctattaagcacatgtttaatttttttatgctgaatcaatgcatacataattcatggtcacatttatgatctgaaccaaaacacgctaagagagcctctgaaaaaatctggtgtgccatagacacagtcttcacatagatttggcaaaccatcctagtttaaggtaggaattaaaaggtaggtctgcatcaatacaactaaagattcaaagataaatctctcacccagtg

SEQ ID NO: 176809 - DNA, 475 bp, Homo sapiens
ttttccttcacaaccaactaatggagaaataaaagtctaaaatggaggaaaactagaatgtcacagtatcttcttagtgtgcctttggctgattttcctaatttatrttgcacttacaacacctgacacgaaatccttggagccttaacattgaatatataaaagctcgtggaaaaaatgtgctatcaaattcaaaagcatccaaaatacacgttcacagccagctacaggagcgtttgggtcagcctattaagcacatgtttaatttttttatgctgaatcaatgcatacataattcatggtcacatttatgatctgaaccaaaacacgctaagagagcctctgaaaaaatctggtgtgccatagacacagtcttcacatagatttggcaaaccatcctagtttaaggtaggaattaaaaggtaggtctgcatcaatacaactaaagattcaaagataaatctctcacccagtg

SEQ ID NO: 176810 - DNA, 475 bp, Homo sapiens
ttttccttcacaaccaactaatggagaaataaaagtctaaaatggaggaaaactagaatgtcacagtatcttcttagtgtgcctttggctgattttcctaatttatattgcacttacaacacctgacacgaaatccttggagccttaacattgaatatakaaaagctcgtggaaaaaatgtgctatcaaattcaaaagcatccaaaatacacgttcacagccagctacaggagcgtttgggtcagcctattaagcacatgtttaatttttttatgctgaatcaatgcatacataattcatggtcacatttatgatctgaaccaaaacacgctaagagagcctctgaaaaaatctggtgtgccatagacacagtcttcacatagatttggcaaaccatcctagtttaaggtaggaattaaaaggtaggtctgcatcaatacaactaaagattcaaagataaatctctcacccagtg

SEQ ID NO: 176811 - DNA, 475 bp, Homo sapiens
ttttccttcacaaccaactaatggagaaataaaagtctaaaatggaggaaaactagaatgtcacagtatcttcttagtgtgcctttggctgattttcctaatttatattgcacttacaacacctgacacgaaatccttggagccttaacattgaatatataaaagctcgtggaaaaaatgtgctatcaaattcaaaagcatccaaaatacacgttcacagccagctacaggagmgtttgggtcagcctattaagcacatgtttaatttttttatgctgaatcaatgcatacataattcatggtcacatttatgatctgaaccaaaacacgctaagagagcctctgaaaaaatctggtgtgccatagacacagtcttcacatagatttggcaaaccatcctagtttaaggtaggaattaaaaggtaggtctgcatcaatacaactaaagattcaaagataaatctctcacccagtg

SEQ ID NO: 176812 - DNA, 475 bp, Homo sapiens
ttttccttcacaaccaactaatggagaaataaaagtctaaaatggaggaaaactagaatgtcacagtatcttcttagtgtgcctttggctgattttcctaatttatattgcacttacaacacctgacacgaaatccttggagccttaacattgaatatataaaagctcgtggaaaaaatgtgctatcaaattcaaaagcatccaaaatacacgttcacagccagctacaggagcgtttgggtcagcctattaagcacatgtttaatttttttatgctgaatcaatgcatacataattcatggtcacatttatgatctgaaccaaaacacgctaagagagcctctgaaaaaatctggtgtgccatagacacagtcttcacayagatttggcaaaccatcctagtttaaggtaggaattaaaaggtaggtctgcatcaatacaactaaagattcaaagataaatctctcacccagtg

SEQ ID NO: 176813 - DNA, 581 bp, Homo sapiens
cactcgatgaccccttgaagacccttcagaagttgaggataactaattgcttcatgaacgtttaagaaaatataatttggtttcctcagataattctccagatgtggatctataatatattccctagagatttaccaaatgaataatcctacctattatcaagaaaacaaaaaaataaaaatatgctgagacttgtaagaacacctgtaaaagaaaattgcagattcttggccactaatgtcttttaaacagaaacaaataataatactaagactaacacctcccaaattgaagggtatctttcatcaaagctggtgttcatgaattccaaattttacatactattaatgacatgtaattatttataaatattttatttggatataattacatataatcattaaaaamcaaaacagaaatgatagctcagacctcttttatggaagaatagcagaggcatttacatacatgcagtcattaagcagaagaaagtctgagtgacaatctgaaatccaaacacgctgtcgacccgagctgcagtgagtgtgcttaggaaaatgagataggtcgcccaatgctgc

SEQ ID NO: 176814 - DNA, 575 bp, Homo sapiens
ataaaaatgtcattttattattcaatttgaattcttaattgccaataagattacatcactttttttggaagcttttagctatgatttctttgtgtccttttcttagccccgccctttttcttctctccttgcaagactccagtgacaggaatgttagatcttttgttatagtttcctaagtccctgaggttcttttcatttttttagtctattttctctctgttattcatattgcttaatttctgctgctctatcttcaagttcattgattttcttcctgtctcgtttattctgctgttgtcttttgtttcggcttttgtatttttcggttctaaaatttttatctggktcttctttatatcttctatacttctgctgagactttctattttttgtttgtttcaagtatgtttgtaatagtttatttcaaacatttatataatggctgtctttaaaatatttgtcagataattctgccatctctgtcattttgatgttgggatctattgattgtctttttccattcaagttgagattttcctggctcttgatatgatcttcgatggaaagctaga

SEQ ID NO: 176815 - DNA, 455 bp, Homo sapiens
taggcctgtgtttgttctactcatgctagtataactcatagatcatcacaatgctctctttcctctgtctggtatgattgatcaagctacaggaaacttgtcatcagaacaaaatgcaaatccatctcgtaagggaaagattcgtcctaccccaattgagagtaggtgtgaaacttgactgtcctgtgaggcgaatttttcactggtgaaagtttagaacattacgtgtgttatagagggtctcagtgtgggctttgtttataaaaagggatttgacmcatggtgcttaagacagatgagaagattcttcatcccacctctcactgggcatccctagcttcctttgatgcttaggtgctcttcccttcatcctcccaagtcccaggcatccttcgtcctttctccacgacatttaggaaaacaatgttcttaaaaaccaccaccacatggcacat

SEQ ID NO: 176816 - DNA, 558 bp, Homo sapiens
ggtttactcagacccctgacaacataaaggccttggctgcttttcctgtttttctttagatctgagaggcagcgtgtgaagctgttaagtgtcaaaagtcrgagctgcactgcctggggtgaatcccagctttaccatttactaactgagtgacctgggcaaattgtttaaatcttctgtacctcagtttccttatctgtaaaatgaggataactctagtactactttataggattgttatgtggattacatgagcgaatatagtaacaaaacttagaacactacatgtgctatataaatatttaataatattgttattttctcacttcagatgatctcttctttttgtctgtcctcatgctccaaatcattttattaccctttggttgccagtcttctccactcccctcggccaaggcttttgtataatcctgacttctgtctgatttttacactatattagttattgatacataaaaaataatcctcaaatttagcaccttaaaacaacaaacatttattatctcacatagtttctgagtatcaagaattagggaa

SEQ ID NO: 176817 - DNA, 558 bp, Homo sapiens
ggtttactcagacccctgacaacataaaggccttggctgcttttcctgtttttctttagatctgagaggcagcgtgtgaagctgttaagtgtcaaaagtcggagctgcactgcctggggtgaatcccagctttaccatttactaactgagtgacctgggcaaattgtttaaatcttctgtayctcagtttccttatctgtaaaatgaggataactctagtactactttataggattgttatgtggattacatgagcgaatatagtaacaaaacttagaacactacatgtgctatataaatatttaataatattgttattttctcacttcagatgatctcttctttttgtctgtcctcatgctccaaatcattttattaccctttggttgccagtcttctccactcccctcggccaaggcttttgtataatcctgacttctgtctgatttttacactatattagttattgatacataaaaaataatcctcaaatttagcaccttaaaacaacaaacatttattatctcacatagtttctgagtatcaagaattagggaa

SEQ ID NO: 176818 - DNA, 405 bp, Homo sapiens
cttacagggcttggtgagaggcagcacaaatggccctatcaccaacaaattcctcctgtaccacctgtaccacactctccccagacctcatccaccagcctactagggaatcagagatgctcagcattgtgaggaggtcagtgtttgagggaaagggcagtttctttcctcctctcaaagtcaagacagcaggctgctccctgagagcgcacctgcgagaagtggagtagggcactttctttcccaacsggacccttactgggcagcaggatccaggcctccaggtgctgccaccacttcagagcaggggaccgacagtccctgggagagtgtctggaggcctgggaggatggtgtaccacggggagcctggacatacgtcctctgaaatttgaggttcacgtga

SEQ ID NO: 176819 - DNA, 418 bp, Homo sapiens
aagccaaccatctccttacagggcttggtgagaggcagcacaaatggccctatcaccaacaaattcctcctgtaccacctgtaccacactctccccagacctcatccaccagcctactagggaatcagagatgctcagcattgtgaggaggtcagtgtttgagggaaagggcagtttctttcctcctctcaaagtcaagacagcaggctgctccctgagagcgcacctgcgagaagtggagtagggcactttctttcccaaccggacccttactgggcagcaggatccaggcctccaggtgctgccaccacttcagagcaggggaccgacagtccctgggagagtgtctggaggcctgggaggatggtgtaccacrgggagcctggacatacgtcctctgaaatttgaggttcacgtg

SEQ ID NO: 176820 - DNA, 557 bp, Homo sapiens
attttcatctgcaaaaactatcatgaaattaaatatcaacagcaacaacaatggatctaacatccatcaatatgtgcacgctcaacatacacaaggagcttgagctcaaagaacttgatacagaaaagagctgaaattcccagtcgccaatagcagctaacagtcttgggccactagaatgaagattcacaaagaatgaagagtcacagatttaatcagatacatcttgcaccttgtttgaaagagacagaacacagctaactactaggccctatctttttcagagtgatagatgaagaagcgtgattatcctacagctcatggtcytgtgcaaattaataacagcattcatttattcacccacccatttcactgtgacaataacaatactataatagttcattacatggattatgtcatataatgcttatcccacagagtgactaaatgactattcatgtcctcacttaactgttgaagaaactgaggcttacaaatgtaataatctgtccaagatcaaacagctagtaagtacaatagtggggactcagctatag

SEQ ID NO: 176821 - DNA, 509 bp, Homo sapiens
aaattctctgtctctctgatagagctgagtagaatattcacaagctcacccaaattgaatgtgcctgctgagctggtgattgcatttttcagatatgctagtcctctgttggagctgttttgttttagggtctctgtttagctgtgtacttacactcagagcaaatgaatcacaaagggtgcaattttataaataaaaaaatcaagaaatagataagctagcaactagtaaaaaccrgagtgacacatccctggcaattgattttcaagcctcagcccagctgtgtttatttccattcattctgtatctcacgagggtcaggctttgggtaggaggagaatagcatggggcctgggagagagggaaaaatcaccacacagaatggagacatggttctgccatgccagaccctggcagatgtccccaacaacctgcgagaaacaggtttgcagtgtcacaggactggtttgagttctgagtccataaaattctaagtgtattaaatactt

SEQ ID NO: 176822 - DNA, 509 bp, Homo sapiens
aaattctctgtctctctgatagagctgagtagaatattcacaagctcacccaaattgaatgtgcctgctgagctggtgattgcatttttcagatatgctagtcctctgttggagctgttttgttttagggtctctgtttagctgtgtacttacactcagagcaaatgaatcacaaagggtgcaattttataaataaaaaaatcaagaaatagataagctagcaactagtaaaaaccagagtgacacatccctggcaattgattttcaagcctcagcccagctgtgtttatttccattcattctgtatctcacgagggtcaggctttgggtaggaggagaatagcatggggcctgggagagagggaaaaatcaccacacagaatggagacatggttctgccatgccagaccctggcagatgtccccaacaacctgcgagaaacaggtttgcagtgtcayaggactggtttgagttctgagtccataaaattctaagtgtattaaatactt

SEQ ID NO: 176823 - DNA, 507 bp, Homo sapiens
aaaaaaaaaaaaaaaaaaatcctttactcattttaaatgagcctaacaattgattatatgaaattgaagaacaattagctatttaccacatgacactaataatcatatctatcatagatttaatatctccttgtgccagtcagcactctgagtcctgtaatcattgctaatcctcccaatcatgcaaggtgttgtgcccattttaagatgacagcttgagaattagagagactaggtcactgcccatgaccacagagcttttaagtggtagagcgggaattcaaacctaattctgtctagctccaaatcctatacattctgccacatcttctgctayaccatgctacctcttctttcatagggattagttgtacagatagcacattagctcccactgtgggagagcagttaaaaagtgtcataaagaaatgaaatggggccagccacagtggctcacacctgtaatcctagcactttgggaggccaaggcagacagattgcttgagc

SEQ ID NO: 176824 - DNA, 515 bp, Homo sapiens
acttaacataaatgctttaaatgcagtgaagaatttgggatggagtaggggtgggtgtttgcctcaccatggttttgactgattcactcatttctcttttcttgatattgcttgagctcccaccccaactcactctgactttctgtctctcatgacccttccagttccaaattttcccaattctataggctgcccgtttacttcgaatagtgttttgcagaccaaagagaaatttggaaggatttttctgtatgatgtggagagtatggaggaggataacctcacacagtgtgaggaggctaagggagattgttcctgaaatgatactaaaactgctattgacttcaagagccacataccatccatcagttaaaaacaaagtgaatagaaaattgccagaagatagtcttgaaaaaaaamcccacagattccaaccagccaatttcaaagtaagccctggaataaataacctgttggataccatgcatgttaatgaacctcaaaccatatactga

SEQ ID NO: 176825 - DNA, 545 bp, Homo sapiens
ctttgcacacacttcattttatccatgcagaagcaccatagtcaacagctgggatctctcagcactcatcccagctcaatgaagatgctattcgggatgtttgatgtacagtatgtggtgtggtgcaatgtggtgaaaagaatctgaacttgaagttagcacagctgggtttgagtgttagatttgttacttcctaaacttgtgctcagcttaggcacaaagaaacaaattatattacctctttttgtctcaaatgtcatctttcaattgaagatattcttctactgcccaatgttgaataaagagtaaaggagacggcatactttaatgatgtacatatgrcattatctatgtcatacccaggtctggaaatacttcttctcatcattacctaaaaaattctaactgcaccaaaggaggtgtgttattggatatctaattttaaagtcattttaagtcccccaattctctagtttttcccataattcaaaagtcctgatattgcggacttcttactttttcttctcaaagtaagctagaataca

SEQ ID NO: 176826 - DNA, 607 bp, Homo sapiens
gagagtcagcaaaccacagcacacaggctaaatctgcccaccaccagcttttataaataaagttttattgggacacagtcacactcatttatttacttatttgttgtctgtggctgctttcataccacagtggctaagctgagtaattctgacagagtccttacgacccacaaacctaatatgtttactatctagccctttatctctagctgacccccgaacaagaatgataaaatacaaatgttttggtggtcaataagctgataactcattgtgcttcaaaagaatacaacataggaaaaggtaaattcaccatgttttctccagaacatttacatataactcatagtcaataatcctgaagctttctttacctcacaaatggacataaatagmactggttttaagttgaaaatgaactcaccgtggctagtttctgaacatcttcatctgatgctcccagagacgccagacctatttcttgtgaaaactgagcaaacttaggatccgcaagtagtggaacatgtcccaagagttcatggcatgtgtctctgacaaaaaagacatcacaaagacgtgttaaataagaagctttaaattaccactg

SEQ ID NO: 176827 - DNA, 389 bp, Homo sapiens
gaattcaacagcactgttgttatacaaattaaaaaatcggaaatctgaaatgccttctcaagcacacgctcttttcctcacttaaaaattattttatcctgaatatagaaaagaagaaagtgtaatgattctccatacaaccatcaagattttgttccatttgatttggctattttttacttttgatgatctattttaaatctcagacctcctttcatttcactcttacatatttcagtgtataccttttttaagaatatggcatttttcctaggcaattaggatgycattattacacctaaaacattaataataactcactgtcatctcccaaggtacactccataatcaaatttccctggatgtattgtgaaaatgtcctttttact

SEQ ID NO: 176828 - DNA, 468 bp, Homo sapiens
aatagctttttctaattctgtatacctttgtaacaaaccttaatatgtacccctgattctaaaataaaagttaaaatagaaaaaaatacttaatatacaactgtaataattagaaccatctagtattgatgatgaagtaagactatttcactactggtacaatttggagacttcagaaacagactcacacatgtaaacaaagttaatatatgtgaaagatttcatggaatattacaggaaaaagaaacytgaagtgatccacgagaatgaactgaaattagattgctacttcacattatacataaaaatcaatgcacaatgaatgaaaaacttaaatataaaagacaaaacgttaaaaattagagaagaaaatctgggatagaagttacatctggggaaagactaaggtcagaagcagtgtataggtagaggtaacactgtcatattctagttcttaattgtgttcac

SEQ ID NO: 176829 - DNA, 576 bp, Homo sapiens
cacagggtttatgaattggagctatcataatcagaatgtcatctccagtgctccgggatgcttttccctcctaagggaagacttgttttctgactaggcttcagtacygagatagcgatcttcagaggtcccaagccttataaaggttatggtgcatcttcaatgtcagatttgaaataaaaacaataccaaactacaaatcaacataatgaggcctaacaattcttagaatgtactcaaaatgattacttctttcctcatttaaaatatatcaaaatctttcagaaatttattttttctcctgttttggcggggcagggagaggtcttccggatttctggtgtcttgtgtactagcagagtcttgactgttgaataatcatctccaccaccttcccttctcttgtcctcaccctcacccttcagtatactgtagtccttcctaatccaccattccacagtctcagttgattgcagtcagctgcatcctgaaaataggtgagcgcagtatattatgagagagagagagagagggactacaagcacacaactttcattacagtatattgttattggt

SEQ ID NO: 176830 - DNA, 595 bp, Homo sapiens
ccaggctaactgattgaaaccagtggctggtatgatgaagctccctattttaaaagaaatctgaaaaaatgtctgcttcctgggttagatattctatgaatgttacctaaggaggtgggaggacaagacaaaaatatctccatgacaggacctaaagaaatataccagctggcttcaggactaatcaccatggtgcagctgatacaaagtctctttctgaaacagcaggcctctgggaggcagttcaaagcaacaggtaatgtgggaatagagatttagatgaagaaggtggtgggaaggggtaaaagggagagcgtttcctatttaaatgagcctaaacccgaaaattacatgaacaaaaaatgtagttcttagacagctaacaaaattaattcaaaatccaatgcagataaaatgaaataaaaacaatagaaaagaggtataaagtttaattaataataaaataactaaagaaataaaaataatattcaagaaaagaacargaaatactgaaattaaaacagcaaaccatgaaacaaaaattgatacaaatatgtattagttttctggataacagattaccacaaacctagtg

SEQ ID NO: 176831 - DNA, 626 bp, Homo sapiens
gcaacaatttgtgctgattttttaaacataattaacctcttaaggaaaactcaatcatttttgacttactaatgcccgaaatcatggtccaaattgttatgcctcttctgccagagacatggactccaaaggagatgagttctcacaggaatggagaatgaaaagacacataaagtgtaagtggtacaaagactggaaaagacaatggatagtgttggaaagaagagaaacacaaacacctaatttgcttctctcctagaggtatttcattcattatgcatatgtgaatcatagacatatatgaccttgaaagaattggcaaaactgcaagaatgctcacagtaatctcatsctacttccatgtattcagtgtccataaaatgcaagatcaactgtctgcaaatgcccagtgtgaaactgatcctgtagaccctggccaacagtggctgactctgcagccaaaaatttacagtgttctttggattttactggctttttcacgaaatctaacctctcattaccaaatgtaactttttttcctattctttaattttctgggtctgtccttatgttgcaagtacatttatattactatgacaacagatttacaaagcaaaaaattgact

SEQ ID NO: 176832 - DNA, 491 bp, Homo sapiens
taaatggtattacctctaggttttacactgaaataacataggaagtgaggaagtaaatggaagcacagatgaaatgcaattgaccacgaattggtatttgttaaatagatacatggagatttattatactcttctgttcacttctatatgtttgaagttctcgataataaatatatatgtacacatatatgaatatgtatgtatatatgaaaaggtagataatagatagaactaatacctatttaactcacagtgacccatacacccacttgggaacccagacatctctcttcttctggtaatgcagataatgattatttaatgtctggattttacatacaaccttgccccttcccaagattcccccaccctcccaagcttaagcggaagtggaagtccaggtcagcaccaaggacagatccacagtattgggtctcagaaccacagacagcaactcaactaacggaggacraaagacagggaaatgaaga

SEQ ID NO: 176833 - DNA, 620 bp, Homo sapiens
tgaagctcagaaagagattggggagcatgaggtgggggagtaccaaggctaaggagaccaaagcagtgcttgggggcctcccactctttaccttgggttctaactgccayccatctcgtgcttaatgggtccttctgactccagggtgagaaatgttctccttagcatcaggagacgctgcacatgagcagttcctccccctgggagtactggttcagtgagcaaaacagcaaggggctgggcatcctgagggctgggagggatacatgggccaaagaaggagaaggagggtagagaagcatagccagggagagaaatcaaaccccaggacacaagatgagtggggcatctttgggggctacagtgggctctcaatgatcacctgtagtggcagcaaaagaggcaggatccatgggcatttgttctggtttatttgacagggacagggagttcagacactggggagggtggcattcctgttgatgttcttgtgctgatgatttgatgtccttgtgcttcggatgtgggcacagtctcggatggaagggttcagggagcaggatgcacatcccagcccactctcccactcataggatgctcatacaaatgttcccacagaa

SEQ ID NO: 176834 - DNA, 392 bp, Homo sapiens
tcttggtggattcaagggtggttgtggtggtggtagatgattccagagaagagactttacagtgatacaacctgggcttccttactccatttgcttcttcctaaataacattatttctctatcttcctccccccacctccaaccagagaaaatatctacacttctgtcctagatgtattttctaggaacctttcttcctcttagttttagtcrcataaaccttactgtatataggaggaagagaaaacagtaaactctgtgtctggctagctcagttgcacctgtttttatgcttctcacttcttttatgcttttatacttctctagctggactctggaacgaccactatgttatctggtattttgtggctgttagtgatttggcaagagag

SEQ ID NO: 176835 - DNA, 646 bp, Homo sapiens
cttcattttacacatggggaaactgagactaagagaataataagtggttgagtgacttgtccaagggcacatatctgctaagtgaacaggtccagaacttggagtgtctgacttacggtataaactgtgctactttctcgtcccctggaagcgctgagccttcacacactatctatggaagaaagtctcattgcctctcacatttacattgtgagctcctctaaacaggaatcatctgtccaagagktctgtatatgtccatagcccagatactgaaaatgtcttaatttgctctgtctccaaccccctttctctctcatcccaatacataatcatcaatggtctgggatctttgaaatttgtcacacaacctctgattcaaaatacttccagtcctttggacctcctataaaagaggtctccatctggaaaggactttgtgtcatttctgttttttctcatcaaacatccagaggacccctagtgtaagtaatgccctgagtcaagggactaagtgtctatgggtattgtcatgaaaggaagaccttcctggactacctagataacacacttttctcccaataccttctctctcattcataattgacctttggatttattttctgccttagcttcatacctttga

SEQ ID NO: 176836 - DNA, 646 bp, Homo sapiens
cttcattttacacatggggaaactgagactaagagaataataagtggttgagtgacttgtccaagggcacatatctgctaagtgaacaggtccagaacttggagtgtctgacttacggtataaactgtgctactttctcgtcccctggaagcgctgagccttcacacactatctatggaagaaagtctcattgcctctcacatttacattgtgagctcctctaaacaggaatcatctgtccaagagttctgtatatgtccatagcccagatactgaaaatgtcttaatttgctctgtctccaaccccctttctctctcatcccaatacataatcatcaatkgtctgggatctttgaaatttgtcacacaacctctgattcaaaatacttccagtcctttggacctcctataaaagaggtctccatctggaaaggactttgtgtcatttctgttttttctcatcaaacatccagaggacccctagtgtaagtaatgccctgagtcaagggactaagtgtctatgggtattgtcatgaaaggaagaccttcctggactacctagataacacacttttctcccaataccttctctctcattcataattgacctttggatttattttctgccttagcttcatacctttga

SEQ ID NO: 176837 - DNA, 491 bp, Homo sapiens
tttgttgattgtttcctttgctgtgcagaaaatgtggtctcccttatttgtgtttttgtttcttgtgcttttggtttcaaataaaaaaaaatcattgtccagaccaatkgaactttgtccctatgttttcttctaagagttttacagtttcaggtcttatgtttaagtctttagtccattttgaattgatttttgtgtatggtgtaagttttcctaacatcatttaatgaagagattatcctttccccattgtatattcttggtgcctttgttggaagttagttgactgtacgtgcaagggtttaattctgggctctctattctgtttcgttgccatatgtgtctgtttttatgctagtaccatactgtttggattactgtagtttgcaatatagtttaaaatcatgacgtgtgatgcttccagctttgtcctttttgctcagaatttctttagctattcagtgtcttttgtggctcacatgaattttagg

SEQ ID NO: 176838 - DNA, 491 bp, Homo sapiens
tttgttgattgtttcctttgctgtgcagaaaatgtggtctcccttatttgtgtttttgtttcttgtgcttttggtttcaaataaaaaaaaatcattgtccagaccaatggaactttgtccytatgttttcttctaagagttttacagtttcaggtcttatgtttaagtctttagtccattttgaattgatttttgtgtatggtgtaagttttcctaacatcatttaatgaagagattatcctttccccattgtatattcttggtgcctttgttggaagttagttgactgtacgtgcaagggtttaattctgggctctctattctgtttcgttgccatatgtgtctgtttttatgctagtaccatactgtttggattactgtagtttgcaatatagtttaaaatcatgacgtgtgatgcttccagctttgtcctttttgctcagaatttctttagctattcagtgtcttttgtggctcacatgaattttagg

SEQ ID NO: 176839 - DNA, 628 bp, Homo sapiens
tattcactgatgaaggggtgaaaatccatttttcttcttccttaatgccattccttatatctcaccctttgcagtaagtcctcaaaatgttaacaataatcataaccattcatatttctgtcacagtgcrtacaacatatttttatgcatattatattgtttaatctttttgtacagtcttgtgaaaatgaagaacaattgcttatgctgttttcctaatgaggaacacaaggctcactggtacagagttggaaggaatggaggcaagcagagaaaggcccaggctttgtggagcttgatgcttgtataattatggataccttgttttagaaaaataatgcagaactactaatacaaaattagacacgtaagtgaatatttatttgaaatgaaaaagaaattgcaacaaattacaaacttaacaaaagcttacgaatatatcaaatatcatgaatcccaggaaaataacactttattattattattttaaatacctttataatacctttttaatattttatggctgattatttttgattgtctcttcttatgactatagtttttatatcatttctgtagagagaacagaaggataattcaatctttgctctagcatggttgatcaaaa

SEQ ID NO: 176840 - DNA, 386 bp, Homo sapiens
ccagttagctacatgtgacccaaccctggatctagccccaggatcatttcagaggagttgcgattgcagagtgggagattctgtaccacactgattaatttccaccaactcacagtaggaygacagggaagacccatagccactctgtgccaattactccttagcaacagcagcatgaaccacctgttccacatcccttagtgttcctcttgatctaaagaaaagagaatgaaccagcccctaaggaagagggcttgggaaagataaggactattcagttaatggaaggtgctggagtgtcagatcctgaggcccaaaatgggtcccatcagaggagtagccatattggtgggtgctggataggaggagctttggggttggtgcag

SEQ ID NO: 176841 - DNA, 568 bp, Homo sapiens
tgactatggttgtgtccatatcaagggtatcaatggtgtatgtggtgaacaagaaagaggtttgtatgttcgttctgcactgattcattgtgtggtcttgagcaagttgtagagcttctcattaacaacatagtttaccctggggttaacctaacatggrttatttgtgtacaggaagaatgagtgaaaggtaagttttggtaaaggatgaagaccatgcattaaactgaaggtactggatcagagagctgggacccaattcacaagtaagttctgggagtgacttctttcatggtaagaagggtggggatttcagaatggcgttcaaagattcagcttttttcttccttggtgtctctcgatcaggaggccagagcaccaggatgccccactttctactgttagagaagaataagcatcattatgttgacttcctatttcctcccctacccccaagtatttcagttcaaagctaagacctacctgccctgggagagtcttccctacgtccacaacccacaatctcctttctattcctggactctaaagatgggccccattaatccct

SEQ ID NO: 176842 - DNA, 568 bp, Homo sapiens
tgactatggttgtgtccatatcaagggtatcaatggtgtatgtggtgaacaagaaagaggtttgtatgttcgttctgcactgattcattgtgtggtcttgagcaagttgtagagcttctcattaacaacatagtttaccctggggttaacctaacatggattatttgtgtacaggaagaatgagtgaaaggtaagttttggtaaaggatgaagaccatgcattaaactgaaggtactggatcagagagctgggacccaattcacaagtaagttctgggagtgacttctttcatggtaagaagggtggggatttcagaatggcgttcaaagattcagcttttttcttccttggtgtctctcgatcaggaggccagagcaccaggatgccccactttctactgttagagaagaataagcatcattatgttgacttcctatttcctcccctacccccaagtatttcagttcaaagctaagacctacctgccctgggagagtcttccctamgtccacaacccacaatctcctttctattcctggactctaaagatgggccccattaatccct

SEQ ID NO: 176843 - DNA, 578 bp, Homo sapiens
tatccatcttgtataactgaaattttgtgccctttgactaatatcttcaatctctctgcttgttattggtctgttcagggtatctaattcttcctgatttaagttaggagggttgtatttttccaggaatttatccatctcttctaggttttctagtgtatgtgtgtaaaggtgttcatagtagcgttacatgatcgtttgtatatctgtggtgtcagttgtaatatctcccrtttcatttcttaatgagcttatttggattttctctcttattttctcggttaatcttgctaatggtatatcaattttatttatcttttcaaagaaccagctttttgtttcatttatcttttgtatttttttgtttcaatttcatttaattctgctctgatcttggttattttctttttttatcacactttaagttctggagtacatgtgcagaatgtgcaggtttgttatataggtatacacgtgccatggtgatttgctgtacccatcaacccgtcatctacattaggtatttctcctaatgctatccctcccccacatcccccgccgacaggcccaggtgtgtg

SEQ ID NO: 176844 - DNA, 578 bp, Homo sapiens
tatccatcttgtataactgaaattttgtgccctttgactaatatcttcaatctctctgcttgttattggtctgttcagggtatctaattcttcctgatttaagttaggagggttgtatttttccaggaatttatccatctcttctaggttttctagtgtatgtgtgtaaaggtgttcatagtagcgttacatgatcgtttgtatatctgtggtgtcagttgtaatatctcccatttcatttcttaatgagcttatttggattttctctcttattttctcggttaatcttgctaatggtatatcaattttatttatcttttcaaagaaccagctttttgtttcatttatcttttgtatttttttgtttcaatttcatttaattctgctctgatcttggttattttctttttttatcacactttaagttctggagtacatgtgcagaatgtgcaggtttgttatayaggtatacacgtgccatggtgatttgctgtacccatcaacccgtcatctacattaggtatttctcctaatgctatccctcccccacatcccccgccgacaggcccaggtgtgtg

SEQ ID NO: 176845 - DNA, 558 bp, Homo sapiens
ttaaatatgaattacactggatttttatgcaaatatgtttataaaaggaaatagaaagaatacatacattaaataaggattttttttttgcatgaacactatatacttttttcagccagtacaatgaatttagatatttttcatccttcctccctccttcactttcttctattctataattcctcatccttcaccatttccttaatataaatgattaactgttatatattgagtgatatctaaatatataatagttaattattatacaactattaaatattatatataaatgttacataattatataatatatgtaaatatatttttttatatttttatttttcataagataatataatagggttgctactcatctgtatcttattatttaaggtcaaaaatayatattgaccattcttttgtatgggcatatatttcaaaatctcctcttatggaaaacagaagagggaaacattaataaatattttgagaataaaagctcataaaggaaaatatgaaagacataaataggcttatgaggctgatgctgaaaataaa

SEQ ID NO: 176846 - DNA, 537 bp, Homo sapiens
acacctggggaatgacattcattctcattttcttgttaagtcaaaactgttattaaatatcctgtgtttcctttacataaaactgaacatgtgtgtccatctcagagatataaatatatttcagaggtggaaaatactatattatctatttggcattttcccctataattatatgtatgtctataatgttatctttccatctcactattttacactctatgtttaatctatactctatgtttaatctattagttagttttttcctcaaaaaaccattgcaattgtagtatgagctaggaagcaagtcctttcacacatacaaagaaacaagtcctttcatayacatcgtacacagaatgccatccatgatgcctatgtgttatttttttctacttctccttcctcttcttgttctcctttttttcttcccctcttccttcctcttttccttttcttttcctaatttaagagggtttatgaattttatatttctgccatagtattggtgttgcagacaatccattttgctgcaaaatt

SEQ ID NO: 176847 - DNA, 549 bp, Homo sapiens
gaattcgattactcctggtatagtgtgtgtcttaggttttaatatttagactatggggatttttcttctttagaaccctttagattggggtgagtgtctgagttattgctacccaattatgctctgtctcaagtgatgaactataacacccatagactaaattagaatgtactaaccgaatattaggccagataaattttaaaacaatctgtaatcacaaagacatgaggtagctggtcctattgagggcaagaactttttagaggaggaatatttgaagctaaaaaaaaagtgataaaggagatatgtattaatcagaacataccatgatatgagagagagaaagacggaggggccataatcataattttacgtggtttagacaccctattgtatatgtaccattaagtttctggagatgttatttcttaaatactgtrtttcacttatcttaagtatcatctgaactactgccatcatctctcaaccatttttcctggttttactcttgtttttctcaagtcctcctctctgtattatgcataatgt

SEQ ID NO: 176848 - DNA, 552 bp, Homo sapiens
gttttgagatggagtttcactcttgttgcccaggctgagtgcaatggcgtgcgtgatcttggctcactgcaacctccacctccgggattcaagggattctcctgccttaacctcctggatagctgggattacaggcgcctgccaccacacccagctaattttttgtatttttagtagaaacgaggtttcaccatgttggccaggctggtcttgaactcctgacctcaggtgatccgcccgccttggcctcgcaaagtactgggattacaggcatgcgccyctgcagctggcctccagctcttattagagataatgtgttatgagcatgtgggactactcgatactttcagtgctattttacccattgctgctactaagaaaactagtgcatcaaaaagaacagcgtgggttatagtttcctgtaaagttcttacatatcctacattttttccattatcctcatgtctgcatatcaacttcccggcctactgatggcataaaataaattggtagtgttctaagagaatcttggtattttacctgtgtttaccc

SEQ ID NO: 176849 - DNA, 596 bp, Homo sapiens
cagatgttaccattctgtggccatccagagagttcacacacaaaatgctttgagaatctctttgctcgtgcccggttctctttttgtgtgaatggmccacttttgcctcttggtagccagtgctttggttgtgctttgttttcaggagtagtagtggtagagtcacatttcatgtgtcacagttcttcaaataaatgattcaggatctttatcacgtttgtttggttttccaatgaaagttctgcttttcactgcagctgatctgattgcaacacttgctaccctcatcaagtggaaactttgctcagctttaatttttcagtcagaattttgtatgctaaaccaattgagatgtgtatggcgttggctttgttttctactattagtcattggccttcttgtattagagcactagcaaaatggatttttcctcacaaattgatgtggatgtcctgtggcttcaggcttcatattcaacagtatctcctctttcttaaaacgagttgtcaatgattaaactgctgatttctttggatacattgatctcataaacctctcctaagcatctattatttcaccatttttccacccaagct

SEQ ID NO: 176850 - DNA, 597 bp, Homo sapiens
cagatgttaccattctgtggccatccagagagttcacacacaaaatgctttgagaatctctttgctcgtgcccggttctctttttgtgtgaatggcccacttttgcctcttggtagccagtgctttggttgtgctttgttttcaggagtagtagtggtagagtcacatttcatstgtcacagttcttcaaataaatgattcaggatctttatcacgtttgtttggttttccaatgaaagttctgcttttcactgcagctgatctgattgcaacacttgctaccctcatcaagtggaaactttgctcagctttaatttttcagtcagaattttgtatgctaaaccaattgagatgtgtatggcgttggctttgttttctactattagtcattggccttcttgtattagagcactagcaaaatggatttttcctcacaaattgatgtggatgtcctgtggcttcaggcttcatattcaacagtatctcctctttcttaaaacgagttgtcaatgattaaactgctgatttctttggatacattgatctcataaacctctcctaagcatctattatttcaccatttttccacccaagctt

SEQ ID NO: 176851 - DNA, 567 bp, Homo sapiens
aatctgtactactataaatgtataaatatggtgctacggccttctgaacttgatgttgttatactatagggagaaagctatttttacatgtactggtggaattacaaaaacctgaagtcaataataaagtccatctgtatgtcacatccactgcacggctggcagcatggttttctccattgtgcgaattgcaaaaatcaaatttattgaggagatatagaaagcttaacatattttatgaacaatataaagtgtgactcactcctgtaagtctaaaatcaatagctaaatgtctaagaataaaaaaaggcccttaatttcaayaaatacaacacatttttctactacgctgtttctactaaaatatcccttcttgagggattaaatctcatccctgctgactcccattgagtaataattaatgtggttcatttttgaatagaaagattgtgatgtttttaaaattaaaaacactgatcaatttctgataccattattcaaccaaagggaaaatgctccggacttttagagaaatggctgatgataggaatatggtagcaaatacat

SEQ ID NO: 176852 - DNA, 567 bp, Homo sapiens
aatctgtactactataaatgtataaatatggtgctacggccttctgaacttgatgttgttatactatagggagaaagctatttttacatgtactggtggaattacaaaaacctgaagtcaataataaagtccatctgtatgtcacatccactgcacggctggcagcatggttttctccattgtgcgaattgcaaaaatcaaatttattgaggagatatagaaagcttaacatattttatgaacaatataaagtgtgactcactcctgtaagtctaaaatcaatagctaaatgtctaagaataaaaaaaggcccttaatttcaataaatacaacacatttttctactacgctgtttctactaaaatatcccttcttgagggattaaatctcatccctgctgactcccattgagtaataattaatgtggttcatttttgaataraaagattgtgatgtttttaaaattaaaaacactgatcaatttctgataccattattcaaccaaagggaaaatgctccggacttttagagaaatggctgatgataggaatatggtagcaaatacat

SEQ ID NO: 176853 - DNA, 271 bp, Homo sapiens
tgttatcagaacattttgcctgaatgaaaataaattataacattgaagaattacatttctggttattttcccaaaaagataaaagcagctcatgcactagtcaaacgtggatgcaaaccaaactccaccaatatatgagcatacactatacatccacacgttgaataacattcaaygaaaaaaagaatgatgtatttatacaggttacaaaatgagtgaacataattagggtttcagaaagaaaccaggcaaatagattccatatgccatc

SEQ ID NO: 176854 - DNA, 549 bp, Homo sapiens
caaataatttgaataaattattttataattagttgttcaaataattgctgttgtttttgtctcttcagaggactctgactaatacatcatgttttaattggtggcattattttgctcttgctttgcacacaaaattatgtctcttattgatggcagctttatttgatgatatttaacatttagcataatagtattaattcaattttacacagtcaattgctgatasaaggactaagtatttttttaaatgacatgggagcaaaaatatagttagaatgaataagatcgaatatttgatgacaacagtgtgactatagtcgccaataatttattaaatattttaaaataactaagaaaaattggaatgttcctattcataattattttggcaagaatgcgattatagctactccaatagctagacatgaaaggaaaaaagggatacattataattttaaattgtgacataatttttttttaatatgtaaatgacaactaactcaggataataatctggccaaagctatttactatactatatctccattt

SEQ ID NO: 176855 - DNA, 555 bp, Homo sapiens
tcaataacataaatttttgaactgatcattcgtgtgacattaagtaaataatcaaacgtttcaaggctacccaaggaaagtagtagctgttctattttgcttcttagccactgaacccgatgaagcacctttgctttttaaagtatattggaccttggtataaattaagcctctaagtttcaaggaacaagtctgttctttttagttttcgtcaatgaagtgcatttcctcacatcccaggttagtgaaggtcatgaaataaaatmtagactttacatttttattttgttaaatgatgttgaagggggcttttttttttttaataactggagagtcagtactaagactacagataaaaacaaaaggtttctttagatttcttttttcatttttaaacttgttggatttctggaaagttcatttatataaaactgagaaataatcatgtttagccataaaatgaagttaggttatcagcccatatacttattaatatgattttaactaaacggaatgcctgcaggtctattgaatgatatgtgtaacacactacag

SEQ ID NO: 176856 - DNA, 492 bp, Homo sapiens
tatcgtcaggagtatttcccaaatatgacaaaaataaaaaatacacccaccaaatctaaaattcctcgggattcagttcatatcacataaaaaatggctgaagtaaatgattatttccttctcaaaacattttcatttcttggcatcgtaaacaccaaagttctgcaattctcaccctgcctcactggatgccatttctaggcttctctgctggttcgcgttccaaatctttcaatgttgaaatgcaccgggctcagtcgtagcacgttcctctttatttaaagatattcacatactgctgttttcctaatgtgtttccccaacttctcctcctcctyctctgggctctggattcattgcatgatccattgcatatttaacatctcagtttaatgtgtataggcatcttcagctaacatatgctctcagatttctaaacaaattttattccccaacctgcacatcccacggtcttcctcatactggcaaata

SEQ ID NO: 176857 - DNA, 603 bp, Homo sapiens
aataactgttggctattattagcagaaagacgacgtgctttggaatcaaatccattggggtttaatgcaaatgcatctgggtttaaatctgcctcctctgaaatgtttggcaaggtttttaagttctatgtttcagttacctcatgtgtaaaatgagaataataacatctaccttaaaggtaaaaacagcctagtcctaaaaggcaaggatatcagataagagatataaaattcgtaccaaaatgccttggacacagtaaatgcttattaaatatcaataccaatcctcctctcttctgaccttggaaagtctcagattgaacactggcaagctgttgcttcctctggtgtaaaggttttccttggacttatccaagaatcaggtggccgtttacctcattatgagagcagctccctactcatttgtgaaacaytaaacctcctgctaggaaaggagtcctgatgaatcttttttctcattaagtcattaaaaatgtacaaagacaaacacagagaaatttcaagaggcataggctcttacggtttatattagcaaaggttgcagctttttcttttttctcttaatgggaattttcaattctt

SEQ ID NO: 176858 - DNA, 499 bp, Homo sapiens
acttgttttgctgtagagaaggacactttaaatgacagctctgtacttttggtctcacctatgccttggcagcacaatttgtattccaatttttactggaaagtattattttgcacttgtttcagaaaaactctgttggtttatcaggaaggttgttatgctgtgtttaaaaataaggggaaagcttgagttacttcatgaccctatatgagaaagtttcataacagaaaatgcactatagacacggggtgaatgcatgaataatcttataaaatctattggatttacttgtcccagtctgtctctctgtctgtctgtctatctatctatctatctatctatctatctatctatctatctacctatctctcatatatctatctatatatagagagaggtraaatatttatacttgagttttggtgatcatttgcatttacattaccctgagtcgtatgtgtttactactatattattactctttttgcatttcagaata

SEQ ID NO: 176859 - DNA, 558 bp, Homo sapiens
tggctcatggtaggtgttccttacacatctgaacaatgaatgaataaatgtttggccttgatatgttgtttactctagacatccctcaacacacayaccacaacaacagcttcagagtctgtagcaggttgtagtaaaagaagaaacagaggatctcgtgagatttctagaatccttttggatcaaacactctagatggttacatcaaggttccaacctacagacaagtacatgttagtagatggggaggctggctgatgctgacacctttctgtgcatagataaagatctagttttgggggcatggggcatggagtcattctgtttgaggcagagcacagtggcttctatgtctacatttgcctctcactgcatactcatggccaacactgagattttctcctatgaaaacaggaactccctcaaacaggaatatggctgcagaaaagaaactttccagtggaagcttgcaaaatcagaggaatgtactgtatgtgcaaagatttattttttgatttgagattggttttggggttagggtaaaatagaaaaggaaag

SEQ ID NO: 176860 - DNA, 607 bp, Homo sapiens
ccttcctccctctgcatctccaagagctctgcattttattaattctttccactgctacataaaaaaatcaaaattggagctgagctataaatcactggcatcttctaacttgagaaaaattgagtctactttgtacttcacccttgcaacatttcatctctcggtttggcttcccttaatataaacactgcgcccagcaaatgaatgtgctaaaaccaaatgacacacttygctgctgaaagagcagaactgttttcgagcaatgggtggtcttctgaggcaccgaataggccgaaaggcggaaaaaaatgtgtaagcgtacaccattccttacaagtgggcagagcttccaaaactcgcagaaatctctgcatgttgaagcacatcaaagggatttttcccttttcagataatatttcctttgctgacatgtatttagtattgtggttgaatgactcataaagatagcttcatggcgtcccaacgcagttgaagtggaacacatgccaataaacattattgtcagcctcaaaataaaaacaaaacgttcagctaagggtcaatcaatcaagtgtgctttgaagaaaattccatttagatattacaa

SEQ ID NO: 176861 - DNA, 607 bp, Homo sapiens
ccttcctccctctgcatctccaagagctctgcattttattaattctttccactgctacataaaaaaatcaaaattggagctgagctataaatcactggcatcttctaacttgagaaaaattgagtctactttgtacttcacccttgcaacatttcatctctcggtttggcttcccttaatataaacactgcgcccagcaaatgaatgtgctaaaaccaaatgacacacttcgctgctgaaagagcagaactgttttcgagcaatgggtggtcttctgaggcaccgaataggccgaaaggcggaaaaaaatgtgtaagcgtacaccattccttacaagtgggcagagcttccaaaactcgcagaaatctctgcatgttgaagcacatcaaagggatttttcccttttcagataatatttcctttgctgacatgtatttagtattgtggttgratgactcataaagatagcttcatggcgtcccaacgcagttgaagtggaacacatgccaataaacattattgtcagcctcaaaataaaaacaaaacgttcagctaagggtcaatcaatcaagtgtgctttgaagaaaattccatttagatattacaa

SEQ ID NO: 176862 - DNA, 413 bp, Homo sapiens
aatgttgctttcaaaagtatgccttgcctaaatggttaaaatgaacatttcctttaaaaatgtccaaaagtgtctgcagagttgaggctgctacaaagcagcaggataaagacttcacccaatggagaggcctagcatgtacctctctctctccaastgttggttctcctcccattccaatccctaaaactgtcccacactgaggactactgttaccatccctagtcttccctttcactgactcctcaaaccatccccccaccccattcatgcctcagtgcttctcttcaggccccagttctcctctcataaggatcctggtagctgtaatttatacctagttgtgaaggtgggtcaaggagctactcttgaaaagaatatttgcactttgatctttatccttaagtgaagtt

SEQ ID NO: 176863 - DNA, 428 bp, Homo sapiens
gaattctatgggatacaatgttgctttcaaaagtatgccttgcctaaatggttaaaatgaacatttcctttaaaaatgtccaaaagtgtctgcagagttgaggctgctacaaagcagcaggataaagacttcacccaatggagaggcctagcatgtacctctctctctccaactgttggttctcctcccattccaatccctaaaactgtcccacrctgaggactactgttaccatccctagtcttccctttcactgactcctcaaaccatccccccaccccattcatgcctcagtgcttctcttcaggccccagttctcctctcataaggatcctggtagctgtaatttatacctagttgtgaaggtgggtcaaggagctactcttgaaaagaatatttgcactttgatctttatccttaagtgaagt

SEQ ID NO: 176864 - DNA, 428 bp, Homo sapiens
gaattctatgggatacaatgttgctttcaaaagtatgccttgcctaaatggttaaaatgaacatttcctttaaaaatgtccaaaagtgtctgcagagttgaggctgctacaaagcagcaggataaagacttcacccaatggagaggcctagcatgtacctctctctctccaactgttggttctcctcccattccaatccctaaaactgtcccacactgaggactactgytaccatccctagtcttccctttcactgactcctcaaaccatccccccaccccattcatgcctcagtgcttctcttcaggccccagttctcctctcataaggatcctggtagctgtaatttatacctagttgtgaaggtgggtcaaggagctactcttgaaaagaatatttgcactttgatctttatccttaagtgaagt

SEQ ID NO: 176865 - DNA, 400 bp, Homo sapiens
ttttctggcatttaaaggcttcctgtattccttggctcagggccccttcctccatcttcaaagccagcagtatagaatctttccatttctctctctctctctctccctgcccccctttctctctccatctgtacttctcttcctcccttttctctccctcacatgcacataactctccttccccgatcacatctactcccctacytctgacttccctgccttcctcttataaggacccttgtgattacattcagcacacctggataatccaggataccctccccctctcaatatccttaatttgatagatctgcaaagatcctttgctatataatgtgatattcacaggttccagggattaggatgtggatgtagacatcttttggtgggcgggaggggc

SEQ ID NO: 176866 - DNA, 395 bp, Homo sapiens
cttgccttttctggcatttaaaggcttcctgtattccttggctcagggccccttcctccatcttcaaagccagcagtatagaatctttccatttctctctctctctctctccctgcccccctttctctctccatctgtacttctcttcctcccttttctctccctcacatgcacataactctccttccccgatcacatctactcccctacctctgacttccctgccttcctcttataaggacccttgtgattacattcagcacacctggataatmcaggataccctccccctctcaatatccttaatttgatagatctgcaaagatcctttgctatataatgtgatattcacaggttccagggattaggatgtggatgtagacatcttttggtgg

SEQ ID NO: 176867 - DNA, 541 bp, Homo sapiens
aaaaaaaaaaaaaaaaggaaatgattaatatgaaataaatatatatcaggaaaaatattaattttagtcaaaatttttgttctttatgacatgttttggcaattatgtttattttttcatctaaaatttctaactgcagagtgtcacttggaattcttgcttttcacagggtcaacagtgacatatattcagaatttgcatgatatactgttatgtctgtattcacaagtacacatatggctgcacacacatttttacagacagtgccaaatatgccactatgttgatttgttgtcatttaatatttatggacaggtcacaatackctggacactgagatgatcttctattcagaattcaatatccagtgtcaaacctacctaatgaattgctcctgatttgaggtctgtggtcaaaaaggcttcacatgttagggcttccttatgatttttctggatgttactgagtaattctcgcattttcatcttgcaagttggttctttgttgtgaggattttcagctagcattttgcttactgaaa

SEQ ID NO: 176868 - DNA, 569 bp, Homo sapiens
gggcacattaataattgagataatgttttcataaatgttggaatcaaatgtgccttttcacttctttattggaaaacacatyaggataaaattatctcattctcatcaataagacctaattgctgagaaagattgttttctttggaaaacattgagaaagattttatttcatatgatgtccaaatagctagaaatgtatcatgcatccaagtcttggaataaatatatataaccaaggcaagtcattgtctgatgcaccttgtaatgttttgttttaaagtatctgaatttattattgtttaaaaaacacattaaaattctgattctaaaagaaactagcaaaaataaatgactaattatttggcttttagcttgtaatcttcttaaactataaaaaataaaaaattaccttggcttattgcaaaaaaagaaaaaacaactctcttggaatttcccataaatacccagaagagtcaaaatgtactgaatataatgaaatgatatttaacttcctttaaattgctgtattttgaagaactatgattatacacaaagaaaatattaactaa

SEQ ID NO: 176869 - DNA, 569 bp, Homo sapiens
gggcacattaataattgagataatgttttcataaatgttggaatcaaatgtgccttttcacttctttattggaaaacacattaggataaaattatctcattctcatcaataagacctaattgctgagaaagattgttttctttggaaaacattgagaaagattttatttcatatgatgtccaaatagctagaaatgtatcatgcatccaagtcttggaataaatatatataaccaaggcaagtcattgtctgatgcaccttgtaatgttttgttttaaagtatctgaatttattattgtttaaaaaacacattaaaattctgattctaaaagaaactagcaaaaataaatgactaattatttggcttttagcttgtaatcttcttaaactataaaaaataaaaaattaccttggcttattgcaaaaaragaaaaaacaactctcttggaatttcccataaatacccagaagagtcaaaatgtactgaatataatgaaatgatatttaacttcctttaaattgctgtattttgaagaactatgattatacacaaagaaaatattaactaa

SEQ ID NO: 176870 - DNA, 569 bp, Homo sapiens
gggcacattaataattgagataatgttttcataaatgttggaatcaaatgtgccttttcacttctttattggaaaacacattaggataaaattatctcattctcatcaataagacctaattgctgagaaagattgttttctttggaaaacattgagaaagattttatttcatatgatgtccaaatagctagaaatgtatcatgcatccaagtcttggaataaatatatataaccaaggcaagtcattgtctgatgcaccttgtaatgttttgttttaaagtatctgaatttattattgtttaaaaaacacattaaaattctgattctaaaagaaactagcaaaaataaatgactaattatttggcttttagcttgtaatcttcttaaactataaaaaataaaaaattaccttggcttattgcaaaaaaagaaaaaacaactctcttggaatttccyataaatacccagaagagtcaaaatgtactgaatataatgaaatgatatttaacttcctttaaattgctgtattttgaagaactatgattatacacaaagaaaatattaactaa

SEQ ID NO: 176871 - DNA, 556 bp, Homo sapiens
tttgagggtgtaggggtgggcgggggtggggaggaaggaggaaggggaggagaatctcatttcccacatgtgtaattttttctccttaagggaatacatgagccaacagtcaccgtctgcaaatgcagtttgtaggggaaaaaaacagacatgaatagatagcatttgactgggtacaaccttctaaatcagaatgttttaggtgtttgtgcccttaagtaytttaagtctccctttgttgttgaatttctgcatgttattcctggctgtcactctcactatcctcgcccctaccccaaatgctgaggctttcctcaataacaaacaaaaatattttatgaaaagtaggttttacactaagaaagttgattgcccactccctagcaaggaggggtaaagtggtttggaaaggatctgtttattgatctataaatcatgatcaccatgtctgacccagctgctggggtgcccggggtcaaggaaccctttcagagctcagaaggtctaaagcttctctctttgtagggctcttaatcaaccctcccaaggcagaaag

SEQ ID NO: 176872 - DNA, 609 bp, Homo sapiens
tacaaataacctttagaatctattctaaagtttacacaaccacaacaatataaacatggaatctagagaaagaaaaataacattacccttgttctgtttttatcagatcacatagggtagagtgctaaagtgcaaagagaggagtgatgtagatagtgaaggtgatgctcaacaakccacttatcttatgagttggaaacattttaatagacaactagagataggggcagtagctccaaaggatataactctaaccaccaagtaaaagttaaaaataggaagattttgaagctgtataaaataaaaacttcaactcaaaagagttactaataaagcaagctgcttatatggtagtcaatcttccatcactgagaattttttaaaaagtggaaagattatttgtagacaagattgctacactgagcaggagtttagggtatagaactataagtatatttttaataacaagaaaatattgcaggcatttttttaaagtggagttacttttgttttatgttttctgaatttaacaaagaatactacttttacatcaacccatatgtaatatgggtaatcaaatgtactggcaaaataaacaataactttaaa

SEQ ID NO: 176873 - DNA, 527 bp, Homo sapiens
atttctgtctgctatacattagctgtatgaatctatgccaattacttaatttatccaagtgcaaataaataaaaagtagaaatagatgatatttaaatgttttcttacatcagaaaagttaggctcaataaaacagtactttaaargtttatctgtgtgtttacctatatgttagataagagggtgtcagaaaaaaaatgactccatgacttaccctcaagatgtttaaaactaactgtaattcaaaggcttttatttattttgtaaaagaatgttccaatgacaaaactgtgaagttgctaaaataggctctattaataatgaatgaaataatatttattgatgtgagttgagaatttcattattattgctccccaaataaccagaagacagaacgaaagggatatcactttttttaattatgctttagttggtagcttaatttggctgtaaaaagagggaggagttcatctccctgagcatattctcactaagtaacacactgtgtagcacttttaaatgcaata

SEQ ID NO: 176874 - DNA, 493 bp, Homo sapiens
caaaacagtgttatgtttatgctttaaggcacctacttctacactatataaacaaagtaataataggtaaaatataaaaatataaaactaaagtgctatgattggactcaaatataagacaaattactgtggtccagaaatacaactttcctgcctaatgggactgaatcagcacgtgtgctgcactgtggatccagagacaggcaacatctcaagtttggctctggtgaggtaatggacatcagtattgctccaaaagaaacattaactggaaacaggcacatggcctgatgtcaagaggtgggaagactcatgacagaaccagcatagtatttaaggaagatgaatccaaactgtttccaatctgctgaatgtaactatgacagwtataacaatataggcaaaaaggcagaaggacaaaactaaactgcatgatcagaacagctaagaacacaccttgctcccaagacccagactaggagatctggctcta

SEQ ID NO: 176875 - DNA, 618 bp, Homo sapiens
ctgaattccagcttgaggatttttagacttgtatactttattttagtaaattaagttcattgtatataagcataatataattaaacagcaaagctgaggttattacaatcattataaaatatatcaactgtagaaatatgtcatacggttgtgaaaagaatgagaaaataaagtagtagttaactgatgaaatgatagatgtttttatattgtattaatcttctaactgaaacttttttattgaaggtaaaggaggagaaatraaaggataaaaatgaatttatttttaaatcaacatgtacaatgagatctctgtgtgtttcctagttatgcagggaattaattcgggggacgaaagatgaaaggaaaaagaaacagatcaaagttttcctagtttttctgcctttaagttatccttccagtgagttactttagaagatttgttattgttattttgccatccacaagtgttagctttattccaaataaggcaagggttctatttctaaataaataatattatagcaaaagttaaaaattaaatattaagcaaaatagtttatccatttaaactaacttggaacattattagaatatttttaaaatcctaagaaccaa

SEQ ID NO: 176876 - DNA, 618 bp, Homo sapiens
ctgaattccagcttgaggatttttagacttgtatactttattttagtaaattaagttcattgtatataagcataatataattaaacagcaaagctgaggttattacaatcattataaaatatatcaactgtagaaatatgtcatacggttgtgaaaagaatgagaaaataaagtagtagttaactgatgaaatgatagatgtttttatattgtattaatcttctaactgaaacttttttattgaaggtaaaggaggagaaataaaaggataaaaatgaatttatttttaaatcaacatgtacaatgagatctctgtgtgtttcctagttatgcagggaattaattcgggggacgaaagrtgaaaggaaaaagaaacagatcaaagttttcctagtttttctgcctttaagttatccttccagtgagttactttagaagatttgttattgttattttgccatccacaagtgttagctttattccaaataaggcaagggttctatttctaaataaataatattatagcaaaagttaaaaattaaatattaagcaaaatagtttatccatttaaactaacttggaacattattagaatatttttaaaatcctaagaaccaa

SEQ ID NO: 176877 - DNA, 415 bp, Homo sapiens
gagggtacaggagtccttggtaaggcttttcatttaataaaaagcagcccccaaaccatttcttttctagcagaaaacagcctgaaaagtcaggctgcaagcatagacaagcamgctggaagcttgcattaatgctggcagctgtacctaaaagccaggtacatccaacatggcaattcctctctcccttctctttggcaccacatgtgcagatgtcatggtgcaagccaggaaaaaaaccccatctgcataataaaagattaaggtggcatggccagtttctttgtgggctatgtaagtggcacacttggtcaaaccaatcctgtgggccctttgtaaatcagacactgccttacactgtcttctgaaacacctttatataaccaactatttcctgccacgcacagggaaatcc

SEQ ID NO: 176878 - DNA, 432 bp, Homo sapiens
tttaatctcactgcttgttattggcctgtttaaagtttctatatcttcctggkcaccaaaacagcatgatactggtataaaaaatagacacatagaccaatgaaacagaatagagaaacctagaaataaagccaaatacttagagtcaactgatcttcaacaaagcaaacaaaaacataaagtgggtaaaggacaccttactcaacaaatggggctggagtaattggcaagccacatgtagaagaattaaactagatcttcatctcccaccttatacaaaaatcaactcaagatggatcaaatacttaaatctaagagctgaaaccatgaaaattttagaagataacatcagaaaagcccttctagatattagcttaaggagagacttcatggccaagaaccgaaaagcaaatgtaacaaaaacaaagataa

SEQ ID NO: 176879 - DNA, 432 bp, Homo sapiens
tttaatctcactgcttgttattggcctgtttaaagtttctatatcttcctgggcaccaaaacagcatgatactggtataaaaaatagacacatagaccaatgaaacagaatagagaaacctagaaataaagccaaatacttaragtcaactgatcttcaacaaagcaaacaaaaacataaagtgggtaaaggacaccttactcaacaaatggggctggagtaattggcaagccacatgtagaagaattaaactagatcttcatctcccaccttatacaaaaatcaactcaagatggatcaaatacttaaatctaagagctgaaaccatgaaaattttagaagataacatcagaaaagcccttctagatattagcttaaggagagacttcatggccaagaaccgaaaagcaaatgtaacaaaaacaaagataa

SEQ ID NO: 176880 - DNA, 432 bp, Homo sapiens
tttaatctcactgcttgttattggcctgtttaaagtttctatatcttcctgggcaccaaaacagcatgatactggtataaaaaatagacacatagaccaatgaaacagaatagagaaacctagaaataaagccaaatacttagagtcaactgatcttcaacaaagcaaacaaaaacataaagtgggtaaaggacaccttactcaacaaatggkgctggagtaattggcaagccacatgtagaagaattaaactagatcttcatctcccaccttatacaaaaatcaactcaagatggatcaaatacttaaatctaagagctgaaaccatgaaaattttagaagataacatcagaaaagcccttctagatattagcttaaggagagacttcatggccaagaaccgaaaagcaaatgtaacaaaaacaaagataa

SEQ ID NO: 176881 - DNA, 432 bp, Homo sapiens
tttaatctcactgcttgttattggcctgtttaaagtttctatatcttcctgggcaccaaaacagcatgatactggtataaaaaatagacacatagaccaatgaaacagaatagagaaacctagaaataaagccaaatacttagagtcaactgatcttcaacaaagcaaacaaaaacataaagtgggtaaaggacaccttactcaacaaatggggctggagtaattggcaagccacatgtagaaraattaaactagatcttcatctcccaccttatacaaaaatcaactcaagatggatcaaatacttaaatctaagagctgaaaccatgaaaattttagaagataacatcagaaaagcccttctagatattagcttaaggagagacttcatggccaagaaccgaaaagcaaatgtaacaaaaacaaagataa

SEQ ID NO: 176882 - DNA, 677 bp, Homo sapiens
atgattctttgtattaggagttgtcttgtgctttgtagaatggctaacatcattcctggcatctaccatctagatgccagttgtaccacctccatccctggttgtgacaatcaaaaaggtctccatatattgccagatgttctctaggcacaaaataaaccaatttgaaatgatggcattagaccctacctctttattttgaatccttccatttcttttccattccactcctaactccctgttcaaagtcagtgtcttctcttgtatgaactattaaagcaatttctctttgttttcaatcatggttctttatgattcattcttcacacagcagccatataaatatattttgtcacttttcaatggcttcactggggacttaaaataaatattaaacttytcacctatggctacgaggcctgaattacttggcatctcttcatctttctggacttatgttctgcctttcttacccaatctcatgacattttcgacatctggaatttcttcactttttctatgttaacttagctcattttcatctttggctcttttgcaggtctctgcctggaatgctcttctggaatgttgcatcactcacctttcagttcaaaattaaacattgtcttctcaaatagtctttctctgatcacaagctctaaatcagtcacatttta

SEQ ID NO: 176883 - DNA, 527 bp, Homo sapiens
cttcacacggtgttcagtctcttgcccttccactttccacgtgaggacacagtgtccccccatccagagagtaaagccctcaccaaataactgaacctgtcagcacctttgtctcggacttttcaggatccagaactgtgagaaagcaatttcttttctttataaactacccaatttatgatattttttgttacattagcacaaagtggactaagacatcatctcataaatcatagaatcaatttagagaactcatccttaagagtctttttctggaatcattcccaatgctgaattacatgtcacttagggttcaatcagagaagtggaaccaatagtggataatagagattgctacttacaccattattaattccctaacccaaaactccaaggtccacatgtcattttcstgaaatatcaattgtggaagaaactttgtgtccttttgttaggctcaggtaatcgatcctgactctcctctcatggtcagccaattaatatcatttagcttgtaatgtcccttg

SEQ ID NO: 176884 - DNA, 593 bp, Homo sapiens
aactcaaacaactcgacagtatagaagcaaacaattgcattaaaaagtgggcaaaaaaatgaatagataattttcaaaagaggattacaaatakttaacggtatatgaaaaaatgatcaatatcaaagcatcagagaaatgcaaatcaaaaccataatgagatatcaatttattccaggtagaaataaaaagacaaaaattattattgtctttaacttatttaactagtattaacttgctgaactattattaaaaatacaaaaataaacagatgtggacaaggatgtggagaaaggggaacccttgtacattgttgatgggaatgtaagtcaatacaaccactatgaaaaatggaaatggaaatgaaaaacggcatagagatttcccaaaaaagtaaaaatagaatttttttatatatagaactttatatatagaagtttttgtgtatatgtgtgtatatatatatatatatatatatatatatatatacacacacacaaaagaatactattcaacaataaaaagaatgaaatcatgtcatttacaacaaaatggatgccaattggaggttattatgttaggtgaaacaatcc

SEQ ID NO: 176885 - DNA, 488 bp, Homo sapiens
tatgaaaaatggaaatggaaatgaaaaacggcatagagatttcccaaaaaagtaaaaatagaatttttttatatatagaactttatatatagaagtttttgtgtatatgtgtgtatatatatatatatatatatatatatatatatayacacacacaaaagaatactattcaacaataaaaagaatgaaatcatgtcatttacaacaaaatggatgccaattggaggttattatgttaggtgaaacaatccaggcacaaaaaaattccacaggttctcactcacatttgggagctaaaaaacttggtcccatgaagacagtgaatagaatgatagatactatagactaggaagggtgtgcagatgggagggagagaggaagagaggttggtgaatgggtataaatttacagtaatttagaagtaagctctcatgttcagtagcgaaatgaattgactgtagttagcaacaatgcattgtatacttcaa

SEQ ID NO: 176886 - DNA, 597 bp, Homo sapiens
agctatttttattctctggcaatttgccagcattatataagcaatcccttggccagctttgagctttgtttactgctagctaacataagatttagaatgagtgtaatcttcagcttttgtaaagagtatcaaatgataaattgagtaatcagatctttgcctgaattgcttactgcagtgaaacatttawtaaatgtgtagtaaaaatatcagttaatctgtccaaaaagctggatacattcatttgctttctttcatccagcttagttgtctcattggagaaagaagggaaaagaaaaatgatgtcctaattatttatgtgtttacaagtttgttttcttttttgcttagactgctgttaaactggctcactccatatactctgtgctacagcaatttaatatttcattaaaaagcattaatgatggctccagtgaatttctcctattcaagctccataatgacagcagttcaagcgagtgttgatctctgagtgatgcaacacaaaaacatcgcctaacaaaggaacacttggagtactactcatattctctgcaacttgaggtaaagttggagagctagctgctgagtggtacc

SEQ ID NO: 176887 - DNA, 388 bp, Homo sapiens
tgaaatctgataagtaaatttgccacaatttcgtggttgctgaaagcacagacatgatttctgggtcagagataaagaattttaatttttacagaattagcactagccagaatatcattttttttcctactgattttctgagccccaatctccatgcggagtgtaccaagtaatgcctatgcaaacactagttgtgtgatatgagcactctgagcttatgaaacctgaatctttcatagcggccagtaagcatgcttaccttttgttctggagagagcaaggaygttggtaacacaatttctcatactggtctatagataaacagaaaacaaaaattgtacttggagaaaatgttgttgtagtacttaaaaaagaaaaggcaacagaa

SEQ ID NO: 176888 - DNA, 523 bp, Homo sapiens
aattagtttcatcaaattttcttaggttcatttggttgtttttttaaaactatcttcttgaattaagtatgtaattaatttgcgttcattttttgtttttagaaatgaaaatatttaaaacaaatttccactgcagtgctgtagttgtatcccatgttttcataacattctctataacttctgttttgtcctttctttgaagttatgtaagtgtaacactttaaaaattatctcatttttagacactccaaaattctgataaatcacagtatagacactattctatgactataacayacaaagctagaatatagcaaaagaaaactaaaaacaaagttagagacacttagaatctctctttctttctctctctatttatctctctcagatatacacacacatacacacataaatacttatgttaactccaaacaaggacttaaaagtatcaaactaatgaaatgttacaaatatttcttatgaatcaattaatactttaaaaatcctttaaaaagcaaagccc

SEQ ID NO: 176889 - DNA, 523 bp, Homo sapiens
aattagtttcatcaaattttcttaggttcatttggttgtttttttaaaactatcttcttgaattaagtatgtaattaatttgcgttcattttttgtttttagaaatgaaaatatttaaaacaaatttccactgcagtgctgtagttgtatcccatgttttcataacattctctataacttctgttttgtcctttctttgaagttatgtaagtgtaacactttaaaaattatctcatttttagacactccaaaattctgataaatcacagtatagacactattctatgactataacacacaaagctagaatatagcaaaagaaaactaaaaacaaagttagagacacttagaatctctctttctttctctctctatttatctctctcagatatacacacacatacacacataaatacttatgttaactccaaacaaggacttaaaagtatcaaactaatgaaatgttacaaatatttcttatgaatcaatwaatactttaaaaatcctttaaaaagcaaagccc

SEQ ID NO: 176890 - DNA, 599 bp, Homo sapiens
ccacagttatcattagtagtgaagcagttgtcactcaatttacccaggagagagagctttttggcttttttgtcttgttttgggaaggatcagcattcatttcttgtggttgctgcaacagatttgttagttcaaaccaacagaaatttattttcctacagttctggtagccacaaatccaaaatcagtttcactcagctaaaatctagatgtcagtagaattgtgcttcctctctccagaggctctgcctcttmtaatttatggtggctactggcagtccttggcttgtggccacaacactcaaatatctaccaaatatcatcttcacactgccttctcctctgtgttcctgtgtcaaatctcctctatctctcttatacaaatacacgagatgacattttagactcatctggatagtccatgataattttctcatctcaagatccttatcttaatctcatctgcaaagaccttttttcttttccaaataaagtaacatttacaggttatagggattagaataagaaggtactatttagtccactagagtgtccttttgttttcttggcattcagatataattatgaaatagtattgt

SEQ ID NO: 176891 - DNA, 543 bp, Homo sapiens
gaagtcgtgaatatttatgaaaaaggaaaggttcatatgcaattgagcttcatgccccttcatgggtcccatgtacaaaaaatggtagttagcatgatcccaccatggagttttggactctctgatgtcaaaagattaagcagaggcatgaaaatccttattgtgcattctccatagactggccagaaccactctgtgtctagtagtcttttatcaggcaaaaatgctgtgcagttgtaacaaaagagaggagcagcatcaggtagttggttgaaatcagcagtgcagaaagtcttttgaaagggctggtttctgtttagtccttakagaaaaaagtctaatggcagttagtgagggagagggtataatgaggcatgcctgacctcctatcttatcatggctgagaacttagttttcaaaatttctctggggtccctttggccaagggaaggctttttcactcagttggagggcttaattttattaatattttcatttgtcattttcctcctattggcctggatttgttagaggcagcatcaa

SEQ ID NO: 176892 - DNA, 543 bp, Homo sapiens
gaagtcgtgaatatttatgaaaaaggaaaggttcatatgcaattgagcttcatgccccttcatgggtcccatgtacaaaaaatggtagttagcatgatcccaccatggagttttggactctctgatgtcaaaagattaagcagaggcatgaaaatccttattgtgcattctccatagactggccagaaccactctgtgtctagtagtcttttatcaggcaaaaatgctgtgcagttgtaacaaaagagaggagcagcatcaggtagttggttgaaatcagcagtgcagaaagtcttttgaaagggctggtttctgtttagtccttatagaaraaagtctaatggcagttagtgagggagagggtataatgaggcatgcctgacctcctatcttatcatggctgagaacttagttttcaaaatttctctggggtccctttggccaagggaaggctttttcactcagttggagggcttaattttattaatattttcatttgtcattttcctcctattggcctggatttgttagaggcagcatcaa

SEQ ID NO: 176893 - DNA, 191 bp, Homo sapiens
ctatctgaacatatatactcaaataaatcactgcaagtgtaaatgtactctaaatgctaaacaaatatgtgcttctatatatgatcatgggattaaacacagggccttttagcaacasgatgcgtggcatgagtctttttttttaatgactctgaaaacattctcactatctgggaagtagtagaaagctt

SEQ ID NO: 176894 - DNA, 475 bp, Homo sapiens
ggagtcatcatattcaatctaccattggaagagcagatgagttttttcaggctaaagaaagttttatttttaaggggtcttcatctctttatttcattccaatagaaggagacagcatttaagtgattacattctactgaatagtttgggatgagagagattaatgttgatctttgtgttagtctgttctcaaattgctataaaataaaagaatttaaaaattgctataaaataatatgtgagactgtgtaattcacaaagaaaagaggtttaatttgctcacagttctgcaggctgtataggaggcatagcagcttctgcttctggggaggcctcaggaatcttataaccacggtgaaaggtraaggggaaacaggcattttcacatggctggagtaggagaaaggtggggtggtttaacactttacccaaaaagtgttaaaaaaaagccacacacttttaaacaactagatct

SEQ ID NO: 176895 - DNA, 475 bp, Homo sapiens
ggagtcatcatattcaatctaccattggaagagcagatgagttttttcaggctaaagaaagttttatttttaaggggtcttcatctctttatttcattccaatagaaggagacagcatttaagtgattacattctactgaatagtttgggatgagagagattaatgttgatctttgtgttagtctgttctcaaattgctataaaataaaagaatttaaaaattgctataaaataatatgtgagactgtgtaattcacaaagaaaagaggtttaatttgctcacagttctgcaggctgtataggaggcatagcagcttctgcttctggggaggcctcaggaatcttataaccacggtgaaaggtaaaggggaaacaggcattttcacatggctggagtaggagraaggtggggtggtttaacactttacccaaaaagtgttaaaaaaaagccacacacttttaaacaactagatct

SEQ ID NO: 176896 - DNA, 372 bp, Homo sapiens
gaattccctttgctgttattccagtgatgccattctatggagctggagtcctgttcctggatgctgccttctttctttgtttactccattgtttatttgggggcacatcctctagtattccaaaagttaaaatgaaggcttgatgacagcagatatgattatgacagatggcatggatatgtctatcttgtgagtcacactgcttcgckctggtatggttgtcctagatacttggtcacagttgtcatcctgagatctttattattacccaggattttttttttttttttatgttttcctgggttcattctcctgttttctttccttgcttttgtggaacagtcctctaagagcttactgggcataggaaat

SEQ ID NO: 176897 - DNA, 406 bp, Homo sapiens
ttcttgaagctccatatgtattttgaagttttatgatacgtaatcatgttctctactgaagtaatcaatttgaactgtaccagatgggtgttcagaagtcatcaactgatgagtcatgtatcgatcacmtagataactctcattgaaaaatgtgtctaagtgtgggtaaggaggagcgtggggggtagaaaatcctttatttctttgtggaaaatggccccaaaagaaagatagtgcagactgatgcaaatcacttggtctaaaaatggggaatagtgtttagtcagaactggtgactgtggagaattaagaagtagaattttattataggatgtgaaggagtcctccatatattatgaactgaagatagaaaatggttcataaaatctggtaggccatttaaaac

SEQ ID NO: 176898 - DNA, 406 bp, Homo sapiens
ttcttgaagctccatatgtattttgaagttttatgatacgtaatcatgttctctactgaagtaatcaatttgaactgtaccagatgggtgttcagaagtcatcaactgatgagtcatgtatcgatcacatagataactctcattgaaaaatgtgtctaagtgtgggtaaggaggagcgtggggggtagaaaatcctttatttctttgtggaaaatggccccaaaagaaagmtagtgcagactgatgcaaatcacttggtctaaaaatggggaatagtgtttagtcagaactggtgactgtggagaattaagaagtagaattttattataggatgtgaaggagtcctccatatattatgaactgaagatagaaaatggttcataaaatctggtaggccatttaaaac

SEQ ID NO: 176899 - DNA, 406 bp, Homo sapiens
ttcttgaagctccatatgtattttgaagttttatgatacgtaatcatgttctctactgaagtaatcaatttgaactgtaccagatgggtgttcagaagtcatcaactgatgagtcatgtatcgatcacatagataactctcattgaaaaatgtgtctaagtgtgggtaaggaggagcgtggggggtagaaaatcctttatttctttgtggaaaatggccccaaaagaaagatagtgcagactgatgcaaatcacttggtctaaaaatggggaatagtgtttagtcagaactggtgactgtggagaattaagaagtagaattttattmtaggatgtgaaggagtcctccatatattatgaactgaagatagaaaatggttcataaaatctggtaggccatttaaaac

SEQ ID NO: 176900 - DNA, 419 bp, Homo sapiens
agaatcttccctggctgagccccacttytggggttggcccgtgtcagtaggatggaggtccctgtttccatggggtcagtctcagcagcttctagaggccactccagtcctagctcatgattcccttcctccatcatcaaagctagcaacagcaagtcaggctttctcatgcttcaaatctctctcacctctccctccgcctcatctttccagctacatctccctgactgacttttctgccttcctcttctgcttctaagggctcatgtgattacactgggctcaccaggataaaattcctattttaaggtcagctgattagtaaccttcctaacatctacaaagtgtcccacagtagaaactagaccagtgtctgactgaagaaccagtagatggaatcttaaagaacagctttagaa

SEQ ID NO: 176901 - DNA, 427 bp, Homo sapiens
gaattctttcctgagtgaagccaagaatcttccctggctgagccccacttttggggttggcccgtgtcagtaggatggaggtccctgtttccatggggtcagtctcagcagcttctagaggccactccagtcctagctcatgattcccttcctccatcatcaaagctagcaacagcaagtcaggctttctcatgcttcaaatctctctcacctctccctccgcctcatctttycagctacatctccctgactgacttttctgccttcctcttctgcttctaagggctcatgtgattacactgggctcaccaggataaaattcctattttaaggtcagctgattagtaaccttcctaacatctacaaagtgtcccacagtagaaactagaccagtgtctgactgaagaaccagtagatggaatcttaa

SEQ ID NO: 176902 - DNA, 440 bp, Homo sapiens
cctggaactgaggttcctcctccttttagacatatagggtaacttgctgatgttgctatggcatttttaaactgtcatgaactggtgggagtgtctgttagcatgctaatgcattataattarcatataatgagcaaggaggacgaccagaggtcactttcatcgccatcttggttttggtgggttttggccagcttctttaccatttgctgttttatcagcaaggtctttgtgacctgtatcttgtgctgacctcctatctcatcctgtcactaggaatgtctcacctcctgggaatgcagtccagtaggtctcagccttattttacccagcctatattcaagatgaagttgctctggttcaaatgcctctgacacttatatttggacaaactttgtgcatgcaaactacaaacaaaaaaaaatctgtcagattgccac

SEQ ID NO: 176903 - DNA, 449 bp, Homo sapiens
gcaattcctggaactgaggttcctcctccttttagacatatagggtaacttgctgatgttgctatggcatttttaaactgtcatgaactggtgggagtgtctgttagcatgctaatgcattataattagcatataatgagcaaggaggacgaccagaggtcactttcatcrccatcttggttttggtgggttttggccagcttctttaccatttgctgttttatcagcaaggtctttgtgacctgtatcttgtgctgacctcctatctcatcctgtcactaggaatgtctcacctcctgggaatgcagtccagtaggtctcagccttattttacccagcctatattcaagatgaagttgctctggttcaaatgcctctgacacttatatttggacaaactttgtgcatgcaaactacaaacaaaaaaaaatctgtcagattgccacaaa

SEQ ID NO: 176904 - DNA, 446 bp, Homo sapiens
attcctggaactgaggttcctcctccttttagacatatagggtaacttgctgatgttgctatggcatttttaaactgtcatgaactggtgggagtgtctgttagcatgctaatgcattataattagcatataatgagcaaggaggacgaccagaggtcactttcatcgccatcttggttttggtgggttttggccagcttctttaccatttgctgttttatcagcaaggtctttgtgacctgtatcttgtgctgacctcctatctcatcctgtcactaggaatgtctcacctcctgggartgcagtccagtaggtctcagccttattttacccagcctatattcaagatgaagttgctctggttcaaatgcctctgacacttatatttggacaaactttgtgcatgcaaactacaaacaaaaaaaaatctgtcagattgccacaaa

SEQ ID NO: 176905 - DNA, 573 bp, Homo sapiens
tgcatgtgggatttactttccacctctttaactctaatcctaggtctgtttacacgttgattaaaaggtccttaaattgttttaggacataatgatgtttttctatttcaaggatggcttggaaatagagatgagcatacaagggaatgtgagagcatgcrggatctgtttattcttctcaactcttctgtttgtttgagtcccagtgtatgctgggtttgataaccaggactcaaggagaactgaaccaccgacagctttgtttactaagggtatgccaacatccctctgtggatctgacatttatatgccttatagagaagatttggttgggtttttctgtcccatccgatgtggatcacctgtactaagagctaaatttttctccaagccacctcacaatgggttgagctccatgatgtccaatctatacccagtcgcctttggtttgggtaatgatccctggttcaatcagttattgcagcagaagcaaagttagtttcacttgatatacaaggcgggtccactgcaataagacgcagcctctgctggagacctctagactcagaagcg

SEQ ID NO: 176906 - DNA, 573 bp, Homo sapiens
tgcatgtgggatttactttccacctctttaactctaatcctaggtctgtttacacgttgattaaaaggtccttaaattgttttaggacataatgatgtttttctatttcaaggatggcttggaaatagagatgagcatacaagggaatgtgagagcatgcgggatctgtttattcttctcaactcttctgtttgtttgagtcccagtgtatgctgggtttgataaccaggactcaaggagaactgaaccaccgacagctttgtttactaagggtatrccaacatccctctgtggatctgacatttatatgccttatagagaagatttggttgggtttttctgtcccatccgatgtggatcacctgtactaagagctaaatttttctccaagccacctcacaatgggttgagctccatgatgtccaatctatacccagtcgcctttggtttgggtaatgatccctggttcaatcagttattgcagcagaagcaaagttagtttcacttgatatacaaggcgggtccactgcaataagacgcagcctctgctggagacctctagactcagaagcg

SEQ ID NO: 176907 - DNA, 433 bp, Homo sapiens
atttcagaaactcaattctgagcgcgcccctggccctgcccgtccccggccccggccccatccccacccccataccccgaggcggggaatgagagcttcccggcttggcctgaggctctttcttatgtaaatgacccggccgcggtgagcgctcagccatagggagctgcggagccaggtgggaacagacaggtcgaggcttaaggaaaaaaaagctcgttttcggaaggacataaatctcaagaatctcaagtaatccaggaacgcggcgcgttggcctctccgagtaacttttagggcaaaccagaaagtaacaaccaaagtcctccccttactcaraggcagatcctgaggacacgaggctgggcggtcccgaggctgatttggaggggcgggggttaatgggggacgcccctcgccgagcctcagttcc

SEQ ID NO: 176908 - DNA, 516 bp, Homo sapiens
agggctctcaaaatgcggttggcaacctatggggaagcagatatttgtcaagagggccactaggctcaaatgattgtcacaatactaccaagatggattttaacattttacactcattctctcatgagtgtacagtggcattttctttaaactacatgaaatgtgattccacaacatatcaaatgcagaagcaaatatagtctatcagtcatctattacaccagactttaaagatatttcaaccaatgtaaaataatgcagtgcttttcacttgtgatttttgaaaatgttttttgaaaacgtttttcttaataaagtatgttatctgcrttaacatgtggtgggtttcttgttatgtgtacataaatttactatagttttaaaattctgttttagtttctaatattataaatgttaatagatatctatcacataagaaaaactctttggtgtactaagcaatgtttaagagaataaaatacatcctttcgttgaggggcaaacacctagatgaat

SEQ ID NO: 176909 - DNA, 581 bp, Homo sapiens
atttttgtgtatggtgagagataggggtctagttttattcttctgcatacagataaccagttttcccagcaccatttattaaagagactgtcattttctcattgtatgttcmtggtgcctttgtcgaagattatttgttttaaaagcatgaatatatatctgggttctccattctgtttcattggtctgtgtgtctgtttgatgacagtaccatgctgatttggttactataattttgtaataaatttttagttaggtaatgtgatgcctccagctttattctattttgctcagaattactttggctactcagcatcttttgtgattataaaaattttaggacttttttttttctattttcatgcagaaagatgttagtattttgatagggactactttgaatctgtaaattgctttgggtagtatggtcagtttagcaatgttagtatggtcactttagcaatgttaattcgtccaatctgttaccataaagtatctttaaattttttgtgtccttttttttccctcggtgttaaatagttttccttgtatagatattttacttatttggtcaaatagat

SEQ ID NO: 176910 - DNA, 538 bp, Homo sapiens
atattacaagtatctttgaagagcactggcctctttaaaaaacaaaaacagaacacaacaagatagaatagatgatgtgttattgatgcttttggaaaaaaaaattgtgcctaactgtatatgcagagaaaaggccttggcatcaaaatatgggaaaattagtgaatgtttatatgttttaaatttaaatgcctcttttcaaaatgattgcccacttttaataattttcatttgaccartctactgctagtcatgaatacatgcagagaacaagcaagctctacccaatataagggatggcagctgccaaactatatttaattcatgttaatacctctttacttagcatatctgtgaaaaggtagttagtttaacctgtatttttattataaactagtaaaaaaaaacacaacaagtttaaatgtcagtttctaaaattcataacaatccaatataaagaaagaagagctgcatttgtttaaactgagttacagggtctgtaggtttgtgtgtatgcgaacacgaagcgggtaggtgc

SEQ ID NO: 176911 - DNA, 603 bp, Homo sapiens
caactaatattgcatttctatttacctctccttatagatatttcaaatagttttcactttataaatttcaatgttcatatcctatatgaggtttgtgatgattatatctttacttgaagagtctccctttcaatcaatatgaaattacttacttttctgttatttgttgtgatctactttgtctaatttcaatattgctacccctactttctccctgtatgtatatttgcccatgtcattaattatatccttgggtgtcactgtgatttactttctatagagaataaatagcttgacttttgttttctacagatcagtggtctttatcttttcaaagataagtttaaartcatttgtatttattatacaaactgatacgctacttattcctgccatctgtttcttctgcttttacacttccatgctgttttgtttctttacttcccttctcttttttcttccattttttcacttcttaattgtcttctgcattctttatcttatttatggctcatttgtatttttcctgttttgttattttattgtcataggaactgatcttttatatatatatacatatataaaataaagtctccaaaagaa

SEQ ID NO: 176912 - DNA, 603 bp, Homo sapiens
caactaatattgcatttctatttacctctccttatagatatttcaaatagttttcactttataaatttcaatgttcatatcctatatgaggtttgtgatgattatatctttacttgaagagtctccctttcaatcaatatgaaattacttacttttctgttatttgttgtgatctactttgtctaatttcaatattgctacccctactttctccctgtatgtatatttgcccatgtcattaattatatccttgggtgtcactgtgatttactttctatagagaataaatagcttgacttttgttttctacagatcagtggtctttatcttttcaaagataagtttaaagtcatttgtatttattatacaaactgataygctacttattcctgccatctgtttcttctgcttttacacttccatgctgttttgtttctttacttcccttctcttttttcttccattttttcacttcttaattgtcttctgcattctttatcttatttatggctcatttgtatttttcctgttttgttattttattgtcataggaactgatcttttatatatatatacatatataaaataaagtctccaaaagaa

SEQ ID NO: 176913 - DNA, 610 bp, Homo sapiens
ttgctgagattttgccatttccacccatatctgataatcacattttatgtctgtttccccatctgtaaaatagaaataataaatttgtacctaatacataaggtagtggtaaagataaaaggaggtaacacaaagcatttagaacagagcctggcacataaaaaattactaaatattagctgttattcttacctccagttaaatatagttgctggaatgtgtgttgccttctctttagtctttccctctctttaggatcttaagttcatcttccttagaaacaactttaaaaaaaaacaaaaaaacagggtttccctatgttttccagtctggcctggaactcctgggctcaagtgatccctgcctcagcccttaagtagctgaggctgcatgtgcacgccaccacaccccacttaaaaaatatttcgtttatacttcttctttttactttcaacagagctctacttcttggaaaagtggtctgtactactcartgttaccacttccttacccagtaaatttgacttctttgctcattactcttcagattgttcttaacatggttatcaatgacccgtttcaaaaatctaaggaactctttagttcttat

SEQ ID NO: 176914 - DNA, 610 bp, Homo sapiens
ttgctgagattttgccatttccacccatatctgataatcacattttatgtctgtttccccatctgtaaaatagaaataataaatttgtacctaatacataaggtagtggtaaagataaaaggaggtaacacaaagcatttagaacagagcctggcacataaaaaattactaaatattagctgttattcttacctccagttaaatatagttgctggaatgtgtgttgccttctctttagtctttccctctctttaggatcttaagttcatcttccttagaaacaactttaaaaaaaaacaaaaaaacagggtttccctatgttttccagtctggcctggaactcctgggctcaagtgatccctgcctcagcccttaagtagctgaggctgcatgtgcacgccaccacaccccacttaaaaaatatttcgtttatacttcttctttttactttcaacagagctctacttcttggaaaagtggtctgtactactcagtgttaccacttcyttacccagtaaatttgacttctttgctcattactcttcagattgttcttaacatggttatcaatgacccgtttcaaaaatctaaggaactctttagttcttat

SEQ ID NO: 176915 - DNA, 417 bp, Homo sapiens
gggtctcactctgtcgcccaggctggagtgcagtggcgcaatcttcggctcactgcaacctccagctcctaggctcaagcgattctcctgactcagcctcccgagtacctgggataacaggtacttgccaccacgcctggcaaattttggtatttttagwagagatggagttttaccatgttggccatgctggtctcaaactcctgacctcaactgatccacctgcctcagcctcccaaagtgctgggattacaggcatgagcaaccactcctggctccagattaacatttttataagaaagaaacataacttattttgtaaaaaacctaaataacataaaaaatgtgaattctcacgaaattactacataaattaaatgcaattctagttagaattccaaaagtttatttggaatt

SEQ ID NO: 176916 - DNA, 417 bp, Homo sapiens
gggtctcactctgtcgcccaggctggagtgcagtggcgcaatcttcggctcactgcaacctccagctcctaggctcaagcgattctcctgactcagcctcccgagtacctgggataacaggtacttgccaccacgcctggcaaattttggtatttttagtagrgatggagttttaccatgttggccatgctggtctcaaactcctgacctcaactgatccacctgcctcagcctcccaaagtgctgggattacaggcatgagcaaccactcctggctccagattaacatttttataagaaagaaacataacttattttgtaaaaaacctaaataacataaaaaatgtgaattctcacgaaattactacataaattaaatgcaattctagttagaattccaaaagtttatttggaatt

SEQ ID NO: 176917 - DNA, 566 bp, Homo sapiens
tgggcaagaacgtagaatagtaaatagactatcaggtaaaaggtactcttacactattggtgtaaaaggaaattataatagccttttctgaaagcaggtacaggcacagacacatacaaacacacatgcttttttttttttcatttatgggcaccaattaaggtacagaactatttaaaggctacctcagcagaatgataggagtaatgactaaattcttattttaaacctttattaactcaatggagtaacactcttttaatctgaaaaataaaaagaaagaaaactttraaaagtagtagcatgtatcactgactaaaggaaatggagaagaagagagaaaaagagcactgaccatggagttgtaaggaaatcaaaaacaaattcatccatttcacaattcacaattctgtctaggctgaccctgaccttcatactcaaagcaacacatgcaccattagcgtttctcattttttaaatatatccaagcaaataatgcccatggagatgccaccaacctgatctgtttgtggcttcacttggttctacaacaaactgtagagagg

SEQ ID NO: 176918 - DNA, 610 bp, Homo sapiens
catacatatatatacacacacaaacatgtatatattgtaaagcatatggatgtcttatgtagtggaataagccaaggtttccctaggcatctacatagctaatttcctcatctcctgcctcagctagtaaacaccatacctccagcccccagcctccagcatgagtcagcgctgkgggaattgagtaggcctttggctcttctcaggtctgagggcaacattttagaaaaaaagattagccacattaggctgtctgcttttcagacactggaaacctggcaaataccttccttccacccggctcaaacaaagaccacaacatttgccttttctagacataacatcatcttgctgggatatggtatggaggggtgatatgtggcttccttacctgtcagaaccttccattttagtcgatgacaaaggatgagcaaggtcagaataaaaagaagggattttgactggatcatcagcacttgatcatatttccttctgtgcagagatatccaattgccttaccctctgtgacataataggaaaatgtcacttacatgaaatcttatgtcttacttttcaagcagacatacatcctgctgttataaattattta

SEQ ID NO: 176919 - DNA, 274 bp, Homo sapiens
aacaaattgaggaaatcatctaacataacagacaaaggccaaaacaaacagaaaaaagtacttgtaggaaacagagataatgtaagaagaaaattcaaacaagtaactataattrgtattcctggaaactatgtgaagattagtgttaatgaaacaaaaacagaatgcacataaaaagagaacctttagagaaataaggagcctctagaaattaaaaataaggtggcagaaatgtatgggtcacattttctgaagatagttaatatatgcaaga

SEQ ID NO: 176920 - DNA, 502 bp, Homo sapiens
gaattagctcattgattgatatacaggcaataggtggaagtaaagagatacctttaaaaatagacacacctaataaacattaaataagaaaacagggaactaaaggcatttttaaaatttagtgtataaaagcactagaacaaaaacaaaagccttcctaaatataaaaacaactttaaaaaataaaatgtaaagagccaaaagtatgcatcttgtaggaaaaaataagcataatataaaatatatataatgataagacattrtgaaagttgggaacaaacatgtgagtagtataattaaaatgaatgagttagttaacctattaaaagaaaaatgatttaaatttggctcaaaaaggtagactcaacgataagctgcatatgagagacagacacaaaacagattaaaaataaagattaacaaaattatactaggtgaataaaaacagtaggaataatgatcctggtgtcagacaaagcacaatttacgactaaatatgaca

SEQ ID NO: 176921 - DNA, 567 bp, Homo sapiens
gattcactgtagatatcagaaattgttagatacatccactttctcccactcctattacctcaatttattatgctcccactgtgtatatggtgtagcactaacatttgtatgtattagatgattaactgaaagataaaaatcttttcaataaggaaattttttcaaacaaggatattgaatttcattctggtatgtgaagtgaaatggaaagtgaaaaatgtaaatatagaatggcagtggtttaatttgatatagcttkacattattgggaaacattatttgtgctcatgtttttttcttcactgtgagaattgaacatacacataattcttactggtttgtacttttaatcaaatgggtgatggggaggatagagtttgaaggaagttccatgattatcaatggttagcaagagggcaccgaaggtgaaatagacttgagtacatctaaagatgccaggaatctgagaactaagcttaactgacagtattgcctatccagctatttggatgattatgtttgccatacatattgatgtggtttggatttgtgtccttgcccaaatct

SEQ ID NO: 176922 - DNA, 460 bp, Homo sapiens
ctataatacaccttcatttaatatcgtttgaacctatggaaatatagctgcagtcacatggttatgtatactcgtagttaatttgtactgaaatataaatacatatcaatatccatataccttataaaatactgtggaacattcaatttcctgtaaaatataatgcaactcacatatcaccatcatgattctagcaaatgaaactagaatgattacttagagtaacctacactggaatgaagaggragaaactgaaaaacaacaaattaggagatactttctatgaggttacaacattgatattatttttcctctacaaattccttctttctagtcttgaccatcactgtttctacacattctccctacaaaaaaaaagattaggaaaaaatgttatttgctattgtttaagcataactcaagtgaaaaggaaaaagaaaaaccaaataacccaactcaa

SEQ ID NO: 176923 - DNA, 636 bp, Homo sapiens
tactacaccagctgccgtgtacttttttctgttttataatctgaacagcacacatgtagtggacaattccaaatgctgatgaatgaaattttgttttagccaacacttagaaataaacctaaatatatttaatttctcctaactgtatatttagaagtgaaaactatgaaacatataaagtttgcaaagtcaaaacaagtagcttgaggtacctgttggtcactttgtatttttgaaatcartttgatttctgtacttaggaaataaagttggctgtgaaataaagacacaacataatataaattataggaaatagagggtgattttgctttgatgtagcagtctaggcttaagcaatttaataaagcaaggattttgtttcagaatggttagaaacctgagctacctttattttgttgcattttctttgctaggctatgactcatatcttcatggtctaaggtaacacctacaccatgttcctacttgccagaaaacctacacataatcacacctttgtgcaagagaaccaggcagtatggactctactccagtgtgactgtctagaaggaaaagaaaaataaattccaatcatagacacagaactttcagtctgtaccataggttcaatcatct

SEQ ID NO: 176924 - DNA, 649 bp, Homo sapiens
gggatattacaatgagattttccccctttttcagaatagtgtgaaaaagaaaaggatattatgagaccatttatttaaacaattttaaaccatggttttactggcttagatatctatgaacagcatttaaaatcccaacaactttttctcagtaattcaaatatggaaatttaatgtaatgcaaattgatatacaaagatgttcattctagcaatatttatagtagtaatatattcaaaacagatattaatttgtggattaagagctaactaaactatgatacattaaaatagttaaatattatatactctctaattgagatatgtaacattattcaaatgcccaggagaatttaagagaaaagccaacatttaaattgaatttggaatataaaatgaaataaaacaaataaattataaaaataaatgtaasataccaaaacattcatattatttatcaaggtaaaatctgtgatacatgattggctttctttttagtttgtgtatatgtttcataatgatttatgaatgaattatgatttatgaatccttatatagatatgtttataaatactaaaatggaaaaacataagcatgcatgttctttttagaaagataatcaagggaataattgtaagttataaacagaa

SEQ ID NO: 176925 - DNA, 527 bp, Homo sapiens
ttgtttggtttatctctgcctctgacttattcaccagatcttgacagagcatggaaggaattttattaagaggttgggcgataaagagtcactcgacctcttgaaacgtgatggttatttcttatgtaggagggtgtcttctttcttcagacaatgatcagctgggattattttatttgttgcctttgtattacccccaagacaagcaaaaagtaaaatgtaggattggtgaggaattctttatttgttccagaataaaagcccttcttctaatagaggtgatttcttatcaagctcccttttagtcagacttgtaatttaaatktaatttaaataaatatctataatagatcaacttttatgcacatagcatagaagaaaatatatacctttatacattagaattataaactaaaattatgtatgcagaatgaatatacagataagttatgtttgctttatcacagtcgttcaaaacacctaatttacaggtgtagaattgtgtatatatgggtattttatatgaa

SEQ ID NO: 176926 - DNA, 551 bp, Homo sapiens
agaatttcttgtacatttcaaatattttgactaattaaatgattttttctaatttgtacttgtaaaagtctatatttgatatctgctctgcaattgacatataaagtctaaaaattaaatctgataaaatttaattgtaactgcattcttcaatgcatttaggggttaaggccaaaatgaaattatggaaaatagtaaacaaggaaataactaaaggacatttaatgtaattgtttgaagttgttcaaatggaatygatctgaaatgaagctactgaaaacagtaccctgtcattcaagacctggttctagagtatgtaatcaattttgattgatgcttctggtgacatgctaagtccttgataacagagggctacagaatgtcaagaacaaggctcctttttaaatatatcacatgtaattttaactctggaaacccctagtgttgattaccattgtgctctgtggtcatatgttagtattgtctcttaagtgctgtgcaggagatcatttacataatgaattaattaatctgttccccctaagtcctca

SEQ ID NO: 176927 - DNA, 600 bp, Homo sapiens
cattttcttcaacttttattttccaacttccaaaatgcctcatactactaagttgactcattcagtatcttagtttccagaacatcactgccctattggagtcactgtccccagctgtccccaagtcataccaaagagtttcagttmtctttcagttgagttttccataacacatatagttttatagatattgtatattattatctatgtgcacatacatcatggaccttgtcatcacccaggatatacagtttttaaaactgtatgttggcattacattttctttactgccctatgattaatgttctagctaaactttgtcctttgatgaactattctcccaggttattgcttccttgagatatcatttaacaagttatttggcttgaatcttgtgaccaccatgtgaacccctaagtcatgccttttactatcagcttgcatttatttgctactttaatgttttaccatagtcatgcagtcaatataaaccttgggtacccctaagcatttcacttcttggattctgcaataggtagctcatagacaggctgcaaggctccagtgcatgtagatttacagctttcccaggaaacttag

SEQ ID NO: 176928 - DNA, 523 bp, Homo sapiens
tacatatgcacccaacaaaggagcaccaagattcataaaagcaagttcttacaaatctatgaagaaacttaggtaaccacaaaataataatgagagacttcaacactccacagacattattagatcaaccatcaaggcataaaactagatattcaggactcaaactcgacacttgaccatatagacctaacagacatctaaagaacyctccatccaaaacaacagaatatacattcttcttgtctgcgcatgaactatgctataaagttgactacacaatcagctgcaaaacaattctcagcaaattcaaaaaaaccaaaatcatacctaccacacttttgtaccacatgcaataaaaatacacatcaatactaaggagattgctcaaaaccataccattacatggaaattaaacaatctgctcctgaatgacttttgcataaacaatgaaattaagccagtaatgaataagttctttgaaactaatgacaacaaagacacaacataccaggatctctgggac

SEQ ID NO: 176929 - DNA, 597 bp, Homo sapiens
attgtccccaaatgcattgggttctgcttttcaggatgctttcctctggtgttttcaggaacacccttctctcccagttcttttatctttctcattatttcttccttgtttctttttctggcttctcctatctcataaatgttctgtttgctcatagtttttctgctcctctcccctgttctcctcataggctctgttttttttttttctgcttccatagcttcagcaccatctctaattctatactgatgatcccaaaatctctgaaaccagtctccacctttctcttgtgctccagtcccaaacttccaacagctttccacatatgtcaatctggaatcctgtagatacttcaaaacctttctgtcttgtattcttgatctctgtcatgatccatccagtttcccaggctagaaattttatagcaatctgtcagtcactccactctctcgtgtattaaatccaaccaacccctaaactccttttagtttacttcatttatggaggttctgtaaggcaatgtcctcagcrctaagaattcagcaaaaatccctactctcatggaacatataattttgtgggagacagaaaataaac

SEQ ID NO: 176930 - DNA, 433 bp, Homo sapiens
gaagacctagccattccactgtgaggtattaaaatcatatgtcaatagataccctttggcatgattgttcacaatagcctcagactggaaaaaaatcaaaagcctaacaataagtgaatgaataagcaaattgtgtcatgttcatataatgagatgctactcagcaacacaatgggaggaactattggtaatacaacaacatggcgatatcttgagattattatgctgaatgaaagaggtcagacatagagtacatattgtataagtctatgcttataaaacattaaaaatgaaaatttatttcattgacagaaggtagatcagttgtttcctggggtgaatgtgtgggaaggggtagacragaggaattaccaaggacgtgaggaattttggatgtgtggaacatacagttgcccctccacatccgtgaatt

SEQ ID NO: 176931 - DNA, 558 bp, Homo sapiens
actctggcacaaaaactgctcccactaaacacacattaaacacttgtggtttcaatttccccagtaataaatcagtatcatgccccaaagaggtgccacatgtgttcaaagactgaaatataaggcattcttaaaaaagcatattactaattgtgtgcactgaatactgaaaaccattaaaaataatgcttcagcatacctgacaattcttgttttacaaatgaaagcacagccaggtaaacctggcagtcagctatgattatmtgcctctgaagccgatcaaccatagagggggcggattttcggacatcaacctgtttggcagaaagaatgtccacactgataaatcacacataacaacgacagttcccccaaacagtatcaggttattgtacaagataatttcacatacgaattgtgaaacctggcactcaaagccaagcccaaatttatcctatgagcctggcagcatccaaattcccattagtctgactatgttttgtttgtttgagcactgtaactcagagacaaaaatattctaagtgatacaagctgaat

SEQ ID NO: 176932 - DNA, 561 bp, Homo sapiens
gggtttgattgtggtgtaagatggattcagccaactggcttagtttctgtgagattttaggccaacactcagctcccaactctggactgtgtgctctaactctgggggacttgcactgggcttttgttctttgactcctcaaggtttggagtccactgtgctgggcggactgaagtgtggcagatgaagcagagtgctagtggatgcaggggtgcctrctttcctgtgggtgttcaccacagtggcagaggccaggcagctggggaggagttgggattctctgctgaagaccatgcgctgtgttgctctgaaggttgtgttggcttggggcagcatgctggctgtcacacatctgagctccttctctgtgctctccaagcagtagtgattgctcagggtgtgggaggatgccctgtattctgcacagtgtgtcagtgcaagggctagacactagcaggggatgggcttgctggctgtgtgcccaccaaggctcactctgcaatggcggtcagtagagttgaggtgtactaaacttctgcatactggcagggcaagtaaagc

SEQ ID NO: 176933 - DNA, 561 bp, Homo sapiens
gggtttgattgtggtgtaagatggattcagccaactggcttagtttctgtgagattttaggccaacactcagctcccaactctggactgtgtgctctaactctgggggacttgcactgggcttttgttctttgactcctcaaggtttggagtccactgtgctgggcggactgaagtgtggcagatgaagcagagtgctagtggatgcaggggtgcctgctttcctgtgggtgttcaccacagtggcagaggccaggcagctggggaggagttgggattctctgctgaagrccatgcgctgtgttgctctgaaggttgtgttggcttggggcagcatgctggctgtcacacatctgagctccttctctgtgctctccaagcagtagtgattgctcagggtgtgggaggatgccctgtattctgcacagtgtgtcagtgcaagggctagacactagcaggggatgggcttgctggctgtgtgcccaccaaggctcactctgcaatggcggtcagtagagttgaggtgtactaaacttctgcatactggcagggcaagtaaagc

SEQ ID NO: 176934 - DNA, 528 bp, Homo sapiens
tacaggctcataggcagaggacttgctttgtctcagatgagactttgcacttggactttgagttaatgctggaatgaattaagactttgggrgactgttggaaagacatgattggttttgaaatatgaaaagaacatgatatttgggatgggccaggggtgaaatgatgtggtttggctctgtgttctcacccaaatttcatcatcaattgtaattcccatgtgtcaagggagggtcctggtgggaggtgattggctcatgggatagtttctgccatgctgttctcatgacagtgaggaagttctctggagatctggttgtttgataagtgtctggccctttcccctgagcttcctctctctcctgccgccttgtaaacacatgccttgcttccccttgccttctgccatgattgtaagtttcctgaggcctccccagccatgtggaacagagtcaattaaacttctttttttatataaatgacccggtttcaggtagtatttttatagcagtgtaagaatggactga

SEQ ID NO: 176935 - DNA, 577 bp, Homo sapiens
ctgtctcagtcattaaagccacaatatgtcagatcagaattgcctctctaggggtctagagagcagcaacaaccagaagatggcctggtcttgggacttggattcaagagaagtgttcccccaaggcaatgacaagcaagagttaaaaagtgaatgtgggctcaagtgttttgggaaaaataagcattttacaatctataaatcatgtctaaatgacaagtaaaaagagaagaacaggctaaaaataggaaaataaacatgcagagaatatgtattaactgaataacttttgtggggaggttacagtcataacttstttatatcaattatatggaattctcacaaaaatcctgtaaataagttttaaatcatagtctcataaatgaggaaacagaggttcagagaggttaatgcacttgctccggggagcaaacccctggagggcagatttgagattccagaagcaggactgagagctgtttggcactgaggtggagttggggaaggggtgggcagggtgggcatggcgtttccagtagtctcttccagaagagtcctaagcgattgctagggaaca

SEQ ID NO: 176936 - DNA, 512 bp, Homo sapiens
cagagaaggacaggagtgtgttgggatatakagggttttcagtgtgttttaaagttaaatgagcattatacaaagaatatataaataaaagatccacataagaggcagaaagttgaaatatgagagagaaataatttctctgatttttgtaaccattaacatgtgggtaccttaagacttaatgagattttaatttaaacataagaactatttcaaaacattttatgttggctttaaatatctgcttccatttaattcaatgtgaggaattaggctaggtttcatggaggagtaaaaagatgaatcagatggaagacatcaaggtatttataatataacaaagaaatgacagacatagaaataagcaatagacaatgcatgatttatgatttaattgaagcaaaaagactatggacacagatgttcaatagaagtttatctgcatattttgtagcaataatgcatttaagcaacaagcctagaacataggtcttgggatggcagtaaaactt

SEQ ID NO: 176937 - DNA, 587 bp, Homo sapiens
atacttcctgcatttcatgagtaaattgaggctcagcaagctagtcacatattcccagtcccacaagtagttgggagatgcagaggaatccacttctgtcactagaggctgccytcagctcctaggagccacaagttcctctacatattgccgtttattttatcaatccagcatagggaatcttaagaacatcccatcatttttgccatgttggttagaagcaagtcacccatcctatccacactcaaggaaagagaattacacaaaatcatgaacatcagaaggtggggatcatggaagataaggatggtggcagcacaatagtctgcccaccaaatttttcaaaaaataggtttttataagtatctgtttttaagttaaatttattttatttaacttgtacaacagcactgcctttcatggatgagaaaactagtttgtagtatatctaaggccaaacatcaaatattcaaagttaaaatacctttatggaactcttgctttaccaattagacggatagttttaagaacaagaactatgacatatacacctttggcactgctatgaagcattttaatgctcaatc

SEQ ID NO: 176938 - DNA, 587 bp, Homo sapiens
atacttcctgcatttcatgagtaaattgaggctcagcaagctagtcacatattcccagtcccacaagtagttgggagatgcagaggaatccacttctgtcactagaggctgccctcagctcctaggagccacaagttcctctacatattgcygtttattttatcaatccagcatagggaatcttaagaacatcccatcatttttgccatgttggttagaagcaagtcacccatcctatccacactcaaggaaagagaattacacaaaatcatgaacatcagaaggtggggatcatggaagataaggatggtggcagcacaatagtctgcccaccaaatttttcaaaaaataggtttttataagtatctgtttttaagttaaatttattttatttaacttgtacaacagcactgcctttcatggatgagaaaactagtttgtagtatatctaaggccaaacatcaaatattcaaagttaaaatacctttatggaactcttgctttaccaattagacggatagttttaagaacaagaactatgacatatacacctttggcactgctatgaagcattttaatgctcaatc

SEQ ID NO: 176939 - DNA, 587 bp, Homo sapiens
atacttcctgcatttcatgagtaaattgaggctcagcaagctagtcacatattcccagtcccacaagtagttgggagatgcagaggaatccacttctgtcactagaggctgccctcagctcctaggagccacaagttcctctacatattgccgtttattttatcaatccagcatagggaatcttaagaacatcccatcatttttgccatgttggttagaagcaagtcacccatcctatccacactcaargaaagagaattacacaaaatcatgaacatcagaaggtggggatcatggaagataaggatggtggcagcacaatagtctgcccaccaaatttttcaaaaaataggtttttataagtatctgtttttaagttaaatttattttatttaacttgtacaacagcactgcctttcatggatgagaaaactagtttgtagtatatctaaggccaaacatcaaatattcaaagttaaaatacctttatggaactcttgctttaccaattagacggatagttttaagaacaagaactatgacatatacacctttggcactgctatgaagcattttaatgctcaatc

SEQ ID NO: 176940 - DNA, 417 bp, Homo sapiens
tcgctctataaaagtatagctttgaaaaaattaggagataaacagtaggcattttcccctatatgtctagaaaaaagaagggcaggagataaaagtgaagagaatatcatttactggtgtagatcttcaaaaacaatcctgaggaggcttcactttcaaagtaaaagagtcataacaagggagatatgaaagcagagtggataagtgcctcaatcctcagttggaccacatgtttttgacatggatctatagtttccttcaagattygctgtggcaggaatacttgaacatcggtgggcaggtaagtagtggcagaacggacctgaaacagcccacatatgtcactacctgtagctagagaacaagtgcttcttatgttggtgggttgctgtttttgttcaaaattgaaaacttcct

SEQ ID NO: 176941 - DNA, 417 bp, Homo sapiens
tcgctctataaaagtatagctttgaaaaaattaggagataaacagtaggcattttcccctatatgtctagaaaaaagaagggcaggagataaaagtgaagagaatatcatttactggtgtagatcttcaaaaacaatcctgaggaggcttcactttcaaagtaaaagagtcataacaagggagatatgaaagcagagtggataagtgcctcaatcctcagttggaccacatgtttttgacatggatctatagtttccttcaagatttgctgtggcaggaatacttgaayatcggtgggcaggtaagtagtggcagaacggacctgaaacagcccacatatgtcactacctgtagctagagaacaagtgcttcttatgttggtgggttgctgtttttgttcaaaattgaaaacttcct

SEQ ID NO: 176942 - DNA, 417 bp, Homo sapiens
tcgctctataaaagtatagctttgaaaaaattaggagataaacagtaggcattttcccctatatgtctagaaaaaagaagggcaggagataaaagtgaagagaatatcatttactggtgtagatcttcaaaaacaatcctgaggaggcttcactttcaaagtaaaagagtcataacaagggagatatgaaagcagagtggataagtgcctcaatcctcagttggaccacatgtttttgacatggatctatagtttccttcaagatttgctgtggcaggaatacttgaacatcggtgggcaggtragtagtggcagaacggacctgaaacagcccacatatgtcactacctgtagctagagaacaagtgcttcttatgttggtgggttgctgtttttgttcaaaattgaaaacttcct

SEQ ID NO: 176943 - DNA, 492 bp, Homo sapiens
ctcatcttatttggaaataaccccatttacaaataggtattcatttggargtactggggattaggattccaacatataaatatggcgcaggggaaacatgtaatttaaccataacagtacatatagtatatcccacagaacttgataatgtgagaaaagaaaagactatggctttaacctgattccttgtatacaatagtccattctcatcccagtagattgaattcagatccccttagtttcttatctcaaaaacaatctaaaaaccatgggttttttatttataaataccattatactaccttaaatttattttactaatattttgtgacatggggaattataattcagtggtttaaactttacctcctcttcatgtgttaaactgttggcaaattattctaaagaaaatcacttaatattagaactggagagactttagaattcaggtcgttctctccctttattttacacatgataaagaaagagatt

SEQ ID NO: 176944 - DNA, 492 bp, Homo sapiens
ctcatcttatttggaaataaccccatttacaaataggtattcatttggaagtactggggattaggattccaacatataaatatggcgcaggggaaacatgtaatttaaccataacagtacatatagtatatcccacagaacttgataatgtgagaaaagaaaagactatggctttaacctgattccttgtatacaatagtccattctcatcccagtagattgaattcagatccccttagtttcttatctcaaaaacaatctaaaaaccatgggttttttatttataaataccattatactaccttaaatttattttactaatattttgtgacatggggaattataattcagtggtttaaactttacctcctcttcatgtgttaaactgttggcaaatkattctaaagaaaatcacttaatattagaactggagagactttagaattcaggtcgttctctccctttattttacacatgataaagaaagagatt

SEQ ID NO: 176945 - DNA, 411 bp, Homo sapiens
ataaacatttgggtaatcaacaacaacaaccaacaactagaaaagagawcccggtgttaacttcctgaaaggctgagctcttgtcattttaaggaagctaagtcagaggaaagagtgatgtgtaagcatgtagaggtggggagttttcaactgcatctgctaaaattcttatcaggaatgtcagagtcctgccttagcaaccttgggaggcatcactcaaggagataagcgattaggttcttccttttatggttaggaattcagcctagtcagctaagttaggaaggggtagctttctactaggtgacttgggtcagcttgttaagggaggcaagaaggtaggggagggaatatgctcagacatagaagacttattgggagtctgctcatgtcttttgtctgccaaaacca

SEQ ID NO: 176946 - DNA, 411 bp, Homo sapiens
ataaacatttgggtaatcaacaacaacaaccaacaactagaaaagagaacccggtgttaacttcctgaaaggctgagctcttgtcattttaaggaagctaagtcagaggaaagagtgatgtgtaagcatgtagaggtggggagttttcaactgcatctgctaaaattcttatcaggaatgtcagagtcctgccttagcaaccttgggaggcatcactcaaggagataagcgattaggttcttccttttatggttaggaattcagcctagtcagctaagttaggaaggggtagctttctactaggtgacttgggtcagcttgttaagggaggcaagaaggtaggggagggaatrtgctcagacatagaagacttattgggagtctgctcatgtcttttgtctgccaaaacca

SEQ ID NO: 176947 - DNA, 628 bp, Homo sapiens
atgattgtatatctagaaaaccctgaagactcatttaaattttgatccattctagatctgataaatgaattcagtaaactttcagcatacaaaatcaatgtacacaaatcaatagcactgctatatgccaacaatcaccaagctgagaatcaaatcaagaactcaacccctcttgcaatagttgcaaaaaaataaaatacttaggattataccaaccaaggaggagaaagatttctcctagggaaactacataacaccgctgaaggaaatcagagacaacacaagcaaatggaaacacatcccatgttcatggatgggtagaatctatattgtgaaaatgaccaaactgccaaaagcaatctacaatttcaatgcaactgccattaaaatatcatcatcattcttcacagagctagaaaaagcaatcctaaaattcctatggaactaaaaaaggcctcacaaaagcaaagcaagactaagcaaaaagaacaaatctggagccatcacattattcaccttcaaactataccatgaggctgtatttaccaaaatagcatagtactgarcatataaataggcatttagaccaatgaaactgaatagagaacccagaaataaagccaaatac

SEQ ID NO: 176948 - DNA, 352 bp, Homo sapiens
ctatttattaatgcctcagtatcagaattttttattcatctgtttagggattcaattacttccttgttcagtcttgggagggtatatgtgtccaggaatttatcaatttcttctagattttctagtttatgtgcataatggtgtttgtaatattctctgatggttacttttatttctgtagggtcagtggtaatgcctcmcttatcatttctgactgtgtttatttaaatcttctctattttctcctttattagtctagtgaacagtctatttattttattttatttttttcagaaaaccagcttctggatttgttgatcttttgaaggtttttattttttgtctctatctc

SEQ ID NO: 176949 - DNA, 540 bp, Homo sapiens
gccttttgaagagatatgtttgggatctcattgtgatttcagtttgtatccttgccagcagaaaagatgctgtttcatctgaagagatgagggacgatagtaaaacagattattcttattaatgtgacttatttttcaaaaaactcttaagttactaaaggctgggggagctaaggttacatacacatcagaaggacattgacttaatattggtttaaaattatggaaaaaaatatatttttcctgtattaaactttcatattctcctgtatgtaatacatctacctacaaaaaagtctccaaacaactgagtgtcaactcctgctttcataattaccaaagaaagcaagagtgagaaaacaggttatatagaaaatcctgcactgcgtcctgcaaatggtttcccttacaagatttaaaatggccttgaaaacattccatggcctagtcatggctcagcacacrttttcaggcagatgcatttctgtagtcacaaaaaatttcagcctgagctattgcagctcggcaaataagcattac

SEQ ID NO: 176950 - DNA, 360 bp, Homo sapiens
ctttttgtgactcaagtgtgcagaaggtaatcaactcttcctaaggatcaggtatggaaacaatctggttccctaaactcttctttcatatgaatcaatttgttttttaatgctaaggtgtcagcaaacctctcatcctcaagtccaacacaatgatctattattttgggggaaggtgatgcagcaacctccccccctcccccacttytgggagatgaggtataaaactttattacccttagaactcagaaaaaggtccattgtttctggggaaataaataagcaaaagtactttaacccataaggaatggtcaagacaatctcttggacccaggattttgcatgatttcgaagcagagt

SEQ ID NO: 176951 - DNA, 521 bp, Homo sapiens
ataggagaaatgctgattgatttttttctttaagatcttaggggataatggagttgtagctagcagttaaattattgaaataaaacaatggagaaagaaaaaaaaagattgtgtttttagaggataaattccatagacacatagtgacctggccagtgacaccgcagtctgttgtagtcacctggctgaggagagaataagaacaataacaaatagagccaaagcatcattcattttcatttacttggtgaattgaccttagtttcatccctggcaatcatactaacctcaccatctgtgcaaagcaaatgcagtgtgggagtcaggagttcatgctctaatattgctttatcagtttatttcacagataatggcaccttaattattatcaatgacctgcatgccattccttactattccttcttagatatgtctttctgagttattcaaattgtactggtrttttccaatctgattcttctaggaactaatacctacatttctgtaagacagaagaattc

SEQ ID NO: 176952 - DNA, 526 bp, Homo sapiens
tccacattttgtacatcttcttatttatctctgagctcattagaaagatttctgttcggctttattgctttctgggacttatcatagtactataccaagggcaatgaggagaggtttgctattcttaatgaataattaagttagaaaatatatccaccctttttaccaaaaatatgcgttcatctgccattcatctgtcctttctaaaagaagtcaactaaaaatacttcccaataccttgttcccctatctagaatatgacagacattcaaattaatttctcctttcagagwgttaatggtttgtgaaattgaactcagtcagatagtcttgctagccatataaagttttctttatcattctctttgcgaatgatagacaggctttcctctgtttaaaagatatgtgatatgtacttcataaggatcagagggctgcataaagtcagaaaaataaaactcaagttggacttttatcacttaattgaaagaacttagattagcacattgaaccaaatgaagaaaat

SEQ ID NO: 176953 - DNA, 372 bp, Homo sapiens
atcatgactatcttagactgaacaggtagcaagggatggattaattcaataatgattaatcgcatacctactatactaggaacctgggatataacaacgaattcaatagtctcatttctcatggagtttacagtctagtcagatggacatataataaacaaataaaaacacatataatgtactactgataataaaagccgctaaggaaggaaaaaaaaggktaaaatgaatatggaaagccagagaatggattggggctttatttttttataagagagtttagtgatgtcttattggccaggtaacctttgatcaaagacttgtaaaaaatgaggtactatgtcatatggttatctgagggaaataactacc

SEQ ID NO: 176954 - DNA, 615 bp, Homo sapiens
gtaatgtattagaagaaacataaataagaaattcatagatatgaaggtctatatgtatctagcccctcaacgttattccactatattttcaaattgcttcataagagccagcaataatttggttttattcctttatttatttattctgcacatatatattgagtaggttgagatcttaaacatgtaagaggcacaaaaatgtgagtgtaactcttgaggctgcttttgtcctgtgttaaaataattaatgatggaaataggttataatattttggatataataggaagaaaatcaatctatgctgatataaataattaaattaataatgtgaaagttgtatgaaagacagaatatttacatggtttcaaaattccttcccaccaattaactattaattacaaaatgaagggtttctgcttctgtaactcctgtcgatccaattcgtttataactacaagaaagaaagaaagaragagagagagaggaagagaagagaagagaaggaagagaagagaagagaagaaaagagaagagaagaggaaagaaagaaaagaaaaactactgcttgatgagagtttgcactttgaaaggaaatggcattgtttctcattgca

SEQ ID NO: 176955 - DNA, 635 bp, Homo sapiens
attatttatagcttcccagccggaagcagtaagaaagcaaaacctaaccaaacaaaatctttgtgtatgattttcctttttttcctggatcctatgtcacttatcatacatataaagattttgttttctctttgtgtggaacattctcctctgcctcctgattaaaaaccctaatgttccattttctaaatgacatattttctttatcatatataaaccgggttcatatggtattttcctcccaatgtttattgtgttctgcagtatggtatcattttttctgttttagaattattatccaataatttttaaatgtgaaattcatcttaccaactagcttttggtaactaaatttaaaattttctcaccaaaattagtcatcagatgctgttccaaatactacaaataggtaaaatagtattgagctccattactatatgaaaaaattcaaaattggtggttaagtgacaaagtcagtgttagaaaccatrtatctttactcttaatctatactttcttacacagtaatacacagcatctgttacaaaacttttcagtgaaatgaaacaacatagaacgtctattgtatatacattttgaaaagtagttagaaatcttgtatatcgccatttctt

SEQ ID NO: 176956 - DNA, 588 bp, Homo sapiens
atgatgtttcacctgaattgttggttgtgaagcatttcctggaaaaaaaatgcaaacatattttatcccctaaacttatatacatatttagttgyttattaggctaccaattcattgataaggttttattttttatttatttttctttattttttattgttttttattttactctaagttccgggatacatgtgcagaacgcacaggtttgttacataggtatacatgtgtcatcgtggtttgctgacctaccaacatcatctaggttttaagccccacatgccttaggtatttgtcctaatgctctccttccccttgccccacaacccctgacaggccacggcatgtgatgttcccctccctgtgtccatgtattctcactgctcaccttccgcttatgagtgagaatatgcagtgttcggttttctgttcccgtgttagtttgctgaggatgatggcttccagcttcatccatatccctgcaaaggacgtgaactcctttttttatgtatggctgcgtagtattccatggtgtatatgtgccacattttctttatccagtctatcccattgatgggaatttggatt

SEQ ID NO: 176957 - DNA, 608 bp, Homo sapiens
ttattcagtatcacaagaacagcacaggaaagacccgcacacatgattcaaatacctctcaccaggtccctcccacaacatgtgagaatgatgggagctacaattaaagatgagatttgggttaggacacagtcaaaccatatcacaccttaacctcattagcctcttcgggatgaagcattttcatgagcaaaatatcatttttatgcacaggccaggagtaaagagcaaacaaagacattgcactgactatcaaaatatgaaaaaaaagcagtggctgccttcyctacattggctggtaaagtcacttattggctctcaagttacttaaggagccatgttaattaagtgcatggtcccttaactattcagttaatgaaattatttgaatagcagcgcgaataaaaatgtgtgtttcataagcgataaatgatttgtagttatcctggttgcttttttatttggcattcttgaataaggtctttgttccctctgaaacaaagcttaaattcaaagagttaatacaaatatactgagagttgtttaaaacataattctgagcctgacctggtagcagtgatcaaggaactgaactattcctgctactg

SEQ ID NO: 176958 - DNA, 608 bp, Homo sapiens
tcacaagaacagcacaggaaagacccgcacacatgattcaaatacctctcaccaggtccctcccacaacatgtgagaatgatgggagctacaattaaagatgagatttgggttaggacacagtcaaaccatatcacaccttaacctcattagcctcttcgggatgaagcattttcatgagcaaaatatcatttttatgcacaggccaggagtaaagagcaaacaaagacattgcactgactatcaaaatatgaaaaaaaagcagtggctgccttctctacattggctggtaaagtcacttattggctctcaagttacttaaggagccatgttaattaagtgcatggtcccttaactattcagttaatgaaattatttgaatagcarcgcgaataaaaatgtgtgtttcataagcgataaatgatttgtagttatcctggttgcttttttatttggcattcttgaataaggtctttgttccctctgaaacaaagcttaaattcaaagagttaatacaaatatactgagagttgtttaaaacataattctgagcctgacctggtagcagtgatcaaggaactgaactattcctgctactgctccctactt

SEQ ID NO: 176959 - DNA, 483 bp, Homo sapiens
aacccccagacttcaccattatgcaatatattcatgtagcaaaactgcatttgtacccattaaatgtacacaaattaaaaaaattctattatagtttaaatttcctaatctttacaagtattttttttcagagggatcttagcgttttccgtttttttctaggtctttgctcaaaaattaccatctgaatgttgtcaatgttttcatcccatgtgaaattgtgtscactcctttttgtttttctttttttaacacttatcataatgtgatgtagttatactttacttatttaactattgtcattcccttgctattagaaagtaaattccaaggggcaggtatttttctttttcagttcactcactgcaggttaaagagtatctcatacacagtgtacacattgcaatatttcttgaataaattaatgaattactccactgaaaattgtcctgttaaggttaccagtgacctctagtatgccaa

SEQ ID NO: 176960 - DNA, 483 bp, Homo sapiens
aacccccagacttcaccattatgcaatatattcatgtagcaaaactgcatttgtacccattaaatgtacacaaattaaaaaaattctattatagtttaaatttcctaatctttacaagtattttttttcagagggatcttagcgttttccgtttttttctaggtctttgctcaaaaattaccatctgaatgttgtcaatgttttcatcccatgtgaaattgtgtgcactcctttttgtttttctttttttaacacttatcataatgtgatgtagttatactttacttatttaactattgtcattcccttgctattagaaagtaaattccaaggggcaggtatttttctttttcagttcactcactgcaggttaaagagtatctcatacacagtgtacacattgcartatttcttgaataaattaatgaattactccactgaaaattgtcctgttaaggttaccagtgacctctagtatgccaa

SEQ ID NO: 176961 - DNA, 576 bp, Homo sapiens
actattatcatcagcattattattttataaaagaaayaaaactaaggtttagcaagataccaaagtcactcagaaagtaagtcaaaaggaaaatacttgaattcatatttgtctgaagtcagtgcatacattataacattgttctgttctggattaatgctctttagagattaaataaaatacaagcacttggagctaatgtgtttgtcaaggaatgtactgtagtaataaaaaaaaaaaagtaatcccagtacagaaatctaaggaaaaaccaaaatttaggagatgataagaggaaaagaaatacaaagcaaatttataagtattaatgaaaaaaatgtatctatgagtatcaacaactgtatataaggaaatttaatatctccaaagataaggcagtgttttttctggaagggaagtatcatcagtgtcaaaagtgactgagaggacaagtgaaataaggtttgagtaatgtcctttgggcttaagcaaggttattgctaattttggagaaatactaaaggatatcaaaaattgggaacaaaatgctttccaaataataatgcagtacttgaa

SEQ ID NO: 176962 - DNA, 576 bp, Homo sapiens
actattatcatcagcattattattttataaaagaaataaaactaaggtttagcaagataccaaagtcactcagaaagtaagtcaaaaggaaaatacttgaattcatatttgtctgaagtcagtgcatacattataacattgttctgttctggattaatgctctttagagattaaataaaatacaagcmcttggagctaatgtgtttgtcaaggaatgtactgtagtaataaaaaaaaaaaagtaatcccagtacagaaatctaaggaaaaaccaaaatttaggagatgataagaggaaaagaaatacaaagcaaatttataagtattaatgaaaaaaatgtatctatgagtatcaacaactgtatataaggaaatttaatatctccaaagataaggcagtgttttttctggaagggaagtatcatcagtgtcaaaagtgactgagaggacaagtgaaataaggtttgagtaatgtcctttgggcttaagcaaggttattgctaattttggagaaatactaaaggatatcaaaaattgggaacaaaatgctttccaaataataatgcagtacttgaa

SEQ ID NO: 176963 - DNA, 576 bp, Homo sapiens
actattatcatcagcattattattttataaaagaaataaaactaaggtttagcaagataccaaagtcactcagaaagtaagtcaaaaggaaaatacttgaattcatatttgtctgaagtcagtgcatacattataacattgttctgttctggattaatgctctttagagattaaataaaatacaagcacttggagctaatgtgtttgtcaaggaatgtactgtagtaataaaaaaaaaaaagtaatcccagtacagaaatctaaggaaaaaccaaaatttaggagatgataagaggaaaagaaatacaaagcaaatttataagtattaatgaaaaaaatgtatctatgagtatcaacaactgtatataaggaaatttaatatctccaaagataaggcagtgttttktctggaagggaagtatcatcagtgtcaaaagtgactgagaggacaagtgaaataaggtttgagtaatgtcctttgggcttaagcaaggttattgctaattttggagaaatactaaaggatatcaaaaattgggaacaaaatgctttccaaataataatgcagtacttgaa

SEQ ID NO: 176964 - DNA, 584 bp, Homo sapiens
ttatgcttctctgccatttggaaacatttatcctcctatttcctgttactttagttatatatttaatacttacaacaaaatagttaggaaaaagcttatttattactttacagcttagaatggtagatagatatagatagatgtattaaccagaggatttcacccagttttagctggagtgtttttcattttcttctattcaccagagatttctctaatgctctgtcaaataattaaataaaaaaattatagcaattcataatatataatttaacagaaaatgtattcacttcatttcactttgctttttaaatcagagaaacaccagtgaaggaccagaacactttttytccccctctatggcttacagcactttgaaaaatactgacgatctcattagtacttaggagagtttctgagttgctaaaagctgtttcagtttaggttactgggaaaagagattctgagaaaagaggtaggtgcaagaaacaatgcccagggactggggatttaaaacaacgaaaggaagcagtcattgaaggatgtcttatttagtcaacatccactgtgggtaactggagctt

SEQ ID NO: 176965 - DNA, 568 bp, Homo sapiens
atttatcctcctatttcctgttactttagttatatatttaatacttacaacaaaatagttaggaaaaagcttatttattactttacagcttagaatggtagatagatatagatagatgtattaaccagaggatttcacccagttttagctggagtgtttttcattttcttctattcaccagagatttctctaatgctctgtcaaataattaaataaaaaaattatagcaattcataatatataatttaacagaaaatgtattcacttcatttcactttgctttttaaatcagagaaacaccagtgaaggaccagaacacttttttyccccctctatggcttacagcactttgaaaaatactgacgatctcattagtacttaggagagtttctgagttgctaaaagctgtttcagtttaggttactgggaaaagagattctgagaaaagaggtaggtgcaagaaacaatgcccagggactggggatttaaaacaacgaaaggaagcagtcattgaaggatgtcttatttagtcaacatccactgtgggtaactggagcttaaacccaga

SEQ ID NO: 176966 - DNA, 579 bp, Homo sapiens
ttgtcataaatggctcttattattttgaagtatcttgctttaatgcctagtttgttttttacatgaagggacattgaattttattgaaagccttttctgcatctatagagatgatcaggtggtttttgtttttatttctstttatgtgatgaatcaaatttattaatttgcaagtgttgaaccaaccgtgcgtctcagagataaagcctacctgattgtggtggatttaactttttgatgtgctgctggttcagtttgctagtattttgttgaggatttttgcatctgtgttcatcaaggatattggcctgaagctttctgttcttgttgtgtctctactaggttgtggtatcaggatgatgttggcctcatcttctttttaaaggctaaatagtattccattacgtgtgtgtgtgtgtgtgcatgtgtggggtttgtgtgcatgtatgcatcctcacattttaaaaattcattcatcccttgatggacatttaggttgagtccatatgttggctattgtgaataatgctgcaattattgcagtgattatgggaatgcatacatttcttcaacatactg

SEQ ID NO: 176967 - DNA, 579 bp, Homo sapiens
ttgtcataaatggctcttattattttgaagtatcttgctttaatgcctagtttgttttttacatgaagggacattgaattttattgaaagccttttctgcatctatagagatgatcaggtggtttttgtttttatttctgtttatgtgatgaatcaaatttattaatttgcaagtgttgaaccaaccgtgcgtctcagagataaagcctacctgattgtggtggatttaactttttgatgtgctgctggttcagtttgctagtattttgttgaggatttttgcatctgtgttcatcaaggatattggcctgaagctttctgttcttgttgtgtctctactaggttgtggtatcaggatgatgttggcctcatcttctttttaaaggctaaatagtattccattacgtgtgtgtgtgtgtgtgcatgtgtggggtttgtgtgcatgtatgcatcctcacattttaaaaattcattcatcccttgatggacatttaggttgagtccatatgttggctattgtgaataatgctgcaattattgcagtkattatgggaatgcatacatttcttcaacatactg

SEQ ID NO: 176968 - DNA, 519 bp, Homo sapiens
gtggacatttctttatgtttaatctgtttgaggtttttcaggtttcatggatctggatgtgtcatttcccattccagattgggatagtttgctgtcattactttaaataatctttctaccccatctcttgttctccattttctgttacttccatagtgtgtgtattggttctgctgatgatgccccattaagttctgtagacattctttaatctttttcattcttttttctttttgttcctctgactgggtaatttcaaaggacccagtttcaagttcactgattctttcttctgcttgatccagtctactatggaagttcatttgtgttcttcaactccagaatttcggttkggttctttattacggttttatctttttgttgaacttctcaatttcttcatatagtgttttcttagtgttattgagttgcctatccatgcacccctttacctcatgtggacccccatttttttaaggtcggttactggtgctttattttattccatttgtggtgtca

SEQ ID NO: 176969 - DNA, 503 bp, Homo sapiens
ttctcatattgttcaaatggcttattcctgatattttctacctggaaataaatggcttaacttcattttttgggtttgagcaatgaggcatctatgttccycacgtttgcttggttttacgttttttaaaacttttattcctctgggtgtttgtttcctaaagcttctagaagaagtgtcatatttcagttgattcatttgacagtagagatggtaacacacataaaaatttatttccaaaaatgtgatttgttaaagcaagtgacacttattgaaaattggaaataatggcatatttggaaacgtgtcttccttatgttttctggttcagtgggctccatgttcttatctagaattgctttatagagtggagctcctttaattattacagcaatgctcattttctgcttgtacttgtcaagcagatgctacctcccataatagataaactctgaaatctcaatggcttaacacaacagaagtttatgttggtagttttacat

SEQ ID NO: 176970 - DNA, 481 bp, Homo sapiens
cattccccaagtctctaagccgaatgatggaaaatgagagcaaaggaggaaggacgttcagaaggtgatcattgatctcccagagagtaaagaattcaaatattgtttcttttcctcgcctcattcttgcctggtatctccgggatttgtagttgaatgaagaaaggattttatccagttatttcttaaacttcccaggaaacatataaaagttggcatactgtagactcccacgttcaaataagtrattcttactttgccagtcacctaggaaagaatgtcactcgccactaccccctcctaggccacatccatattccaagccattgactcttcttttcacttgttccctgtttcagactcatccttccagagggtttatagcagtggatgtcttccaaccttctcttagtatcgtttataaactcaaaatctttcttatcttcttatcttgaaaaatatacttagcagtaaagtggtt

SEQ ID NO: 176971 - DNA, 576 bp, Homo sapiens
gcgataatccaagtacaaaacctgtcttagagagtttcatctatattgttatttttacatgattccaggttgaacagaataatggtcatccatgccattttttccctgtatcaaagacctaaacatatgttttattttattttgtccctatgagtcctagtccttaaaaaaaaaaaaaaaggcaaaaaagttcaaattaacaatccccttttatgggttctggaaaaatcgggcaccacacatgtaaggcaaataattaaaattgctaatctacacaaagccacactgtacattacaaatattaacagaaaaccattcacctacataatacatgaatgtgttaagtgtatgtgtatgtgtgaatataaatgtgtwgcaccacaaaaaaaaatctttaaaaggagaataattataacaatatactggaactctttgaaattttttctgcaagaattcttttataaaaattctacaaaaagtttttaaagtagccacttagagtacacagacactaaatttgttgatctgcaaggctcatttgaaggacattttaaagagcgaccattctatagaagg

SEQ ID NO: 176972 - DNA, 576 bp, Homo sapiens
gcgataatccaagtacaaaacctgtcttagagagtttcatctatattgttatttttacatgattccaggttgaacagaataatggtcatccatgccattttttccctgtatcaaagacctaaacatatgttttattttattttgtccctatgagtcctagtccttaaaaaaaaaaaaaaaggcaaaaaagttcaaattaacaatccccttttatgggttctggaaaaatcgggcaccacacatgtaaggcaaataattaaaattgctaatctacacaaagccacactgtacattacaaatattaacagaaaaccattcacctacataatacatgaatgtgttaagtgtatgtgtatgtgtgaatataaatgtgtagcaccacaaaaaaaaatctttaaaaggagaataattataacaatatactggaactctttgaaattttttctgcaagaattcttttataaaaattctacaaaaagtttttaaagtagccacttagagtacacagacactaaatttgttgatctgcaagsctcatttgaaggacattttaaagagcgaccattctatagaagg

SEQ ID NO: 176973 - DNA, 598 bp, Homo sapiens
gtttgatttaaataatttttcttacaggaacttctagcagaaatataactctccataagtgtaaggaatatctctagtgctgtcatatgaaaactcaattaaaagatcaattttttggaaatacatattttctggaaaacctaattattaaaacaggtgccatgaaccagatataattgtggatgtttaaagttctacaaattgaatgaatttgcctttgaaaaatctggatattcaacatgatttcaaacagacttattaaagaaaatatcaagacgccctctttaataccttccctattatacctttcctaagaaatatctgtgagttactgaagktctgtcagccttcaatttgattttattagcatttgttgctttaaatcagacctttcacattatttatacaggtttttttaaattcaatattcaaaatgatagaacatatacattgaaccacagatagggacataattcattgcagtatgaaacatgccttataacacttaagtggtttattaaacttgtctgctcttatattggataaattctatccttgacatcaagatgtgtgtgtgaaacatttatcatgtttagaa

SEQ ID NO: 176974 - DNA, 583 bp, Homo sapiens
aaagaattccacactgtctaggaaagaggtctgaagtgaatataagagaggatgtaaataaacttaacgggtttcatataagtaaatataagaataaaagggaacatatattaacttaaagaatatttcctccaaaaatctatagagaggaacaacacagaaaataatcactgaattaaaagtgatcacaagcaagttgtcatatagaaaattaaaacagcatgtagtctgattgtaatatgcaatttgcaattccttaaaatacatattcacttttatayttacatgcacacacacacactcacacgtatacacactaatctggaaacactctttcacattactatttagaaagcaaatgctcaaatgtagggccactattcacctaggggtagaagaacccctgagaaacgcaaaagagatcatgcagtatgtcctttttttcccatttccacccttactctcctcatcaagttcattcctctctgtcagccaaatcctcccactgcattagggctctggacacctcttctcctcatcttttccatccccatttgtcctcacctactctatcaggatgatc

SEQ ID NO: 176975 - DNA, 583 bp, Homo sapiens
aagcttcctgcattaaatgaaataatgtttatagaatgctcaatagagcacttggctagttcagagctcagtaaatgttaagtattattttgaaaagaaatttgaaccctaytctatgaacaaaaagggaggggttgcattagcttttgtattaaattaagagatggagtaaggttattgaaggaataataaagataggttacaaataactaaatcccaaaaaatgtaaattacatttaaacataaatgtaatttacattttgagctaagtgtgtgaaagtctttccagcattatatgtcttatgcatgactaatgagaagcagtgtgcataatggtcaaaattaagtgtcctgtatcagacttcccaggtttccatctccctattacccctatcaagtaggaaaccttaggcaagttacttggcttctccatgcctcaactttctcatcagaataatgagggtaatactgaaaccatccttgcaaaattacaagaatgagagaaacctaattagctggctccattttgcttctaacctcacaagctaaccacctttgcttattcttgtacgtaggccaggat

SEQ ID NO: 176976 - DNA, 457 bp, Homo sapiens
gaggggttgcattagcttttgtattaaattaagagatggagtaaggttattgaaggaataataaagataggttacaaataactaaatcccaaaaaatgtaaattacatttaaacataaatgtaatttacattttgagctaagtgtgtgaaagtctttccagcattatatgtcttatgcatgactaatgagaagcagtgtgcataatggtcaaaattaagtgtcctgtatcagacttcccaggtttccatctccctattacccctatcaagtaggaaaccttaggcaagttacttggcttctccatgcctcaactttctcatcagaataatgagggtaatactgaaaccatccttgcaaaattacaagaatgagagaaacctaattagctggctccrttttgcttctaacctcacaagctaaccacctttgcttattcttgtacgtaggccaggataa

SEQ ID NO: 176977 - DNA, 442 bp, Homo sapiens
gaaaacaaactctccttttccctgaaaaacagaatctataagcatttttaatatatttaggaacttatttatgacatatataacttaggtagctcaacagaccaaaattccatcaagtgaagagataagcatgcattacatggcttctttatttaattacaaaatacaaaagcccattagcagaatagcctgttggcctggagagagaatgctggcctgccatgtggtagacctgcagttttctcccctgctctggcttgccaagttggcgggggcttggagaggagtcactgtgtacagagtcaacatcaagaaggaaatgtgtaatgatgctgaactctgaccacttcattgtcttcacattagggaaataaacattaaattcctacaaaatatgattataaaaggccttttrtaagtgttttatttataatttgaattt

SEQ ID NO: 176978 - DNA, 407 bp, Homo sapiens
cagccctgttgcgaagtggcctgaggccctgaccctgccsacagttggagggagataagaatggggagcccgtgagatgatatagtgtgggagtgggatgaaggttttgcatcttgggaaaggagggagtctgtagcccgagctaaaggcagagcaggatcctggccattctagctcaggttctggaggaaatagccagcaacatcttcagcaggtagaggggaaatgacaagaaaaagaagcaagcagtgtctgtgaccacctcccatcccgattcattgttactcaaagtatcatcttcagcccagcagtgatctcaccatgaacctctaatcaaaaaagaaagttgtttctaaaaatctttaagagtaaacattcccataagcctttatttatgcttatgagta

SEQ ID NO: 176979 - DNA, 338 bp, Homo sapiens
aagcagtgtctgtgaccacctcccatcccgattcattgttactcaaagtatcatcttcagcccagcagtgatctcaccatgaacctctaatcaaaaaagaaagttgtttctaaaaatctttaagagtaaacattcccataagcctttatttatgcttatgagtaagtgctacgtattgataaattctaattaagtattactaaaatatggtaagagaatgagctattaagggaaaataycccacattatttttgtttgttttattttattttttggtttggggttttgtgttattttgggattttttttctccagctgtaggctaacccaagaagaat

SEQ ID NO: 176980 - DNA, 554 bp, Homo sapiens
aatagcagcataatgagacaagcatagtaattacactatttgcagaactaattctatgtgatatgatgaagatgtcctcctggccctcaataaaacacaaataagcaattttgtctgacaaagcattatttttaaaagacagtaattcactccttacctttatcttctttcactttccactctaggattttgtattattttgcaaagtagagatgattcatttctgaaaaatggcaaccattttcagtgttggcataggagggtgacaatattgttggtgaataattctgagcgcatgtctctatacaacatcctakattctccagcctcttttgatgaccaaacatgtctatttcatttttatcttctgttttctaataaaaacctaagttgtttttgagccagattatgggatcaataaactaagcactttaaagtgtatatattcaatctgtaactaattgcccataaaacatcactggaaattaaatgagggagaagaatgtatttatcagaaatcatcttgagagtgtcctacatgttactgaattgaa

SEQ ID NO: 176981 - DNA, 511 bp, Homo sapiens
tggtctctcttttatatttgtagtaatttattagtaagtcaatattgcaatgtatcagaatattcttcactagcaggtcaatataaaattcaggagatcatataaaggaccaaaatgtagtcacagagtcttcttacactaacagtaattcgtacagtttggactgacaagttattcggccttggaacacttgtagaatgcasaaaaattttctaagacgcaaataaaagatgtgctacactttactattcttccaaaattccatgtgtcaaataattgaaatagtacctgcctgcaatattgaaaaagataaatggtagcagttccaaggagactgattttataacaactttaactcctctggatataaacttctgtattaattcaaatacctggtgaattgaagttgctgaaagagaaaagcagaggtattaatacctatgctattaatgctgtcattttcacgagcctgtttcagatttatccttacacattaataatactaagatct

SEQ ID NO: 176982 - DNA, 577 bp, Homo sapiens
tttaactgttttcaatagtttgacagttaccttggtaaattgaaataacaagcctatgttgccatttcttgactttttcttatttttatttattattattttaatttttattttaggtttgggagtacatgtgaaggttttttacataggtaatcacatgtcatgaggattggttgtgacggacttcttcacgaaaaactggacaattgacttgaattaaacttttataaatgagaatattcaaatgaccaataaacatatgaaaaaagcttattttcattcgtcattaggtaaacacaaattaaaamtacaatgagatgccataacatatgcaccagaatgggtaacaaaaaactaacaatactaggtgttgataaagatatgaaagaagaaaaacgctcatatactgcttgaagtataaattggtacaaccactttggaagacccattgttaatatttaacctagaaaatgcaccaatttatgagactctcattacaatcctaggtatatactctacaaaatatgtgcttaggtaatataatcaagacacacacacacacacacacacacacaca

SEQ ID NO: 176983 - DNA, 637 bp, Homo sapiens
aatttgaactccgaggtggatttcacctagaaattgctgggaatttaagaacctctgggagcctcccactgactgtcttaatttgcagaaccaactcaagtgattaacaaaaatttactatcatatgtttcagctaaactgtagtgagcgcttcacaggagactgtcagaaaatcatataactgccatctgcctacttgtctgcctgcaactgtctcttttagtcacatcttctaaacagtgtgagatggtttctcattgacagatgttaacatagaaccacatagggaagaagatgttgggaaatttatttagagggatttctagcaggggtggagatgatgttgagttaacaaaagacaatccaatgttctatcacaattgaggaatacacagaaatacaaaagatcctcagactattacaaaacacttctatgcacaaaaactagaaaatctagaggaaatgggtaaattcttagaaacatacaatctccacagattgaattgggaataaattgaaactctaaataggccaatatcaagttccaaaactgaatctgtaataataataataraaaaactatgaaccaaataaggccctggattcacagccgaattctaccagatgtacaaaaaaa

SEQ ID NO: 176984 - DNA, 397 bp, Homo sapiens
gattctatttgttatgtaatgtgagtgacatggaaggtaaatttttttaaatagtcatggatttyagctttctgaaaggaatgcaatttggaagtttctccaaatctccaaatggttttgagttacatataatgcaacctgacacctagcttgatatttgaattctgtgtagctagaaagttgatagactatggatcttttctgttttataatgtttggtattatactggacctttccttgtgttaattttttctctttattaacatatgaaaaattctgtgaactattgatcatccaatgagattttctcagtctcaaaagacaaataatgcaatttggaaaactgtaaatttgtttgcatgtaatctgaatctctaggtatactctaattttttt

SEQ ID NO: 176985 - DNA, 576 bp, Homo sapiens
ttagtagcagacctctcagccagaagagactgggagcctacttttagtgacctaaaaraaaagaaattccaaccaagaatttcatatgctgcctcactaagctttatacataaaggagaaataaaatctttctcagacaagcaaatgctgaaggaatacattacaactagatcagccttatgggaggttcctaagagaacgctaagcatgggatcaaaagagtgacacctgctaccacaaaaacacacaagcacatagcccacagttatgctaaatcaactacacaatcaagtcgacctaacaactagcaaacaacatgatgacaggattaaaatcacagatataattatcaaccttgcatgtaaatgagctaattgccccatttaaagaacatagagtagcaggctggataaaaaagacaaaccctaccatctgttgtcttcaagagacccatctcagatgtgatgacactcacaggctcaaagtaaaataatggagaaatatcaagcaggcaaaaagaaaacaaaaaaaaaacatgaatagctattcttaagttagataaaacaaccattttaa

SEQ ID NO: 176986 - DNA, 563 bp, Homo sapiens
cctctcagccagaagagactgggagcctacttttagtgacctaaaagaaaagaaattccaaccaagaatttcatatgctgcctcactaagctttatacataaaggagaaataaaatmtttctcagacaagcaaatgctgaaggaatacattacaactagatcagccttatgggaggttcctaagagaacgctaagcatgggatcaaaagagtgacacctgctaccacaaaaacacacaagcacatagcccacagttatgctaaatcaactacacaatcaagtcgacctaacaactagcaaacaacatgatgacaggattaaaatcacagatataattatcaaccttgcatgtaaatgagctaattgccccatttaaagaacatagagtagcaggctggataaaaaagacaaaccctaccatctgttgtcttcaagagacccatctcagatgtgatgacactcacaggctcaaagtaaaataatggagaaatatcaagcaggcaaaaagaaaacaaaaaaaaaacatgaatagctattcttaagttagataaaacaaccatttt

SEQ ID NO: 176987 - DNA, 587 bp, Homo sapiens
ataccctcaggttagtagcagacctctcagccagaagagactgggagcctacttttagtgacctaaaagaaaagaaattccaaccaagaatttcatatgctgcctcactaagctttatacataaaggagaaataaaatctttctcagacaagcaaatgctgaaggaatacattacaactagatcagccttatggraggttcctaagagaacgctaagcatgggatcaaaagagtgacacctgctaccacaaaaacacacaagcacatagcccacagttatgctaaatcaactacacaatcaagtcgacctaacaactagcaaacaacatgatgacaggattaaaatcacagatataattatcaaccttgcatgtaaatgagctaattgccccatttaaagaacatagagtagcaggctggataaaaaagacaaaccctaccatctgttgtcttcaagagacccatctcagatgtgatgacactcacaggctcaaagtaaaataatggagaaatatcaagcaggcaaaaagaaaacaaaaaaaaaacatgaatagctattcttaagttagataaaacaaccattttaa

SEQ ID NO: 176988 - DNA, 563 bp, Homo sapiens
cctctcagccagaagagactgggagcctacttttagtgacctaaaagaaaagaaattccaaccaagaatttcatatgctgcctcactaagctttatacataaaggagaaataaaatctttctcagacaagcaaatgctgaaggaatacattacaactagatcagccttatgggaggttcctaagagaacgctaarcatgggatcaaaagagtgacacctgctaccacaaaaacacacaagcacatagcccacagttatgctaaatcaactacacaatcaagtcgacctaacaactagcaaacaacatgatgacaggattaaaatcacagatataattatcaaccttgcatgtaaatgagctaattgccccatttaaagaacatagagtagcaggctggataaaaaagacaaaccctaccatctgttgtcttcaagagacccatctcagatgtgatgacactcacaggctcaaagtaaaataatggagaaatatcaagcaggcaaaaagaaaacaaaaaaaaaacatgaatagctattcttaagttagataaaacaaccatttt

SEQ ID NO: 176989 - DNA, 580 bp, Homo sapiens
agacctctcagccagaagagactgggagcctacttttagtgacctaaaagaaaagaaattccaaccaagaatttcatatgctgcctcactaagctttatacataaaggagaaataaaatctttctcagacaagcaaatgctgaaggaatacattacaactagatcagccttatgggaggttcctaagagaacgctaagcatgggatcaaaagagtgacacctgctaccacaaaaacacacaagcacatagcccacagttatgctaaatcaactacacaatcaagtcgacctaacaactagcaaacaacatgatgacaggattaaaatcacagatataattatcaaccttgcatgtaaatgagctaattgccccatttaaagaacayagagtagcaggctggataaaaaagacaaaccctaccatctgttgtcttcaagagacccatctcagatgtgatgacactcacaggctcaaagtaaaataatggagaaatatcaagcaggcaaaaagaaaacaaaaaaaaaacatgaatagctattcttaagttagataaaacaaccattttaatacagaactaaa

SEQ ID NO: 176990 - DNA, 511 bp, Homo sapiens
ctatttctcagggtccccctcttgacttatctctattatatcacccttttaacattttcttcatagcatttactagtatctgaaattacagtcaggtgccacataatgatgtcggggtcatcaatgggcttcatgtatgacrgtggtcccctaagattataatacagtatttttactgtacattttctatgtttaaatacataaatacttaccattgtgttacagttgcctacaatatttggtacagtaacatgctgtaaaggtttatagcctaggagccataggctataccatatagcatagctgtgtagtaggatacaccctctaggtttgtgtaagtacactatgatgttcacaaacagatgaaatcacctaacaatgtatttctcaaaatgtatcgccgttgttaagtgacacatgactaaatgctgtttccttgattatgatctgtctcttttactagaatgtaacctctttgaaaccaggaaccttgtctacctagttcactgct

SEQ ID NO: 176991 - DNA, 511 bp, Homo sapiens
ctatttctcagggtccccctcttgacttatctctattatatcacccttttaacattttcttcatagcatttactagtatctgaaattacagtcaggtgccacataatgatgtcggggtcatcaatgggcttcatgtatgacagtggtcccctaagattataatacagtatttttactgtacattttctatgtttaaatacataaatacttaccattgtgttacagttgcctacaatatttggtacagtaacatgctgtaaaggtttatagcctaggagccataggctataccatatagcatagctgtgtagtaggatacaccctctaggtttgtgtaagtacactatgatgttcacaaacagatgaaatcacctaacaatgtatttctcaaaatgtatcgccgttgttaagtgacacatgactraatgctgtttccttgattatgatctgtctcttttactagaatgtaacctctttgaaaccaggaaccttgtctacctagttcactgct

SEQ ID NO: 176992 - DNA, 569 bp, Homo sapiens
caaatacaaattttgaaagctataacactttttaatctacttacatttataggactataattttcagacaagcatatgtctatgttattcacataactattatctttgtcaatacacaaatgaataacaaaagataaaagatctgatttatgtatctagttaccagaattcagttaggtttaatagtctttatcaagaatagcataaaagcctgtaagatggtaatgcatttaggttttcatagatgtgatagaaacacaaagtgacagtagctcaaacatggtgaaggtttgtttctcatgaaagtacgaatttaggtaattcaaggmtgttgtggtaatctacagattcatttgttgatgtggtctttatcctaaagtttcaaagtagagagagctccaagaattcctctttcaaacagtaagataaagaaaatagggtcatcagggtcacaatcctgcagtttaaggacatgatccagacttcttatacaccacttccatttacattttcttagtgacagcttagtcatgcaaccacacctatttgcaagggagattaggaaatga

SEQ ID NO: 176993 - DNA, 564 bp, Homo sapiens
tgataaatatattagtaatatacataagtaatatatacattagttatatatatatacatatatgtgtgtgtgtgtatatatatatatatatatatatatttgagaggggatttattargaaaatttgctcacatgattatggaggctgaggagtcccatgacaggctgtctgcaagctggagaccctgggaagtcaatagcatggctcagtccaagtccaaaatcctaagaacccaggaggacactggtgtaagtaagtcccagagtccaaaggtcagagattctggagttttgatatctaaaggtaggagaagaagagtgtatcccagatccaagagagagggagagagagggagagagagagagaaagagagagagacaccaatttacttttcctttgtttttgttctatctaagtctccagccattggatggtgcctgcctacattgaggaaggattttctgcacttggtccactcaaactctcaggattatttcatctggaaacactctcataagcatactaaaaaataatgctttaccagttctctaggtattccttaa

SEQ ID NO: 176994 - DNA, 564 bp, Homo sapiens
tgataaatatattagtaatatacataagtaatatatacattagttatatatatatacatatatgtgtgtgtgtgtatatatatatatatatatatatatttgagaggggatttattaggaaaatttgctcacatgattatggaggctgaggagtcccatgacaggctgtctgcaagctggagaccctgggaagtcaatagcatggctcagtccaagtccaaaatcctaagaacccaggaggacactggtgtaagtaagtcccagagtccaaaggtcagagattctggagttttgatatctaaaggtaggagaagaagagtgtatcccagatccaagagagagggagagagagggagagagagagagaaagagagagagacaccaatttacttttcctttgtttttgttctatctaagtctccagccattggatggtgcctgcctacattgargaaggattttctgcacttggtccactcaaactctcaggattatttcatctggaaacactctcataagcatactaaaaaataatgctttaccagttctctaggtattccttaa

SEQ ID NO: 176995 - DNA, 564 bp, Homo sapiens
tgataaatatattagtaatatacataagtaatatatacattagttatatatatatacatatatgtgtgtgtgtgtatatatatatatatatatatatatttgagaggggatttattaggaaaatttgctcacatgattatggaggctgaggagtcccatgacaggctgtctgcaagctggagaccctgggaagtcaatagcatggctcagtccaagtccaaaatcctaagaacccaggaggacactggtgtaagtaagtcccagagtccaaaggtcagagattctggagttttgatatctaaaggtaggagaagaagagtgtatcccagatccaagagagagggagagagagggagagagagagagaaagagagagagacaccaatttacttttcctttgtttttgttctatctaagtctccagccattggatggtgcctgcctacattgaggaargattttctgcacttggtccactcaaactctcaggattatttcatctggaaacactctcataagcatactaaaaaataatgctttaccagttctctaggtattccttaa

SEQ ID NO: 176996 - DNA, 564 bp, Homo sapiens
tgataaatatattagtaatatacataagtaatatatacattagttatatatatatacatatatgtgtgtgtgtgtatatatatatatatatatatatatttgagaggggatttattaggaaaatttgctcacatgattatggaggctgaggagtcccatgacaggctgtctgcaagctggagaccctgggaagtcaatagcatggctcagtccaagtccaaaatcctaagaacccaggaggacactggtgtaagtaagtcccagagtccaaaggtcagagattctggagttttgatatctaaaggtaggagaagaagagtgtatcccagatccaagagagagggagagagagggagagagagagagaaagagagagagacaccaatttacttttcctttgtttttgttctatctaagtctccagccattggatggtgcctgcctacattgaggaaggattttctgcacttggtccactcaaactctcargattatttcatctggaaacactctcataagcatactaaaaaataatgctttaccagttctctaggtattccttaa

SEQ ID NO: 176997 - DNA, 534 bp, Homo sapiens
cccacatagctcagcatcacacaatatatccacgtaacaaacctacaaacatactccctgaatctagaaaatttaaggcagagacagagtaagaaggcagaatagaagcctacaccactcatcccccatgtcaaaacaccatattttcacaacttactatattcaagaagcactgtcaaagggaccaaaaattaggtgagcaatcacagtatctggtattaacttcatatcactgaaaaagacattggagaagacaaaaaaatgacagcctagaaacaccgatgccacctctttttcaaccaccagtagtgaccacatggtgcagagattgtatgtttgggagaggaagagcacagtttctgaggctttgcaataaactcagtactaccctgtcacagtaaaaagcagagccagattgtactcagctgacatctgccaatagraggagaattttgattggccctagcaaaaggaaaatctcccatcttggtgctgggagcttgagtctttacaagccttgccatcatgagttga

SEQ ID NO: 176998 - DNA, 523 bp, Homo sapiens
atcacaagtagaatcaacctatggtgagaagctatgatagtagttgcatttgggtctggtatggagctaagaaaaacttctgaaatagtagtaatattctgtttcttgatttttgtgctgttacatgggtgtgataccttcatgcaaacttactgagctgtatattataagatrtgcacttttctgcacaatctttaaagttttcaagtagaagggaagaaagtggtgaaacctttgtgctttatctgatagaagttccccagaagacactggaactatccacactgtagcttctactgctacatgttcatggtcctgatatactctgcctctacttcaacctttggcatgttcttggatataacaccattatctaatgagaaagcaaactctgctcagcaaatgtttttacataaatgttgctctagtataacttaggacacaaatggaatttctaggggcagagtaatcaaatgatactcaataatataacaagcattgttgttcaaatggaggtggactg

SEQ ID NO: 176999 - DNA, 600 bp, Homo sapiens
ttttctcttcataataagatgtttgttccttgtaaataactttcttaactgttattgccttgaggattacatgcagtcactctgacccaggtagccttattaaggtggtggggccctggtgtcaggcaataatcagaccagccagggccgattgtcaccttctttcactgctgcttgccatggctggaaataaagggcaacagtaattacttctcaaacggtaggtgctgagaaggcatttttttagcgatattgaaagaaagttaataaaggcacacctatagaaaaacagaatagaatttggaagaccagaaggaagtttattttagaagagataatgcctctctttctttctctggygctgatcaggatttactagctctttctactagttcctgaagaagaacaaactgtacatcactcccttttatgaaacactacctcatttctaactcagtgagatataaagtagcacaggtacacttgtggctacaaaacataattttctgtggttatttgaagggttacaaaagagagaaataggctacacataggattgtcttagtccattttgtgctgctataacataatgccacagac

SEQ ID NO: 177000 - DNA, 332 bp, Homo sapiens
aatgggaatcagggtgacatttgctggaaattctggggaaatgaccttgtctctcttcctctgaattsagtcgtagaagatgtaagcttggtgcccctgtggtcctgccatagtgaggcaagcccagtgaggaagggtctggaaaaacagagccagaaatgtagaaaaactgggcccacaatgcttagatcaaacatggcagaagccagccatattcttggattttgagatccatgagccaacacatccctttttcctgttttagccagttttttgtgtgttggtttgttttgtttttggtcactggcaactcaaggaatcctcaaagtcag

SEQ ID NO: 177001 - DNA, 530 bp, Homo sapiens
agaatgaatcactccctaagaccctgacctatgcatggaacatgaaaaactgaagtttaactgggcrcggtggatcacgcctgtaatcccagcactttgggaggctgaggcgggcggatcacctgaggtcaaaagttctagatcagcctggccaacatggtgaaaccccgtctctactaaaaatacaaaaattagttgggcatggtggtggacaactgtaatcccagctactcgggaggctgaggcaggaaaatcgcttgaacccggaaggcggaggttgcagttacttctagagggaatttccattagccctttgaaatccttcaacattcatgaaggccaaagagttttcacctaatttaatctgatgggtatgtgaccagagtctttctagggaatagagactcccaaacagttcagctgggaagtgaggagagaatttattactcaaaatcaaagggaaatgaaaagaggccaacatagaatgtcattattctttcttggtggggaatggattccagagtcattct

SEQ ID NO: 177002 - DNA, 530 bp, Homo sapiens
agaatgaatcactccctaagaccctgacctatgcatggaacatgaaaaactgaagtttaactgggcgcggtggatcacgcctgtaatcccagcactttgggaggctgaggcgggcggatcacctgaggtcaaaagttctagatcagcctggccaacatggtgaaaccccgtctctactaaaaatacaaaaattagttgggcatggtggtggacamctgtaatcccagctactcgggaggctgaggcaggaaaatcgcttgaacccggaaggcggaggttgcagttacttctagagggaatttccattagccctttgaaatccttcaacattcatgaaggccaaagagttttcacctaatttaatctgatgggtatgtgaccagagtctttctagggaatagagactcccaaacagttcagctgggaagtgaggagagaatttattactcaaaatcaaagggaaatgaaaagaggccaacatagaatgtcattattctttcttggtggggaatggattccagagtcattct

SEQ ID NO: 177003 - DNA, 382 bp, Homo sapiens
caaactaaaacagaaactcctgaactgggttctttcraacccaggaagcagcagtaaatcattaaagaacagataagttcttaaggtgagggagagtttcagataaatggaatgctggtagaacacagggcccaaaggagcaaaagttaacctaagcccaggtagaaccttgtttactagagtattaggcatgggtttgggcaactattctaaccagagaaactggcttcagtgagggcaagttggcaatccaaggtatagcatgcatagggctggcaaaattcagggtgactggagcaaaagcttcagaaccagaaagaccacatctgggggtagagcacaaaactctcaagagatgaatctttgtaagagtgaggcagaa

SEQ ID NO: 177004 - DNA, 311 bp, Homo sapiens
gataagttcttaaggtgagggagagtttcagataaatggaatgctggtagaacacagggcccaaaggagcaaaagttaacctaagcccaggtagaaccttgtttactagagtattaggcatgggtttgggcaactattctaaccagagaaactggcttcagtgagggcaagttggcaatccaaggtatagcatgcatagggctggcaaaattcagggtgactgragcaaaagcttcagaaccagaaagaccacatctgggggtagagcacaaaactctcaagagatgaatctttgtaagagtgaggcagaa

SEQ ID NO: 177005 - DNA, 360 bp, Homo sapiens
ctccactcacatctaaagagccacacacagcaccaccaaaggcagcacaatgagaacagcattctcctcaacagacaagctgggagtatctagacacctgacctcaatagctccagaacagccctaaaacagttcctccctaaccaccactcaagtcaccagcttggaaagtattaagaaaacccaaatcctgacacaccactatgaaacaacttaaaacagcaaagaacaacccatttaaacagcaatgccagctgctgggaaaaaaagaaacaatragtagaggagaaacagacctcttggggtccaccaagacccagtctctcagcttcagcactttcaaatgcagaatccgtaccc

SEQ ID NO: 177006 - DNA, 510 bp, Homo sapiens
agaatatacccacttggccagccagagagaggcaaccatggagaggtgccccttgcacatcctcstgcactactcacacaatacacacatgcacgagcgcacgcgtgcacacacacacacacacacacacacagttgtagtcagagacatggagataaggagatagttcacttaaggggggctcccagtcctgatcctaaggttttctgatctttcaccttaaaaatcacagacctctcagatggaaccacagttaacacacacaccaataaacactccctacccatgctgtcactcatcaatctgtctagcaaagtcccctgctgaggtcagaagtggctctctcaatggcccagcttgaccaggcttcacacctagatcacacatggattgagatgcaggaagtgccacccactcccaccccatcaacacttagaacaatccttcgtggtgaagggacagcatgggccacagtggctcagaacagaacttagggtcagatggagttga

SEQ ID NO: 177007 - DNA, 510 bp, Homo sapiens
agaatatacccacttggccagccagagagaggcaaccatggagaggtgccccttgcacatcctcctgcactactcacacaatacacacatgcacgagcgcacgcgygcacacacacacacacacacacacacagttgtagtcagagacatggagataaggagatagttcacttaaggggggctcccagtcctgatcctaaggttttctgatctttcaccttaaaaatcacagacctctcagatggaaccacagttaacacacacaccaataaacactccctacccatgctgtcactcatcaatctgtctagcaaagtcccctgctgaggtcagaagtggctctctcaatggcccagcttgaccaggcttcacacctagatcacacatggattgagatgcaggaagtgccacccactcccaccccatcaacacttagaacaatccttcgtggtgaagggacagcatgggccacagtggctcagaacagaacttagggtcagatggagttga

SEQ ID NO: 177008 - DNA, 510 bp, Homo sapiens
agaatatacccacttggccagccagagagaggcaaccatggagaggtgccccttgcacatcctcctgcactactcacacaatacacacatgcacgagcgcacgcgtgcacacacacacacacacacacacacagttgtagtcagagacatggagataaggagatagttcacttaaggggggctcccagtcctgatcctaaggttttctgatctttcaccttaaaaatcacagacctctcagatggaaccacagttaacacacacaccaataaacactccctacccatgstgtcactcatcaatctgtctagcaaagtcccctgctgaggtcagaagtggctctctcaatggcccagcttgaccaggcttcacacctagatcacacatggattgagatgcaggaagtgccacccactcccaccccatcaacacttagaacaatccttcgtggtgaagggacagcatgggccacagtggctcagaacagaacttagggtcagatggagttga

SEQ ID NO: 177009 - DNA, 427 bp, Homo sapiens
gaattcatacctcacttcttccattcttcaggcttttgcacagctccagcgagcaccattcacactttccagtgagcaccattcacacttttacctaaaggcataagattcacggagaatacaatgtgaatgatcatccccccattcccccacccccccaatggagttgtgacatgctatggccctatccactagctattagcaatgaactaatagtattatttgagaaagagcttggccatcactatatttgtaaagtgaccattttaatgtctacatctccaacttattctaaggatcaaattagataatatatgaaaagtgctcagcacagagcctgacacattgaaagcatcagtaactagtagcaatgattatttytcaagtcacctaatctaggatcatgcccacacaagaaccattgagg

SEQ ID NO: 177010 - DNA, 317 bp, Homo sapiens
ttaataataggttccatatctccagattagcttttattttatgaacctaggcactttataaaacattcatctattgaacactttacttccttctatgtggaataatactcctctctcatcactctcttccctgctctgcctctcccttccctgactaacctcattcatctttgagggttcatgttagctatcagttcccccagaagtctgacctaactcccaaatctgggttacgaggtccacttatggaccrtcaaagcactgtgtgctccccacatcatagttcttcgagacctcactcacagttctttccaccc

SEQ ID NO: 177011 - DNA, 423 bp, Homo sapiens
taggaggctatcttcattgaaagttttttctcaaaagccttaagatagaacatagttcttggcagcaatttgaaagttayttgaggaggaggggagacttacaatgatgattcaaatgaaggaaactaaaaagtaatgaagcaaggcagaggaaaaagcagtattcacttgagcacatcccaaaagaataacatttcaaatgtaactggaaaaaagtatgctgaagttcgcaatacagaaataattattaataagatagctttaaagccctgctcagcttttgaatgttgggaattgacccagaggtggctgtaacctaagatggttccttcagtaatgaccattttttctttttcaagatgatgattattccccaccttctaagagacaaagaccagcgagccaccacagccaccagtccca

SEQ ID NO: 177012 - DNA, 423 bp, Homo sapiens
taggaggctatcttcattgaaagttttttctcaaaagccttaagatagaacatagttcttggcagcaatttgaaagttacttgaggagraggggagacttacaatgatgattcaaatgaaggaaactaaaaagtaatgaagcaaggcagaggaaaaagcagtattcacttgagcacatcccaaaagaataacatttcaaatgtaactggaaaaaagtatgctgaagttcgcaatacagaaataattattaataagatagctttaaagccctgctcagcttttgaatgttgggaattgacccagaggtggctgtaacctaagatggttccttcagtaatgaccattttttctttttcaagatgatgattattccccaccttctaagagacaaagaccagcgagccaccacagccaccagtccca

SEQ ID NO: 177013 - DNA, 341 bp, Homo sapiens
aaaactgttacaccctcctggtgtttcaatgattgggagaaaaagggttggcattttttgcttaggggtccctcttaaacttgtatctgtaaggtcgggggtccctcttaaccttgtgtttttgtttttgtttttttgaggtggagtcttgctctgtcatccaggctggcagtggcgtgatcttggctcactgcaatgtstgcctcctgggttcaggtgattctcctgcctcagcctcctgagtagctgggactacaggcgcccgccaccatgccctgctgttttgtatttttggtagggacggggtgggggtggggctagggaggggggttttggctatg

SEQ ID NO: 177014 - DNA, 609 bp, Homo sapiens
cactcaaaactcaacaggcttccatccctgggtggtctgacaggacctgggcagcaaaactgcactgctgtctgggtcatatactaaactcttcagcgatgctatccaagattgcatttgcgttttgacaactttaaaggctgcagttataagtagcaagaagatttagagctcttcagggtctgctagaacattgccctgactctttcccagatgtctacagagatttttgggctccctttcctcaaggtttcctcgctcaggcagcttggagctgcatatcaaccgaatatcgcacgtgtcagagccagctctcttccttcatggacttgtgtatgtcagcctgggttgtagaactaaaatatataccasgaatagtctacagtgatgataatgaaatcactgggagcttttaaagctatgcaagctgacctggatgattctgataggcctcttagaatctgggcatatatagtttgtacaagctccccaggtaacttactaagctattgtccccaccttgagattcactgctctgcagcttctgtttgttgaaataggagctttcctacctaggtactaaaaatccacctgcagatggaccagatg

SEQ ID NO: 177015 - DNA, 369 bp, Homo sapiens
atggcagtggctgttgccatcatgccagctgcagcaggtagtcatggctggggattgccactccatggagcaggtgggaaccccgccccttctgagttggggtgggagctccctgggtgctgatgcagccacccagttkcccaatctgtggctgcagacccaaaccctttgctctagggagcaggcaggagtcccaccctcctgggctagcccacagtttgtggatctgagcctgcctatgctcttggcaggtgactgggaacaggcaggatctaccctcccaggtacagctgctgctgccctcccaggtacaggacacggtgtctttgtagcctgcacccttggggcctgggaagccctcctccccta

SEQ ID NO: 177016 - DNA, 444 bp, Homo sapiens
aatatttggggcctcagctgtaatcgctggttaaaatacttgcagctgggcaattccattccatgtggcttgttttacttacttacatgtttggctcctactgggatggctgaggacaggcggtgytgactggggtattccagcaaataatgtggatgctgaagagtgtatatgacagagtttcattattcagcttctacagttttgctggaatactttctctgggaatacttcctgttagagccctgagactgccatactgggaggccacatacactccagtcaatagtccctgctgtacccattctacaaccatcccagctgatgatccaaagcaccatagtggatgcatcttcaaaataaaatgaaatcatctataactgataatgatatctgaacaatttgtaatgtgtataattattgaaaagatacttcaaaaactca

SEQ ID NO: 177017 - DNA, 548 bp, Homo sapiens
catttaattgtttttgtctctcctgactgtgtattgttaaatagcctaccttcaaactcactaattctttcttctgatgaggctratgcatttttcagtatgtgaattgcatctttcagcttaagaatttctgcttgattctttttggttatttcgatctctattaaatttatctaatagaagtctgaagtccttctccttgttttcttgaattgctttgagattcctctaaacagctattttgaattctctgtatgaaagttcacatatctctgtttctccaagattgatttctgatgcctagttagtttgttcgtttgtttggtgaggttgtgttcctgaatggtcttgatgcttgaagatgtttatcaccatccagacattaaagagttaggtattttttgtagtcttcacagtctgggcctctttgtacctgtctttcttggaagtatttccacatatttgaaaagacttgggtgttgtgttcttagccatatctgcattagggggcaccccaagcccagtgacactgtggttcttgcagactc

SEQ ID NO: 177018 - DNA, 548 bp, Homo sapiens
catttaattgtttttgtctctcctgactgtgtattgttaaatagcctaccttcaaactcactaattctttcttctgatgaggctgatgcatttttcagtatgtgaattgcatctttcagcttaagaatttctgcttgattctttttggttatttcgatctctattaaatttatctaatagaagtctgaagtccttctccttgttttcttgaattgctttgagattcctctaaacagctattttgaattctctgtatgaaagttcacatatctctgtttctccaagattgatttctgatgcctagttagtttgttcgtttgtttggtgaggttgtgttcctgaatggtcttgatgcttgaagatgtttatcaccatccagacattaaagagttaggtattttttgtagtcttcacrgtctgggcctctttgtacctgtctttcttggaagtatttccacatatttgaaaagacttgggtgttgtgttcttagccatatctgcattagggggcaccccaagcccagtgacactgtggttcttgcagactc

SEQ ID NO: 177019 - DNA, 298 bp, Homo sapiens
tcagatacctaaggttttattactatgtaaactcttttcaacttgacagaggaaggtggagagacttcttggtggtagaaagcagcacctggcattttcctggctccactcagttcttattggtagaagatgactagcttctgctgttgctgctgtgtctctgccactctagagagaggcaccagggcatgaaaagagcttgtagatctttagagtcagcaggatggtactrctgtttcccagtagtgtgttatagtgatgagctatacaggctcctaggcaaaatctcaaaaacatt

SEQ ID NO: 177020 - DNA, 360 bp, Homo sapiens
aagctttctctgcttagcgggccgggctgtctttatgcccagccggacgcatccttgctaggcattgagttgacagtgcagccgccccggaaaagctggggtctcgtgcgctgcggtacrggcatcttccagcaagaagggtgaggaggtccccaaggtctttccagcacccctgggagagacgggagtctgtgaataaagccttgggcgcagctgaacgaaggactttttctctcagcacaactaatgtgagaacactgtcacctgcttccatctctggggaatgcattttctgaacaggtgctggccccggccctcccctccacaccacctctgcttcaaatgggaaatctaaacctc

SEQ ID NO: 177021 - DNA, 360 bp, Homo sapiens
aagctttctctgcttagcgggccgggctgtctttatgcccagccggacgcatccttgctaggcattgagttgacagtgcagccgccccggaaaagctggggtctcgtgcgctgcggtacgggcatcttccagcaagaagggtgaggaggtccccaaggtctttccagcacccctgggagagacgggagtctgtgaataaagccttgggcgcagctgaacgaaggactttttctctcagcacaactaatgtgagaacactgtcacctgcttccatctctggggaatgcattttctgaacaggtgcyggccccggccctcccctccacaccacctctgcttcaaatgggaaatctaaacctc

SEQ ID NO: 177022 - DNA, 475 bp, Homo sapiens
gaattctttacatagtctagatacaagtcctctatcagatacttattatggtttgaaaatattttctcccagtctgtgatttttcaattaattttttttttttttttttttgagacagggtctcactctgtcacccargctctagtgcgggggggtgatcttggctcactgcaacctctgcctcccagggtcaagagatcctcccacctcagccttctgagtagccaggactacaggagcacgccaccatgcctggttaatttttgtattttttgtggagatggcattttgctctgttgtccagtctggtctcaaattcctgagctcaagtggtccaccctccttggcttccgaaagtgcagggatttcagatgtgaaccacctccccgggccaattaattttcttaatagttttttgaaacaaaattttatattttaatgaagtccaatttattaatattttcttttatgaatt

SEQ ID NO: 177023 - DNA, 471 bp, Homo sapiens
cctctatcagatacttattatggtttgaaaatattttctcccagtctgtgatttttcaattaattttttttttttttttttttgagacagggtctcactctgtcacccaagctmtagtgcgggggggtgatcttggctcactgcaacctctgcctcccagggtcaagagatcctcccacctcagccttctgagtagccaggactacaggagcacgccaccatgcctggttaatttttgtattttttgtggagatggcattttgctctgttgtccagtctggtctcaaattcctgagctcaagtggtccaccctccttggcttccgaaagtgcagggatttcagatgtgaaccacctccccgggccaattaattttcttaatagttttttgaaacaaaattttatattttaatgaagtccaatttattaatattttcttttatgaattgtgctattagtgtcttaagaattc

SEQ ID NO: 177024 - DNA, 557 bp, Homo sapiens
aacttatgttcagagaggttatataagttgcccaagtttactcaattagtgtataatcacaatcattttcctcagactgtctcccacatcgtttgaagagctataatcaagtttccctttaggaccattcttaatggcctgacactgtttcagagattgcagatatctgctcactgagtgtattaatttatataattcttttttttattttttgagatggagtcttgctttgttgcccaggctggagtgcagtggtgtgatctcrgctcactgcaagctccgcctcctgggttcacaccattctcctgcctcagcctcctcagtagctgtgattacaggcacataccaccacacccagctaatttttgtatttttagtagagacagggtttcaccatgttggtcaggctggtctcgaactcctgactttgtgatccgcccacctcggcctcccaaagtgctgggattacaggtgtgagccactgcacccagccaaaggcttgcttaagactctctttctttagctgatttccagcttttaaaaataattaataagag

SEQ ID NO: 177025 - DNA, 593 bp, Homo sapiens
attttctttttaaaaaagaaaaaatgtacagacgtattaacccaaaacctagaagggaatacagtatatcaacaacggtgtaattttgattactattcttttttttttttttttgcttctttatgttgatttttaaataatggatgttttagttgtataatttttaaattgttaagtggaaagttttcttaacctctaatggcaaatttgggttatatgcagcaggaatttccttaaccagtgtagccacacagtataacaagcatattactcttatgtgcactgactgctctcatttctcctatttttacctctctctatccagcctttttcttttactgatacatgatattttacatatttatgggtacatgtatttgttacacgtataaaatgtataataatgtcagagtatttggggtatccatcctcttgagtattcatcatttctatgggttggtaacatttcctgtcctctctyctagctacattgaaatatacaatatattgttgctaattatagtcactgtaatgtgctatcaagcaatacagcttgtcttttatctaactctttttgtacccattcaccagtt

SEQ ID NO: 177026 - DNA, 413 bp, Homo sapiens
acaagataattcaaaccgactctctctctgagaactgaaaaagttgggggaaaacaatccacatttgtttgaaacacatttgttagcatcagagagctaacgaggctataaagaattacagtctgagatcctggagaaggtaattacagatagagcactaattttctaattagatattgagaaattgagcagtttttctaataaaaagagttcagggtatccttcaagaaggcaggggtatgggcaaccttccccaagtatgagaccaggacttggaaagaccatactctaggaataacagtaagaataggaaatagactagttctttcagggagtgaatcccaccttgaaatcatyttaatctctgattacattacagtgacatggaactgctacaaatcatgtcagaagca

SEQ ID NO: 177027 - DNA, 599 bp, Homo sapiens
agctttatttagccctgtggtcctacccactcatgcaaggatgcttctctttctcgtctcacatgagaaccctgatgactgagagatcaacagtgtttcctcaggcccagctgccctgcccagcgttcctgcatcccactctctacaggcacaatgttagtggagcattgttcctagagtattcttcatcttagttgctttacccttgcttcatatatttgtatgtctcacgtttcagattgctctcaaatatccctgaagcacttttttaaaaaaaattgtggtgaaatatacataaaattcatcattttaaactytttaaactatgattctgaattaatttagaatactcctgatgtataaaatgctatgtaaaatacgattttgctgttggcttctgtattagattttcattgctgtataacaaattcctgcaaacttagcagtttaaaacagcatacctttgttatctcacagtttctatggatcaggagtccagccacagcttaattgggtcctctgctcagggtctcattgggctacaggccagttgttgactgggtctgtagtcttatcagaagcttaactggggaaagatc

SEQ ID NO: 177028 - DNA, 599 bp, Homo sapiens
agctttatttagccctgtggtcctacccactcatgcaaggatgcttctctttctcgtctcacatgagaaccctgatgactgagagatcaacagtgtttcctcaggcccagctgccctgcccagcgttcctgcatcccactctctacaggcacaatgttagtggagcattgttcctagagtattcttcatcttagttgctttacccttgcttcatatatttgtatgtctcacgtttcagattgctctcaaatatccctgaagcacttttttaaaaaaaattgtggtgaaatatacataaaattcatcattttaaactctttaaactatgattctgaattaatttagaatactyctgatgtataaaatgctatgtaaaatacgattttgctgttggcttctgtattagattttcattgctgtataacaaattcctgcaaacttagcagtttaaaacagcatacctttgttatctcacagtttctatggatcaggagtccagccacagcttaattgggtcctctgctcagggtctcattgggctacaggccagttgttgactgggtctgtagtcttatcagaagcttaactggggaaagatc

SEQ ID NO: 177029 - DNA, 599 bp, Homo sapiens
agctttatttagccctgtggtcctacccactcatgcaaggatgcttctctttctcgtctcacatgagaaccctgatgactgagagatcaacagtgtttcctcaggcccagctgccctgcccagcgttcctgcatcccactctctacaggcacaatgttagtggagcattgttcctagagtattcttcatcttagttgctttacccttgcttcatatatttgtatgtctcacgtttcagattgctctcaaatatccctgaagcacttttttaaaaaaaattgtggtgaaatatacataaaattcatcattttaaactctttaaactatgattctgaattaatttagaatactcctgatgtataaaatgctatgtaaaatacgattttgctgttggcttctgtattagwttttcattgctgtataacaaattcctgcaaacttagcagtttaaaacagcatacctttgttatctcacagtttctatggatcaggagtccagccacagcttaattgggtcctctgctcagggtctcattgggctacaggccagttgttgactgggtctgtagtcttatcagaagcttaactggggaaagatc

SEQ ID NO: 177030 - DNA, 599 bp, Homo sapiens
aattaggtcattgatatccaccagccagagccactgaccattcaaccttaccaaaacccaaaggactataaaataatttgagtgacaaattacgcctttttgtgatcataatttaactttcctaggctgcttgaataatagttactatggaattgggttgaaaagtagattgatacttctactaaaggtagtaatgtttcaaataatrttcatatcacattttcaccatgtctatacctaactagaagcaggtttgacagtaagatagacccattagtcaatgaatagattgaggacatgtctagatttgacatctttttagtataaagagaaattgtttttattattagtccctaataatgaactcagtcaaccatcagagttgtaccatttttcatattggaattgaatttcaaataatttttaatgttaaaagtagatttttaataaagttggtttaaaataaagttggattcaacccataagtagatggcaagttctcttccaaactacgtggcagaactgttgcaggtacaaatatgtttgtaacttagctttatttttatcttagctttatttttctaacagtgattcaaatg

SEQ ID NO: 177031 - DNA, 587 bp, Homo sapiens
gcccaagtgagcgcttttgggctccaaccccatggtagcgtcttgaggtgtgttacaattaatgttcttttagcatttgctgtccactgattaagtgttaaaccagctcagtggaaagtcagggtgacagtcttttacaccctgacctcttggtacctaggtccttgtccagcacccagggagaatcaggtcacgtggacttgaaggatggtgaatgcagggagggacggtgagtgatggaggtggctctcagtgggatggataggggcctggaaagcgaatggagtgggaaaatgatctttccctggagttcctccatcccgcaacttatctcctctctgactgtccccaggcatggtgggccagagcggtcttggaagaaataacattggacatgaaaacaggaatgcctgttcccatttagrgccgtgagtttccatgcttgagggtagggcctttgccagggaccgctctcttctacccagtatttccctgccttctgtccatattataaccaactgttcaaatagcattcaaataaggcaaacactgggctgtaaccaagccagttgtttctgtgcctcact

SEQ ID NO: 177032 - DNA, 432 bp, Homo sapiens
agaattccttctatgcacattttgtgmaattttctcccctttaaccatgcattcaatgtgccagaaacaggcacaaatgattatatgcattttaggttagatttttctttataaaaacagacagaatttatttttcatgggaattatgcaatttttctgaagtgcggggctacctgattcctcaggcaactcttcatatatcacagctcaaagctcaacttccttcttccttcttactagtaaattacattagcatagattactttgcagtgaacattgtatggacttatttaatgaatgtcagcagagtcttcatgcttgtaaacttattcataagtttctcttttcagtttcttaaaatatgtttgattgagaggcacaaataggggtgaggtggtaaagagcttctttaatttaatatgttcctgctag

SEQ ID NO: 177033 - DNA, 431 bp, Homo sapiens
gaattccttctatgcacattttgtgaaattttctcccctttaaccatgyattcaatgtgccagaaacaggcacaaatgattatatgcattttaggttagatttttctttataaaaacagacagaatttatttttcatgggaattatgcaatttttctgaagtgcggggctacctgattcctcaggcaactcttcatatatcacagctcaaagctcaacttccttcttccttcttactagtaaattacattagcatagattactttgcagtgaacattgtatggacttatttaatgaatgtcagcagagtcttcatgcttgtaaacttattcataagtttctcttttcagtttcttaaaatatgtttgattgagaggcacaaataggggtgaggtggtaaagagcttctttaatttaatatgttcctgctag

SEQ ID NO: 177034 - DNA, 404 bp, Homo sapiens
aatgtgccagaaacaggcacaaatgattatatgcattttaggttagatttttcyttataaaaacagacagaatttatttttcatgggaattatgcaatttttctgaagtgcggggctacctgattcctcaggcaactcttcatatatcacagctcaaagctcaacttccttcttccttcttactagtaaattacattagcatagattactttgcagtgaacattgtatggacttatttaatgaatgtcagcagagtcttcatgcttgtaaacttattcataagtttctcttttcagtttcttaaaatatgtttgattgagaggcacaaataggggtgaggtggtaaagagcttctttaatttaatatgttcctgctagaagactctagcttctgaagagaattc

SEQ ID NO: 177035 - DNA, 367 bp, Homo sapiens
aatcacatctatagactctttgctttgtgctatttgctttgtactgcttcttctaataagtcccttttccctttttttgtgttctgatttttgcaagcagggtaacaatcatgctacggctgctcaattgttttcagatctttttcttactattagttttatataatccccataagcmagaagtgcaatttaaactgcaacagtagttttatgattaaaaaaaaactgacttttaatatctccaacttagttttcttatttacagcacagactacaagataattgttaatatggctatggatactcatatctctcaaatcttgcagagatgcaaaattatcttatgataatacacagtttattatta

SEQ ID NO: 177036 - DNA, 547 bp, Homo sapiens
gttcaaaaacgtgttcgagtaaataaaatttcttatttctattagccaggaattttacatttgcaagttgtagaaatacaataacattgattcaaagcccccagaaaggaagtgggatttattgactttataaatctctgaagtcccaaagtttaccttcacatatggttgtatcaaaaatgtcatgaagactctgttttttgttttggttttttgtctaccaccaccacccaaccccacctgcatcccatgcccttgtttttctccaggttagccttattttcagttaggtcctttccttctaatgaccctaacagtgcccaactttcatcttcctacckaattcatcaaggcagaggaaaatctctcttgtacaatagttaccaaaaatgtcactagttaaatttcagtaccaaggcatgaatactgaggttacttctaggtctcaaaagtgaggtcatcctacatggattaagagtgaggaagaggtggtttcccaaagcaaaatacaagcattatttacacaacatgtatacactacataagc

SEQ ID NO: 177037 - DNA, 403 bp, Homo sapiens
tgtctaagctgatgatcattttgcttatggtaccttccaaagcatggtagaagacacccagcatgcataagaaacacacagrggtaaaggatgagggaaagagaggcaaaggaggagtcattggtctcatggcaattgagatgggtgcaacgggctctacttgtaatccattagtgtttcaccacagctttcccagtaaagtcttagcatggtctatgagggtctcacaagctggctcccatcttcctctaagcctcattcccacattccctcctcatcctctattatctcacggtagggagctgctcttcctgccaaaacccccgctcttcatgctgactctccattccttgcctctactcaatgatcagtgatcaatcatcaatttcatttccacgtttct

SEQ ID NO: 177038 - DNA, 566 bp, Homo sapiens
ggccgcacacatctttctgaaaaagaagatgaagattattttgtccatcttgccattattaatrtgaatataaattctctgtgctatttcattggtgtattttccaggaacacagtatatattctataatttaatactatgataaatgtgatttgtgaaagtcatttattcacgaacagacctttccatattttatgtaaacttgctattcgttatatttaacattctcatatttaacctcagaagatactaaaagtgtaagttgaaaaaatagtcttataaaatccttacttaactgtctctgtcttctcagcagaggggtagcatgttcttgatcttttgcttttgattttgttcttgtattttgagtcataagcctttttaagtgtaggacaaaagttatggatctcttctccagaaaaacatacacaaacagaaacacaaggttttcatataactaattttatttcattggaagtttattaccttcacataaacagaaataatctttataaagaattatatatcttttgctatctttttaatgtttattatgtgtaaaccaa

SEQ ID NO: 177039 - DNA, 566 bp, Homo sapiens
ggccgcacacatctttctgaaaaagaagatgaagattattttgtccatcttgccattattaatgtgaatataaattctctgtgctatttcattggtgtattttccaggaacacagtatatattctataatttaatactatgataaatgtgatttgtgaaagtcatttattcacgaacagacctttccatattttatgtaaacttgctattcgttatatttaacattctcatatttaacctcagaagatactaaaagtgtaagttgaaaaaatagtcktataaaatccttacttaactgtctctgtcttctcagcagaggggtagcatgttcttgatcttttgcttttgattttgttcttgtattttgagtcataagcctttttaagtgtaggacaaaagttatggatctcttctccagaaaaacatacacaaacagaaacacaaggttttcatataactaattttatttcattggaagtttattaccttcacataaacagaaataatctttataaagaattatatatcttttgctatctttttaatgtttattatgtgtaaaccaa

SEQ ID NO: 177040 - DNA, 426 bp, Homo sapiens
tctgcaacctccgcctcctgggcttaatccatcctctcacgtcagcctcctgagtagttgggactrtaagtgtgtgctcccgtgtctggctaatttttgtattttttgtagagatggggtttcgccacgttccccaggctgttgtcaaactcctgggctcatgcagtccacttgcctttgcctcccaaggtgctgggactagagcacccagctgcatttagctcttacatttaagttttgatccatcttaagttaatttttatatatggtgtgatgtggggtccagtttcatttttttatatgtccagttgtctcagcaccatttgtagagaatactattttccctctattgaattgtcttggcaccattgttaaaaccaattgatatatatgtaaaggtttgtctgggctcctaattctattcca

SEQ ID NO: 177041 - DNA, 416 bp, Homo sapiens
tgatctccactctctgcaacctccgcctcctgggcttaatccatcctctcacgtcagcctcctgagtagttgggactataagtgtgtgctcccgtgtctggctaatttttgtattttttgtagagatggggtttygccacgttccccaggctgttgtcaaactcctgggctcatgcagtccacttgcctttgcctcccaaggtgctgggactagagcacccagctgcatttagctcttacatttaagttttgatccatcttaagttaatttttatatatggtgtgatgtggggtccagtttcatttttttatatgtccagttgtctcagcaccatttgtagagaatactattttccctctattgaattgtcttggcaccattgttaaaaccaattgatatatatgtaaaggtttgt

SEQ ID NO: 177042 - DNA, 392 bp, Homo sapiens
gcctcctgggcttaatccatcctctcacgtcagcctcctgagtagttgggactataagtgtgtgctcccgtgtctggctaatttttgtattttttgtagagatggggtttcgccacgttccccaggctgttgtcaaactcctgggctcatgcartccacttgcctttgcctcccaaggtgctgggactagagcacccagctgcatttagctcttacatttaagttttgatccatcttaagttaatttttatatatggtgtgatgtggggtccagtttcatttttttatatgtccagttgtctcagcaccatttgtagagaatactattttccctctattgaattgtcttggcaccattgttaaaaccaattgatatatatgtaaaggtttgt

SEQ ID NO: 177043 - DNA, 392 bp, Homo sapiens
gcctcctgggcttaatccatcctctcacgtcagcctcctgagtagttgggactataagtgtgtgctcccgtgtctggctaatttttgtattttttgtagagatggggtttcgccacgttccccaggctgttgtcaaactcctgggctcatgcagtccacttgcctttgcctcccaargtgctgggactagagcacccagctgcatttagctcttacatttaagttttgatccatcttaagttaatttttatatatggtgtgatgtggggtccagtttcatttttttatatgtccagttgtctcagcaccatttgtagagaatactattttccctctattgaattgtcttggcaccattgttaaaaccaattgatatatatgtaaaggtttgt

SEQ ID NO: 177044 - DNA, 578 bp, Homo sapiens
gtgggagctcccttgccctgtgtggctctcaggtgggctgttgtaccactctgcttttcctcactccccatgggtcaagacaaccgcgtagtcagtcccagtgagagaacctctatacctcagtttttggtgcaggattcacttgctgtttacattcttcttggtgggagcctccaactgcarctgtttctattcggccatcttggcccctcctctgtaagacgcttttgaatcttataaccaaaaagccaaattttcaagtttctttattcctcatttgatggtcataggaaaccacgatgctctattattagagttgttaaaggcagcctgagcccgtcctatcttttccattgattgtagcaagtcttggatttgaccactaaatgagggttattacacaggatgcctagcaaattttcccttttttaaattttagaggtaggaaagacagatttatatcacacatttgaattagaaaacgtaccataagcacattgtaacaattcaagcaatatagaagtgattaaagtaaaacggaagtcttcctctgtcgtgactccacccccagtgtaacc

SEQ ID NO: 177045 - DNA, 578 bp, Homo sapiens
gtgggagctcccttgccctgtgtggctctcaggtgggctgttgtaccactctgcttttcctcactccccatgggtcaagacaaccgcgtagtcagtcccagtgagagaacctctatacctcagtttttggtgcaggattcacttgctgtttacattcttcttggtgggagcctccaactgcaactgtttctattcggccatcttggcccctcctctgtaagacgcttttgaatcttataaccaaaaagccaaattttcaagtttctttattcctcatttgatggtcataggaaaccacgatgctctattattagagttgttaaaggcagcctgagcccgtcctatcttttccattgattgtagcaagtcttggatttgaccactaaatgagggttattacacaggatgcctagcaaattttcccttttttaaattttagrggtaggaaagacagatttatatcacacatttgaattagaaaacgtaccataagcacattgtaacaattcaagcaatatagaagtgattaaagtaaaacggaagtcttcctctgtcgtgactccacccccagtgtaacc

SEQ ID NO: 177046 - DNA, 373 bp, Homo sapiens
gtgtttgtacatattgtatttagctctgtgtaacttaatcacatgtgtagatttgstgacaaccaccaccaccaagaaaaagaagagttccatcacaaggatcccattatagtaagagccaacacccactctcctccatccctaacccctggtgaccacacaccggtttgccattttgtcatttcaagtatgttacatacatggaatcacactgtatatatggttttcttcactcagcataatttctttaaaatccatccaaatttttgtgtatcaatagttcatttctttttattactgagtactattccatgacatagatgtaccatagtttaactcatccataaagaaaatgtgagttgttcccaatttg

SEQ ID NO: 177047 - DNA, 423 bp, Homo sapiens
tttactccctgatttattaatagtttccctggcataacagggaagggtayacccaactgcctgaaacaacaaactagcatacaaatgcatgaagcaatggttcttaagacactagacataagataatgaagaacggttgtccctaagagatgggacacaaatagggtgagaggtctcctattttcccagattagagacttgagcgagtttccaggcctatgtgcagggaggacaacagagggggatcccagtggattccttaagttgaggagacagagcaaaaagtcctgaaagacagctagagttgataggacaagtttataggacaaggcagctagagttgataagacaaagtaacagagagaagaaagcaggccgaggctcaatcaggaagaaacagataacctgggtagcacattatca

SEQ ID NO: 177048 - DNA, 577 bp, Homo sapiens
tgtgccaaacttcctagaccggtatcccagtgatggccatgaaattgttattgaggcttgtttaacgttttctgtttcagggattagtctttttcaacaccattgttcaaggaaatgttttgaaagtgttcctgagaattatttctcatggcatcttgatttcctttttcagttgaaagcaagctgctatcatgaccctccctgaagcaagtaatgattagggctctcatttcaaattattctgcctccatttccaatttatgcatataacatttktatccattcttcaaagaaagtctcagagttccatacagtacatgtattttttaggatactgaacactttttttttcttttttcactattttttttttaaatactttaagttctgggatacatgtacagaatgtgcaggtttattacataggtatacatgtgccatggtggtttgctgcacccatcaactcgtcatctacattaggtgtttctcctaatgccagccctccccttgcttcccatctcccgacaggccctggtgtgtgatgttccccttcctgtgaacatatgctctcattgtt

SEQ ID NO: 177049 - DNA, 436 bp, Homo sapiens
gacccaccactcatgctgggccacattgcaacatccaggacttatttttacttgctttttggaagttcctattgtctcctcatatttgtctcacaaggaaccctaggtttcctcttcaacaatatcaatgctaycctttttggcatactgcagttcttgctttcccttctctgcagaaagtgagctcggcactggctcagtgctcccaccagtgtccagactggaatgcctggagagcaagaggtaagtcagaccgaggcaggtatgaggaggaacggacagagggagggaggctgaaaggggtatggagaaagaattctgccatttaattcttttagaattagtttaatattttcaagtttttggtttatgttaattttcattgggaactacttttcataataactgcacaattaataagacatacatttgtgtg

SEQ ID NO: 177050 - DNA, 602 bp, Homo sapiens
ggtggaacagtcctggccccgtccactttcttactgttgtcctcagtgttgacatagaaagatttggcttttggattcactggtaagttgtgcttttcatattgctgttctgtttaagtactttccctctgtgtttcttttttttaaattactttcttagagtttactgtttttttttttaatacttctttgtttagacctagcttttgtttaacttgttttgtttcaggttctaaaaaatgcagttatagctatatatttttctgagtccgattttggttatatcccacatgttttgacatttatagcatttattgctttttatgactttttaatgacttgagtttttttctttaaatcaagagttactwaaataatttttccaagtggattgttgcttttccccaccccacagcccacactcttgctttcttttaatattaatttcttattcagttttattatggtcagagaacaatggtttgaatgatttctgcttgtttgtaatttatcttaatttttgggtttaatacataatacaattttgtaaatgttctgtgagtgttaaaaagtttagggttatgaaagagtgtgtttgtgtg

SEQ ID NO: 177051 - DNA, 417 bp, Homo sapiens
aggtgtggagtgaatggtgattgcatgagygaatggctgccaagtctacccatggcttgcccatcctctggatacatcatctacttctctggaactgcaagctttctcatgaaatacgaacggctaccctagatgtattaagttgctcaacccatgtcttctatgcctcacaaactgggctgggtccaggggtctagcaaagaacaagacagatgtagcctctgtcttaatggatagtgcagtttgtgaaagacagacattgaacagaaaatcacacaatcattcagtgaaagttgagatgggatcattggaaggcttatgtgagagagcagcagcatctctctgtctgctgagacacaagcaaatgcttccaaagctctgtccacatctagcatgcatttctggtgctgctcatca

SEQ ID NO: 177052 - DNA, 557 bp, Homo sapiens
tgaatttgcatgtcggtatgtcactttctaatacttgagagaagaaagctttaggaagagccccttttctggtctgcacaacaatggcatatggactgacactgggcacagtagtcaacagtttgggaccagtggtgtaatttgttctattgaaggagtgtagatcagagacattgatggtctggagaaataagagagggttcagtggagacacatctcagagtagctgaggcatgtagacctccatcgtccgaaatgatagtaatatggtttggctgtgtccccactcaaatctcrtcttgaattgtagttctcataatccccaagtgtcataggagggaccaggtagagataattgcatcataggggtggtttctcccatcctattctcgtgatagtgagttagttctcacaagatctaatggttttataaagggctttcccctttactgggcactcattcttctccttgctgccgccatgtgaaaaggatgtgtttgcttcctcttccaccaggattgtaagtttcctgaggcttccccagccatgctgaactg

SEQ ID NO: 177053 - DNA, 576 bp, Homo sapiens
tttaaaaaaacaagtcagtactttatacagtaaatatgaaactgtaccatgatctacacatgtgtgagttttctgtaaatacagaaattggrtatttgtcactgcaacaattcactgcaattgaaaaaagataaataatggatgacaatgccacttgtttgttaaaattctacagaaaggaaacatatacccgttattcctttcatgaatttggccaccgaaggttcatacataattgtgcttcacatttacttctaattagctgtgaacctgatccaggccatgcaaagcccagagcaaaggtatttttccagttctttctctcttgccttgggcagaagaggctggagtccagggagcaaaagtcccttgaatgggtgctgggcccataagtgcttggtgcatgctgggcgatgcttgataaactgttcattgctcatctcttgccaggacaggtgcaattatgggcctctgctacttggcacccttcactcaccagctttcagcctgttcatctgggcaaagtatcgatgttttcctcaagggtgggactggtatagggaccctgccaagatt

SEQ ID NO: 177054 - DNA, 562 bp, Homo sapiens
ggtgagttgacctacaggaaaattttctagtcctttcttgtccctggtggagtgtgggccctgctaagaggatccttgtggagtgaagaaacaagatgcctggtatggtggggctgagggtcaagacctggctgcatccatgccatgtgcacaatgcttccactccgtccaatgtcctaccaactccaggcactgctgaggagctaggrcagagtgctgatcacccaaggccctggcttctttcctctttctataccaatgatgagctgggaccacagcaagcccaagacaagccttactcagaaggaagaagtaaagacagcaaccagatatgatgaagatgagattaataatgttaaataattcacacattttgttttgaatcctggctgtatggctacaaatgttgttctcttaactctaagctatactaactctcagtatagagaaaggaaggaagcagatatactgagggtaacaacaatcagaatagctctggctaatgtttattgaacaccaattgcatggcaggtagtcttgtgcatctgtattaatcctctaa

SEQ ID NO: 177055 - DNA, 439 bp, Homo sapiens
cagttcggcacctgagaagttcgagagttaatgcagaggcaagccgagcttgaacttcccgattcccagcccagtgctcctcccccaaacctcactgcttttctccccactcactacccagatcatccacgcccatgcctcacccacacaagggtgggctttatgtgaagcctggcaaggggccttgaacaagcctagatgtccccacatggcctcatctgacatcaggagtgtcyggcagagtgagaagcctgagagcttaggctgggactgaatctagcttttatgtgaatttctgtattctagagctagcaggggcagggactttagagcctggggaagctggaatttcctaggtgccatcaagaaaggagagccagccccacacagccaaggaggccaggcgaccccaagtagggtggcatttcctgagagatct

SEQ ID NO: 177056 - DNA, 560 bp, Homo sapiens
gaaaacaagagaacttcgtcctcaaaagccacagcaaagttatcattgtgactctgagctctgataaggtcgtggacccatccctgaacctatcgctggggacttcaaagtgtgatgatgtcccattggtcaggaytgagacatgagtctgccatggtgggaaaaggattgccagtcccaatctgaaaacacagatggagaatgggagaaaggcggtcctccaaaacacagatgctgggcaggatgtccaccagccaaccaccaacccagggctgaccccactccaagccagctttgaaacaattgttctatgacttagaaccaggactcggttctagcacactcactaaaaaaaaaaaaggtctctgaatcatcccctatggtggtcaactggcaagagaaaggaatcacttcaacaaaggtttatcttaaccaatctacccaagcaaaggtgacagcaccaagtccccacatccattgtgtgtgtgtgtgtgtgtgtgtgtgtgtgtgtatgtgtgtagatatacagaatgtactttttcatagatggctgttaatta

SEQ ID NO: 177057 - DNA, 592 bp, Homo sapiens
cacttatatctgaaagtaattaattgtaggtgtgagaaacagaacacacaacccagattccaagtcttgtatttcatttattcctctggatgtactgataaaaaaagctgctgtgttgattaacatggccagtcacttgaattagatgaattgtaataagtacactcagacactagagtttgtttggtggaattaacaaaaccactaatgcttttggcatcagggaaacattagatgtgatttgaactaccaagtgttctcttataagacaattaaagaakaaggaatcatgagagaaagaaaataatattacatgaaccttcaggaggaaattctaacagaataaccagccctcataggcagaatgtggccttccgtcacaaaataaattccatgcaagtcatagaatggagcagaaaaattcaagaataacttgaaaatcattgcaagatgattagaagcaaaattgtttcaagacagaattcaaacatttctacttcagagacctgtcatcaaatgcacgagccttggctgaactcctttgtacaacttgaggtcaaataaaatacgtttttaagtattttgagaaatt

SEQ ID NO: 177058 - DNA, 592 bp, Homo sapiens
cacttatatctgaaagtaattaattgtaggtgtgagaaacagaacacacaacccagattccaagtcttgtatttcatttattcctctggatgtactgataaaaaaagctgctgtgttgattaacatggccagtcacttgaattagatgaattgtaataagtacactcagacactagagtttgtttggtggaattaacaaaaccactaatgcttttggcatcagggaaacattagatgtgatttgaactaccaagtgttctcttataagacaattaaagaagaaggaatcatgagagaaagaaaataatattacatgaaccttcaggaggaaattctaacagaataaccagccctcataggcagaatgtggccttccgtcacaaaataaattccatgcaagtcatagaatggagcagaaaaattcaagaataacttgaaaatcattgcaagatgattagaagcaaaattgtttcaagacagaattcaaacatttctacttcagagacctgtcatcaaatgcacragccttggctgaactcctttgtacaacttgaggtcaaataaaatacgtttttaagtattttgagaaatt

SEQ ID NO: 177059 - DNA, 591 bp, Homo sapiens
actgctggtttctgctgtcttgatagcctgtgtattttcttcataatacatatcacagtttgcaattatatatctcagtcatttgttgatgaacaactgtattctccactctattctaaaatgaatgtgagaaaggagatatgtttaactagctgctaaattcccagtacttagcacagtgcttggcacctaataggcactcaataaaaatgcrtaactgagtgaataaaggactgaatataaaatgaatgaatgggaaaatttttaaaactttcaaattttaagctacagtgggacacccaagctttaaattttctctatatttttgtgattatgaaaacagtacatgttttctcaatttatttaggtctctatttatatgttaccttttggagacagtgcacctgactgcttgcactcaggaaagatggctcacacaccattggtggcctggtgttgtaaggcctatgagaacagactttttctgttgtgttcatagcttgccccatattagataaataaaaaacccataatcagcattttgaaaaatatatatgaacatgtaaagaataggggaaaatatacccactc

SEQ ID NO: 177060 - DNA, 551 bp, Homo sapiens
aaagtcctcatttagttgtccagtcctgtggggtaaacattgttgtccttttcctggtactgaaacttagttcaaaacatttttgtcacatgcccaagatcacacgagaaagtcatacaaaactattatctgcagcgaatacaccaagtgtattcccctctacgtcctcattcggaacatcatctttccaggcctaggcagatagattacaaaaactgaaactgtggaatccttgcattgtaactttttaaaaaattttactttagcttctgggatacaagtgygaaagatgtaggtttgtcccagaggtatacgtggcgcagtctattcccctgggaggagtcacaagcctcaaagaaagtagtgagatagttctatgatttacacatagaataaagaaaaatggaaaagcaatatgaatataatttgtattttttgacacaaagatgtgcaaacatacataaagatatacagcattcattgtaaacgctagaaataggaaataaagccaacataaaaccataaaaccctattttaactttaaacaaaat

SEQ ID NO: 177061 - DNA, 572 bp, Homo sapiens
gcaagaaaacctcaagttcaggaaaccccaatatttttaaaaaggcttcaaataaacttgcccaacttttgtcacagaaggagatattatctttattagactggacattaaatatgccctctaatccagatgaaggcagtgtctctgtcatccaaggctgtttactatacacacatccttgaaaagatggtacagcacaaaaactgtcaatgtctttgcttgcaaaaagtgcagaaatatgacagacccctggtgaattgtctgctaagagaacaaatagtcaaagtaaacacaaaggttataggcttagatattttgctttagatttttctgactttcaagaaaaagataggaaatcaattaaaaatggatagtagttataatcaactcacataagattcaactaaaaatgtgaatacatgtttaaaaaattgttcaacataagtrgtaatctgataaatggaaattaaaactaatataaaacatcaatatatacccatcaaattgaccaaggtataaatcagttaatatcacatgttagcaggaatacatagacagtaaccttcatatcc

SEQ ID NO: 177062 - DNA, 296 bp, Homo sapiens
agagggaaggtgtcacacactaagcagcagtagcaggagtcgctgtcagttctggctcctaggaaatcaatgagtctgtattcataaatcatagaaaattgtgacattttcatgcaataaaaaacctaagaatgttctttatatatatacatatatttttattatacttcgagttctagggtacatgtgygcaacgtgcaggtttgttacatatgtgtacataacattaggtatatctcctaatgctatcccttccccctccccccaccccacaacaggccccagagtgtgatgtt

SEQ ID NO: 177063 - DNA, 396 bp, Homo sapiens
cactcaagtttgagccaaactatccaagagcttttaccatcagtttcttaatttctgctttcttctgattcaaaaattaacatgttgaataatttattaataacttattttttagcttttaaaagagtaaataaaatatcatagagcattaaactaaaaccaaaatattataaattaggcaaaacaacagagttttaaatgaatacgtagtgttttgaaagcattcttacatttaaattcaattttttatgacaaatattcattgagaaccttgtatatgcaagatactgacccagtaggaaaagtgttcgtttggtcactagtgttcttgcaaagtaaagaacacagtragtttaactaatttaagcaatcaatcttagacacagaaacagccct

SEQ ID NO: 177064 - DNA, 547 bp, Homo sapiens
ctgcaagaggaccagatctccctctgccaacagatggggcggggtaacactggaaatatgtyacaggccaggttcagatgccacaagagtagcctcaagattttgcacataacttcggaagaaaccccagcataatagaaaggtcttctcaagaatttttctggatttactgtgcaacttccctggtcccttacttttcttgccacttttgttattacccctcacaagtgtagcctcgtgtttgcttttatttgatttgcaattctctgtcttataaagattgtcccggttcttaatttcgtgtttcccaaaaatctacctattgcgtccattgtggcattcctggcacctagaacaatatttgcctcataggacatgcatctatttgaccttgccttacgtacatcctgttctcttcttcacttttgtctcaggtccaacagttgaaactatgcattccaagtagaatctggttggaataaaaggatctgaaccagctttaatcatcaaaggaaaaatatgctgtttataatattgaaataaaaat

SEQ ID NO: 177065 - DNA, 547 bp, Homo sapiens
ctgcaagaggaccagatctccctctgccaacagatggggcggggtaacactggaaatatgttacaggccaggttcagatgccacaagagtagcctcaagattttgcacataacttcggaagaaaccccagcataatagaaaggtcttctcaagaatttttctggatttactgtgcaacttccctggtcccttacttttcttgccacttttgttattacccctcacaagtgtagcctcgtgtttgcttttatttgatttgcaattctctgtcttataaagattgtcccggttcttaatttcgtgtttcccaaaaatctacctattgcgyccattgtggcattcctggcacctagaacaatatttgcctcataggacatgcatctatttgaccttgccttacgtacatcctgttctcttcttcacttttgtctcaggtccaacagttgaaactatgcattccaagtagaatctggttggaataaaaggatctgaaccagctttaatcatcaaaggaaaaatatgctgtttataatattgaaataaaaat

SEQ ID NO: 177066 - DNA, 547 bp, Homo sapiens
ctgcaagaggaccagatctccctctgccaacagatggggcggggtaacactggaaatatgttacaggccaggttcagatgccacaagagtagcctcaagattttgcacataacttcggaagaaaccccagcataatagaaaggtcttctcaagaatttttctggatttactgtgcaacttccctggtcccttacttttcttgccacttttgttattacccctcacaagtgtagcctcgtgtttgcttttatttgatttgcaattctctgtcttataaagattgtcccggttcttaatttcgtgtttcccaaaaatctacctattgcgtccattgtggcattcctggcacctagaayaatatttgcctcataggacatgcatctatttgaccttgccttacgtacatcctgttctcttcttcacttttgtctcaggtccaacagttgaaactatgcattccaagtagaatctggttggaataaaaggatctgaaccagctttaatcatcaaaggaaaaatatgctgtttataatattgaaataaaaat

SEQ ID NO: 177067 - DNA, 414 bp, Homo sapiens
tcatgttagtaattgctatgatgtgattaaagctcagtagttggatagagygtttctaaaggaggagtggtcaggaaaggcttctatgaggaccgagtgaagagaagcagagagtcaagtgcaaaccgaggggagattattccaggtacagaaatgagtaagtgcaaaggcacagtgagctcagcaggtcctcgggacaggaaccgggaagaagtgatgggggcagacagaggcacaaagcaggccaaggtctggcagatggcacagggaatgtttttattctaacttcacaaagaagtcgttagaaggtaaaaacctttctccactctaagtggagggtgaagctctaatctgcttttaaagatcagggaagttgctgttgaaaagatttagtgggctctattagtaacacaa

SEQ ID NO: 177068 - DNA, 414 bp, Homo sapiens
tcatgttagtaattgctatgatgtgattaaagctcagtagttggatagagtgtttctaaaggaggagtggtcaggaaaggcttctmtgaggaccgagtgaagagaagcagagagtcaagtgcaaaccgaggggagattattccaggtacagaaatgagtaagtgcaaaggcacagtgagctcagcaggtcctcgggacaggaaccgggaagaagtgatgggggcagacagaggcacaaagcaggccaaggtctggcagatggcacagggaatgtttttattctaacttcacaaagaagtcgttagaaggtaaaaacctttctccactctaagtggagggtgaagctctaatctgcttttaaagatcagggaagttgctgttgaaaagatttagtgggctctattagtaacacaa

SEQ ID NO: 177069 - DNA, 556 bp, Homo sapiens
tcccttaaaaatggtaaattacagctagagacacaaggagtttttgcaactttggtggggcgatctgttccctcagtttacttttgctatatgactgctttcttaaggcaccatggagctgtaggcaattctgtttaaataaagcctgggttggtaggggaacaagtgcaatactaagaacacacatcatcaaaggaaaaatagccaatgaatatttatatatattaaaattaaaataatttctataaatgatagtgaggacacacataaatgacaagatatataacaatataactgataaaagcttgatctcacacacgtgcatacaagtatacaaagttacaggccttctcctgctgagcaaatgatcattataaattaaaagctcacctataaggaaatagaaatcataagccatatgctgaaaaaaaatgtacagaaacaaaaataaaaacaattttgtttttattacattttgcaattaaaacttcaaaaataaatttcagtaacrcacaatgctgcctaagcctacagcactatgaactggctcatttca

SEQ ID NO: 177070 - DNA, 532 bp, Homo sapiens
tagtcttttctcatgctgctaataaacacatactcgagactgggtaatttacaaaggaaagmggtttaatggactcatagttccacctggctggggaggcctcacaatcattgcagaaggccaggagaagcaaaggcatgtcttacatggcggcaggcaagagagaaagatcagctctcgtgagactcgttcactcccacaagaacagtatggggaaaaccgcccacatgattccgtcatctccaactgggtccctcccacaacatgtgggaattgtgggagctacagttcaagatgagatttgggtggggaacagccaaactatatcaaaattattataaagaaggacctcaaccaagagctgacacacatgggttttgtttgtcttgtacagttttaaaataatctgagttatttttggtgggcatgggctcctccagttcccacgagccccactccctgcttctgcctcccgcctccccgcatttatgggttccgcttgaccgtgagatgatgtttcttttccacctct

SEQ ID NO: 177071 - DNA, 490 bp, Homo sapiens
gactgggtaatttacaaaggaaagcggtttaatggactcatagttccacctggctggggaggcctcacaatcattgcagaaggccaggagaagcaaaggcatgtcttacatggcggcaggcaagagagaaagatcagctctcgtgagactcgttcactcccacragaacagtatggggaaaaccgcccacatgattccgtcatctccaactgggtccctcccacaacatgtgggaattgtgggagctacagttcaagatgagatttgggtggggaacagccaaactatatcaaaattattataaagaaggacctcaaccaagagctgacacacatgggttttgtttgtcttgtacagttttaaaataatctgagttatttttggtgggcatgggctcctccagttcccacgagccccactccctgcttctgcctcccgcctccccgcatttatgggttccgcttgaccgtgagatgatgtttcttttcca

SEQ ID NO: 177072 - DNA, 530 bp, Homo sapiens
gtcttttctcatgctgctaataaacacatactcgagactgggtaatttacaaaggaaagcggtttaatggactcatagttccacctggctggggaggcctcacaatcattgcagaaggccaggagaagcaaaggcatgtcttacatggcggcaggcaagagagaaagatcagctctcgtgagactcgttcactcccacaagaacagtatggggaaaaccgcccacatgattccgtcatctccaactgggtccctcccacaacatgtgggaattgtgggagctacagttcaagatgagatttgggtggggaacagccaaactatatcaaaattattataaagaaggacctcaaccaagagctgacacacatgggttttgtttgtcttgtacagttttaaaataatctgagttatttttggtgggcatgggctcctccagttcccacgagccccackccctgcttctgcctcccgcctccccgcatttatgggttccgcttgaccgtgagatgatgtttcttttccacctct

SEQ ID NO: 177073 - DNA, 391 bp, Homo sapiens
ttgcacaaacccaaaacacgaacccccagatggcaaatacatgcttaatgctcattaaagagatgggctgcttgaaggaattcctccatttcttgcaaaaggcaactcgtatgatggaaaaaacacaagttttggagtcagagactcagctgtgtgaccttgggtaagtaatttatctctccaagcctggtttccttgtctgcagaatggagtggataataccttctcacagggtgtttattttttatttttttattgagacggagtttagttttgctcttgttgccaagactggagtgcaatggcrtgatctcagctcactgcaacctctgcctcctgggttcaagagaatctcctgcctcagcctcctgagtagctgggattacaggca

SEQ ID NO: 177074 - DNA, 573 bp, Homo sapiens
ctgtgtgagttaatttctatgtttattgaaagaaaccataaacatcagttctactggatgattgaaatcagttctatgggacaattgggccagttttaatgggaggctagagagagacgatgacctggggaccatgctgagaaattttatctttatttagaatgtgatgggaagccatggaatgatatttatcagggaaatggcatgatgaggtttatattttttaaaaggtcagtatagtccctaagtctagtgacattgtagagggtacattagaaggcatagagtcagaaaatcagagtctagrtggaagattctgagtgatccatgagaaattgcttaggccagacctggaaaagctgaggtagatatgtttgtaagtatttctagactaacatccagattgagtggcatttcctgaaaaaggaaatgcaagtccatgtcctatatagtgtgtctaatactctgcaaggtcctccactacaaacaagtagatcagacatgaaaacaaaatgcttcatgcattactgggatctcaggatgaaggactattctcaaaagcaagaaaagaaa

SEQ ID NO: 177075 - DNA, 610 bp, Homo sapiens
ggatgcaagcccagggaggggtggaaagtgaggagggctgcacgtggctccaaaatggaaccagttaaagcaagcctcactttatgggccaccactctccaccctgcacatcaggtaggtctgtttttgacaggcagattggaaagcagtcactcagaccgttagatcccccttgtgaggtgacctaaattacagcctcagtgtgctgagacacaggggatttgttacaaaattattttctatctcttatgacatcctcaagacttatttaatcctctctcaaagtttcaagaatacataagaattatggtatcttgttggggaggatctcttttttaaaatttaaccttttaatttgaattttttcagccctactgaaaagttgcaagagtgataaaatcagttgtctttacctagattgatccattgttagtattttgccacatttgctctataratgcatgtctatgatatgatacatgatatgtaacaaattctattttttgcagaaccctttgagaataagttgcagagatcataatggtgtcagcaaatattttctaataatattaagtgccttggctgggcatgctgtaatcccagcactttc

SEQ ID NO: 177076 - DNA, 560 bp, Homo sapiens
tggacacagtaagagcctttgaatcctgtacctcaaaatctttgccttgctgtttccattaatgttgggcttttatttcacaatccttacctgatactaactccctattatgaagaactgatctgtaaaccaaaaataagatcccaaggtctcccggccacctgcagggactttctcttaggtcagggcactctaaaatttaacctgaaagactggttcaggccattatgggaagtgggagttgaaatgcatcattatacctcttccgcattaacatcaacagactttaagtctgatgagaaacatttacaatctatttgctctaaaacctgctacctgaaggcttcatccgcatgggaaacctttggtttccacagcccagacattccttcccattagtaactctgtcaaccaattgccaattasaaaaaatttaaatctacctataacctgggttcagctgacccccccaaccctgatagctgtcccacctttctggaatgagccaatgtatttcttgaatgtacttgattgaaatctcatgtctccctaaaatgtgt

SEQ ID NO: 177077 - DNA, 377 bp, Homo sapiens
tagctgtacatgagcagtggctaccatgttggacagcataactctaaattctagaattagtattttgaaaaacagatggctatatttcttgttttccagactagacagtcaattggtctgatagaattattttattcwggcatcgctcactgaagagtgagaagagctaacattccattggctgggcagggcttacttttcttggtccagagtattactagagacaaatgacccaacttctacatgtagaattttaagttcttatccccacttatttctggtttttcatattgaaaattgcttgatgcaagttatttgaactatatggattaaaagctataataattatttgataattataatagtaactataataa

SEQ ID NO: 177078 - DNA, 377 bp, Homo sapiens
tagctgtacatgagcagtggctaccatgttggacagcataactctaaattctagaattagtattttgaaaaacagatggctatatttcttgttttccagactagacagtcaattggtctgatagaattattttattctggcatcgctcactgaagagtgagaagagctaacattccattggctgggcagggcttacttttcttggtccagagtattactagagacaaatgacccaacttctacatgtagaattttaagttcttatccccacttatttctggtttttcatattgaaaattgcttgatgcaarttatttgaactatatggattaaaagctataataattatttgataattataatagtaactataataa

SEQ ID NO: 177079 - DNA, 475 bp, Homo sapiens
ttatggtagtcaaaaaaagaagcagagaaagagaaaggggaagaaagcttatttaaagaagtaatgatagaaaacttctcaaatctggagaagaaaacgaacctacaaatccatgaagcccaaagaaccccaagtaaattaagcagaaagagatcttcaccaagacacattataattaaattctcaaaagtcaaagacaaggagagaattttgaaagcaccaggagaaaagcaacttgttacatacaaargaagccacacacaactatcagcagaaaccttgcaagccaggagaaagggggatatatactcaaagtcctaaaagaacaaaaaagctgtcaatcaagaatactatatctagcaaagctatccttcagcaataaaaaagagataaagactttcctataccaacaacaacaacaacaacaaaaacacctgaaggagtttattattactacacctactttacaggaaaa

SEQ ID NO: 177080 - DNA, 588 bp, Homo sapiens
tattctgaatctgcactgccctccatggtagccactagccacatgtggttatcgagcactggaaatgtgactggtgttactcaagattgaaattttgaatttcattgaattttaattaatttaaagttaaatttaaataactgcatgcgagctgggtatggtggctcatgcctataatcccagtgctttaggaagccaagttgggaggatcccttgagaccagaagttcaagagcagcctgggcaccatagtgagacccctgtctctacaaaaaaactaaaatataaaataaatgagcagggcatagtggtacaaggctatagtcctagctacctgggaggctgaggcaagaggattgcctgagccaaggagttcaaggctgcagtgagctatgatcatgccacccacactccaacttgggtgattgatttatattgattatatgacttatattgataataaagtmatgtagtgagaccttgtctctaaaataataataataacaacttttaaaagtacatgtggatagtggctaccatatttgacagttcagttctatacattaaccttttacatgccctgttttgg

SEQ ID NO: 177081 - DNA, 588 bp, Homo sapiens
tattctgaatctgcactgccctccatggtagccactagccacatgtggttatcgagcactggaaatgtgactggtgttactcaagattgaaattttgaatttcattgaattttaattaatttaaagttaaatttaaataactgcatgcgagctgggtatggtggctcatgcctataatcccagtgctttaggaagccaagttgggaggatcccttgagaccagaagttcaagagcagcctgggcaccatagtgagacccctgtctctacaaaaaaactaaaatataaaataaatgagcagggcatagtggtacaaggctatagtcctagctacctgggaggctgaggcaagaggattgcctgagccaaggagttcaaggctgcagtgagctatgatcatgccacccacactccaacttgggtgattgatttatattgattatatgacttatattgataataaagtaatgtagtgagamcttgtctctaaaataataataataacaacttttaaaagtacatgtggatagtggctaccatatttgacagttcagttctatacattaaccttttacatgccctgttttgg

SEQ ID NO: 177082 - DNA, 460 bp, Homo sapiens
tctcacacaagaaagaattcagagtgagactgtagactaaaatgaaagcaagtttattaagaaagtaaaggaatacactttgggaggccgaggtgggcggatcatctgaggtcaatagttcgagaccagcctggccaacatggtgaaacccatctctactaaaaaaaaaaaaaaaraaaaagaaaaatacaaaatattcgggtgtggtggtgcacgcctgtaatcccagctactaggtggctgaggcaggagaattgcttgagcccaggaggtggaggctgcagtgagctgagatcatgccactgcactccagcctgggtaacagagccagactctgtctcaaaaaaaaaaagacaagacaggaaaggaataaaagaatagctactccgtagacagagcagccccaagggctgctggttgcccatttttatggttatttcttgatgatatgctaaacaag

SEQ ID NO: 177083 - DNA, 433 bp, Homo sapiens
atctgtcttctattactaaattattttgaagtaaatggcacacatactatttctgtatcatattattctgttattatccatacatactttagtatgtatctccaagaagaactttcacaatggcactaccagtgttacttccaaagaaaataacagtaatttttcaagtcatcaaacatccaaaccctttcaaatgtctcagatttccygtaaatgtatttctacagttgctttgtttgcattggaagaaaaagcagttcacacattgcatttgatcaactctcttaaatctctatcagctatataggcctccttgtctccctgacattctcttgttaaagaaagagagtgatttgccctgtaaatttctcaccttttagattttgctgattatatcactgtggtgtcatttaacatgttcctccattccctg

SEQ ID NO: 177084 - DNA, 429 bp, Homo sapiens
tggaattcaatattctgcctctaggttcctgtccttcctccccatcacaggatttgaatctagtctctcctccttggaatggaaggttgtcattaaatcttctacctccattatgacagaaggagcaagagaggagcagtgggaaggttcaaaccttcctctgacatacggcartatttttattttaaacagatgctgtggggagaagtctcctcaagcctgggtggggctatgacagtctgcttttgccagaggactggaagcacttaacacagaactctggcacagacatcattcttgttccccctctctccttttaaacactgagaaccaatttacctgagtgagtgccgaaaggaacatttcatccctttgccttactcattttaatcggagggaatgaggtgtgtgttcttgctcgctggcggt

SEQ ID NO: 177085 - DNA, 438 bp, Homo sapiens
gcgccccctccacatttacagtattctacaggtgttgacatgaacatgctggagggctaagcagttcttgaatgttaatcgtggcataggtcctttatatgtaccagggctagaaaatgaactgatatggttcaaacaagaaggagattttttycaaacctcagatattcagatgaacacattcagcatccctctctggcctccatttaactgaagttcatttgctttgcagataaacacaaaggttgttctgctgtcattctcaaagcatgccagttctagtggctctcatcaaacctacttctggatgtaaatcttaatttcagtcttaataaagcaagttctagtcaacaagcttcatttcccatgactcatttagagaatggtttttgcgtgccgatttgttttgatctatatatctcatttttcttctgaatt

SEQ ID NO: 177086 - DNA, 438 bp, Homo sapiens
gcgccccctccacatttacagtattctacaggtgttgacatgaacatgctggagggctaagcagttcttgaatgttaatcgtggcataggtcctttatatgtaccagggctagaaaatgaactgatatggttcaaacaagaaggagatttttttcaaacctcagatattcagatgaacacattcagcatccctctctggcctccatttaactgaagttcakttgctttgcagataaacacaaaggttgttctgctgtcattctcaaagcatgccagttctagtggctctcatcaaacctacttctggatgtaaatcttaatttcagtcttaataaagcaagttctagtcaacaagcttcatttcccatgactcatttagagaatggtttttgcgtgccgatttgttttgatctatatatctcatttttcttctgaatt

SEQ ID NO: 177087 - DNA, 606 bp, Homo sapiens
gaatattaataattgataccctggggaaggaatgcattcctggggggaggtctataaatggccactctgggagtgtctgtcttatgaggttgagatgaggactgaaatatgccctggtgtcctgcagtaccctcaggcttactaggattgggaaattccagcctggtaaattctagtcagaccagttctctgctctcaaaccctgtttcctgttaagatgtttatcaagacaatatgtgcacagtgggacatagaccctcatcagtaattctaattttgcctttgccttgtgatctttattgccctttgaagcatgtgatccttgtgacctactccctgttcgtacaccccctccccttttaaaatccctaataaaaacttgctggttttgcggctcggggtcatcatcrtggtcctaccaatatgtgatgtcatccccagaggcccagctgtaaaattcctctctttgtactctttctctttatttctcagactggctgacacttagggaaaacagaaaagagcctacattgaaatactgggggctggttcctccaatatcacacgtctataatcccagctaattgggaggctgaggcatgagaa

SEQ ID NO: 177088 - DNA, 589 bp, Homo sapiens
tgcttccagtttagatcacatatgaataatactgctatgaacacttttgtgtctgtagatagatagatgattgatagattagatagatagatgcaggtacacacattattttgggttatgtatacttaggagttgaatttatttgtcatagagtgtacatatgttcagatttaggagatattgacaaagatatttccaaagcaattgtaccaraataaactcccaccagcaatatatgaaggttccagttactccctatcctcaacaatccttaaaattgtcaggccccttggttttaggcattctgattggcatgtgattacaacttcttctgttttaaaattcatatgtaaatttgtatttaagcatataagaataggttaattcatatatgatttaggggcagtaaaattatataatatcactaaatataataaatcattgcaaacgtcaagcattctgcactatatatgaatatatatgtatagagagatttcagtttgtgaattattgacatgttaccttaatagcaatttattttagtggaaattttaagaccttcattatcctttatttaggaatcaaatga

SEQ ID NO: 177089 - DNA, 589 bp, Homo sapiens
tgcttccagtttagatcacatatgaataatactgctatgaacacttttgtgtctgtagatagatagatgattgatagattagatagatagatgcaggtacacacattattttgggttatgtatacttaggagttgaatttatttgtcatagagtgtacatatgttcagatttaggagatattgacaaagatatttccaaagcaattgtaccagaataaactcccaccagcaatatatgaaggttccagttactccctatcctcaacaatccttaaaattgtcaggcccyttggttttaggcattctgattggcatgtgattacaacttcttctgttttaaaattcatatgtaaatttgtatttaagcatataagaataggttaattcatatatgatttaggggcagtaaaattatataatatcactaaatataataaatcattgcaaacgtcaagcattctgcactatatatgaatatatatgtatagagagatttcagtttgtgaattattgacatgttaccttaatagcaatttattttagtggaaattttaagaccttcattatcctttatttaggaatcaaatga

SEQ ID NO: 177090 - DNA, 596 bp, Homo sapiens
ctctgaaacataaaatccagaaacagatcaagttttacctaaacaattactgtttaattaagaaggataatctaataaatagggcttggttaaattattatttttggaaatataaattaaaattggagccatatatgcaactatacaacaaaatcaatcccaggtaaattaaatacagaaatgtagttaaaaatcacacacgtacacaaattagaataatgtatggttaaatattaatttgattcctggtcaaggaagacctatttaagtacaaaagtaaataaataaataggaaggcctagctggaggaatcaggcaagagaaagaaataaaaggcatccaaataggaaaagcagaagtcaaaacattatatctctcttcactgattatatgattctgcacctacaaaaacctaaagactctgccaataagcctctagatctgataattttagtaaratttcaggatacaaaatcaatatacaaaaataagtagcatttaaatacaccaacagtgttcagactgagagtcaaattaagaacacaataccatttacaatgaccacacagaaaattaaatacctaggaatacagcta

SEQ ID NO: 177091 - DNA, 424 bp, Homo sapiens
gttagtggtaacccctcttatattctcttaatagcttaacagtatacttttcagtattaggcacttttttcactgtaacttcattgatatatttgtgggttgttaggtgatgctacacttaaattctaggcctgaattcatggtagtaaacatttgttaagtgctaacatagtgttagcagtattgtaattactttatgtcgtttaatttttataataacccaaaagagtctgtattctcaatttttagatgagttataaactgaggcaaaatcacattaattaacttacccaaagacacaaacctagtaagtaagytgcagagctaggaattgagccaagttgtcttctcaagtccatgtctctgttaccttaaaaagtccatgtctctgttaccttaaatatagaattaaagggtaagtatg

SEQ ID NO: 177092 - DNA, 627 bp, Homo sapiens
aaacaagggtacacctatacatggcatttgccatgaatggagcctgcaagtctggaagttgctctgggtgagtcagttaatgattggtgmgtaaatgtgaaggcctaggacattactgtgcactactttagggctttataaacattgtacacttaggctacactaaatttatttttcaatttttctttcttcagtaataacactggcatcagcacaaatatgtgagtaatgtattgtgctatgatgttacaacagctatgacatctataggcaatgggaatttttcagctccattatactcataagaccactgtcatctatgtggtccattgttgattgaaatattatgtggcacatgactggtttttctacatcaaaatctaagtgtcacccaagatccctccttcttgttaattctcttagatctaaacatcagtaaatcttgaagtccctgctattaaaatgacccctgaacttaccactctacgtctgtctcagctgtagctacagcaggtggagccagcattacccctcacctgtgctactatgagggctaaggaagtattccccttgtagcctcgcccatttacaaaactccgtacgcgtgactaccaggtcatgcgtgat

SEQ ID NO: 177093 - DNA, 285 bp, Homo sapiens
cccaaataaaagatttacttgaggattgtctccttaaaaatcatagtatcacagagtttatagtaccattgctccaaggtttgtactaaaaggtgattctgagcaatatttacagrtgttgacatttatctgataatgtagattaagatttttgaattaagtgactgtgcctttctcataatggtgcaaatggtcaaatacattaatgaacaaaaccgttgcttacagcatttttgttttctaagtttataaataagctatatgctctagtggagagaaaacaga

SEQ ID NO: 177094 - DNA, 609 bp, Homo sapiens
gatttgaagaatattgttcaaatgactgtacaatcaactgtgataaacagattcaatgcaattcctattgaaatatcaatgacatttctcatggaaatagaaaaaacaatcctaaaatttgtttggaactacaaaggacccagaataactaatgcaatccagtacagaaagaatgaagctggctgcatcacactatctcacttcaaaacacaccacaaactgtagttaagtaagcatggtactggcataaaaacagatgcatataccaatagaacacaatagagaatagagaaataaatccacatgtttctagccaactcatttttggaaaaggtgccaagaacatagattgtgrgaaaagcagtctcttccataaatgggactggaaaacctgcatatccatttgcagaagaataaaactagatccctatctatcaccatatataaaaatcaaattgaaatggattaacgacttaaatgtaagacctgaaactatgaaattactagaagaagacattgaggaaatgccttgggacactggtctgggcaaaggctttaggagtaaaatctcaaaagcataggcaataaataaaataccaacaaatggga

SEQ ID NO: 177095 - DNA, 545 bp, Homo sapiens
ttggaattaaatatgtcattttttcaagctaagattgctttagttataactgcatagctgcaatctttgaaagtattttaaacaccttgctaacatcctgtttatgtcatcaccagaggttgtaagggtgatgagaaacaaatgaaagtatacttttcttgcagaaatgaaaagaaatgaagcagtgacttgtacaaaataaagatccacaattaaaagtggcatgtagtactagctacagcccatgagctcaaggttacagtgagctgtgatagtgccactgcactccagcctgggcaacagagcaggaccctgtctcygggggcaaaaaaaagttgagggctgtatctattaaacagatgtatatcttgaaagctcagcaacttctgcagtgatataatttggaatactaatatgtaacctgtttgagtttattatactgcattttggtaggagaaacaaaattttaaggaataaattagatctgatggtctggtttccaatgccaataaatatgtgatgcttttatattattattcgatgtg

SEQ ID NO: 177096 - DNA, 543 bp, Homo sapiens
tgtaaaacttcatgagcactatggaataaattaatggttgaaattggttaactttgatggcatctgtgagggatacaaaaaaaaggagagagtgaggagagaatgtctgagctatttcagagaaaaacacattttatacaaaaagcttgtcatgcaacttacagatttggcaaaatgcccaagaggtagtttaacatgcgatagtaatgggaggttgctttaatactgctcatgaagaagcaatttctttgttaaagrgctttccaattgaatgagtatgccctgtgcataccgtaggaggccttcctttcctaggaacccatgttcattgcttaatgcatgtctggagacaaacctaaacttgattttccaaggaaaaacaatcttagctgtaatttgaaaaatggacttaatatatcaacccattaagcctttcattattattaagtattattgctaggattaggaataaccttatactattcaaaactccctctgttacaagaagcatgtggtttgggacagaaggtctcaaatctaatt

SEQ ID NO: 177097 - DNA, 574 bp, Homo sapiens
ggtgcagatatgcattaggttctacttaataaagcaatcttgattgytttaggagatggacagtcacattgctgtctagcaaacaaggcatgctgaacttgacaaattattttaaaaagaaatgatacagaactctgagaacaagaaactatgacctcaatttaagagctaggaatacccatttttcaggatagactcccatccactgatgcaatttgtccctctgaggcatctgtacttcctcctcttgttctctgtatgctcaaacgaagggaatttaagattatgttggcaacactactggagctgttttgtttttttttttttaagctaaataaaaagaaaatttaagactctcatttgaacaacctgggtcctaaaaccctgctgttgaaaaataggtggtggttttgttttattttaaactgtttgcaattgtcatcttaatagaatgcattaactagacaattgcttggctttcaaagtacatttttcaagcccctgtcaactcaactttttataaaaagaatgcaacaaaaaaatagaaaagagaaatactgaatattaaatcttt

SEQ ID NO: 177098 - DNA, 613 bp, Homo sapiens
tgggcccctgctgtgccgtcagacaataattgtatcctgcaagcctacatacatcactaaataaattagcctgctgcacagatttttttttaatttctctccaaaatgttggagactaactgccaacattgtgtttcttagataatacttgttataaccctctttttgacgataagcccatcttaacattcctggttaaattctctacctaaaaatgggatattcatgctatgtactatggcaagtaaccagttcaactacaatccatttacayagagagaaaaacagatgagagtaaaatgcattttaggagacttcacacttttccttgtgttcttttctctttcctcttgtttccttccctccttagcttctcggatccctctatttctctgctttcctgtttcctacctagacctgtctcttgtcttatatgctaaaatcaattagttctgctttagctcctcacccactaaaatttctacttccactatatcagctaggcctgacacattaggtcattaggttaattcatatgaagatataaatgcctgataaaactaattctccaaaggtgtacttgcattttaaaagaggtgtttgttcattgaaa

SEQ ID NO: 177099 - DNA, 556 bp, Homo sapiens
gaaaagcaaaggtaagaattacagtggagtgaagtaaaaaatttaaagcattgcaagaataaattccaccatcctggaattctatacccagcaaactttgtccttcaaaactgaaagaagaaagactttctaagacaaacaaaaactgaagatattcattcctagcagatctgacctacaaaaaatattgaaagaaattcttcaagcagaaggaaaatgagagaagtcagaaacttgagtctactatataaagaaaggaagagaattagagaagtaataaaggaaagtaaaataaagttttttaattatcaagtggtctaaaaaataatagtttgtataaagaaataatagtatgttattaatgttttgggtgattagagcaaatggttaaattaaatgaacgacaacaatgtcacaagggagagaaaggaagaactgggaatactcttctaagggaamcttcactacatttgaagtgcaatagcattatttgaaggcagacatagattattttaaaacttatatcttacaaggaaataaaagaggatacaaacaa

SEQ ID NO: 177100 - DNA, 542 bp, Homo sapiens
gagggctgatatttgtgagatttctctcactttctgaagaacatcttgcyttgttacttacttataaaagggaaagaatctgtcataaattggcccaaatgtccccccaacatatcaacagatctacattcacccatccttacctcttctgtccactctcagaggatgaggtgctctgctgttcaaggcctgtccctccatctgtccccttgaccctggcttcccataacttatctgggatttcactccatcagttctctcaccctctcattttcagccaccctcattattgggccctgcattcagctaatcaatacgctcaaattatctcccatcctaaaaataaaaccaaagtcgtctttcagttggctgccatattctctctcccaaatttctgtaaattaaaagtagtctgtgtttctcccccaaacgactctctttaatctctggatcttctgacccaccactttgctgaaaatttggccataaataactccccttcttacagtctttttggatatttcctatccttagtgaatcat

SEQ ID NO: 177101 - DNA, 475 bp, Homo sapiens
cttatgagtgatttttcagttgtatttttgggggctcctagaacatttatgtccttagtgggcaaaattttgcaaattatacaattcattcttcttcctgaaatatagttatctggagtcatgaatgttttatcaaactargagtattcatttgttttccactactaataagcctggtcaacctaattctgatgtcttgctaaaattctcaagaataatatagacttactatctagggatggtttataaagtatactcttccctcaaagcccctaattgcttttgcatacatatttgtccttttgtaattcatggcttatatctctctcttctcctttcatacagtacagcctctgtctatttaaacagaaagagctttaatgtaagtcagagccaggccttgagagtcagggggaaggcaaatctcccgaagttcaaaatcaatttggttgctattaacagcctagctcttgta

SEQ ID NO: 177102 - DNA, 540 bp, Homo sapiens
  misc_feature (1)...(540): n = A,T,C or G
nnnnnnnnnnnnnnnnnnnnnnacattctctctctttttacttatgataagaaaggtatgcctggcctatattgcaaaacttccatgcctgtataaagggcattcccacttttttcagtttagtcttccactgagggacaaaagattctgaacaagatcaaggggatamggctgcacggaattctcaaagcttcagctttcacaagtagcacctaaggttgctgaattctatgttagttttatttttaatttttaaggaacctctgtattgttttccataataattgtatcaatataaaatcttaccaagagtgtacaagggttcccttttctctacatcctagtccatacttgttgtcttttgtctttttgagaatagccattttaacagatgacataaaatctcattatggttttgatttgcagtttcctgacgattagtgatgtgaagaatttttatcatatacagggcctcctcgacttataatggaattctcttccgataaattcgtcgtaagttgaaaatattgtgacttgaaa

SEQ ID NO: 177103 - DNA, 604 bp, Homo sapiens
atagatgacatgaaatgtgcatgtcatctatgcattatttttggttgcatataatttaacttcccagttattataaaaccttcatttgagttrtcacctcagtataatttattttaatgtatatagtacgaaaatatgttactcagttttaaaataactgtatttttatggtaatattcaagaaaacaatacttatttatagggtttggatctgtttgggattattgttttgtaaatattcgttcttgtctatagcaaaaattttttcatgatgctgaaagtcctttctacaagcctttgttagctgtatttggaagatctccaggcagcacaaattactaagaaacaacacaggacttcaaaagcatgtttattttcactataatatggaattcactgtcacacataggtattttgaggccttaactctcactcatacaatagggggtgttcctgtaaaaagttgtaataatttaccataattttcttcttttgtctccaaagaatttttaatagtatgccttctaggggtggaaagcaagaagaaaaacctagtcaggtacaattaactcctcatgcaatgcagtgatgctccaccagggct

SEQ ID NO: 177104 - DNA, 507 bp, Homo sapiens
ttttgtaccatcataaagttgaaaaatcaaaagttgaaccattgcaagctgggactgtcttgcacttgttagccattcgtatgcctktttttgagaattctatatccagttcatttgcctattttttataaagttacttgttttcttcctattgagttgagtttcttatacgttttgaatgtttacctcttatcagatatgtggtttgcaattattttctcccattctattcttcactctattgattgttttcttttctgtgcagaagtttttatttggatgtaatttcatttgtctatttttgcttttgttagctgtgcttttggggtaataaccaaataagcattgccaagaccaatgtaataaagattttcccctatgttttcttctagtagttttaaagcttcagatcttatgtttaagtctttaattcatttggagttattttttgtatgtggtgtgagataagggtttaatttcattcttctgcatgtgaatatccagtgt

SEQ ID NO: 177105 - DNA, 537 bp, Homo sapiens
cattgatctctgaaacagctgagctaagccagaagatgaaaagagatttcactcggtcccctacacacccaaccctaccatgaaatagagcttgagaatgacaaccatctctcccagaacaccctccacccatctcctgggactgatttctgataaggtcacactctattctatcagcagccctcttcctacatttttttgaagtctacaattactagtactgcagctcagcccagaggggaaggagggcagtacagcattgcattctgaaaaatgaagttgtcagagacagggagtgccctgcaaacaatgcattctgagttttatatttactttatattcttctgatggaaaatgatggyaaatgtttcatgctaccctgagagaaactcttcataccatgctaagaggcagtaggagtaggagatttctgtccagcagagccatgtttgcatgtttctgttatatatttaaaatgcacacacacacaaaactaaccaggggctgtgcacaaacacctgccattctgttaagatc

SEQ ID NO: 177106 - DNA, 523 bp, Homo sapiens
gcattttgccttaaatgttaccactgtttaatagttttcttgttttcattccccacctttaccccgcatatctgttctcttctatgctttctttcactgtgcacccatggttcccccacaattttttctgcatgcatttttatctttttgccttgtttttgcttgtttgttttgtttgtttgctcttctctttccaatgtatccatatgcatgtggcgaagcatatatatgtgtgtgttaatatatgyatatatgtatatgtgcatctgtaaatctttgtctatttaaaaaatatgtatgcatgtgtatggttggtttggggatatggtatgtagatattaggctctgtaaggacacttggggaatggaataattgtagttattgtctgaatgcttgatggatttaaaatgtgtgacatgatggaacaagtcatcttggaattttctctctttccattgccttttaaagtgcagagtaaggaatctttttatgtgccaaactttggcagaatgttgaagcatt

SEQ ID NO: 177107 - DNA, 472 bp, Homo sapiens
tgacagttgccagaggctgagaagagtagtggggtgggggaggataaagtggagacagtgaatgggtaaaaaaatagttagatcgaatgaataagatccagtatttggtagcacaataggtgactatagcttacawaatttattgtgtatttaaaaataactaaaagaatggaattggaaggtttctaacacaaagaaataataaaggtttgaggtagtggacaccccaattatcctgatttgatcattatacgttatacacctatatgaaaacattacgtgtagcccctaaatatacagaaatattatgtacttataataattagaaataaaaactaaaaaataccatagtctcactaactaaatgcatgatcttcgccaactcacataacttctctcacactcagtttccccaaaaatataacaaggagattgaacaaaatgacttttctgtacagctctgaaattgaca

SEQ ID NO: 177108 - DNA, 643 bp, Homo sapiens
acgaaacctctcataaaagagacttatgctatccattgtagagatctcagatatctaaaatttagtgcattgccaggtagacactgcatccggggccttatcacaaaagcagaactgatatctagaaaatacagaatgctcaaaacttttactatctgtctgtttatgcatcctgaagtcaaaattttgtaatcccaatgagaaggaatataaattttttttggagaggaaaacagattcgagtaagttaatattatcctgcacatatattgtctgttcattgtattttatgatttacctaaatttttttccctcaaaattaatctggtgaaatcactgcttttccccccaagtggatataaaatagggttgtgcatacaggactrttatatgttcgtcctatttacagcctcatttttcttcttacttcccacacaaccacatctttggctttcatgcctctatggctttgctcaaccaggagcacctttgtccactgggtgtggggtagatttctcttcctcagctaaatcctctttcactttcctcaaggagcccctcagtctcctttgctcccatctcattttatgtaggactctggggtagcacacattaaatgagtgctgtggtctgaatgtttgta

SEQ ID NO: 177109 - DNA, 681 bp, Homo sapiens
gacttttaaatcttggtgatctttaacattttataatacctgctattcagaattattctaagaaagttactaaggtttacagaaaatttggtcactttatatccagtgtgcactgttaaaaagcaaaagttggcaaaaggtttagttgtcctaggagcagtggcaaagcattaaaatttttaaagctactcaggttttattttgctaagtttaggtcatagaattaattttctcagtaaaaaagttgcttcttaaaagtgctgcagatatttggcacatgctggcaaccaaaataaactgtaatgtctttctctaagatttaggccaggtgctttgctttacataaactcaaaattttgcttcacaatagcttttggcaattgcaataaacataggcaggcaaatggggtacctatctatcttaacagcaaatcattttttgctaatagtagatactgtttatacaacttgggagagagttcagttattaggattttgtatcttcaacatattcctgtcaaaaaatcatagcaaacaatggatgtttaaaagtctgtaataacagtctaacacaatgtgctaaccctgggactatccrtataggttttagctggtttcgattataagtttctgccttatagtggaatctggtcaataaaagcccatttgtctagtactaaa

SEQ ID NO: 177110 - DNA, 638 bp, Homo sapiens
tttagggtgtctagagattattgttctatatctgtattctctaatgtattgattagccaagtccttttagtaagtggtacctatagtaactctaatggagttttgtgtctcgtgatgcactcattcaattgattaaactcatagccagtcacttaaatctgtctttcgtttccagaatgatttcatttctgtgtcattagagtggatgtgttagctatggacatactatttgccaggctgcaagtacacaacacagttatgaggcttcccctcgtttaaccagatctctaaaatgccttaamtaccactcaagacttgtatcatgagaaatcgcttttagcattctaattttatctttttattaatataacagtatctgcttctatagtataaattctgtttagtcaagcaaatctaacttttttttctcttgtgaacatattcctccttatgttttataatttggacaagatgtaaattcttcctctcctgcattttctttctatttgctatctatcattatatattattcttagtaggtggctctctcttagggtatcaactttgctaaactctcctggcaatgagttggcagatgagggatcaaaaagaagaattactgtttttccaactattta

SEQ ID NO: 177111 - DNA, 638 bp, Homo sapiens
tttagggtgtctagagattattgttctatatctgtattctctaatgtattgattagccaagtccttttagtaagtggtacctatagtaactctaatggagttttgtgtctcgtgatgcactcattcaattgattaaactcatagccagtcacttaaatctgtctttcgtttccagaatgatttcatttctgtgtcattagagtggatgtgttagctatggacatactatttgccaggctgcaagtacacaacacagttatgaggcttcccctcgtttaaccagatctctaaaatgccttaactaccactcaagacttgtrtcatgagaaatcgcttttagcattctaattttatctttttattaatataacagtatctgcttctatagtataaattctgtttagtcaagcaaatctaacttttttttctcttgtgaacatattcctccttatgttttataatttggacaagatgtaaattcttcctctcctgcattttctttctatttgctatctatcattatatattattcttagtaggtggctctctcttagggtatcaactttgctaaactctcctggcaatgagttggcagatgagggatcaaaaagaagaattactgtttttccaactattta

SEQ ID NO: 177112 - DNA, 513 bp, Homo sapiens
cccaagtgtactcaacatctttcttgaaagacttgctctgtgactaatgtgatgatattcttatagcatactggcaagcctcatgtcaaagcaggaagcaggatcctccaaactctgtatgtaagaaatatcatcttcctttatgttcctaaatcgagggtattctcttttgagttcccctcctcttctttgtcttagcaggagatgagactgtattttgtctactctctagataaaattaagattccttgggtcttaagcagatggaaatatctggggttggagcttggcattcagttcacatttaataggccttctgtctaaacttgctcacaagggttgtgagaatgggttgytctctgtgccaaattttgaacctaggaacttttctttaacatcaccacagtattttatgattggtaccaggcttccttagatcactttatcaggggtgtacttcaatcattcttgtataggagctagtctctatctttatctggtactaggtaagtc

SEQ ID NO: 177113 - DNA, 572 bp, Homo sapiens
aacatggtgaaaccctgcctttactaaaaacacagaaatttgatgggcttgggggtgcatgcctgtaatcctagctacttgggaggctgaggcaggagaattgctggaacccgctgcagtgagccgagatcaccccactgccctccagtctgggtgacagagcgagatttcatctcaaaaaaaaaaaaaaagttggctcatgtgaatatggaggctgagaaatcccatgatacactgtttgcaagcattccttgagaacaaggaaagccagtggtgtgattcatttcaagtctgtagtaagcctgagaactaaaggagccaatgtgtaactctcagtcagaaaccaaatgcttatgggcagaagaagatgactgtcccagctcaagaagagagacagagaatttgcccttacttggacttctcgctctcacctggccctcaatggattggaagacggtcatttacattggtgggcatgggtcttctttactcagtctacctattcaaatgataatctcttckggaaacatcctcacagacacatccagaaataatgtttttctagttatgtg

SEQ ID NO: 177114 - DNA, 595 bp, Homo sapiens
agatctgtattcctatatttttaaggtcctatttaagtgagctttgaacatttaaaataaccacccgcttttggataaagttgacccaacaaaacaaawtcttatattgttcatactcacaaagtcaaaggctaataaaagccatgtggactagagtataaaccagctgtgaaatgtaatatagtgtgttgcaagcaaccatgtttgaaaacttttatggtcctgcttgctaaaactcagaacctaaagtcatatatcctggcctcatcaattaatcttcacagacgttactttgtttttcacctaccagtgtttgtatacaattagcaaatttcctagagcaaaacatcagatattcaagttttatcctttcaataatatcaatagtatcccattatttgaatataattaaaagataaacaggtaagatgaaatctctagatttattactgcaaaagttagtttagacggtttgactgaattctttgggtttctaatacttcaccaatgaattggacagacattgcagggatagcaacctttgcctgtaagactgaggagagagaccttagtatatggtctcaccaaaaatgag

SEQ ID NO: 177115 - DNA, 596 bp, Homo sapiens
cctatatttttaaggtcctatttaagtgagctttgaacatttaaaataaccacccgcttttggataaagttgacccaacaaaacaaaatcttatattgttcatactcacmaagtcaaaggctaataaaagccatgtggactagagtataaaccagctgtgaaatgtaatatagtgtgttgcaagcaaccatgtttgaaaacttttatggtcctgcttgctaaaactcagaacctaaagtcatatatcctggcctcatcaattaatcttcacagacgttactttgtttttcacctaccagtgtttgtatacaattagcaaatttcctagagcaaaacatcagatattcaagttttatcctttcaataatatcaatagtatcccattatttgaatataattaaaagataaacaggtaagatgaaatctctagatttattactgcaaaagttagtttagacggtttgactgaattctttgggtttctaatacttcaccaatgaattggacagacattgcagggatagcaacctttgcctgtaagactgaggagagagaccttagtatatggtctcaccaaaaatgagtactgataaggg

SEQ ID NO: 177116 - DNA, 549 bp, Homo sapiens
catttaagaagtaggggtgacagaagatgaaaagtaaaggagactgagaacaacagagaaaagggaaaaccaaaaacgatatttgaaccctggaataaggtaaaaatgtgcattgctttttattatacactgagctcagttctaaatatcttttcaaaaaaaatgaacaatggcaataaaataaaaataaaaatgcctagtagagttgatccttgaacaccaaaggtttgaactctgtgggtccatttatatgcagattttattctgcctctgctacccctgagacagccagaccaaccctcctctgcttcctcctcagcctactcaacacgaagacaatgacaatgaagacctttatgattattcacttccactaaatgaatagtaaaatacgttctgttccttgtaattttcttaataacattttcctttttctaccttgttttactgtatgaatacagtacataatacatrtatcacacaaaattgtgtgttaactctttatggtactggtaaggcttcaagtcaacagtaggcaattggtagtta

SEQ ID NO: 177117 - DNA, 645 bp, Homo sapiens
acgttaacaaaaatcaggagggaatggggaggtgaccagaaatacaaatgtatgaatttcattatctttcatagtggagaaaaaatacatagtttcaaatattaagaaatccataaaagaggctaaatattaaaagccccagaagtagccactgaaatgttgaaagtaggctataaattaacaaatggaagggaaatcctccccagtggatccccataaaaagacagaaaaaataaaattaggtgaaaaatacagaccatagtacatatgtattgtatcaatcaatgaaaatgaagaggttcactgattattagaaaaaaagtagattygattaaaaaaatccaaccatgtattttatacagagctgtatataaataaagtagctccaaaatcttcaacagtgataattgagcacccagcactgcaaggtgatacaatgatgaaaaacagaatttgcacccagcctcatggatctatagtttaattaaaattagagttcaacaaagtgaagtagcatagagtatggtaaggtgcaaccaaatcaagcaaagtaaagattgaatgtgaaaagtaaggccaagaatacaccaggaaaacacagagacaaacgtcagacagggttgccttcaaaacaaaacatattca

SEQ ID NO: 177118 - DNA, 549 bp, Homo sapiens
tttattgtttgcactttagatgcctgtgtctaatgtacttcctgtgcatctccacgtgtatatggagagctgggctgaagggatagaataatttcattttaaagtcacgttccttatccgttctgaactgtagtctattggcagtgagagctattaatcaaataatgacacaaacagatatgcataccaaaaactatgttaggaaccatgaatggaaggcagagagtatatgagaggactgccctagagtcagaggtcagagaaggctaccatgaggaagagacagctgaggtgagggaggagcagaggcaaataaggtgaagcaagggagaacatgccggtcttagagagcagcctgtgcaaagccccagaggcagagaaaggagcagagggttgaaggraggccagagtgggtgcagtgcagacagcacgagaagccaggcaaggtggagctgggattgtgctggagcttacaggtaggggcgagagtcacaacactcagcgacagagacagggacgtaaagatgggaacaggagacactgggaact

SEQ ID NO: 177119 - DNA, 469 bp, Homo sapiens
ttagcttcacatgctcagtttccagaattattgttagattaatatcaaatcaaaattttttctcatggagactatagcaatacaaaaatactttctgggatgaagtaactgactatacacattgatgagtcaaccaaataaaataaaaccagaaaagagcagtgccggcctgtgtcccctgaattcctacaattgtcagattgacatggatgttccactgggggccgtgagctggaatcccgggggcaaaaagcctcactcttttagttttctgttctattccgatgatgctgacacttgctggttcatttggccttcctgatagcaaagaaagggcttgagactccaggagataattttccatgaaaaggagaagcyttgtcgtccacaactcagcgtaaggcagagttcaaagtgaagacttcccagagcagcccaggcactgttggtcctctttgcctgtctcatt

SEQ ID NO: 177120 - DNA, 469 bp, Homo sapiens
ttagcttcacatgctcagtttccagaattattgttagattaatatcaaatcaaaattttttctcatggagactatagcaatacaaaaatactttctgggatgaagtaactgactatacacattgatgagtcaaccaaataaaataaaaccagaaaagagcagtgccggcctgtgtcccctgaattcctacaattgtcagattgacatggatgttccactgggggccgtgagctggaatcccgggggcaaaaagcctcactcttttagttttctgttctattccgatgatgctgacacttgctggttcatttggccttcctgatagcaaagaaagggcttgagactccaggagataattttccatgaaaaggagaagctttgtcrtccacaactcagcgtaaggcagagttcaaagtgaagacttcccagagcagcccaggcactgttggtcctctttgcctgtctcatt

SEQ ID NO: 177121 - DNA, 583 bp, Homo sapiens
aaagtgatcattttttcctgaacccatctcatgcctgcctgaggtagtaaggcagctgagtaaacagaatttcaaacagaggcaaagccctctaagaagcgggccacgtaaatcgcttcagctttggcagaggtcaggaaagagaggtgttcacatacaagccaaaatcttttttttttttttcaggtaaggtctcactccaccactcaggctcaaggacagtggtgcaatcatagctcactgcagccttgaactgctgggctcaaggkatcctcccacctcagcctcccaaagtgctgggattaaaaaccatcacacccagccaccaaaatcttaaaagttcttgaaggccaagtgtgggccagtgtgtctggaacaggcttttctccacggggcccccatgagaagtattgggctacgtcaggagccagaggaggccccctcgacagccaggtgtgtaggaggtgacctgtgactgtgcaggcaggggtggagggaggaacggacacaaagctttcaccgcttctccagatctttccctcatgtgaagcaaaaacagaccctctcacctttatttttattt

SEQ ID NO: 177122 - DNA, 526 bp, Homo sapiens
tatccaaatgctttgggaaaggaagaggagggcacttgctgagagagctgggagcatattttagcttatgggtttagaatctaaacacttctcatcttgctgtttttaatgaacttgcaactctgtctttgtgcaggtgggcacctctgccttgaaaagtcctctgcgaagctttctgggtcttcttgacagarcaactcttttctcttctgtgccacctctacccctttacatgctgtttggggcttttttcacatgattttgcatttattttttatgcatccgtgttccctacaaaactgagttcttcaagggaaacagtttgtgtttgattcatttctagcacagggccagacacagacgaggttctccataaatatttgttgagttgggttaagtaattgctcagcgtttgatggcaacagtgtccacacctgtggctgagacaagtgcttcctcagccccgtccccatgtgttttttacaggcattgcattcccggaccatcttgcatctctctcattaac

SEQ ID NO: 177123 - DNA, 614 bp, Homo sapiens
ctacttggttccaggtcccaaatgagcggggaggatgagcccgtgaaggtggggtggttgggagaagggctgcacagcggcagagactgagggaaaccccttttagctctggccaaactaggaagaacaaggaggaaggagtgggaagagtaggtgaaatgggtgggtcacatcttaccatgaactgaactccaagtcactgtacatgaaactgtgacttgaggaattatatagctgaccagggccatggccttcaaacccttcatagaaaaccctccacatatacaaaagcaggacattttggggtcaactgatgattatttttcttattactcttgcgagcattttatattatttacatcagttactgagcattttgttgttttttaaagcagagtcttgctctgtygcccaggctggagtgcagtaatgcaatctcagttcactgtaacctctgccttctaggttcaagtgattctcctgccttagcctctccactgggagtagctgggattacaggtatgcgccatgacgcctggccaatttttgtatttttagtagagatggggtttcaccctgttggccaggctggtctcgaactgctgacctcaagt

SEQ ID NO: 177124 - DNA, 539 bp, Homo sapiens
gtatagaagtctaggttactttggagatgttatttctttcttctttaaagatgtggcatactttaaagatgccacaccatgttctggcttctgttgtttctttttttccytttttctttgttttttttttttgagacaggatttcactcccgttgcccaggctggagtgcaatggtgcaatcttggttcactgcaacctctgcctcctgggctcaagcgattctcctgcctcagccttctgagtagctaaaagtacaggcacgcaccaccatacacggctaatttttgtattttttgtagagatggagtttcaccctgttgcccaggctggtctcgaactcctgatctcaagtgatccacccacctcgacctcccaaagtgccaggattacaagcgtgaaccactgcacctggccttggcttgtgttgtttctaataagaaatctgatgtgaatcttattttggttcccttgtacataacacatttttttccctctgattgcttttaagatttttctcttcaccactggttttgaccag

SEQ ID NO: 177125 - DNA, 539 bp, Homo sapiens
gtatagaagtctaggttactttggagatgttatttctttcttctttaaagatgtggcatactttaaagatgccacaccatgttctggcttctgttgtttctttttttccctttttctttgttttttttttttgagacaggatttcactcccgttgcccaggctggagtgcaatggtgcaatcttggttcactgcaacctctgcctcctgggctcaagcgattctcctgcctcagccttctgagtagctaaaagtacaggcacgcaccaccatacacggctaatttttgtattttttgtagagatggagtttcaccctgttgcccaggctggtctcgaactcctgatctcaagtgatccacccacctcgacctcccaaagtgccaggattacaagcgtgaaccactgcaccyggccttggcttgtgttgtttctaataagaaatctgatgtgaatcttattttggttcccttgtacataacacatttttttccctctgattgcttttaagatttttctcttcaccactggttttgaccag

SEQ ID NO: 177126 - DNA, 648 bp, Homo sapiens
gaacccctggtaacccatcaagctgcacggcccagtctgtgcagcatgcaggaaccgcatgacctccgggagttgactgtggtgctagcaaagatgcaccagccctgggagtaagaagcagaggagaaggggagaaagggctcaggaaggcaagctccaccgtgtcggttctgtggtccaacagcagggcgggaccccgtgcactgacggccactctcaccaggcatggagctgcctcccgtctgattagcccctctcctgcttgggcctgagtgtcctgcctctgtcatttcacaggcccagcctgtcccggatgagcttgtcactaagctcctgggcaaccagsccacattcagccccattgtcaccgtggagccccggcgccggaaagtttccaccgccccattgggcttcggatcccactacctccttcctggaccgacaacccgagggacagcggggagggagacacaccagcctgcgcctgctttgcagcgtcattggtgagagggcccctgctcgcttctgttctcggctgctgcagtgcgtctggaacacagtaggggggtgactcgagaaggcgaggccagcaatccccttagtttttgttgacttccccgggagtgaggtgctcttccaagagatgga

SEQ ID NO: 177127 - DNA, 548 bp, Homo sapiens
gaattcatgtgaaagtgaaaatcccctggtagaaaytgctcttaggaaaaactaattggaaagtagggaagcaggaccaggaagagaaggtggccaagggagggcacaatatcaagcaaagtctcacagagaaccatagtagccaccccaagatggcacccaaggatgctcccctcatggtatttctgcctttgcatatccctgctcccactttgaatacgatggacctgtttaacaacagcgattgtgaaacagatggagtgtggcttccaaggctagatcacaaaagactgcagtgtctcccttgctctcttggttcactcactctggacgaagccagccaccatgttgtgaggatgctcaagtagtctgtggagaggctgatgtggtgaggaactgaggcctcttgccaacaaccactccaacttgctggccttatgagggagccttcttggaagcagatccccctgtctcagttgagtcttgaggtgacgcagcccagctggcatcttgactgccacctcatgagagacataagccagaatcac

SEQ ID NO: 177128 - DNA, 534 bp, Homo sapiens
gaattcatgtgaaagtgaaaatcccctggtagaaactgctcttaggaaaaactaattggaaagtagggaagcaggaccaggaagagaaggtggccaagggagggcacaatatcaagcaaagtctcacagagaaccatagtagccaccccaagatggcacccaaggatgctcccctcatggtatttctgcctttgcatatccctgctcccactttgaatacgatggacctgtttaacaacagcgattgtgaaacagatggagtgtggcttccaaggctagatcacaaaagactgcagtgtctcccttgctctcttggttcactcactctggacgaagccagccaccatgttgtgaggatgctcaagtagtctgtggagaggctgatgtggtgaggaactgaggcctcttgccaacaaccactccaacttgctggccttrtgagggagccttcttggaagcagatccccctgtctcagttgagtcttgaggtgacgcagcccagctggcatcttgactgccacctcatgagagaca

SEQ ID NO: 177129 - DNA, 457 bp, Homo sapiens
ctgacccacaaaaactgtgctttggattgaatatgtcccccaaagtccatgtgttggaaacttattcctcaatgcaacaatgctgagaggtaggacctctaagaggtgattatgtcatgagggctctgccttcataaattaatgttattatcatggagtggggtttttatgaaagcaatttcacctccctctcccccctctctcatccttttttgccatgtgatgccttctgccatgttatggtgcagcaagaaagtcctcatcagatgcagacctttgatcttggacttcccagcctctagaaccatgagccaatagatttctgctctttataaattttcaagtctcaggtattctgsagaagcagcacaaatttgattaaggcaccctcttagtggcattaatgcccaaagcatatgcatacatttccagaggtcagagccccctagaactttgg

SEQ ID NO: 177130 - DNA, 561 bp, Homo sapiens
ttggcagagaaggactcagaatttagatactcagtagatctcagagagggcagataacaagtcggaaactcagtagttgctctgtctgaggactcatgaggaaagtcagattggatgacaggcagtttgttctaaatctcccatttggtctgtgtcatatattcaaggagggagaacaagaagccaggccagttctgacacaacactcttctggtaggttgggagaggttcacaggatgtgagacaatgcatggtataatggacacagaactgttctagaaatcagacactatagcttctagtctcacccccatctcctactagctgtgtatgatttggggctgatttctttacttccatgagcttcggtttcttcatctgaaatggaaattttaaatacctaccctgattttrtagggatcagtgtaaaaattaacaaatatgaagtcattttataaactacaaactattgtacaaatatacagatttttatgattacttccacttgtatagataattgtgacctctatttgccagtaaaatcagagaagtaaattttgc

SEQ ID NO: 177131 - DNA, 554 bp, Homo sapiens
tacagccgccgcgttgtcgggggaaggaaccaatcagaactgcagcaacaggtggcccggcaaccgacaacagccgttgggctcggctggggttcgcgccttctcccccggtggagcggcctggcgtttagggaccagggacactaaaggccccggcggggcgggagcacccagcgtgacctcacgctcctacacacagacaagcaaacgggccggcccccgcacgtgacaaggcagagccggcccaggccagctgcctgtccagccctgggatgagaaaaggcgtcaggagatggaccgggcctggttcgcctttaattggctgacccgtcctgtgggggtaactgaygcgtgaacagccaacaattggccctctggccgggacaaacacgtgcgtttggggagtagaagaaggctggtattaacctccattttacaatgaggaaacggagtcccaaagacgttcagtcatcttcctgatattcacacacttacaccctggtcaggccggcgccatatgtgttttcaccagcagaagggactgccagggaaca

SEQ ID NO: 177132 - DNA, 567 bp, Homo sapiens
gggcaacatagccaaaccccatctctacaaaaaaatgtgccaggaayggtggtgtgtatctgtagttccagctactcaggaggctgaggtgggagaatcgcctgagcccaggaggttgaggctgcagtgagccaagatcgggccactgcactccagcctgggtgacagattgagaccttgtctcaaaaaaataaaatacataaataaagaaataatcattgaaaggcctgggtgagaaggctgtaactggccctgtaggaaatcttccaagaacaccacctctaaactggcccacaaggagagctgctgtctctgccacagtcacaaagaaggaatcaggaaatgtcaccgttgcattccagagcacaccatgaatgtagctgcaactgctgcctcacttgcctctgacaggcatgaaactcgtgggtggacccacaaaggctgctgcagaaaaacctagtgtctccacaacagtgcccaccagctccagacagagccacggagagatgcctgccgccttcttcctgcctcccaagcagctcaggaactacctgatgaacagaattc

SEQ ID NO: 177133 - DNA, 567 bp, Homo sapiens
gggcaacatagccaaaccccatctctacaaaaaaatgtgccaggaatggtggtgtgtatctgtagttccagctactcaggaggctgaggtgggagaatcgcctgagcccaggaggttgaggctgcagtgagccaagatcgggccactgcactccagcctgggtgacagattgagaccttgtctcaaaaaaataaaatacataaataaagaaataatcattgaaaggcctgggtgagaaggctgtaactggccctgtaggaaatcttccaagaacaccacctctaaactggcccacaaggagagctgctgtctctgccacagtcacaaagaaggaatcaggaaatgtcaccgttgcattccagagcacaccatgaatgtagctgcaactgctgcctcacttgcctctgacaggcatgaaactcgtgggtggacmcacaaaggctgctgcagaaaaacctagtgtctccacaacagtgcccaccagctccagacagagccacggagagatgcctgccgccttcttcctgcctcccaagcagctcaggaactacctgatgaacagaattc

SEQ ID NO: 177134 - DNA, 554 bp, Homo sapiens
agttgtggacctgactactggtaacttctgtcttaccagaagcagtataatagagtgggtcaagaacagtcactgggaccagatatcatcagtgttgtctcctgcccccatttatgtaactttggtcaaattacatgacaccttgtgtgtctgtttcctcatagggtcatggtgataatttcataggtaattagtataaaatkctagctagaactgtatcaggtttggagtaatatatgagtccaattaagcttcagtatccttagctatgcaatgaaggaatgaacctaaatgatgatttctaacatatatttctgtctggaccctttatgtccctaagcatttttactcacattggatccagtgatcctaacaaaattattgcgagaaagactgaaagatattaataatcccagtaacaaataaggaagttgaggctcacaaaggttacaattgtttacctgatactacttgagcaatatatatacagttgaattcatatctttctatagtggcggctgtggtctgtaaccatctctcaccttcaagaccaa

SEQ ID NO: 177135 - DNA, 554 bp, Homo sapiens
agttgtggacctgactactggtaacttctgtcttaccagaagcagtataatagagtgggtcaagaacagtcactgggaccagatatcatcagtgttgtctcctgcccccatttatgtaactttggtcaaattacatgacaccttgtgtgtctgtttcctcatagggtcatggtgataatttcataggtaattagtataaaattctagctagaactgtatcaggtktggagtaatatatgagtccaattaagcttcagtatccttagctatgcaatgaaggaatgaacctaaatgatgatttctaacatatatttctgtctggaccctttatgtccctaagcatttttactcacattggatccagtgatcctaacaaaattattgcgagaaagactgaaagatattaataatcccagtaacaaataaggaagttgaggctcacaaaggttacaattgtttacctgatactacttgagcaatatatatacagttgaattcatatctttctatagtggcggctgtggtctgtaaccatctctcaccttcaagaccaa

SEQ ID NO: 177136 - DNA, 554 bp, Homo sapiens
agttgtggacctgactactggtaacttctgtcttaccagaagcagtataatagagtgggtcaagaacagtcactgggaccagatatcatcagtgttgtctcctgcccccatttatgtaactttggtcaaattacatgacaccttgtgtgtctgtttcctcatagggtcatggtgataatttcataggtaattagtataaaattctagctagaactgtatcaggtttggagtaatatatgagtccaattaagcttcagtatccttagctatgcaatgaaggaatgaacctaaatgatgatttctaacatatatttctgtctggaccctttatgtccctaagcatttttactcacattggatccagtgatcctaacaaaattattgcgagaaagactgaaagatattaataatcccagtaacaaataaggaagttgaggctcayaaaggttacaattgtttacctgatactacttgagcaatatatatacagttgaattcatatctttctatagtggcggctgtggtctgtaaccatctctcaccttcaagaccaa

SEQ ID NO: 177137 - DNA, 554 bp, Homo sapiens
agttgtggacctgactactggtaacttctgtcttaccagaagcagtataatagagtgggtcaagaacagtcactgggaccagatatcatcagtgttgtctcctgcccccatttatgtaactttggtcaaattacatgacaccttgtgtgtctgtttcctcatagggtcatggtgataatttcataggtaattagtataaaattctagctagaactgtatcaggtttggagtaatatatgagtccaattaagcttcagtatccttagctatgcaatgaaggaatgaacctaaatgatgatttctaacatatatttctgtctggaccctttatgtccctaagcatttttactcacattggatccagtgatcctaacaaaattattgcgagaaagactgaaagatattaataatcccagtaacaaataaggaagttgaggctcacaaaggttacaattgtttacctgatrctacttgagcaatatatatacagttgaattcatatctttctatagtggcggctgtggtctgtaaccatctctcaccttcaagaccaa

SEQ ID NO: 177138 - DNA, 536 bp, Homo sapiens
gctttgggcactatgaacattctaatgatattaatgcttcctatccatgagcatggagtgtttttccatttgtttargtcatctttgatttctttggtcactagtttgtagttctctttgtagacatctttcacctccctagttagctgtattcctaggtataaaaatagcttattcaatatatatcattgattcattaatattgaactgatggccaacaacattatattgcatacctgaatgaaacttacccaacacatatattttctctgcaaggcacatcacagtattcctgtgcttaggaacagtggacaacgcttcagcatgatgcttaggggacattttaaacagggcaatcatcaacaagcactcaaaaatgtgggactatacagatagggaaaggaacacttgtttgcatcaggagagctgaaataagaacccgggacttgctgtgtttgacctcagctgagaatgtgcttgtctggtgactgagatttttgctgctctgtgaaaatgactacaaaagcactgtgaag

SEQ ID NO: 177139 - DNA, 536 bp, Homo sapiens
gctttgggcactatgaacattctaatgatattaatgcttcctatccatgagcatggagtgtttttccatttgtttaggtcatctttgatttctttggtcactagtttgtagttctctttgtagacatctttcacctccctagttagctgtattcctaggtataaaaatagcttattcaatatatatcattgattcattaatattgaactgatggccaacaacattatattgcatacctgaatgaaacttacccaacacatatattttctctgcaaggcacatcacagtattcctgtgcttargaacagtggacaacgcttcagcatgatgcttaggggacattttaaacagggcaatcatcaacaagcactcaaaaatgtgggactatacagatagggaaaggaacacttgtttgcatcaggagagctgaaataagaacccgggacttgctgtgtttgacctcagctgagaatgtgcttgtctggtgactgagatttttgctgctctgtgaaaatgactacaaaagcactgtgaag

SEQ ID NO: 177140 - DNA, 497 bp, Homo sapiens
tcatctttgatttctttggtcactagtttgtagttctctttgtagacatctttcacctccctagttagctgtattcctaggtataaaaatagcttattcaatatatatcattgattcattaatattgaactgatggccaacaacattatattgcatacctgaatgaaacttacccaacacatatattttctctgcaaggcacatcacagtattcctgtgcttaggaacagtggacaacgcttcagcatgatgcttaggggacattttaaacagggcaatcatcaacaagcactcaaaaatgtgggacwatacagatagggaaaggaacacttgtttgcatcaggagagctgaaataagaacccgggacttgctgtgtttgacctcagctgagaatgtgcttgtctggtgactgagatttttgctgctctgtgaaaatgactacaaaagcactgtgaagatagatttttgaggttacagataaattttagcaaatggg

SEQ ID NO: 177141 - DNA, 587 bp, Homo sapiens
agtcaacatcttttgctgctgctgtttttatccttagtactgttcttcttattatttatttatttttttgagtgaaaatatttcccacataggaaatacctgcacacttaggcmatgggtggggaccactttgtccattctttattgaataaagtctctgagctgctttatgcctgaaactccacccaaccttgccaaacaacaaaatgacaatactctcattacatgagggagtcagaaattctgaactttgaaaataaaattgtggagatgctgttgaacaatattgcttggaacttaacttcctttggggcatctataagggtatgtattatttcatggtctcattgaatatgacgtcccattgaatattcttttcccatggataaagaactgaaaatagacattagtgatataagagccctatgaattgctgacatcatggtaatttagatataaaaatagatttagttgttttcaatgtattgactcattgcaaagtatagatttaatcaggaaacatttctataactgggaaattataagcaaggtcttgttcactgtaaagattgttgtataaaagggaa

SEQ ID NO: 177142 - DNA, 582 bp, Homo sapiens
agggacaaagtacaggatctccttctgggttgcttttctcttctgttactattttcttccctgcgttgcttgactgaattccacccagtcttcaggtctcaggataaatgtcactttccaagaaaagcttttgcctacattggatagccctatcctagacttcatgcagcctgtacttttatttcatagcagttgacatgttggtatttatatcatttatatggggtttttcgatatctctttttttcccactagagtataaattccacaagagcaggaaccttgcctctcttgtcatcacatctgagtgcttcatactgtgtctggcaaatagcaatggtatttagagggtgagcatgtcacatactctgtgttcgacacagttttatrtacagacatatttgttaatcctcaaaagttgtttgaggaaagtaccataatatttccctttttaaagattgagaaactgagataaagagatgtagagcaacttctataaactttcactgccaacaggggccaagtctagattaaacccaggcgctcttgcttcagactttgtgttcttaaccactttttttt

SEQ ID NO: 177143 - DNA, 293 bp, Homo sapiens
ttgcttcagactttgtgttcttaaccactttttttttttttactgcatttatagataaccctttgtcaaataagtcaaagaataaattaatgagctagacaaactaataccaaagtgcctaacctactttagcagtcttacatgtcttttgaagatataaagattaaatgaaaactgaaagatgagtaggaggactgaaatwtagccctagcatttgggcaaaaaagtgtggatatgcagaaaagtatattccaggtaaggtaagcttcatagatgaaagtttggagatgtac

SEQ ID NO: 177144 - DNA, 568 bp, Homo sapiens
aaatcctttttcagtaacatgaaatcacaaaagaaatgcccataactacattaatttaaaagaaatgtaagacattatcttttgtcaaatttgtttaataagctttcatccttaagttcatcctctattcctatttgtccattttatgcctagagacacaggaaaattattttttaattgatttttaaaatatagatgctattttttcatatttttaaacattggcctgcaaaattaaaaacacatacacatatatacaccgtaartattggacaatcaaactgtaagttttaacccttggtgtgtctgctcaaccaatatcccccttttattaatagacacatacacacacacctgggccctaaaaccacgtttatgttaaatttatacaatagtgtctagggcatagaatgtgctcagtacaacttgaatgagtgaaggaataaactgattctgacctcctggctactatggattgaaccaagatatttagctatatttggccaatcaattggcagtaaagactgaaattttactcactaatttggatgtcctacagtagttttac

SEQ ID NO: 177145 - DNA, 568 bp, Homo sapiens
aaatcctttttcagtaacatgaaatcacaaaagaaatgcccataactacattaatttaaaagaaatgtaagacattatcttttgtcaaatttgtttaataagctttcatccttaagttcatcctctattcctatttgtccattttatgcctagagacacaggaaaattattttttaattgatttttaaaatatagatgctattttttcatatttttaaacattggcctgcaaaattaaaaacacatacacatatatacaccgtaagtattggacaatcaaactgtaagttttaacccttggtgtgtctgctcaaccaatatccccctttyattaatagacacatacacacacacctgggccctaaaaccacgtttatgttaaatttatacaatagtgtctagggcatagaatgtgctcagtacaacttgaatgagtgaaggaataaactgattctgacctcctggctactatggattgaaccaagatatttagctatatttggccaatcaattggcagtaaagactgaaattttactcactaatttggatgtcctacagtagttttac

SEQ ID NO: 177146 - DNA, 573 bp, Homo sapiens
atagtctatacacaatagtattagagatatactattcagcytgaaaaaaagaagaaaattctgttctttttgataacatggtggaccatgctaagtgaaataagccaaacactcatatgtggaatctaaaacaatggaattcatggaagcagaaagtagaatggtggttaccagaggctggggatgggggaaacgggaagatgttggtcaaagggtacaaagtttctcttagatctactgagcaatgagttaactatagttaataataatgtgtatttcaaaattgctaagtattgaaaatattttccaccttccgtcagcttcttttcttcatgcaattcaaacttttccatgatgtatacaactttcattgaatttgctgcatcgtcttcacagacagtgatataagttgactaacaccaccagtatacatgtgttttagaggtgtttatgatttctttggaaaaattgaaaaataaataggtcagattatgtttcatcactgtcctgctatttttctctacaatggaaaattattttgccttcatatcattttatagaagagctaaaaat

SEQ ID NO: 177147 - DNA, 587 bp, Homo sapiens
taaaaaaatcagttaccatattcacatcaaaaaaatgtttttagataactagtttagataaattagtttgtaagtcagctgagtttaggtgacgtgccctattattctcatttcttgttaatacccttataccctgtatgagaagcagataaacaacttaacaatcagttaaaggacttcagaaactcatctgtcctgaaggtkgtgagtaaatccagtgttacagctattttgaaatggtctagagctggtaatctccagatgcattattaaacaaaccaaatattccaagtagtacaaagtccatactggcatacagaatatttagctgctacttgtttaagtagaatgcctgtagatttcatatgtgtatatgatttcctctaacagaataccagaaggagcaataaaagacagtatgtgttgaactaaatgtatgaacaggaaaaaaaagactcaagaacacaattctatatctggagaatagatgcagtgtcacataaactgcaaaggcttcaaaagccaaaataccaaaatatatctgcaaggttattggaggttaatttgcataactgggcataccgcct

SEQ ID NO: 177148 - DNA, 587 bp, Homo sapiens
taaaaaaatcagttaccatattcacatcaaaaaaatgtttttagataactagtttagataaattagtttgtaagtcagctgagtttaggtgacgtgccctattattctcatttcttgttaatacccttataccctgtatgagaagcagataaacaacttaacaatcagttaaaggacttcagaaactcatctgtcctgaaggttgtgagtaaatccagtgttacagctattttgaaatggtctagagctggtaatctccagatgcattattaaacaaaccaaatattccaagtagtacaaagtccatactggcatacagaatatttagctgctacttgtttaagtagaatgcctgtagatttcatatgtgtatawgatttcctctaacagaataccagaaggagcaataaaagacagtatgtgttgaactaaatgtatgaacaggaaaaaaaagactcaagaacacaattctatatctggagaatagatgcagtgtcacataaactgcaaaggcttcaaaagccaaaataccaaaatatatctgcaaggttattggaggttaatttgcataactgggcataccgcct

SEQ ID NO: 177149 - DNA, 587 bp, Homo sapiens
taaaaaaatcagttaccatattcacatcaaaaaaatgtttttagataactagtttagataaattagtttgtaagtcagctgagtttaggtgacgtgccctattattctcatttcttgttaatacccttataccctgtatgagaagcagataaacaacttaacaatcagttaaaggacttcagaaactcatctgtcctgaaggttgtgagtaaatccagtgttacagctattttgaaatggtctagagctggtaatctccagatgcattattaaacaaaccaaatattccaagtagtacaaagtccatactggcatacagaatatttagctgctacttgtttaagtagaatgcctgtagatttcatatgtgtatatgatttcytctaacagaataccagaaggagcaataaaagacagtatgtgttgaactaaatgtatgaacaggaaaaaaaagactcaagaacacaattctatatctggagaatagatgcagtgtcacataaactgcaaaggcttcaaaagccaaaataccaaaatatatctgcaaggttattggaggttaatttgcataactgggcataccgcct

SEQ ID NO: 177150 - DNA, 454 bp, Homo sapiens
tcagctataaaatgacttgtgctcttgaatgcaagtttctgataactttggaggttgtgacattagaataaagggaaaaaactttcaggactcctatggagagctgaaatgttcatgaatatcaagcagaacaggagttaactgaaatgttyatgaatatcaagcagaacaggagttaactgaatggagtgaactaatagaaaactgatgtaatcttctttttgactttttttgcttaaaacattgctgatagtttctgttttccagagccaataaaacttttcttttgagctatctgcagcttttaacaattgagtgaaatatactcctgtgagcaaaatttggagcatgtttgtttctctctgcctgatttctccagaatttggaaactatttgtgagtattctcaacttaaggcagtagagttatttgcaaaagtgcgataagaaccgttt

SEQ ID NO: 177151 - DNA, 455 bp, Homo sapiens
ttctctaaatgtgtacattgtacaatagaagacaaataatcaaaacaattactaatttatccattctctttatgttagccagagaaaacaactatgtatataagtagaaaaccagctactgtgtagcatgatctttatgacaacaaactctttgagcaatattgatctgggcatcttgtcatgwgaattaataggggaatatactttttttagtgtataaatacaacctaagagaagactacctatacttcattaaataccacactttgttctttaaggggttcaaacacataatataaacacataaataaaaacattatcacaaagaaccagtgtgaacaaaggctcataacatctttatgacaatattcacagaacaaagataacttatagcaatattcctgacccataaagatagtgtacatgtagcacccgaaaacaattacaatgcatgc

SEQ ID NO: 177152 - DNA, 611 bp, Homo sapiens
ccattttctgtctcctgtttcactactaacaatggttctgagaaaggaagtgatcataacctgaacaaagatagagttctcatgagtcctttttctattagttttaatagcaccatgttgtcatagccacactgamccatctctactaaaaactgcattcccaatcaaaatgattcttctggtagaaacagcaagttctgccagtgtgaacacaaaagaatgaaggtgattcaggaaatgagaactcggcatttattaaaaaacgttatctatatagttctagatcatcaagatataattgttagctttatcaataataaaagggaaatgggtgtactgaaagtttttaaagactgagttactttgggttcagtgtaagtttatcctaatacctgagtattaagagctttttaatataaattcatagagtaatattgagtgaacagttcaaactttgatttaatattaagtttcccagaatactaaatcttgaaaacataatcatttcaaaaacaatagattattattaaaatccccagggttaaagataaaacttatactgtgaagacaaaagtaaaagtattgaactaaatatgaagttaaacaaggga

SEQ ID NO: 177153 - DNA, 489 bp, Homo sapiens
tgttagctttatcaataataaaagggaaatgggtgtactgaaagtttttaaagactgagttactttgggttcagtgtaagtttatcctaatacctgagtattaagagctttttaatataaattcatagagtaatattgagtgaacagttcaaactttgatttaatattaagtttcccagaatactaaatcttgaaaacataatcatttcaaaaacaatagawtattattaaaatccccagggttaaagataaaacttatactgtgaagacaaaagtaaaagtattgaactaaatatgaagttaaacaagggaactagcaattgacatttagtagaaaaggatgaaacagagagggttttgtgtgtttatgtttaaagattataaccataaagtgtatggtataaaggtaagtaaaggagctagacactcccgtgctgtgatttatgaggccctagaaaaactattctgttttttaaaatatgttttttc

SEQ ID NO: 177154 - DNA, 532 bp, Homo sapiens
tgacactctatcctctttatttgtttttattatttcgtttacttggtaattatctaatttttttcttactacttattttctgtctttcctcaccacccacctgcaaacgctaataataatatttgtcacacttgtaacagtgaaaatccagtccttgtatcacaggcactcattaaatacatgatgactgaatttgtaaatgctaagtacttatgtgttccttgtacctcagttttatcgtctgtaaaatgaaaggatttgkggttgaacacctataaactactttccaactctcacattatttgattttctgatcaaattcataattgatcaaatacttatttgttcaacccagcatacaaaactgaaaaaatggttagagtttggaaaacaaagtcaaaatctttaagtaaacaagatcagaactgatttgctgggtcacttaactctgtgagaaatatactaactaccatacaaacaataagtaagtaaaacaaggaatcaaagaccaggtttatgggctagctttcat

SEQ ID NO: 177155 - DNA, 401 bp, Homo sapiens
gggcagctagccatgggtgtctaaggagtggtgcctgaggcccctgaagctctttgggcgtctgggaagaagrggtgtaggctcattatcccagtgccctaagcgtggtcagagactatctttgagctaaccactaagactggccttttccactcacattccaggagtcaggacgctgaaatccacacctcattactcacaccctgcagcccgcatggaggaactggctcagggcccttgatgggacagtatggcaccttcagtgggcaacacacattctcaaggtactcaacatacctcgacagctgacctctcacctgtaacatcaggctcatggtgtctcctgtctctgtctacagttacctcccccactggaatgccacttcttaaaggcatggggc

SEQ ID NO: 177156 - DNA, 600 bp, Homo sapiens
tagtagtttcctgtgaatgggtgggtgggaggcaaatttctcgagaccttgcatatctaaggatatttttatattttggcttcacatagaactctaggttaggaatacatttccttccaaattttaaggacattgctccactgtcttcttgcttccaggattactgttgagacgtttaaagctgttctgatttgtagaaagtttgtagactttctctatcctaccaatgtcctgaaatttcccttgacctgccctgatggaaatctggacgtgtggcttatctgctgtgctaggtaagcacttgtggggtcttttcaatctcgagattcatgtcttttacttttaggaagttttcttctcttattttattgacatttcctccctaccatgttccctctgtttctagaatgcctatgatttgagtagtagattattagagctcttgcactagtcctccaattttcctgtcatttgtctcctggtttcagtgatttattgcactgtatattcttgagagatttcctcaactttggctcwcaaacctcctactgaatttgttatttctgctcttgtgtttttgttctccaagacctcttcttg

SEQ ID NO: 177157 - DNA, 529 bp, Homo sapiens
tatacatgtgtaacaaaccttcacattgtgcacatgtaccctaagacttaaagtataataataataaaaaaataccatgatatcttttaaatgtctctagaacctgtactgataacccactttcttagctgatattctgtttctctctctgtgtgtgtgtgtgtgtgtgtgtgtgtgtgtgtstgtgtgtgtgtctgtctgtgtctctcttcttagtaggggtttatacattttatttacttatttaaaggcctaacttttatctttgctcattttctccactgtgtattttttttcctatttgatttctgctttcatctttactatttctttccttccactttcttgaggtttaatttgctgttgtttatctatcttcctgagagggaagcttagattcattaattttccgtatatctttttctctaagaattgcatttaaggctataaatgtttctgtaaccacagcctttagatgcagctcacaattttcattatcccactctaaatatttgctgttgtaatgttt

SEQ ID NO: 177158 - DNA, 511 bp, Homo sapiens
ttaaaatcacatcagtcacaagagcccactgttttgtctcccagggtctgggctgctgatcagtttcctttgttaaccagatccggtttgtttatcaacatcaggctgtagaatttgcaggtcaggccacaagggtgtgaaccttctgccatcccctctccgacagttgagggaaraggagaaactataaataatgttcctctgccctccaggaacttccaggctaacatacaggctgggcatacaaaataagtccgcacctgtgtgcccgccaacgctgcagtggcagaggggcatgcggtccacagcccctgcagagaggaagtgtctggggcagaccttgccaagcagccaagagtcttctccattttccccttgctggttttcttctcacttcccctttgttagaattgtcctcttctctgcagatccttgctggggaggatagacagaggcagtggggtagggaggcaggaaaggtgggatttgaaaacaccaggctgagccagag

SEQ ID NO: 177159 - DNA, 373 bp, Homo sapiens
aactgcatccctgaattattacagtctaccttaaggttgcactgttacttcttcttgaacaatgcaagaaccttcaatgcaagaaacttacaacagtttaactcaactttatctgctcttgccctttgtgctattattgtcatrtattggtactcatacatatattatgagctgaagatacattgtcattattgctggtttaagtaatcaatattgttttatgtttacctacatacttattgtcttgggtactattcactccttcctgtggtctgttctctctgggctcattttccttcaccatgaaggacagactctcttttgatttattgtgatactggtctgctggtgatgattctgtatgtggtttttt

SEQ ID NO: 177160 - DNA, 373 bp, Homo sapiens
aactgcatccctgaattattacagtctaccttaaggttgcactgttacttcttcttgaacaatgcaagaaccttcaatgcaagaaacttacaacagtttaactcaactttatctgctcttgccctttgtgctattattgtcatatattggtactcatacatatattatgagctgaagatacattgtcattattgctggtttaagtaatcaatattgttttatgtttacctacatacttaytgtcttgggtactattcactccttcctgtggtctgttctctctgggctcattttccttcaccatgaaggacagactctcttttgatttattgtgatactggtctgctggtgatgattctgtatgtggtttttt

SEQ ID NO: 177161 - DNA, 383 bp, Homo sapiens
acccatggtgctataaaaacaaaaatttaygtttaatttacttgaagttccagacatataaaaagcatttaataaatgacattatgtaaaaaatatcctgcctatgagttagcaaccaggaacacagcggatagatagttctcaacaaatatttatcgaatgatggaatgaatcttcaccccacaacacacacacacacacacacacactctctctctctctctctctcaacttgccttggcagaagaacctaatatctgaagggatttcagaatcttctgtcacatacatcgagcctgcttttgtgtctttgttccagctacctcctccttctctggtttgacagctagtggctctggggaattagacaatgggatagaaag

SEQ ID NO: 177162 - DNA, 321 bp, Homo sapiens
cttaatttatttactactattctgccagagtaatgttttaagtttgattggatttttactacaataaaagtcttctactgcttcccaatgcttgaaaagtaagacctaatatggccattcaaaagcttttgtaatttgattattatgtaactgtaactgtgagttcatcttgtacatatgctctctgacaaacagaaacctggcgytgcagctttatttatttattgttttctgagctgctttccaatgtttctttgcactttaataatactgttttgttgcataaaataaaactgaaccttcagtaaactataactgtaa

SEQ ID NO: 177163 - DNA, 564 bp, Homo sapiens
ctctcttccccaaacctatatattatattcttaatcttcaatctattgttccctagacaaattttagaatataatgaactatatgtgaagcaaaggtttttttaataataaaatgctaaaaatttgtaactcatcaaaactaacaaaaaaaccctttaytttttaaagacaagtaaagaaatgatacaagttagaagcatctcattaaacttaattctgaggttagacatgtgttataatagttacttttataatcatctttatgattccataggcaaaattctctaattcaatgagaactaagagaacagtctaagatgttgcatatttaaatgtaaatgtgaaacaaaagaggcacactgtcttagtatgtttggactataacaaaacaccataagctgactgccttataaacaaaaaaaaatttatttctcacaattctggaggctaggaagtccaaggtcaaggatccagcagatgtggtgtctaggtgagagcctgcttctttgttaatcactgtctatgtctttcctcctgtggtagaaggggcaaggcagtcctctg

SEQ ID NO: 177164 - DNA, 459 bp, Homo sapiens
tacagggaagagatcttactgtgtggacatctcacgacgtgaatggcatacttactgctaaaggagacttgtgtcagagaaccgtgaggaaagtaactaaaatcgtaaatccccatagccctcccttatcatatttttctctttaccattctcttacctgctttcactctcacttcactcactccatgctgytgtatgaccagtagctccccttaccacgagtttcttggagaatgcagcttcctggaaatattgattccccatcatataggagtttatctaagggaaatcacaccttcactgcccacacccatatgccctacaactgctataacgctaccactctttgcatgcatgcaaatactaattattgttcatggaaaatgattaatccttgttgtcctggaggacttggagccactgtctgttggacttacttcacccctaccagtatgtctg

SEQ ID NO: 177165 - DNA, 445 bp, Homo sapiens
gtgggacttggcaagctgtactagggttaattatgttgcaacttttcattgttggaaagtggtaaataggagcacttttttttctgtctaaaacttttatatttgttggggccagaagaaaatattggctgtaagtagacagtgttcttgttttgggaaagtaaaactgtcattattttagtaaattgtagtattacaaaggactataaataataaatacctgtatttaaaaattgaacatatactaytatacaatcaattctctaattatcatggtttaaattatacactatagaatattgaagagactattttaaaagtattttactgtctcttgctgctggatttgtggcttctccttcaatttcaagtggtacagagttcactgtaactcaaaatatgtagtattaagaacctaataagctcaaaatatagtcattcatgc

SEQ ID NO: 177166 - DNA, 309 bp, Homo sapiens
gaattctctgattaagactcgttattttagtgggtctgtgaccttacaactgtttcacagcttgatttcccctccccttaggtaatacaggacattctagagtggctatagttggctaatttcctttcccccatgtcagctaaggctctggtaaatttttcktcttactgggaaagcctttgttatgactgatatactctgggcattttctcatccttgccccaacaaaaaagggtttttttgcctctttattataagaatgcagtggggttactgaattttaaaattattaaaatgtgagggctccct

SEQ ID NO: 177167 - DNA, 309 bp, Homo sapiens
gaattctctgattaagactcgttattttagtgggtctgtgaccttacaactgtttcacagcttgatttcccctccccttaggtaatacaggacattctagagtggctatagttggctaatttcctttcccccatgtcagctaaggctctggtaaatttttcgtcttactgggaaagcctttgttatgactgatatactctgggcattttctcatmcttgccccaacaaaaaagggtttttttgcctctttattataagaatgcagtggggttactgaattttaaaattattaaaatgtgagggctccct

SEQ ID NO: 177168 - DNA, 309 bp, Homo sapiens
gaattctctgattaagactcgttattttagtgggtctgtgaccttacaactgtttcacagcttgatttcccctccccttaggtaatacaggacattctagagtggctatagttggctaatttcctttcccccatgtcagctaaggctctggtaaatttttcgtcttactgggaaagcctttgttatgactgatatactctgggcattttctcatccttgccccaacaaaaaagggtttttttgcctctttattataagaatgcagtggggttactgrattttaaaattattaaaatgtgagggctccct

SEQ ID NO: 177169 - DNA, 315 bp, Homo sapiens
gcacaatattatgcttgtgaggtttatttgtttttatgtatagttctagttcgttggctttcactattatatagyattaagtagcatacatatgctaaaatgtgtttaactcctcttgataaactgtaactttaagcttctttgtcctttcatttttttatttgtgtatacatatattcttttgctatttatgaacagtgctgctctaatactcttgcacatatcttcttgtatgcatttatgggttctcttgtttatgtaaccactcaacaagttcatcttgcctgctgcctagacagtgccaatttacaagac

SEQ ID NO: 177170 - DNA, 409 bp, Homo sapiens
ttttttatttgtgtatacatatattcttttgctatttatgaacagtgctgctctaatactcttgcacatatcttcttgtatgcatttatgggttctcttgtttatgtaaccactcaacaagttcatcttgcctgctgcctagacagwgccaatttacaagacagcagaattgcaatagagaaagagtaattcatgcaaagctggctgtgtgggagactggagttttactattactcaaatcagtctccctgagaatttggggacagagtttctaaagataatttggtgggtgtggtgccagtgagtcagagtgctgattggttggattggagatgaaatcatagggaaatcaatctgtcctcttgcgctgagtcagttcctgggtggggaccacaggggagtcactggt

SEQ ID NO: 177171 - DNA, 505 bp, Homo sapiens
tataaggctgcctttaccatcctacttaaacagagttgtctgaatactggatattgctgtatccacaggtgtgtgctccatgtggacactgactgctaagaagacagaaaagacagaaaagaaaaccaaacaacaacaacaacaaataggacacagcattgaatattttagtcaaattcttctgggactgaagtatccagataagcacttttatgtttctcttcctttttaggaatagatgttgatttaagtacactagacattcaattggataaatggaaaggagaaactatcartcccattattgactctaatgaatgttagattaattaatgttgaagaaaataaatacaaaacgtgttagaagttttagaatgcattttgaaaatcttcctggaaatcattaaataaaaatagtaggggtctttggtaaaggaaaatgttttcgtatacacagacacatgcattttctagctatctgcttagctcatgtaagagaataaat

SEQ ID NO: 177172 - DNA, 609 bp, Homo sapiens
gtgcacacttgatatggtgtgatgaaaatcttacttctgtgatgaaattttacttctgtcatctttttctccaagcctcctaaccctaatataaacatgaaaaaaagcacaaaagaaattccaatagagagtcatattacaaaatattcaaccagtacgcctcaaaattgtcaaagtcattaaaaaacaaggatgttcccyttctctcattcttgcaaataaatagaaaaaggaaagtctgagaaactgtcatagcccagaggactctaaagaaatgtgataactatatgtaatgtaatatcctgaacgtgaccctggaacagaaaaaggaacattaggtaaaaactaagataatctgaaaaaagtatcaattttcattaatgataatgtatcaaaatttttcatttattgtaataaaataccatatgaatgtaaaataataatatcaaaaactaggttcaggatatatagaaactctgtgtactatcttctcactttttctgtaaatctaaaagtgttataaaatctgtttaaagtaaatttaaaaatgagaaaaagattccttgcaaacattaatttttaaaaagcaagagtgactatactatatta

SEQ ID NO: 177173 - DNA, 609 bp, Homo sapiens
gtgcacacttgatatggtgtgatgaaaatcttacttctgtgatgaaattttacttctgtcatctttttctccaagcctcctaaccctaatataaacatgaaaaaaagcacaaaagaaattccaatagagagtcatattacaaaatattcaaccagtacgcctcaaaattgtcaaagtcattaaaaaacaaggatgttccccttcyctcattcttgcaaataaatagaaaaaggaaagtctgagaaactgtcatagcccagaggactctaaagaaatgtgataactatatgtaatgtaatatcctgaacgtgaccctggaacagaaaaaggaacattaggtaaaaactaagataatctgaaaaaagtatcaattttcattaatgataatgtatcaaaatttttcatttattgtaataaaataccatatgaatgtaaaataataatatcaaaaactaggttcaggatatatagaaactctgtgtactatcttctcactttttctgtaaatctaaaagtgttataaaatctgtttaaagtaaatttaaaaatgagaaaaagattccttgcaaacattaatttttaaaaagcaagagtgactatactatatta

SEQ ID NO: 177174 - DNA, 434 bp, Homo sapiens
aaactgaatggtaatggtttatgatgagacagattcaactgaaataacaatcagtaattaatctaaagtataaatatgtacctgttacatactaaatactatgtcagtgagctactttacagttccaaatggctggaaccaaaatgacttaagtacaatggaaaaakgattcactattcaataaatggtactgggatagctggccagcactatgcagaagaatgaaactggactactacttttcaccatatataaaaattaactcaagatggattagagatttcaatgtaagatttcaaactataagaaagctagaagaaaacctaggaaataccagtctggatatgtgctttgggaaagaatttttgactaacacctgaaaagcaattgcaacaaaaacaaaaatttacaagtaggacataattaaagtaagc

SEQ ID NO: 177175 - DNA, 588 bp, Homo sapiens
tgaggcatatagcctcttattcatctacataaaaatgacgttataaagatattaaataataatcccaatttcttagatatgaatatggtttttgagtgtctggatttttattcagttatagctgcatattggaaaatgttttaaaagggaacacattttgaatgcgtatatgaatctgagcagcagtatctcagaatggaatgtttttccctagagaaatatgttaggaatacgcttcttccaaatttttctctttgattatatagagtttttctctccaaaatattggttttctcttatctaaccaatagaatggtctgccttttttctcaaacgaatggcacagagatgtgaaaaatgagagatagtatgtggtatagttatattagaaggcgacccaggaaacgccttagcaactgtcctaaacacattccaaacaaagcctcataacccaccattaattgcaataaaagtagttgccctctatcctaaacagtgaagagactattgaaatatagcctaagtrgttgaataggaatattttctaggctaatatgccagaggggaaaagtaaaggattcttaatgg

SEQ ID NO: 177176 - DNA, 526 bp, Homo sapiens
cttttgccttggggggaacatttctcatctgaaaaaagaacatagggatgccagcacccctagtcattttccgatgagcattagtcatacagcgtcctctatggccctaakgcttattcctttccaggtgtgtaaacacccatggacctctgcttatcggattagtcatgctcaccaatgtagcagtcctgcaccccttttcccgcctttctttaccacaaagaaaggggtctgggctgctggattctagtggtcctttaccagcatgcccaatattgcctttgtgctcaggggtgagtcctagagctgggctgggttcctgagtatttcataacaaccccagctgccccatcaagatgcattcccataaacaacagttctcatgcaaattcatttcagagaggctgtaggtaaccttttgagtcaggattgagatagtcttttttgattctgtaagtattttaggcttggctgagtgcaaacagctcgctcctttgaggagaccaattaggcaatttttctaact

SEQ ID NO: 177177 - DNA, 526 bp, Homo sapiens
cttttgccttggggggaacatttctcatctgaaaaaagaacatagggatgccagcacccctagtcattttccgatgagcattagtcatacagcgtcctctatggccctaatgcttattcctttccaggtgtgtaaacacccatggacctctgcttatcggattagtcatgctyaccaatgtagcagtcctgcaccccttttcccgcctttctttaccacaaagaaaggggtctgggctgctggattctagtggtcctttaccagcatgcccaatattgcctttgtgctcaggggtgagtcctagagctgggctgggttcctgagtatttcataacaaccccagctgccccatcaagatgcattcccataaacaacagttctcatgcaaattcatttcagagaggctgtaggtaaccttttgagtcaggattgagatagtcttttttgattctgtaagtattttaggcttggctgagtgcaaacagctcgctcctttgaggagaccaattaggcaatttttctaact

SEQ ID NO: 177178 - DNA, 512 bp, Homo sapiens
aggaggcaaagaatttagagggcaaggaaagtgtcagtggtcaatcaaagtctttagaaacctgagattaaagggaatgagtgcctgcttcacctctggacgtttgggaagcagcagtttcactgtggtcccagtgttattatcacaggaagcagtaaagcaaagtgcctcctggaaaagctgtttgaaacgctgaggacaggaggaggaggggttgtcccactgaataccctgggagcacagagtagttttagagaacaatcaaacttccccaatttttggaggaaagtataggaagtaatttaaaaggaagaaagtgcttatagcctagaggcatctcacaattatggcaagggaaacaaccaagtccatctgggccatatacccagaggctgatagtgaacagaagtatctcaatgcatgctaactggagttgtatgaatrgctaataattaaacttcttgccagcataatgccataaagctatcttagaccaacagaccttaaaaacc

SEQ ID NO: 177179 - DNA, 554 bp, Homo sapiens
aagcttgtttttaaagcagaagcagaaatttttacaaggatcctatttagatacaacagcatggctattaagaaagcaatctaacatcatatttagcacttgtgattaagtaacaaagaactgattggtccctgcaataatatacaggcataggttgtgtcaggattaaaaaattatattttcaatcatgttacagcaaaggtaagatgacttacaccaaactatagcaacagcttcttataacataaaattaattaacttgaaaagatctgtgattagagttgacacatttaaattattttgtttccctttatgtaaatcttgcaactggaaaaatatttttaattaaaaaaaacctaagaaaatacataaaatgctaaaataaatragccccataattaattacctcatttgcctttggcaattatgctaactataagcacaggttgagtatttcttatataaaatatttgagatcagattctagattttggatttttttcagattttgaaatatttgcatatatagtccataatgtgatatcttggggatg

SEQ ID NO: 177180 - DNA, 554 bp, Homo sapiens
aagcttgtttttaaagcagaagcagaaatttttacaaggatcctatttagatacaacagcatggctattaagaaagcaatctaacatcatatttagcacttgtgattaagtaacaaagaactgattggtccctgcaataatatacaggcataggttgtgtcaggattaaaaaattatattttcaatcatgttacagcaaaggtaagatgacttacaccaaactatagcaacagcttcttataacataaaattaattaacttgaaaagatctgtgattagagttgacacatttaaattattttgtttccctttatgtaaatcttgcaactggaaaaatatttttaattaaaaaaaacctaagaaaatacataaaatgctaaaataaataagccccatawttaattacctcatttgcctttggcaattatgctaactataagcacaggttgagtatttcttatataaaatatttgagatcagattctagattttggatttttttcagattttgaaatatttgcatatatagtccataatgtgatatcttggggatg

SEQ ID NO: 177181 - DNA, 554 bp, Homo sapiens
aagcttgtttttaaagcagaagcagaaatttttacaaggatcctatttagatacaacagcatggctattaagaaagcaatctaacatcatatttagcacttgtgattaagtaacaaagaactgattggtccctgcaataatatacaggcataggttgtgtcaggattaaaaaattatattttcaatcatgttacagcaaaggtaagatgacttacaccaaactatagcaacagcttcttataacataaaattaattaacttgaaaagatctgtgattagagttgacacatttaaattattttgtttccctttatgtaaatcttgcaactggaaaaatatttttaattaaaaaaaacctaagaaaatacataaaatgctaaaataaataagccccataattaattacctcatttgcctttggcaattatgctaactataagcacaggttgagtatttcttatataaartatttgagatcagattctagattttggatttttttcagattttgaaatatttgcatatatagtccataatgtgatatcttggggatg

SEQ ID NO: 177182 - DNA, 283 bp, Homo sapiens
ttaactgatgaattctaccaaatatttaagaaaggaatgataccagtcctccacaacattttctacaaaacagaagtagaaggaaaatttccaaataattcgatgagagtgacatatcatactgccaagataaataaagatattataagaaaagaaygctgaaatccaatatctcccatgaattctgatgcaaaatccacagcaaaatattagtaaatctcatctgaatatgtatataaagtattatataccacaaatataaaatttactcaacatatacaag

SEQ ID NO: 177183 - DNA, 523 bp, Homo sapiens
ctctggtaagcataacttctactctccatgttcatgagtacagttcttttgatttttagatctcacaaataagtgagaacagatgtttgyctttctgtgcctggcttatttcacttaacataatgatctccagttccatccatgttgttgcaaataacagagtcttacacattttattgctgaatagtagtctattgtgtatatgtaccacattttctttatccgttcatctgttgatggacactgaggttgcttccaaatcttagttgttgaaaacagtgctgcaacaaacataagagtgcagatatctcttcgatatactgatttcctttcttttgggtatatacccagcagtgagattgctaaatcacatggtagctcgatttttagttttctgaggaacctccaaactcttctccatattggttttactaatttatgttcccaaaaacagtgaacacatccacatcctcaccagcatttttattgcctgccttttggatacaagccattttcactggga

SEQ ID NO: 177184 - DNA, 523 bp, Homo sapiens
ctctggtaagcataacttctactctccatgttcatgagtacagttcttttgatttttagatctcacaaataagtgagaacagatgtttgtctttctgtgcctggcttatttcacttaacataatgatctccagttccatccatgttgttgcaaataacagagtcttacwcattttattgctgaatagtagtctattgtgtatatgtaccacattttctttatccgttcatctgttgatggacactgaggttgcttccaaatcttagttgttgaaaacagtgctgcaacaaacataagagtgcagatatctcttcgatatactgatttcctttcttttgggtatatacccagcagtgagattgctaaatcacatggtagctcgatttttagttttctgaggaacctccaaactcttctccatattggttttactaatttatgttcccaaaaacagtgaacacatccacatcctcaccagcatttttattgcctgccttttggatacaagccattttcactggga

SEQ ID NO: 177185 - DNA, 604 bp, Homo sapiens
gatttttgtatatgatgagacatggggtctaatttcatcattctgcacatggatatccattttttccagcaccacttattgaagagaccatccttcacccagtgtatgttcttgacatcattgtagaaaatgagttcactataggtgtatggatttgtttctaggttccctagcctgttctattggtttatgtgtttgtttaaattccagtaccatgctgttttggttactatagatctgtagtataatttgaagtcacataatgtgattcctccagttttttattgttgttgttgttgttcmttttgcttaggatagctttggttattctgaatcttttgcaattccacataaatttaaagattttttctatttatataaagaatatcattgatattttaaaaaggattacattgaatctgtagattgctttgtgtagtgtgagcattttcctaatattgattctttcaatccatgaacatggaatatttttccatttttttactgtcctcaatttctttcatcaatgttttataattttcattatagagatctttcaatttctttgattaagttaattcctaggtatttaattttatgtatg

SEQ ID NO: 177186 - DNA, 474 bp, Homo sapiens
gtgaccttctttgtctcttatagcttttgctttgaaatctattttgtctgatgtaagtatagtgactcctgctcttttttggtttccactggcttgaaataccttttttcatccctttattttcagtctatatatgtttttatatgtgaaatgtttcttgtatgcaacaggtcagtggttttcttcatctattcatcaagtctgtgtcttttgactgaagagttactccattaacatttaatattagtattgataggtaaggwtttattcctgccattttgttacttgttttctggttgttttgtggtcttctcttccttttgtctttccttcctgtcttcttctagtgaaggtgattttctctggtgctatgatctagtttcttgctttttattttttgtgtctccatgattttggtttgaggctaccataaggcttgcaaatattaccttataactcattaatttaacctgg

SEQ ID NO: 177187 - DNA, 514 bp, Homo sapiens
tttgttacttgttttctggttgttttgtggtcttctcttccttttgtctttccttcctgtcttcttctagtgaaggtgattttctctggtgctatgatctagtttcttgctttttattttttgtgtctccatgattttggtttgaggctaccataaggcttgcaaatattaccttataactcattaatttaacctggttacagcttaacactgyttgcataaacaaacaaaccataaacaagcaaaaacaaagcaaataaaaattttataccttaacttcatccccctgcttttaatctttttgttcttttatttaattttattgtagttactatgtcttgaaaagttgttgaagttattatttttgattggtttattgtttagtctttctatttaggataagagtagtttacacaccacatttagagtgttctaatattctgtgcttttcagtgtacctactattgacagtgcattttgtaccttcaggtgattacatatggctcatgaacat

SEQ ID NO: 177188 - DNA, 498 bp, Homo sapiens
gcatgcttacttttttttaattctttcttttgtcttctttgactgcrtatttttgaatagcctgtcttcaagctcactaattctttcttctacttcatcaactctgtaattaaaagactctgatgcattgtttcatatgccaattgtatttttcagccccagaatttctttttgagtttttaaaagtatttcaatctctttgataagtttatctgacagaattctgaatttcttttctgtattatcttgaatttctttgagtttcctcaatacagttgttttaaattatccatctgaaagatgacaaatctctgattttcccaaattggtctctagtgtcttatttagttcactgatgaggtcatattttcctggatggtgttgatgctagtatatgttctttgctgtctgggcattgaagttttcacctttcacagtctgagcttatttgtactcattcttgggaatgcttttccagtatttgaaaggaattgggtg

SEQ ID NO: 177189 - DNA, 498 bp, Homo sapiens
gcatgcttacttttttttaattctttcttttgtcttctttgactgcatatttttgaatagcctgtcttcaagctcactaattctttcttctacttcatcaactctgtaattaaaagactctgatgcattgtttcrtatgccaattgtatttttcagccccagaatttctttttgagtttttaaaagtatttcaatctctttgataagtttatctgacagaattctgaatttcttttctgtattatcttgaatttctttgagtttcctcaatacagttgttttaaattatccatctgaaagatgacaaatctctgattttcccaaattggtctctagtgtcttatttagttcactgatgaggtcatattttcctggatggtgttgatgctagtatatgttctttgctgtctgggcattgaagttttcacctttcacagtctgagcttatttgtactcattcttgggaatgcttttccagtatttgaaaggaattgggtg

SEQ ID NO: 177190 - DNA, 437 bp, Homo sapiens
aattttgccttttcagaatgtcagataattggaatcatacaatatatagccctttcagattgggatcttacacttagcaatataaatttaagattaatctattatgttgcatggattgatagataattctttttatttctgaatagtagtayagtgtatggatataacaagtgtgtttatcaatttacctgttgaaagatatttttgttgtttacagattttggtggttatgaataaagcttcattcaattgcaggttttggtgtggacataaaccttcaaaccagttagagacttacccaggagtgcaattgctggatcatataagattatgtttaagtttataagaaccaccaaattatcttccaatgtggctatgccatttgcatttcaccagcaatgaggaacagttttgttgcttctaattctcaccagcaa

SEQ ID NO: 177191 - DNA, 437 bp, Homo sapiens
aattttgccttttcagaatgtcagataattggaatcatacaatatatagccctttcagattgggatcttacacttagcaatataaatttaagattaatctattatgttgcatggattgatagataattctttttatttctgaatagtagtacagtgtatggatataacaagtgtgtttatcaatttacctgttgaaagatatttttgttrtttacagattttggtggttatgaataaagcttcattcaattgcaggttttggtgtggacataaaccttcaaaccagttagagacttacccaggagtgcaattgctggatcatataagattatgtttaagtttataagaaccaccaaattatcttccaatgtggctatgccatttgcatttcaccagcaatgaggaacagttttgttgcttctaattctcaccagcaa

SEQ ID NO: 177192 - DNA, 520 bp, Homo sapiens
catagactacatttatcattatcatgtttttggtaaaaactcttcatttattcaaaagatttttattagcagataaaaactcttcatttttataagttttagatttatggaaaaatgaaacaactgatacagagttcctatattcccctccccctgcagttctcyccatgattaacatcttacgtaatgtttgttatgaaaaatttatttgtaacaagttatttgttacaaataataaaccagtattgatttattaataacattagctaacatatatcatttattcagattgccttatttaatgttctttttctaatccaggattttattcaggttaccatattgaatttaattgtcatatgtccttaggcgcctcttggctatgacaatttctctaactttcctggtttttaataacgctgacagttttgagagtagaggtatattataacatgtccttccattggaatttattttatgtttttcttatgattagaccggggttattggttggtgggag

SEQ ID NO: 177193 - DNA, 520 bp, Homo sapiens
catagactacatttatcattatcatgtttttggtaaaaactcttcatttattcaaaagatttttattagcagataaaaactcttcatttttataagttttagatttatggaaaaatgaaacaactgatacagagttcctatattcccctccccctgcagttctctccatgattaacatcttacgtaatgtttgttatgaaaaatttatttgtaacaagttatttgttacaaataataaaccagtattgatwtattaataacattagctaacatatatcatttattcagattgccttatttaatgttctttttctaatccaggattttattcaggttaccatattgaatttaattgtcatatgtccttaggcgcctcttggctatgacaatttctctaactttcctggtttttaataacgctgacagttttgagagtagaggtatattataacatgtccttccattggaatttattttatgtttttcttatgattagaccggggttattggttggtgggag

SEQ ID NO: 177194 - DNA, 520 bp, Homo sapiens
catagactacatttatcattatcatgtttttggtaaaaactcttcatttattcaaaagatttttattagcagataaaaactcttcatttttataagttttagatttatggaaaaatgaaacaactgatacagagttcctatattcccctccccctgcagttctctccatgattaacatcttacgtaatgtttgttatgaaaaatttatttgtaacaagttatttgttacaaataataaaccagtattgatttattaataacattagctaacatatatcatttattcagattgccttatttaatgttctttttctaatccaggatttyattcaggttaccatattgaatttaattgtcatatgtccttaggcgcctcttggctatgacaatttctctaactttcctggtttttaataacgctgacagttttgagagtagaggtatattataacatgtccttccattggaatttattttatgtttttcttatgattagaccggggttattggttggtgggag

SEQ ID NO: 177195 - DNA, 429 bp, Homo sapiens
gaattcagcggatgtaaattctaatcctagttcaagcacccaaagtgtctgagcattttcaatgaatcattgttcattcattcattcattcaataattgttgttcaccaaacatgctaagtaccggaaatacaaagctgaataaaaatagttatctgtagatcatatgaacatgagtgcatagatagatatagatggagaggaaggcagtatctgatcctgggccacacagggaaggttatatgcctgtctttctccctacagacacaaggtgttaatctactccatcccctgcctcttgcttctggctgtgagttttaagayataatgtaagatgacagctttttctaacatgtgagaattaagtggtataaaagatattgttgtagtctattcaggctgctatagcaaaataccatagatcaggtgg

SEQ ID NO: 177196 - DNA, 575 bp, Homo sapiens
tgactgattataatcaaaatcattaactgtcatttacttttcctgaaagctctttatttaatataaaatctagacataaagaaactaatttatcctcttaagtgctataaacattttctctcatttcattttttttttagttgtcaattttgatagtgttcaactagaagtcacgaataggcaatccactaacataggttcacagttctcatatatttttgaaacattgaaatcaacctgtccccaactccactccagaggctaatgtcraaatacctgctgaaagcaatgccaagccaatatctctgaaatataaagttggctattataattctcttcatgattatatttttatgtatatatgagagacagagcaaacattatacatgaaaaataatacattttacttaaaaacatgttaaggtctcctgggtgtggtggctcatgcctgtaatcccagcactttgggaggccgaggcagatggatcacgaggtcaggagatcgagaccatcctggctaatatggtgaaaccctgtctctactaaaaacacaaaaaaattagccgagaatggtg

SEQ ID NO: 177197 - DNA, 391 bp, Homo sapiens
tacatgctgaacatgcaaatataggaaataccactggcctcacggttctagtcttgtaggggactgggctatgcrgaaacaagctgtattgtgatatatgcaataatgcaagtttgtacatattaccttctgagcaaagcagcaaagactgttctttttccataagttgttgactttctgtcatgtgaccctggtaagtaaccatgatcgaactgatcaagaatctgtaacttggccaaaggtaaccacaaagttgtgcaaaactacaggatacatagagtaaatattttgggggtttcattattacagatgacgttgaggagagaaaagttttacatttttacaatcttaggtttaccaatgggctctgggaggtctaatagcagaattc

SEQ ID NO: 177198 - DNA, 428 bp, Homo sapiens
tttcctgggctagattttgcaggtataatttttgacaagaagatttgattcttttgtcaatttttaaagtcaattacaaatttttctgtgtaaagctttcacctttgtcagttttattttgtgttatttctataaagtgcaattttaaaagagttcacttttgtagttttgtgrcttaccaacacaatgagattcttcagtcagttttttgtcaatatcaaagttaacatatatcattttagttattatcagtttgatcctgtgtagattcttttcactacatcaattttttttctagtgacccgttgaaaatatacttgatataaaaatatcaaggtcataacatcatgttttcatccaaagctactctgtttaaatatatttaaaaagtagaatcgacctgtctttttagaagcatgggttcacag

SEQ ID NO: 177199 - DNA, 428 bp, Homo sapiens
tttcctgggctagattttgcaggtataatttttgacaagaagatttgattcttttgtcaatttttaaagtcaattacaaatttttctgtgtaaagctttcacctttgtcagttttattttgtgttatttctataaagtgcaattttaaaagagttcacttttgtagttttgtggcttaccaacacaatgagattcttcagtcagttttttgtcaatatcaaagttaacatatatcattttagttattatcagtttgatcctgtgtagattcttttyactacatcaattttttttctagtgacccgttgaaaatatacttgatataaaaatatcaaggtcataacatcatgttttcatccaaagctactctgtttaaatatatttaaaaagtagaatcgacctgtctttttagaagcatgggttcacag

SEQ ID NO: 177200 - DNA, 428 bp, Homo sapiens
tttcctgggctagattttgcaggtataatttttgacaagaagatttgattcttttgtcaatttttaaagtcaattacaaatttttctgtgtaaagctttcacctttgtcagttttattttgtgttatttctataaagtgcaattttaaaagagttcacttttgtagttttgtggcttaccaacacaatgagattcttcagtcagttttttgtcaatatcaaagttaacatatatcattttagttattatcagtttgatcctgtgtagattcttttcactacatcaattttttttctagtgacccgttgaaaatatacttgatrtaaaaatatcaaggtcataacatcatgttttcatccaaagctactctgtttaaatatatttaaaaagtagaatcgacctgtctttttagaagcatgggttcacag

SEQ ID NO: 177201 - DNA, 428 bp, Homo sapiens
tttcctgggctagattttgcaggtataatttttgacaagaagatttgattcttttgtcaatttttaaagtcaattacaaatttttctgtgtaaagctttcacctttgtcagttttattttgtgttatttctataaagtgcaattttaaaagagttcacttttgtagttttgtggcttaccaacacaatgagattcttcagtcagttttttgtcaatatcaaagttaacatatatcattttagttattatcagtttgatcctgtgtagattcttttcactacatcaattttttttctagtgacccgttgaaaatatacttgatataaraatatcaaggtcataacatcatgttttcatccaaagctactctgtttaaatatatttaaaaagtagaatcgacctgtctttttagaagcatgggttcacag

SEQ ID NO: 177202 - DNA, 546 bp, Homo sapiens
agatctttacttgagttcatatggctgtgatagtgtttcactgctgtgactactggaagcttccttaggtattccattgtgtatggaaacggaagttgccaatcacattaaattaatttctgcctcaggaaacatgagagatttaaaatcaataaatgatttttcagtgacamtgtcagggaaaatcaaatcttctagaaatttaagtcagaattaaaaatgtgttcttaaaatgtatttatttttatgtacttggctttcatatgatagtttattttaaaaaggctaccgtactttgctatgtttatacttaccagtgtcattaatctgtaaacagtgcagtgccactgacatattctttgaaccattagtgtatggaaggcctcgggagagatggtactggagatacagaaggaacagggtttttttcccccacctcaaaatagaaagggaactctgtcatatgtctttttgtatttctttcaggatgtcgctctgtgctaagcatttaattgatcttcagtagagaaacgcctaaggaactaa

SEQ ID NO: 177203 - DNA, 546 bp, Homo sapiens
agatctttacttgagttcatatggctgtgatagtgtttcactgctgtgactactggaagcttccttaggtattccattgtgtatggaaacggaagttgccaatcacattaaattaatttctgcctcaggaaacatgagagatttaaaatcaataaatgatttttcagtgacactgtcagggaaaatcaaatcttctagaaatttaagtcagaattaaaaatgtgttcttaaaatgtatttatttttatgtacttggctttcatatgatagtttattttaaaaaggctaccgtactttgctatgtttatacttaccartgtcattaatctgtaaacagtgcagtgccactgacatattctttgaaccattagtgtatggaaggcctcgggagagatggtactggagatacagaaggaacagggtttttttcccccacctcaaaatagaaagggaactctgtcatatgtctttttgtatttctttcaggatgtcgctctgtgctaagcatttaattgatcttcagtagagaaacgcctaaggaactaa

SEQ ID NO: 177204 - DNA, 573 bp, Homo sapiens
taccactgtcttaaggatgctttcatcaccccaaaagaaacaatgcccattagcagtactgcttttttattgataatgccttctttatttattttgtaatgattataatagaatatttaaggatttattatctccgtttcccctttagagtgtcctggtttagacagtaaatggttattstgcttaatgcaagccaagttaaagaactatgggatagagcaagggcagataaactcccatccatgggcccaattcagcccagctggcatggctcttaggttttttaaggttgtaacaaaacaacaacaacaaagcagcatgtgtgacaggggccatatgtggcctgcacgcctacgatatttattatttcatccattatggaaaaattctgaccgcccttggtttagcatctgtggtaagtgtgttcgaaggccgtgtaagcacattttattatgagcatgtcttacttccaagttaagataaagatttggaaattaatgtatcctcattagtttcactgttataaatacaagagaaccctctatacctgaccacaggctgtagtctttaagc

SEQ ID NO: 177205 - DNA, 573 bp, Homo sapiens
taccactgtcttaaggatgctttcatcaccccaaaagaaacaatgcccattagcagtactgcttttttattgataatgccttctttatttattttgtaatgattataatagaatatttaaggatttattatctccgtttcccctttagagtgtcctggtttagacagtaaatggttattgtgcttaatgcaagccaagttaaagaactatgggatagagcaagggcagataaactcccatccatgggcccaattcagcccagctggcatggctcttaggttttttaaggttgtaacaaaacaacaacaacaaagcagcatgtgtgacaggggccatatgtggcctgcacgcctacgatatttattatttcatccattatggaaaaattctgaccgcccttggtttagcatctgtggtaagtgtgttcgaaggccgtgtaagcacattttatyatgagcatgtcttacttccaagttaagataaagatttggaaattaatgtatcctcattagtttcactgttataaatacaagagaaccctctatacctgaccacaggctgtagtctttaagc

SEQ ID NO: 177206 - DNA, 564 bp, Homo sapiens
taaatactaataccaatttatattgaatggctgtctagtaaatgatttttttggggggarataacttcataatatcttactttgtataattaatatcttaggtttatataaattgacttttaactatgaaagagtgtgatagcattttcgaaaatttcactgtttaaatttttaattctcttgtaggtatttctttaaagcattctctcttgtgggagaaactcaagaacgagagagagttttaatacacttctccaatagatatttttattgtaacccagataccattgcttcacaaggtaatctgatacaaatccttgaatttcttttttatatcaatggttattttccttattatgaaagttaaattttattgtgagaaattatgtatcttcagttacctagtgataactattaacacttctgtttacttcattctagtctatttaatatttaatgtcaaattggaattagagttttgtttttagctgcctttttatttcattgtgagcattttctcatgtcattaaatattctttaaaagcataatatttaaggacagca

SEQ ID NO: 177207 - DNA, 564 bp, Homo sapiens
taaatactaataccaatttatattgaatggctgtctagtaaatgatttttttggggggagataacttcataatatcttactttgtataattaatatcttaggtttatataaattgacttttaactatgaaagagtgtgatagcattttckaaaatttcactgtttaaatttttaattctcttgtaggtatttctttaaagcattctctcttgtgggagaaactcaagaacgagagagagttttaatacacttctccaatagatatttttattgtaacccagataccattgcttcacaaggtaatctgatacaaatccttgaatttcttttttatatcaatggttattttccttattatgaaagttaaattttattgtgagaaattatgtatcttcagttacctagtgataactattaacacttctgtttacttcattctagtctatttaatatttaatgtcaaattggaattagagttttgtttttagctgcctttttatttcattgtgagcattttctcatgtcattaaatattctttaaaagcataatatttaaggacagca

SEQ ID NO: 177208 - DNA, 564 bp, Homo sapiens
taaatactaataccaatttatattgaatggctgtctagtaaatgatttttttggggggagataacttcataatatcttactttgtataattaatatcttaggtttatataaattgacttttaactatgaaagagtgtgatagcattttcgaaaatttcactgtttaaatttttaattctcttgtaggtatttctttaaagcattctctcttgtgggagaaactcaagaacgagagagagttttaatacacttctccaatagatatttttattgtaacccagataccattgcttcacaaggtaatctgatacaaatccttgaatttcttytttatatcaatggttattttccttattatgaaagttaaattttattgtgagaaattatgtatcttcagttacctagtgataactattaacacttctgtttacttcattctagtctatttaatatttaatgtcaaattggaattagagttttgtttttagctgcctttttatttcattgtgagcattttctcatgtcattaaatattctttaaaagcataatatttaaggacagca

SEQ ID NO: 177209 - DNA, 494 bp, Homo sapiens
aataattagaccttctaatttagcgtaaattgaaaagatttttactgcatctgaaactgctattgtctactgtacttgtgtagagaattagcagagtgagagtaacgagaacaactaattgtartgtttggaaaggagaatcttaactctacttggagaacatttttatatgactttaacctaacagtaatgtgtctttggaggctcatatttacttgtctcccattgtaagcaatgcttgtctggatatccttgtactatgtatagatcactaattattgctgtagtgcaaagccctagaagccgatttgttgtatcaaaagacattgtttgaaggctttacatatctactaccaaactgtcctccagagaggtaagaacaacttatcaacagtggagtccagttctgtgcattgaggttctttctataaattattcttatccattttttgtttcttaaaacaggactaattgtacctagcacagtactgttt

SEQ ID NO: 177210 - DNA, 494 bp, Homo sapiens
aataattagaccttctaatttagcgtaaattgaaaagatttttactgcatctgaaactgctattgtctactgtacttgtgtagagaattagcagagtgagagtaacgagaacaactaattgtagtgtttggaaaggagaatcttaactctacttggagaacatttttatatgactttaacctaacagtaatgtgtctttggaggctcatatttacttgtctcccattgtaagcaatgcttgtctggatatcyttgtactatgtatagatcactaattattgctgtagtgcaaagccctagaagccgatttgttgtatcaaaagacattgtttgaaggctttacatatctactaccaaactgtcctccagagaggtaagaacaacttatcaacagtggagtccagttctgtgcattgaggttctttctataaattattcttatccattttttgtttcttaaaacaggactaattgtacctagcacagtactgttt

SEQ ID NO: 177211 - DNA, 588 bp, Homo sapiens
agccttgtaggaactgttaaagcaaactaaatatggccttaggactctatacttctttatttgagtccttgtggatgaactgcaacctaacttaataggtagacaagattgaaaacctaacttaggagtatgcacctgtaacaatacctgagtcttggccaatcccagtggytgtacttcaaccactcatacactgctgagtgttcgaactgtattcaaataaggtacgtgctgagctgtaaccaacccagttgtttctgtacctcactgctgatttctgtatgtcacttccctttgtttgtctataaatttgttctgaccacgaggcatccttggaatctctctgaatctgctgtgattctgggggctgcctgatttcagaatcattcattgctcaattaaactcctttaaatttaattgggctgaagcttttcttttaacagaacctatacctattgcttttcccagaaaattatttccttttcttatataatagcaaccaatgcatattttgatagagaataagaaatgaaaacaaagagagaattggaagaatattctattcaaagtgttccctagtggggtgc

SEQ ID NO: 177212 - DNA, 636 bp, Homo sapiens
tgacttcttcagggacgtagttctacagattatcattatctgtatcattttcatattatcgataactgtttattccccttaagttgatgacttgagtcagacttgccccaaaataaaaactttcactccttacacaatattgctctgtcttctaggccagagtgcaatggcctgacctgggctcactgtaacctctgcctcctgggttcaggcaattctcatgcaccaccacacccagctattttttttttatttttaatagagatgggtttttgccatgttggccaggctggtctttaattcctggcctcgtgtgatctgaactccttggcctccaaaagtgctggcattcaaggcatgagccactgcgctgacctggttttatttttgttaggaaasctagcaaagtgacaatggtttttgttactgggttggtttgttagagctaccccctgctgcccacctcttaatttccctccttcctctagttcctctgtatctgtgaatttctcaaatcctgctggtactttcatataaataaatgtcttttttaagattgctcaaatgattacttaggagtaaatgttgagcacactatgctcctgatagagtgatatttcttgacccttgaattta

SEQ ID NO: 177213 - DNA, 614 bp, Homo sapiens
gaattcgtgtattttagttcaatcatctctaaactccaatgaatttttttctctgtggttcctgaatcattatgaaaagtatggaggatatcacagcttccactttcagtgaaactgacagtgaccgcagtggaatttgtactcagaaagaattatgacaccatccgtaccacaattcyctctttcaaatgctatgctggctctcatgcagatacttagatcaagcagactgttaagtatagaattaaatatgcaccactctggcagtgttatcagagaaagagcatgtttgaaaaagacactggttaaaaattaatgataaaaccagttattagataaatatcaaaatggttagaaaaactcaaaatactttgcaatggtcttcaacttctactatcgtctctatgccttaaaataatattgaaaaactgcactatctctcactataggaagcttctccaaaactaggatttggaattgactctttttttgccccctccgcaccagtggaggtccttacaccttgcgatgtaccaaataaggttataggtgagggttatgacttttttttcttaagtggcaaagggcaattgttaagcagagatgcaaaagga

SEQ ID NO: 177214 - DNA, 474 bp, Homo sapiens
cttctttatgatgtgtgcattcatctcacagagttaaaacattcttttgattgagtagtcttgaaaccctcctttagtagaagttgcaagtggacatttggagcactttgatgcctatggtggaaaaggaaatatcttcacataaatactagataggaacattctgaaamacttctttgcaatgtgtttctccatctcctagagttgaacctttcttttgaaagacgagttctgaaatatgctgtttgtagaacccgcaagtggacatttcaagcgccttgagccctatggtggaaaaggaagtattttcacatgaaaactagacagaagaattctgagaaacttctttgtgaagagtgcgttcatcttacagagttgaacatttcttttgattaagaagtttggaaacacttttttttgtagaatctgcaagagggcatttggagtgctttgcagcctatggtagaaaaggaa

SEQ ID NO: 177215 - DNA, 474 bp, Homo sapiens
ttttcttttctaacatgggccrcaaagcgatcaaaatgtccacttgcagactctactaaaagagtgtttccaaactgctcaatcaaaagaaaggttcaactctgtgagattaaatcacacatcacaaagaagtttctcagaattcttttgtctagtttttatgtgaagatatttcattttcgaccataggcctcaaggtgctcgaaatgcccacttgcagatactacaaaaagaatatttcaaaactgctcaatcaaaagaaaggttcaactctgtgagattaaatcacacatcacaaagaagcttgtcagaattcttctatctagtttttatatgaagatattaccttttccaccttaggcctcaaagcgctccactaccaaattctacaaaaagagagtttcaaaactgctctatcaaaagaaaggtttatctctgtgagatgaatgcatacatcacaatgaagttttttca

SEQ ID NO: 177216 - DNA, 474 bp, Homo sapiens
ttttcttttctaacatgggccgcaaagcgatcaaaatgtccacttgcagactctactaaaagagtgtttccaaactgctcaatcaaaagaaaggttcaactctgtgagattaaatcacacatcacaaagaagtttctcagaattcttttgtctagtttttatgtgaagatatttcattttcgaccataggcctcaaggygctcgaaatgcccacttgcagatactacaaaaagaatatttcaaaactgctcaatcaaaagaaaggttcaactctgtgagattaaatcacacatcacaaagaagcttgtcagaattcttctatctagtttttatatgaagatattaccttttccaccttaggcctcaaagcgctccactaccaaattctacaaaaagagagtttcaaaactgctctatcaaaagaaaggtttatctctgtgagatgaatgcatacatcacaatgaagttttttca

SEQ ID NO: 177217 - DNA, 581 bp, Homo sapiens
cctgcctaaatgaatgagctgtgtaagtaagattcaagggtgttgcttaattttgttattataatagtgtcgcagcagctgcatatcctactgtagatcattcttgtccaagaggtcattgttgttgatttgtcaatttggagaaactatgatgcacaaaaaatgcttttgtgtgccttatagaaaatatgcattttacttccacacctttcctagatttcagagttcactatcacccagcaacttatgtggaaaatttcgataagaactagtgaatactctctttcatattatagaataatataacgtatgcactgactggggtcaaatacaaggagagttatctgagtgaaagttattatttgattatctttctaatgcatgttcttcaataaattcagaaaaccattcataatatctttgcatggaaactagtaatatgattttgacagtcatccatttccctacctaatgtaactcttcatacaatctggatacagtgcttataattcaaaatacatgacctcagcacatmagtgaataatggaattggttgcagtatctactaccaggtagtctac

SEQ ID NO: 177218 - DNA, 583 bp, Homo sapiens
aattcctgcatattatatttcaaattttatttcagtgatggtaattctgaaacatatatggagatatataaatatgtttcttgttagtatataaaaaaaagttgctatttagaatactaatgattttgtcctgaaaaatgaggaagcccctagagaggaaactgaatttctctaaataagaaaccagaaaatgttaacccccaagaaggaaattaaacaagaaatcattatgaaactaacttgagaagccaaaagagagatcaagtagtattagcaaaatgaatagtggatgtctatgtgctctataatgtggccaaggaattagctaagctycttttttgatttaaaaatagtgagactataatattaagacaagaagaaccagtcacagaacttgctaatgtgggtgccatggaggacatgagaaattagtgaaaaataatgaaaaagacttgactttcaaagtagttggaattttggattttatctaaaattatattcatctccaaaatgcaggaaatccaaaatacctcataggacatatgtagattatccattaaatattcaaaatatatgtattatt

SEQ ID NO: 177219 - DNA, 505 bp, Homo sapiens
tcaagtagtattagcaaaatgaatagtggatgtctatgtgctctataatgtggccaaggaattagctaagctccttttttgatttaaaaatagtgagactataatattaagacaagaagaaccagtcacagaacttgctaatgtgggtgccatggaggacatgagaaattagtgaaaaataatgaaaaagacttgactttcaaagtagttggaattttggattttatctaaaattatattcatctccaaaatgcaggaaatccaaaatacctcataggacatatgtagattatccattaaatattcaaaatatatgtattatttgcatcctatataaagactgcctttgttgctgagtatataaagcacacatgctcactctcatgcacacaatcctaaggttctgactgtaaagagaacctattttgtctccccattttgccttgattaatttatttaasttaagaagatgagataaatcacctaaatgaataaatgatatggt

SEQ ID NO: 177220 - DNA, 505 bp, Homo sapiens
tcaagtagtattagcaaaatgaatagtggatgtctatgtgctctataatgtggccaaggaattagctaagctccttttttgatttaaaaatagtgagactataatattaagacaagaagaaccagtcacagaacttgctaatgtgggtgccatggaggacatgagaaattagtgaaaaataatgaaaaagacttgactttcaaagtagttggaattttggattttatctaaaattatattcatctccaaaatgcaggaaatccaaaatacctcataggacatatgtagattatccattaaatattcaaaatatatgtattatttgcatcctatataaagactgcctttgttgctgagtatataaagcacacatgctcactctcatgcacacaatcctaaggttctgactgtaaagagaacctattttgtctccccattttgccttgattaatttatttaacttaagaagatgagatraatcacctaaatgaataaatgatatggt

SEQ ID NO: 177221 - DNA, 495 bp, Homo sapiens
tgaaacaagacaaggatgcctactctcaacactccgattcagcctaacattggaagtcctagtcagagcaatcaggcaacagaaatagataaaggcacccaaataggaaaagaggaagtcaaactatctctcttcacagatgatataattttattcctagaatactccatagtctctgctcaaaggctccttcagcaaagtgtcagcatacaaaattattgtaaaaaaactagtagcatttctacacatcaacaatatctcggctgggtgcagtggctcacacctgtaatcccaacactttgggaggctaaggagggaggatcccttgaggccagaaactcaagactagtctaggcaatattgagaccgtcacctctatttttttttaattagccaaacatagtggcatgsacctgtagttcctagctgcttctggggctgaggtgggttgattgcttgagcctgggaaattgaggctgccagtgaggcaagatt

SEQ ID NO: 177222 - DNA, 613 bp, Homo sapiens
ctcaaccttgtaaattgagaaggaaatctagtgttctggatagagaaaaggagagctctccttttaggctaccatacctaaggtatggataatgggggagataaaatactctctgcttgaaaaatttctattacagtgttgtcatggatattttatctaatttccttctactaaattgatatttattcatttatatttatttattaaatggatattttgttctattaaagcttctacctttatcaaattacagtctattctttctttatcctggaacctggtcatcttttatcttctcaaggattaatctcttaaatatcacttttatattttactttaaatatctcatctaaacattagataaagacaagaagaaacttaaaggaacattatggaaatggtttaagacatgaggaattttactaaccgtaaatgtaatgttatacagagctgtgaagatgggggaattccatgacattagtaatwacacagtaatatgggcatgggaatcattgtcatcgtggtggtatgggaggactagctttttaaggtgttggaaacaaacatgaatattaagcttaatgggaataatgtttcttctataagaaaaagc

SEQ ID NO: 177223 - DNA, 603 bp, Homo sapiens
ttttaatatggtagcatgcatattttgggcatagtgaaaatgtgaaaatatgaaaatatctaagaaagagaagaggatattcctggtgagttctacttttttatcagcaaagaaataagtaattttctaggactcttccattatactttcaggtttttagcaagaagggtcactgacgtggggagaaaaataaaataacaaaggaacagaaaaatcatcattgtcctaagcaaattattttgcaatcttgatcttaaaaaagggtctttcttctacagcacacagccactgacaatgaactttcatgaaaaatcatagctatatcaacaaggacaggatgaagggatagaatagaaaagcaacctcattgggtcattaaaaataagctatgtgtttgttattgctgttttttaaaggatcactattttggcttgtatggtctaacccaacttggcagttatcccacttacttgcttctcacattctaagaaacattgtctgatcacagttcttggaggctctgggtgatattcattgccttcacggatttttactttgttgggttctaaattggagaaaatrttatagccttccatatcccta

SEQ ID NO: 177224 - DNA, 282 bp, Homo sapiens
aatctataattgataagaaagcacgagttgtgcatattagtcaacgacaaatgaatagttgatcatttgtatggtgtacgtatagaccttgtcctttcttctcaaacaagattaaagactgaaatttttaaaaaatcttgccttggtatcaatttatctgatgttgttctatgagattaattatgttcaataagagaaactctyaggctagatttcggtgcaaggccagttccttagaacactgaagctgagctgtgtttcccagaatttagaatatgctaa

SEQ ID NO: 177225 - DNA, 567 bp, Homo sapiens
ttaaagtattttcaatatttctaatcaatattagccgagagagaactggacaccatccatcatttagcaaatgcagcaggacaatttggattgctgcttaagtacccgttgtccagattacacagacaacaatgttactacactgagaaataacgcttccaaaattacagttcagaattgrttatatttcaagattacttcttcaatattaaattgagagaagttatgttaaaagtcagttttattcagagtcatttgctcctttgttattttccataatatgctaaacataacgtcatattggccttacccagtgtctaacaaggcactctcccagatgcatatttgaatagcctttcctgcttgcagtttgagtattaagtgttacttgttatggtttagaaagcttttctcactcgcaaataccctttcctttcctcagtggataatatgttattattttccttcaatcagatattaaatgttagtgtgaagccaaaaaattgagtgattaactttcatcataaattaaggtaacttttaacattaaattgtacatatcaactg

SEQ ID NO: 177226 - DNA, 550 bp, Homo sapiens
ggctctggaaattatatttgtttgcctaagcttttctagctctattgtaaattgtcttttctattttattatttatattggaaatacttttgatttagttcataatcttcctgcagaagatacaatgtatatttgtgcttcttcatacattatacatgacaataagcaaaatttacagcagtgtaagcaaaagaatagttagctttactgcaaagtacaaaattcagccaattcagcaaaagctwtgaaagtctagtggaaatattttcacagtctgcatatgtgttaaaacaagcccttcaaatatgtatgtgtatgtgtgtgtatatatatatttatatgtgtatatatacatttgtatatatgtgtatatatatacatttttttcttcagagaaaactgaatcttttaataaattgaaagtggcaagtacaaacacaaggtgccctctgtttacagtaaccatatttagtatggtagctccaagtctaagttcttccatgggatttgtttaaaagaagacaatactaattttaaatttccacataag

SEQ ID NO: 177227 - DNA, 606 bp, Homo sapiens
ctttacctgttctaaaagtttttaaaaaatggaattatacattttatactccattgtagtcccagcataataattttgagatttactcatatttgtgcattctttccccattcaccctttgatgaacttttgttgattacaatttgaaattaagatctgatatgattaaccttctttgaacatttatgcatttgtctttttgttgacttttttattactcttggcaacttatctagggatgaaatgcaacctatgtctgagtcataggctaagggtccgtttaacattataaaastctgacaaataatttttgaaaaatggtgtgatgttttacacatcaaccagaaatggataaggttttagttacaactgattatcgtcagaacttggtattgttatttgatgtaactctagccatactggtgtgatgcactgcctcactaaatataagttgtattgtgatagtcatatataaatgtttaggaaatatttattgcacaatgttctaggttttcattttattaatcaaataaactcattcatactccaaccacacattctacacacaattataacattttgtttcattggtatatgtgattgact

SEQ ID NO: 177228 - DNA, 606 bp, Homo sapiens
ctttacctgttctaaaagtttttaaaaaatggaattatacattttatactccattgtagtcccagcataataattttgagatttactcatatttgtgcattctttccccattcaccctttgatgaacttttgttgattacaatttgaaattaagatctgatatgattaaccttctttgaacatttatgcatttgtctttttgttgacttttttattactcttggcaacttatctagggatgaaatgcaacctatgtctgagtcataggctaagggtccgtttaacattataaaagtctgacaaataatttttgaaaaatggtgtgatgttttacacatcaaccagaaatggataaggttttagttacaactgattatcgtcagaacttggtatkgttatttgatgtaactctagccatactggtgtgatgcactgcctcactaaatataagttgtattgtgatagtcatatataaatgtttaggaaatatttattgcacaatgttctaggttttcattttattaatcaaataaactcattcatactccaaccacacattctacacacaattataacattttgtttcattggtatatgtgattgact

SEQ ID NO: 177229 - DNA, 486 bp, Homo sapiens
aaaaacaaacaaacaaacaaacaaaaacccacttacaaatatttacaggctgggcacagtgactcccgcctgtaatccaagcactttgggagcctgaagtaagaggatttcttgaggccaagagtttgagaccagcctgggcaacatagtgagacctcatctctatgaaaattgaaaatagataaaaagtaaatttaaaaaaattataaagagactattatgagtgaaacattgtgctaataattagtgtaacttagagttatcagtggggtagataaatrtcaatcaagcaatcacaaagcttgcaaatgtgacaggttgctttgaaaacagatagtaaaagacttgggttgggtttaaagagtgaaagagtcttccaaggggaggtaatatttgggtcaagatgagaggataaattacagttaaattgggaaagattgtgcagaaatagcagaagtaaaaccatttcagtcattgcaagggcct

SEQ ID NO: 177230 - DNA, 401 bp, Homo sapiens
catctttcttcccataactgtgaggataagctttcgatgtatattgccagggtgaagttcaatagaactgttttagggtaaagatctgggaacccacaaaaaatttgttttaggtaaattgtaaggtttgtaactgtttatctttgtagctatcttatttagaaacaaaacaggaggcaagtttgtgtggctttttcctttggcttagtgagtttggggtcccaagatctcttttccattcacagttcataaatatgcaccattaagaagatgaaatgtcactcataagtcataaaatagaataaataaattgatagatgaggacractacaaaacatatattgatatacacatgtaaacacacctgcaatggaaaatatatgaagaatatcttataatta

SEQ ID NO: 177231 - DNA, 585 bp, Homo sapiens
aattatatcttacaaaacaattttgaattttttaaaagttggaataatatcaattttataatgtaaggatgtgttaaggacaaaagtgaaaaaaaaatcatgtctctatatatcaacaattcagaaggatccttaccatagtaatggttgccactggggaggaaaaaggaatagttaattttgtaataatgtttaaaaggttttaaattgtttttgtaaaaatacaagaaacaaatgtaaaaaaaaagtatgaagaatgtatttccatttagttttgattcgcttttttaacattactaaaaataaaaatgtgagaaatcaaacatgagcargcaactcaccagtgcaaccttattttggagtaatgcaacacagtacatcagttatttgtacacacatcctcctacctccgtctgtgtattcctttgtagcattgatgatgattgtgtattctcaacaactgccaagtgtatggttcatgcaaataataatagttattacttatcaaacctttcctttgtaccaagtgctgtgctagttcacatcttgtatcttacacaattcccacaacattcctgaaaccat

SEQ ID NO: 177232 - DNA, 311 bp, Homo sapiens
acatgattgcattgtttttaatgaccatatagtattttatggtgtacattcaccacattttctttatccagtgtaccattgatgagcatgtaggttgattccacrattttgccattgtgaatagtgctgtattgaacatatgcatgtatgcatgtgtctttatggtagaacaatttattttcctttgtgtatatacccagtaatgggaagactgagtggaatggtagttctgtttttaggactttgaggaatcaccacactgttttccacaatgactaaactaatttacgctcccaccgacagcatataag

SEQ ID NO: 177233 - DNA, 573 bp, Homo sapiens
agccttgtagtattacttgggagtaaaataatgactatgacataaaactacattaaaaagatttagagtcatgggggatgtaaatgttaaaaaatataaatactgctcacattatggacacagagcagggatatttgataggggttggaggagacagaatatcagagatcccctcagaaaaggaattatttgtggtcattcttcacatgcaagcaacartagttacctaaaagaaggagacacacatgaagggtatcatttacttaggcaatagtaggagtgaagagtttgtatatattcggcatttctcaagaagtttgatgctgcttgatcaaaactaatgaggtggaatttgttgtcagacagacatgagagataaacaagggtcagttcagggtggatttttcatgtcatagagagatacttagtttattacttatgtagcctacaaaaagaaatgaaagagttgtattcaggctgaattcagacacagattttttttgtgggctggttggaggatggggtaaggctgagtaagaaagtttcaagtgctgatacaaacctgtgagttta

SEQ ID NO: 177234 - DNA, 328 bp, Homo sapiens
tcaaaatgcttatatttattcaaaaaaccttctaaagtactagcagtttaaaaataactttcagtaaaagaaaaaaatacaatcatttaccatcaatgagcttacagagtagtgaaaataagaaaattttgtaatawctacattaaaatgcaatgtatttgccacaagaaaatataaacactagttaagtttatgggtgctgaggagattgcctgaggacagagtaccatgacctataggatactatcaagatatatagcatatgtgtcatttgattgggtgtagggaaaagatgtatatttgaaaaattaatagacagaaatgctac

SEQ ID NO: 177235 - DNA, 504 bp, Homo sapiens
actatatagccataaaaaagaataaaatcatatcctttgcagcaacatggatggaggtggaggccataatcttaagtaaattaatgcaggaacaggaaactgaatactttatgttctcacttaaatattgaacatacatggacacaaaaagtggaaccaatacacgctgcagactaccagtaggggagagagtaasgggggcgtgggttgaaaaactacctgctgggtactatgctcaccatcttggtgcgatatacccatgtaacaaatctgcacatgtaccccttgtatctaaaataagcatagaaatttaaaaaaaatctcaaactcaggaagatgtacagttatgtaagacttaaaataagtatttataataatgagacttttattaggaatacattttagtctctataaattctatagttttgcccagaggaaaatttgtatttctttttgtcattggtaatttttaaaattttgtattattgtatttttaccttcaaa

SEQ ID NO: 177236 - DNA, 581 bp, Homo sapiens
tcttgatattcaaaaacctaaacatccacttaagcccattagcttcccagcaatggttcttatctaaattgaaaaggctgaaatgacagacatacaattcagaatctggatggcaagggagctcatcaagattcaggagaaagttgaaacccaacccaaggaatccaaaaagtccaataaaattatccaggagctgaaaaataaaatatcaattttaagaaatatccattytaagaatgaaaaaaatatccattttaattctggaaatgaaaaattaactataagaatttcataatacaaacagaagtattaacagcagaaaagaccaagctgagcatagaatcccagagcccaaagaccagtttattgaatcaactcagttagacaaaaataaagaaaaaaaacttaaaacgtgaacaaaacctctaacaaatatgggattatgtaaaaagaccaaacatatgactcactgacattcctgagagaggaaagagtaagcaacttgggaagcctatttgaggatatagttcacaaaagaatttttcaatatagctaaagaggttgacatgcaagttcaagaa

SEQ ID NO: 177237 - DNA, 340 bp, Homo sapiens
cagaaaaggcctttttatatttcaattcagcacttacctaattcagtataccagttgactaatatttaggggatagtcatctgttcaatgcataacaatctgctcagtgctttaggggaatccctttaaaattatcagccagttacatgaatgttcacagaatgagtacatctgtaagtgatttccttcatagaatcattaaagaagtgaaacttattctgatgayactagaatagctaaaaatatagtcaaactattcacttgaaattataacccaatatacaagacatgcaatactcaatctcatgtttgcatagttgtagctaatagaggtcattac

SEQ ID NO: 177238 - DNA, 620 bp, Homo sapiens
taaaatttaaactgggacatgaataccagtagtgtttggaactatgtagagagaggtaggtatcactctatgcagggacaaatgtgtcaacaaaggtatcaatggaagtcagcacaagctctgctcatgagagagtgaataaatgtaagctgaaaaaaaatatgtaggggaagtgttataaacacaattagggtgatagtttgtaccamattatggagagctctaggcatgcatgaggtttgactaacaaaatgccactgatcattctaaaccacatactaaaatcatttttaaaaattttactctaaacctatccattaacagtttggtggcgtttattgtttagcagtacttcttaaagatttctcatttcccacatcttaatttattagatatttaaagataaatgtatttaatgaagactgtcacatttgtaaaagcagcatagtagtggtatgaataacaggtaacccactttattaagacgtttagtgaaaaatgtagcctgtgatatggtttggctctgtgtcctcacccaactctcaccatgaattgtaatcccataatccccacgtgttaagggtgagaccaggtggaggtaattgaatcatgggagtggc

SEQ ID NO: 177239 - DNA, 536 bp, Homo sapiens
tttaagcaggggcaggccttgatctcatttacctgttgtcaccactaatgtcctgggaccaaggtgcctaattgccttccaacacccctttctcccttctgtctcactatagtcctgagcaaggggctcagcttaaagaaaacaaaaagaaaatagaacaaaaaaaaccccctacattttccagcctctcttgcagctaggtgtggtcagtgcactgaattctggccaacgagacgtaagcaaatgtgtgtgggacttctgggcagactccttgagaaggaggagctagaccctctttgctcctccatttttccccttccagcctgacatcatgactggaagcccagcagtctttctgggccatgaggagaccttaggatagaggccacrtgctaggaaggggcaacagataaacagaaggagcctgggtctctgatgcacacagtggtccatgagccctagacggccaacctcccaggcttgtgtgtgagaagaggtatgctctggaggggaagctgccactttcagctcaccct

SEQ ID NO: 177240 - DNA, 625 bp, Homo sapiens
tgtgccaggcagagggcctgtgtgagggagaaccgagygatggggccagtgagctgcagcctggaatagtgtgggtgacaccggggcagctggcaggggcttctcagaccttctaaagacatttggatgccgttccagaggcgccactgctctcacctgcttcctggcctggcctgctgtggtgtagaaaccttggacttcaccttcgccttctttctgggaaaagggcagagatcggctgtaactcctgtcctatgtctcaagagttttcacattccatccagtgcccagctgggttcactggtcacttctctccaccagtctaggagagtgggagagggatggaggagagactccgattttcctagaaacaaagaaatgggtgtggaggcgacaaaggtggtaggatcgtagggaaaggctgggagagccccgaaaaagcaagccatggtgtcaggatgctggaggggcagaagcctgggagtaagtaaggagagactcagtcactgtcccagtgcctatggagagactggataggccctggaaccacctgtcaagctctctggccactggagactggcgtgagccccttgtcactccctccccgctccatcctgctgcagtg

SEQ ID NO: 177241 - DNA, 546 bp, Homo sapiens
gagacttgaacattatattamcagacatttatgtgtcatcttctaaaagcaaatgctctaactttaatataattatattactgagtttgtatttgttaataaggtttgttatatgccattcaatgaaataaattacatgagctatacaattaatattttcctgaaatcctccattaattaacatgaataactgatacactgttttatcaaaatgttctgcatttgtttattatataagcatatcttcacaaatgtaaacatgcttatatcatattatgcagtaaaataaacatgcaataaaatatttctgataatacgagttcaaaatacaagtagaattcccataaaatacttacacaaattatttttacttacaaagttcatttgaagtataaagtttgtgttattttgcattaatattaagatacacacaagacaagcaaaattccaaaacaaaatgaatttttaaaaaccatcatgctagtagttttatccaattagtaagtgctgattttgattataaaaatgctctgtaactctcataaa

SEQ ID NO: 177242 - DNA, 409 bp, Homo sapiens
gaaatgtcactattttgctgtaccttcaagttttacatttcctcctttgaatccctgtcagccttcatgaatagcagagagtttaatcaatgcttgaggtagcgayagcataacactgaatatttctcttgctaataatcaaaatggtgttaagtaagcatcataaagtaaaacgacatacacatttatcctaattatcatataacaagttaactagtgttccaggtttaaaaataccacacatttcaaagaagcctgtatttccactaaatacagttttatggttatgggtttagcctgaagcatttggcttgcactaagaaattcgaagatcaggaagttcaaaatttttagttatcacactagaaaccaattttttaaaaattctgtgatgcaaagtacttataga

SEQ ID NO: 177243 - DNA, 541 bp, Homo sapiens
tttttatatggatatagaatatttataattaatgcacacaataatgctttataaatccaggaagggtctttcaacataccaaaaaaattgctgaatatacttatgtctacttayatttgagtatgtttcattaaactataattctgtaaacatagggaatggcttacaaggatctattcaggttgttttcttaatcagtacctgattttctagccctatcaggtgagagtctcctgctgggaattatttgaattgaaaataagtgttacacaaaatgaaagagctaaccatctaatattggttgaaccttgaagaaaaatcatgtaattccaagaaaagttatctctgtttctgttctggagattgcctacaatgagtcctattttccagtattatcaattttcttaactttccccatcattcttatgtttctatttgtatatttaagaattcttgacaccactttgactttgcttcacctcctcagtttctggcatttctccctcgcacacatcttcctgatttgcatgctcctccaccc

SEQ ID NO: 177244 - DNA, 497 bp, Homo sapiens
gttttaaaaaatcaagtttatggaagatggggaggtcaactagtgacagagcagagaacagactagagactaatgtagagaaggatgctttggagctcactgcaccatggactagaytagggcaatgggagaggaaagaggagaagaaggagacacaaaactcaaggaattcctgaggtcagaaaagaggtggaatctacagactttgtcaactgaatgaggaagcagaatataagatcacaccaagttttctaggataatgaactcctgggttaatagagacaacataattagaaaatgataacacaagaagtgaaagaaagtgatttacttgaaggctaaaggaaataagtggataatgaattacattttaaaacaagtatctgtagtttggtgtgacagacactaattgttttttttttactaggcaggataaaagtaccagaaaacctatgtttgcattaataaatcctctttaaatgttatcataacttaat

SEQ ID NO: 177245 - DNA, 507 bp, Homo sapiens
ttttaacattacacgtttctcacctattttgccaaggcttataatccacaaaacttctgcagggatttcctagtctagtcattctttattacatattccagcaaattttcataatacacatctatgaataagtgtaacaagtttgtagcttgcataaaataattaaacaagaaaacatcaatgttcaacatttaaaagaaggaaaataatactgaatgatgcttaatatagaagaataagcaaaaactgcagtggataatatttgtaaatgacttgtaattcactttatctatattaatgcctatgttagttcttaatatataatgtatttacttttatattgaggatttaattcagctcaaataatcctttacttttttttagtawcttgaattcaaaaaatcatttttggtataaataagggctgcttcctgacatagataatgctggcttttgtagtgattaacctgatagtcagttaaacaaatcagatatgaaaactagaat

SEQ ID NO: 177246 - DNA, 553 bp, Homo sapiens
caaatgataagaaagtaaaacaggcttactgctgatacagagaatgttttagtgttctgaatggatcaaaccagctacgacatcctcttaatccaaggcttaattcagagcaaaygctcttaacactcttcaattctatgaaggatgagagaggtgagaaaactgcagaagaaaagttggaagctagtagaggttggttcatgaggtttgaggaaagaaaccatcaacagaacagaacagaacagaacagaacataaagcagaaagtgctgatatagcagctgcagcaagttatccaaatgatcttgctaagataatttatgaaggtgactacactacacaacagattttcagtgtggatgaaacatccttttattggaaaaaaatgccacctaggacttgtgcagctagaaaggagaagtcaatgtctgacttcagtgcttcaaaggacaggctgactctcttgttaggtactaatgtagctggtgactttcagttgaagccaatgctcatttgccatttcccaaattctaggacccttaataattgcgcta

SEQ ID NO: 177247 - DNA, 475 bp, Homo sapiens
tacagaatatatcctgagattaattgtattgaaatttactataaaccgattgctatggtcaggggaattgagtgttatgattttctgtggcctgaaaagctcatagacaaattgtgggaatcaaggagcaatgtggttcctagaaaaaaattccaccttttgcttgaaaaagggtggatggatagaraaaaaattcaatgcatgtcacaagaggttctaataattgccagtgcatttttagacattttcctaataattcaaacatatatgttaaaaacaaatttttctaagcttacatattcattgtttagaagattttgttagcctttggaatctatacaagatacagcattttgtctattgatttatttatgagatgaataggaatgaaaaaaagagaaatttaaacattgctttattgctttgcgagcatctactttctttactttcttcttgccttccctccccatttttc

SEQ ID NO: 177248 - DNA, 536 bp, Homo sapiens
gaacattctctaagatagaccatatgacaggccacaaaacaaatctcaataaatttaagaaaattgaaattatatcaagtatcctatcacaccacagtaaaattaaactggaaattaactccaaaaagaaccctcaaatctatatatatacatggaaattaaataacctgcttctgagttatcattgggtcaacaatgaaatcaagatggaaatttaaaaattctttgaactgaacaatattagtgacacaacttacaaaacctctgggatacagcaaaagcaatgctaagagaaaagtgcatagcattaaatgcctacatcaaaaagtctgaaaaagcacaaatagacaattaaaggtcacacctcaagaaactagaaaaacaagaataaaccaaacccaaacccagcaatagaaaakaaataacaaagatcaaagcagaactaaatgaaattgacataaatacaaaatataaataaaattaaaagttggttctttgaaaatataagtaaaattgatagaccattagccgtatta

SEQ ID NO: 177249 - DNA, 615 bp, Homo sapiens
tgcagagagccctataaaggtattgcctaatagagttacggggtcatggccacccccaagaccccagaagggtaatcccaccagtgtgcaactttaacctgggaaaaccaaagcatgtaacttcaatgcatgagagttgcagccagcaaagctgtgaaaggggggtttctcagagatttagggatccaatccccatctcaatgtattcagagggtgtaacagggagacagcattattctcagtcctcatgatttaacattatttgcctcattgagttttaaacttacttgggacctgttattcctttctactttcctattgctccagtttggaataagaatgtctatcctctgcctgtcccatagttgtatttttgaagcacataacttgtttgatttcacaggctgacagctggtgagaaatttacctctggatgactcatgccttgagtctcacccatatctgacttgaatgatatttagatgaaactttggacttagactgtaaagttgatgctagrtaagtttagacttttggggttattgggatggaataaatgcgtttttaatgtgagaagaacatgaatttgtgggggccgggggagtaatagtatgg

SEQ ID NO: 177250 - DNA, 615 bp, Homo sapiens
tgcagagagccctataaaggtattgcctaatagagttacggggtcatggccacccccaagaccccagaagggtaatcccaccagtgtgcaactttaacctgggaaaaccaaagcatgtaacttcaatgcatgagagttgcagccagcaaagctgtgaaaggggggtttctcagagatttagggatccaatccccatctcaatgtattcagagggtgtaacagggagacagcattattctcagtcctcatgatttaacattatttgcctcattgagttttaaacttacttgggacctgttattcctttctactttcctattgctccagtttggaataagaatgtctatcctctgcctgtcccatagttgtatttttgaagcacataacttgtttgatttcacaggctgacagctggtgagaaatttacctctggatgactcatgccttgagtctcacccatatctgacttgaatgatatttagatgaaactttggacttagactgtaaagttgatgctagataagtttagacttttggggttattgggatggaataaatgcrtttttaatgtgagaagaacatgaatttgtgggggccgggggagtaatagtatgg

SEQ ID NO: 177251 - DNA, 415 bp, Homo sapiens
agcttaaaataacctattatatstaagatgttttgcaagtcacatggtaaccacaaaacataaacccataatagacacaaaagatgcaaactatatcactagaaaaatatcatgtaatcacaaaagaagagagcaagagaagaaaagaacaaagattctataaaacaattagaaaattattaatggcagcagtaagtcaatacatataataattcccttgagtttacactcaatggattaaattcttcattcaagagacataaaatggctgggtggataaaaaaagattcgaccagaagctccctaagaggttcatttcacatgtaagtacacatatacactgaaaatgaaggcataggaaaagatatttcatgcaactcaaaaccaaaagagagcaggagaagttatgtcagat

SEQ ID NO: 177252 - DNA, 431 bp, Homo sapiens
ctaaaccagttagatttaggatccaccctaaatcaccttgatgacattgcaaagactttatttccaatcaggtcaccatcataagtatgggggttaggacttgaacataagtcttttttgaggagacacagtttggcccgctacatcaggcttaagaaagtttgaattcctaggtgattctacagcatagtagctaaagcagagagcyacttctttcagaacagtgcttctcaaattttaatagacaaatgaatcactggaggatctaattaaaatgcagattttcatacatcagtgttaaagtgaggccagagtccctatatttttaacaagctcctgagtggtgctcgtgcttggtccaaacctcaaggagtgagtacttagagtaaaggctttgccgccttctttgtggcttcacctgtgactcccct

SEQ ID NO: 177253 - DNA, 534 bp, Homo sapiens
ttgagaaatataactatcctagctctgtcacattattggccaaagaaccaaataagtatacacacactcaaatcaaagatgctgtaagagatggcttgagggctgtcaaaaaaagctattgatgatggctgtgagttccaggtgctagtgcagtagcagtggcaatggcagaagtccarttaaatataagtccagggctcaactcagagtccaagcatttgctgatgtgttgctctttcttcccaaggttcttgctcagaactgtagttttgattttcaagaaatgttagttttaaaaatggcaatttttcccatatgaaaaaggaaagaacactggcacctattctgaagctttgaaatgataatcacagtattttttaattgcactgaattgaacacatataaagcaggtcttttttacccagtgaacaagatgttttcttttgctgcagtgacataaaattatatattagataagcatatgttgtaaaccttgttattaaatattcattgacaaacaaaaaacaaaagtag

SEQ ID NO: 177254 - DNA, 566 bp, Homo sapiens
atgtgatatgtgtgtttactgataaataattgtgatattctttgaagtgccacattttcatatcaacattaaatggtattaaaggtgacagcagtagcaaggcagggaattccatagcctaaagtgcatgaagaagagaatataattaagaggcactctatttgtctaacagaaccctagagattaatagaattttgcatcacctgttattagagarggcaagaatgagatgcaataataaaatcacgaatcaaattagaaacaaaaggaaactttctctacctgataaacggaagctatgaaaaacacacagctaacatcatacttaatagtgaaaaatggaaagccttcctcctaagatcaggaacaagacaaggatatccactctgccacttctttcaacattgtattgaaggtcccagtcaaggcaactagtcaataaaaagaaataaaaggtattcagattagaaagaagaagcacaaccacttctatttgcagatgacataatcttgtatctagaaaatcctaaggaatttacaaaaaaaaaaaaaaactgttagagcca

SEQ ID NO: 177255 - DNA, 648 bp, Homo sapiens
catctccgcctctctttacaaataaaacataccaagaaatgaagcccacaattrtgtgtatttccttccaaaactaagggtcaccaaacatttgacgagtgtctccaacatgagaggcattggagttaaaatggcatcataaagataatataagagaactaaagcaacaaaaaacaaaacaaaactgtgtaactataaaacaagggcaaaatactatttttaaaaagaataatcagaatgaataagagctcttggaaataaatgacccccccccccaaaatcaagaactagaagtccaaaattgtggaaatcacccaaaacttggaacaaaaagacaaacaatataggaaaaacaaatgtgagagtcataggaaatcaatacaggacatttaatacctagaaaaagaaaactaagaaattggaagattttttaaaagggttttgtcataggttagcttcccaatgagatggaccctgagaccctgaaattctcaagcagcatgcttcctggggaatacttttgggaagacaacctttgagaggtgaagaaagtgggaccaggcagagagaaagaactgcccaatacaactggttggaggcttcagataattttatagttggcatgacctttagaattgttccagctga

SEQ ID NO: 177256 - DNA, 618 bp, Homo sapiens
aaatctagcatagttgaataccaggggttgagaaagagagtgcgtggcatattgagacactgaagaaaagcttgagaagctgagtgctgatagaagcagcagcttggggcccaggtcatacaggtaagaagtttggtctctatagtaacagcattgggaaagctttgaagcatctttagataggaaagtggcatgccatatggctgtgtagcctcctagtcctggccccctgatctaataggtacatcttactcgcaatcgaaatcaggattctaayggctagttataccaatttaccattggaggttttgtcaagatggaccagaaaagctttagtcatgccatgtagatatattctcatcttgatagctaatctgggtgattccactaaaaatctctctccttcatttgatgatgacagacaattttggtgctgataactttactattctttatgatggttgtaaggtgtattttgagatatcagcccacaaaaggcatcttactgtgggaaatgcacccagattgttctccagatgccatcatcagaaagaaaacactaaagtctaattaaaatgcagcataggttgtatcacttaggctttataataactattt

SEQ ID NO: 177257 - DNA, 618 bp, Homo sapiens
aaatctagcatagttgaataccaggggttgagaaagagagtgcgtggcatattgagacactgaagaaaagcttgagaagctgagtgctgatagaagcagcagcttggggcccaggtcatacaggtaagaagtttggtctctatagtaacagcattgggaaagctttgaagcatctttagataggaaagtggcatgccatatggctgtgtagcctcctagtcctggccccctgatctaataggtacatcttactcgcaatcgaaatcaggattctaacggctagttataccartttaccattggaggttttgtcaagatggaccagaaaagctttagtcatgccatgtagatatattctcatcttgatagctaatctgggtgattccactaaaaatctctctccttcatttgatgatgacagacaattttggtgctgataactttactattctttatgatggttgtaaggtgtattttgagatatcagcccacaaaaggcatcttactgtgggaaatgcacccagattgttctccagatgccatcatcagaaagaaaacactaaagtctaattaaaatgcagcataggttgtatcacttaggctttataataactattt

SEQ ID NO: 177258 - DNA, 540 bp, Homo sapiens
agatctgtgcctagtgtcaagagagagatgttaaagattaaagagcctccaccaggaaagggaatggttttgcctgaatctcttaatttgtttttccccgctacgagtgcattcatgttgctgggctccctggcttactccccggtggtttgtagtcattttcatcatgactttgcggttgcattgatatcagaatgagtttcgactgctgtacgtgatgcttccatgctccattgctttctctcttatgttgctaacgactctcctgttggyttcagcccttagccaagcccaccccactccacaccccactccttccctgtcttttattgatgctatgttgactttgcatgcctcagttagttcagttttctgagcacctgcagagaattaaccatctctgcttgctgctgcggatcacctaggcctttgatctgtttgatttctgtacttctaaaaatgttgaaggactctctaaccccaccaaagtacataaatggtgctacagttcctgtagcctgacctcctccagactagctc

SEQ ID NO: 177259 - DNA, 554 bp, Homo sapiens
agacttctcatgatttaatggatactacttactcctactactactaataataaattaacaataataataaagtacttatttaaagtttaagtaagggaatcatacatactatacatggctagtaaaacggcttatgtcattggcctatgtggtcagtctattgatttgcattagagaattttttaatataactgaaatatataaattaggaacctttaaaatgcaaggaagtacacaaaagagaccctmgtttatggggtgaattaaaaaaaattcaaaactaactaaaggccacattttgttctacaagattacatatgcatgaggaaatagaatatacattcaaacaaataaagaaagtgtacactcagggtattgtgaataccagcaagtggcgaactagtctttgctgcagaatatctgtgcatttatttttaccaaagccaggagctgacttttgtcattgcccataccacatcttaaggaaaaaaaaaatctagttgaagagttccagtaaaaagagttataaagtgtatcactttatcgaggttagt

SEQ ID NO: 177260 - DNA, 554 bp, Homo sapiens
agacttctcatgatttaatggatactacttactcctactactactaataataaattaacaataataataaagtacttatttaaagtttaagtaagggaatcatacatactatacatggctagtaaaacggcttatgtcattggcctatgtggtcagtctattgatttgcattagagaattttttaatataactgaaatatataaattaggaacctttaaaatgcaaggaagtacacaaaagagaccctcgtttatggggtgaattaaaaaaaattcaaaactaactraaggccacattttgttctacaagattacatatgcatgaggaaatagaatatacattcaaacaaataaagaaagtgtacactcagggtattgtgaataccagcaagtggcgaactagtctttgctgcagaatatctgtgcatttatttttaccaaagccaggagctgacttttgtcattgcccataccacatcttaaggaaaaaaaaaatctagttgaagagttccagtaaaaagagttataaagtgtatcactttatcgaggttagt

SEQ ID NO: 177261 - DNA, 554 bp, Homo sapiens
agacttctcatgatttaatggatactacttactcctactactactaataataaattaacaataataataaagtacttatttaaagtttaagtaagggaatcatacatactatacatggctagtaaaacggcttatgtcattggcctatgtggtcagtctattgatttgcattagagaattttttaatataactgaaatatataaattaggaacctttaaaatgcaaggaagtacacaaaagagaccctcgtttatggggtgaattaaaaaaaattcaaaactaactaaaggccacattttgttctacaagattacatatgcatgaggaaatagaatatacattcaaacaaataaagaaagtgtacactcagggtatygtgaataccagcaagtggcgaactagtctttgctgcagaatatctgtgcatttatttttaccaaagccaggagctgacttttgtcattgcccataccacatcttaaggaaaaaaaaaatctagttgaagagttccagtaaaaagagttataaagtgtatcactttatcgaggttagt

SEQ ID NO: 177262 - DNA, 628 bp, Homo sapiens
aactgcagctcctgtggcctagactacccttcaggtttatgcagaaccacagaacactctagacttcaggggcaaggcttgcaagaacttaagttctgaccactggcatggttgactcccctagctagggctggtttaaacccgtgggtgactgtcagcttagtttggtcctgttttgttttttgttataatagggcagcactgagtacaatgccacatattttctgtgcttcccctctccccagtgcacagaaacactctccacaccatgmcaccagtgctgggggatggaggagaggtccattggcaattcaggactgtttttgttacctcttcagtgtctctttcagcaatatgaggttaaaatcaggtactgtgagtggtcactcgatttttcgttcttatggaggtgctttttttttgtgtgtgtagataattgttaaattggtgtccttgtagtggcagggggatgattggtggaaccttctattctaccatcttgctccattcccacacatctcacacttcaaacaaaaagctagaaataactaaacataatgaagatggcatgttaaaagctcagataggccaaaagctaagtgtcatgtgccaatcagcaaaattatga

SEQ ID NO: 177263 - DNA, 628 bp, Homo sapiens
aactgcagctcctgtggcctagactacccttcaggtttatgcagaaccacagaacactctagacttcaggggcaaggcttgcaagaacttaagttctgaccactggcatggttgactcccctagctagggctggtttaaacccgtgggtgactgtcagcttagtttggtcctgttttgttttttgttataatagggcagcactgagtacaatgccacatattttctgtgcttcccctctccccagtgcacagaaacactctccacaccatgacaccastgctgggggatggaggagaggtccattggcaattcaggactgtttttgttacctcttcagtgtctctttcagcaatatgaggttaaaatcaggtactgtgagtggtcactcgatttttcgttcttatggaggtgctttttttttgtgtgtgtagataattgttaaattggtgtccttgtagtggcagggggatgattggtggaaccttctattctaccatcttgctccattcccacacatctcacacttcaaacaaaaagctagaaataactaaacataatgaagatggcatgttaaaagctcagataggccaaaagctaagtgtcatgtgccaatcagcaaaattatga

SEQ ID NO: 177264 - DNA, 628 bp, Homo sapiens
aactgcagctcctgtggcctagactacccttcaggtttatgcagaaccacagaacactctagacttcaggggcaaggcttgcaagaacttaagttctgaccactggcatggttgactcccctagctagggctggtttaaacccgtgggtgactgtcagcttagtttggtcctgttttgttttttgttataatagggcagcactgagtacaatgccacatattttctgtgcttcccctctccccagtgcacagaaacactctccacaccatgacaccagtgctgggggatggaggagaggtccattggcaattcaggactgtttttgttacctcttcagtgtctctttcagcaatatgaggttaaaatcaggtactgtgagtggtcactcgatttttcgttcttatggaggtgctttttttktgtgtgtgtagataattgttaaattggtgtccttgtagtggcagggggatgattggtggaaccttctattctaccatcttgctccattcccacacatctcacacttcaaacaaaaagctagaaataactaaacataatgaagatggcatgttaaaagctcagataggccaaaagctaagtgtcatgtgccaatcagcaaaattatga

SEQ ID NO: 177265 - DNA, 610 bp, Homo sapiens
tggtggcatctgattgaacaagactaagtcatatgcccagacaccagctttcacttctataaatgcaaggtaaggctctgcctcccaccaagacttcaaaaatggtagattccataaaccaaaatattatgtttggtagttgattggccaattgaatgtccatcatattctgcttaaaatagcattttcagaaacttcaaattctggaaagatgaaataaatttacttcttcttatttttctttctcagcacaactaaaaccctggatgtattagtccattctcatgctgcttataaagacatacccaagactgagtaatttataaaggaaagaggtttaattgwttcacagttcagcatggctggggagccctcaggaaacttataatcatggtggaaggggaagtaaacacatcctccttcacatggcggcagaagaagaagtgccaagccaaagggggaaagccccttataaaaccatcagatttagtgagaactaaccactatcatgagaacaggatagggggacagcccccaggatttaattatctccacatggtttgtcccacaacacctggggatttgagtggggacacagccaaaccatatc

SEQ ID NO: 177266 - DNA, 610 bp, Homo sapiens
tggtggcatctgattgaacaagactaagtcatatgcccagacaccagctttcacttctataaatgcaaggtaaggctctgcctcccaccaagacttcaaaaatggtagattccataaaccaaaatattatgtttggtagttgattggccaattgaatgtccatcatattctgcttaaaatagcattttcagaaacttcaaattctggaaagatgaaataaatttacttcttcttatttttctttctcagcacaactaaaaccctggatgtattagtccattctcatgctgcttataaagacatacccaagactgagtaatttataaaggaaagaggtttaattgtttcacagttcagcatggctggggagccctcaggaaacttataatcatggtggaaggggaagyaaacacatcctccttcacatggcggcagaagaagaagtgccaagccaaagggggaaagccccttataaaaccatcagatttagtgagaactaaccactatcatgagaacaggatagggggacagcccccaggatttaattatctccacatggtttgtcccacaacacctggggatttgagtggggacacagccaaaccatatc

SEQ ID NO: 177267 - DNA, 570 bp, Homo sapiens
taacatatatccataggcaacaagctgaactttggcttctcataccttacacaaatattaacacggaatggaccacagacttatgtgtaaaacatacaaccacaaagcttttgagaaaaaaaaaaaggagaaaatctttgccatccaggggtaggcaaagagtttgtagatttgacactaaaagcatgatcygtaaaataaaaatttggtatgttggagtttataaaaattgaaaactttcttctgtgaaggaccctctaaagagaatgaaaatataagctacagaataagagaaaacacttgtagaccacatatctgagctatcaggaaaaagtgaagaactctcaaaactcacccgttaaaacaaaatccaattataaaatgagcaaaatacatgaaaagatacttcaccaaagaagaaatatataatgcaaataaacatatgaaaagacgctcaacatcagtcattagagaaattcacataaaagtataatgcaatatcactataaacctcttagagtggctaaaataaaagagtagcaatatcaaaagtgggaaagaatgtagaga

SEQ ID NO: 177268 - DNA, 570 bp, Homo sapiens
taacatatatccataggcaacaagctgaactttggcttctcataccttacacaaatattaacacggaatggaccacagacttatgtgtaaaacatacaaccacaaagcttttgagaaaaaaaaaaaggagaaaatctttgccatccaggggtaggcaaagagtttgtagatttgacactaaaagcatgatctrtaaaataaaaatttggtatgttggagtttataaaaattgaaaactttcttctgtgaaggaccctctaaagagaatgaaaatataagctacagaataagagaaaacacttgtagaccacatatctgagctatcaggaaaaagtgaagaactctcaaaactcacccgttaaaacaaaatccaattataaaatgagcaaaatacatgaaaagatacttcaccaaagaagaaatatataatgcaaataaacatatgaaaagacgctcaacatcagtcattagagaaattcacataaaagtataatgcaatatcactataaacctcttagagtggctaaaataaaagagtagcaatatcaaaagtgggaaagaatgtagaga

SEQ ID NO: 177269 - DNA, 570 bp, Homo sapiens
taacatatatccataggcaacaagctgaactttggcttctcataccttacacaaatattaacacggaatggaccacagacttatgtgtaaaacatacaaccacaaagcttttgagaaaaaaaaaaaggagaaaatctttgccatccaggggtaggcaaagagtttgtagatttgacactaaaagcatgatctgtaaaataaaaatttggtatgttggagtttataaaaattgaaaactttcttctgtgaaggaccctctaaagagaatgaaaatataagctacagaataagagaaaacacttgtagaccacatatctgagctatcaggaaaaagtgaagaactctcaaaactcaccygttaaaacaaaatccaattataaaatgagcaaaatacatgaaaagatacttcaccaaagaagaaatatataatgcaaataaacatatgaaaagacgctcaacatcagtcattagagaaattcacataaaagtataatgcaatatcactataaacctcttagagtggctaaaataaaagagtagcaatatcaaaagtgggaaagaatgtagaga

SEQ ID NO: 177270 - DNA, 610 bp, Homo sapiens
tctgccaaaattgacacctaatgaaacttctagacacaacaaacatatttttttggcaagttaatttgaaatgtcattttcccttaagggggatagctagacctctttgtcaaatagaatgagtttatgaggctacctgaagcctggttcatgcagtagcacaaactatttctgtgaatttggcctagtcacttaatatctttgcatataaatgatctcgtgaaataaaattaaatattgaataaatagtttttaagtttcttcsagtttgacctactaatattttatgagtttataggtttccttaacactggggacaggaacaatctggaataaactctctaaaatgaaactgtacaggtctcatcaatggaacaggaaaaacaaagatttagcttcatagatttatttaaatgagaattaaaaaaactataaatctcactgaaaatgtgcatgtgacttatggttatccagaggctcaattataggctaccctttgagagttattaactaggaagcatcccaacaataatgggtaattgccttagaaaacccagtctggcatagcttgaatgagtctggttcctattcacaacccatcatttaaaaa

SEQ ID NO: 177271 - DNA, 426 bp, Homo sapiens
aattcagtgataatcatatttatacttcagggttgttgtgaagattaaattaattatgcacgaaaataactgacacgtagtctatgcccaagtaatattagctattatcataattaggtatgggttttcctcttttccatatatagtgtgtgctggttaccgaaatccctctaatagatkactatccactttgaatcaattatgaatgcttttaaaatgtcaatagtcctgggaaggtttgtctacgatgtcatggacacttgtaataaatatgttcaccactttttcattgccagagactaaatggggcaggaaagcttatgtttgaccaaaagaaaggggaacatcatgatggaaagaagagagccaaggaggttagcagatgctaaatgacacatttcactgatgttgcattttcacttagtc

SEQ ID NO: 177272 - DNA, 535 bp, Homo sapiens
tctgagcctctttaatgctggactagtacatttcctttttttcatgctattgatttacgcaaaaagaaaacaaaataggtcagccaatttgaaggacgttccatattgaagatatgtctttgttttttctaaccttattatttcctgaaaactggaaatgagctctcatgacttacattctactagaatcaggttcaaccatttggtaagaatattttacagatggtgctaaatattttatattcaccatatcaagagacacaaaatatgtaactatctcttggtgatgctatgatttacctgtgagttcagggtgtgacagccccatcctcttattctttttcttatcmgcatttcccatgattgtctcctgtttttaattattggtgccagccccaatgattaaatgggaaattgcaaaatatttgtaattctatcatttcttctacatatattagtaataattattttaacaaagaataacttttcaatatttagataatagtatgatttgagcaaactgaaaaacaattcc

SEQ ID NO: 177273 - DNA, 535 bp, Homo sapiens
tctgagcctctttaatgctggactagtacatttcctttttttcatgctattgatttacgcaaaaagaaaacaaaataggtcagccaatttgaaggacgttccatattgaagatatgtctttgttttttctaaccttattatttcctgaaaactggaaatgagctctcatgacttacattctactagaatcaggttcaaccatttggtaagaatattttacagatggtgctaaatattttatattcaccatatcaagagacacaaaatatgtaactatctcttggtgatgctatgatttacctgtgagttcagggtgtgacagccccatcctcttattctttttcttatccgcatttcccatgattgtctcctgtttttaattattggtgccagccccaatgattaaatgggaaattgcaaaatatttgtaattctatcatttcttctacatatattagtaataattattttaacaaagaatwacttttcaatatttagataatagtatgatttgagcaaactgaaaaacaattcc

SEQ ID NO: 177274 - DNA, 582 bp, Homo sapiens
tgaggttggatcaaagctcatagtttcatcccagagactgaggcctcagttgtatgtggttgaggccaagttaggtggtatatatttctccctgtgtattgattgctctctctcacttatccatattacatcgttaaygggcttgataaagatttcactgtaaatgctgtgtcacaagactgattgcataaaagtgtaaatagaggtcagaaggtagtgactcagaaactgtttatttatggacttgcacattacaggaaggtgacagggttgtcaatgtggtgctctcaacagattggtagtcagctgattgctgtcaagagggattcaaagtgtcttatctccagattttgagtcgtagaaaaataattggggagtttaatacctggtcccacctccaatcagttttgctatcaccattaaagatcatacactaatgatatcataatgtactaccatctcctgcttgagatacaattttttagctactttccctaatttcactcttaccctcactcccactgacttattttcatagcaggaatagcacttaatattataattcatcagtgactgatttcc

SEQ ID NO: 177275 - DNA, 479 bp, Homo sapiens
atcttcattttacagctaagaaaacaccttcttggcaggtattattttcttaattaagattgtaaaatcaatgttaaaagtaattttttcaagtctacaaatgtagtaaatgacaaaacagattggaacctagatgttttataatctgcactttgcttttctgatgacaaacagaatgcatgtgtatgtgtatttatgtggggtctgccttcagttaagtattgtaatgaaaacaccttcgattagtaaaaaaaaaaaaagaaaatcattatctgagtgcctatctatgtgctgaaattgagttcatttctctaagagtatacacatagtatgaaagagagaataagccacaaaccatytggtataaaatggtaagttttaaaaataaattattaaagaataagattgccttgaacaacgtgctggttattgggtatgtatataaactcagcacagagattagggagaacgagcttaaa

SEQ ID NO: 177276 - DNA, 522 bp, Homo sapiens
tgttcattcctgtattaccacctttttacagactcatcatacatgcatcctgctgagctggtacaggtgtgtttagcaggtacatcagctgtgtcacayctgctgtcagaaacagccttttatagaacagtagcgcaggcctcaccacagtgggaggcatgaggggaaacttctggattggattagtcacctcttactgcctcattatgtttgatgcccacaagggacagattgatctcaatttagaccagattaaagttttcaaaacttttctattgagctgcttcatttggcaccctctttgagagtgccacgttatggtgggtttagctcctccctttcaaagcatttccaccgactgggatgatggtaacaagcttcttaccatgactactgaagctgcaggtaacttcaggtggtatgtgctgaaccgggcttgtgcactaatctggctctccttgtgaatggcttgttcattatgccaatatcaaagtgcagggagacaagaatttgaaagagtag

SEQ ID NO: 177277 - DNA, 544 bp, Homo sapiens
ctctcccactgccctgaggctgttaagtttcattttcactctccttctgtggctccttcatatggtagggagcttgcaaaccactgggttttcaaccttcacttgctgttccatagcacttcgctattggttgtgaaatttatagagcagttggttaaaagcccttaaatcaatctggctgtttaaaactggagactgcctttggcagaaacattcctaagcatcttgcttggctggtatttttaattaacacagctaattgccttgtagtattagtacaggccagtaggacacaattaacaagagagacaaagacagagatgttgttaggtctaaggaccaacttgggagagcttggtctaaatcttattgctaggttaaacgaagttgcccwaaatccttagaagcattgcctttatcagaccctgcatctgaagtttctaggctttggcagcagcaaggttctctatggaggttcaagctctgaggatttttaaagcaagggactagggttaactcactgcaaacatttcacaatcaaaga

SEQ ID NO: 177278 - DNA, 550 bp, Homo sapiens
ttttttcttctttttaaactttacatcattctcttaattttagattggaaagacaattatttgtacaaactcccaaaagctgtaggcattaaaaaaagtttgcatacaagctcaagtgagttgtttgaattatgcaagagcataaactgcagtcttttctgtgcctcttacgtgttgtgcagaggtacagccagcacctggcattgtgtctaacaaccctttgtcatcgcattggtcgtcaaccatgccaaacccattgggtagcactgtctacagttgaatgacaatatttaagtccccataaascaatttttcattcttaaaaatatcctgaatgtggacaattcttttcggttggaacagttatggttttgcagcaggaatattacaattgggaagattatgcaagtagcttttctaacacatacaacaatgaataagataagctgtactccacagacaaactgaactgcatctcttgaccattatgctgataaaatatttcagtaaatcagtctttacgctgtccttgggcttttgcaatctcagc

SEQ ID NO: 177279 - DNA, 570 bp, Homo sapiens
tatttaattttcatgaacttcataaaacgtatcccaatcagatcacttatgataatttgttcaataaaaaatgcygtgcacctgaattggaacaacaaaaatagcatataaagtgatgcaaatttaaatgttaaatgggacctactgaaggcctagacagtcatttcatgcttcctgagttcctaaaattgctactgttaaaggttctttactccacaacccatcacgaagtagacaaaacggttcaaattatgaaaaagaacttatggggtgattgttctaaagcagtcaaaatggtttataaccaatgtctgactggttaaactcataatactaaaaaaaaccctgaaggtttccagtggcatatttctaccatatgctggacaatttgaacatctgcagatggatttcattcaattgccaacttcaattggatatcaatatattcttgtgattaagagcctttttttaaagagggattgaggcttttccttgcagaaagaatgatgtcacaacagtagcaaaactattaaaatatttgtttcctttgtggggcatccctaaataaat

SEQ ID NO: 177280 - DNA, 597 bp, Homo sapiens
tctttcatgaacataaatgcaaaaatcctcaaaaaaattaacaaatccaaaaatgtatagaatgaattactatagtacttctttatccacggtttcactttccatagttccatttacctgtgatatagtatgataggatatattgagagatgacattcatataacttttattacagtatatygctatgttgttctgttattacttattgttgttaatctcttactgtacctaattaaactttataatgtgtattatatatagaaaaacaacacatatagcgtttggtaccattcctcatttcaggcatccactgaggaacttagagcatgtctcctgctgataaggggagactgctgtatatactacaaatagatttattccaagtgtgcaagcctggttcaatattgacaaatcaaatcatacaattcatccattcaacaggctaaaagaagaactatcatatattgtatcagcagatgcagaaaaactagacaaatttcaacactcatccatgtgagaaactctcagccaactagaaatagaaggaaatttcctaaacttataaaaaacatttattgtaaaaaattcacagctca

SEQ ID NO: 177281 - DNA, 483 bp, Homo sapiens
caaatttcaacactcatccatgtgagaaactctcagccaactagaaatagaaggaaatttcctaaacttataaaaaacatttattgtaaaaaattcacagctcatatgctttatagtgaggaacttcaagtttccttcctgagatcaggacaaaggtaaaaatatcccatctctcaccattcctatttaacatcatattggaagtcctacttaatgaaataaatgaagaaaaaatatttaagttgggaaaaaaaaactgtcttttcttgcagaaaacatgattttttatgtagcaaatcctaaataatcaacaaaaaactcctggaattaataagtaattatcacaagtttacaaagttaacacataaaagtttgttgctttcctctatactagcaatggacaattggaattayttctatttatgttcatttttagtagagatgaggtcttgctacgttgcctaggctgatctcaagaccctg

SEQ ID NO: 177282 - DNA, 391 bp, Homo sapiens
ggaagctagaaagaaccctgcagtattggactagaattcaagatctcaatatttataaactagtggctttcaatattatatgtatgaacacacacacactcttagagagatgagataaagaaagataaatagtaaatacatttatttagttctgtccactgaaaagccctagaaaaagacacctagaaaagaatatctcagtagcagtgagcayaccgagctcttagatctgaggttctaaataccatttccaactaaaaggagacaatgctctctggagaaatagctaattccagggttagaggaggagagtacaaaacgagataagaacattttgtcatgccagaaattaaggagtgctaaaaagtgttgggtgcatgtcacaaaaaca

SEQ ID NO: 177283 - DNA, 567 bp, Homo sapiens
agagagaatatggtataatgaaaggagcacagaatttggaatataagaaatttaagtttatatactgacactggcacttcttagctgtgagacttcagggaaagaactaactagagtttcctcctctataaaatgatgattatgtggataatgtcaatacttctctcagaggatgactatcacatgcttagtacatatactatgtcaggtattgtgcygatattatatgcacatgaattttgttcatctgcatgtaatattgaatattgaatctagttcatgtgtatataatattagcataatgcctgacataatgtatgtactaagcatatgacagtgattaactctttgtaattaaaattaactctttgtacaaacagtgattaactcactctttgtaggaatgatattcaaaatatttaaaatgaatatgacacaggcatatctcaatcagtatgagtgctgaccttaaacatctgggactctagttgcttgcacaggctgaatatcaatccctagtacaagaaagtagaaggaaatacaactggaaaaggcagttgggagaga

SEQ ID NO: 177284 - DNA, 589 bp, Homo sapiens
tgacctctgtaactatttagtgaggaaagaaggttttggggtgataaatattgaacttctagaagatgcttgaggtgtcacatttctctcttccatatagaggtcttacttcacaacattaataaaatgtcccaaatgactatgaactatgtttgtattttctagatactcttacatgcaatgactgctaaaggaagaggcctggactgtaacagagattattctgtgtctttgttttgtgctactctatcagaataccacagattaggtaaactctaaagaatagaarttttttttcacagttctggagactgaaaaccaataactctctggttccaagatggctccttgttgctgtatcctttagacagaaggaacactgtgtcctcccctgacagaagagagaaagagaggaagcccataagccctttttatagtgtcactgatacattcatgagggcagaactctcatgacctaatcgcctcctaaaatgtgactactctcaacactgttgcattagggattaagtttccaaaacataaattttgaaggggacaaaagcattcaaaccacagcactccagttttt

SEQ ID NO: 177285 - DNA, 579 bp, Homo sapiens
  misc_feature (1)...(579): n = A,T,C or G
ccttccaaaatcatgcctcactcttaaaattttgcaaaatagacatttcaaaaataatagatacaaatgacacctcatttactcttatgagaccaatgctgtgagaatgttggtttaaagataaaataatatttaattaatcatgtaaaatattaattctgctaaactattattcttccaatggccctaattttttcattaaaatggacacggtgcttgtaattgtgttagtgagttatagatgtagagagaccacaaggactttgtgagtgtcaracttcttggtctgttgctcagctcacatccaccagcctattctttgtgagcacaaatgactcagcttgtttatgtgctcattctcattcttccagcagccactaacactctatcctttagaggataaatctttcaagtctagctgtggggagatgcagggtacccaagttctcccctttnnaataagttttctcactcaggtacaccaacagtggtactaaaataaacaaaaaaaaatttgaagtaacaaagctttcagaaatcttaccaaagtctcataacgtggggactgcagtttccact

SEQ ID NO: 177286 - DNA, 605 bp, Homo sapiens
taacaacagcataagcaagaagcaggatgatgtgtgcagaatatattaaatacctaccaacctaggctagttactcaaagccatataattccaaatgttttgtcagaagataaatcagtaggcttgaactactccacacagggtgtgctgtgtaacaaaatcaaaatcgtaaatctgttaaagtttttygggtacctgaatgagggaaatgtttcctgaaggcatctgagagaaagttggcacagtatgggagaaaatacccaagatcagaaagcaagggactctgattccaattactgcttttgatttcatttgtgatgacgttttacaaaagccttttaaccttgtcattattgcttatcacttgggaattatatatctgtcctgcttggtttgacaagttaatatgacattcatgtgagaaaggagttgtgaaagaaatttgtaagttggctgggcatggtggctcatgcctgtaatcccagcactttgggaggctgaggcaggattgcttgagtctggtcattcaagaccagccaagaaaacatagcaagaccccatgtctacaaaaaatttttaaaattagctgggtataaagtggcaca

SEQ ID NO: 177287 - DNA, 605 bp, Homo sapiens
taacaacagcataagcaagaagcaggatgatgtgtgcagaatatattaaatacctaccaacctaggctagttactcaaagccatataattccaaatgttttgtcagaagataaatcagtaggcttgaactactccacacagggtgtgctgtgtaacaaaatcaaaatcgtaaatctgttaaagtttttcgggtacctgaatgagggaaatgtttcctraaggcatctgagagaaagttggcacagtatgggagaaaatacccaagatcagaaagcaagggactctgattccaattactgcttttgatttcatttgtgatgacgttttacaaaagccttttaaccttgtcattattgcttatcacttgggaattatatatctgtcctgcttggtttgacaagttaatatgacattcatgtgagaaaggagttgtgaaagaaatttgtaagttggctgggcatggtggctcatgcctgtaatcccagcactttgggaggctgaggcaggattgcttgagtctggtcattcaagaccagccaagaaaacatagcaagaccccatgtctacaaaaaatttttaaaattagctgggtataaagtggcaca

SEQ ID NO: 177288 - DNA, 605 bp, Homo sapiens
taacaacagcataagcaagaagcaggatgatgtgtgcagaatatattaaatacctaccaacctaggctagttactcaaagccatataattccaaatgttttgtcagaagataaatcagtaggcttgaactactccacacagggtgtgctgtgtaacaaaatcaaaatcgtaaatctgttaaagtttttcgggtacctgaatgagggaaatgtttcctgaaggcatctgagagaaagttggcacagtatgggagaaaatacccaagatcagaaagcaagggactctgattccaattactgcttttgatttcatttgtgatgacgttttacaaaagccttttaaccttgtcattatygcttatcacttgggaattatatatctgtcctgcttggtttgacaagttaatatgacattcatgtgagaaaggagttgtgaaagaaatttgtaagttggctgggcatggtggctcatgcctgtaatcccagcactttgggaggctgaggcaggattgcttgagtctggtcattcaagaccagccaagaaaacatagcaagaccccatgtctacaaaaaatttttaaaattagctgggtataaagtggcaca

SEQ ID NO: 177289 - DNA, 605 bp, Homo sapiens
taacaacagcataagcaagaagcaggatgatgtgtgcagaatatattaaatacctaccaacctaggctagttactcaaagccatataattccaaatgttttgtcagaagataaatcagtaggcttgaactactccacacagggtgtgctgtgtaacaaaatcaaaatcgtaaatctgttaaagtttttcgggtacctgaatgagggaaatgtttcctgaaggcatctgagagaaagttggcacagtatgggagaaaatacccaagatcagaaagcaagggactctgattccaattactgcttttgatttcatttgtgatgacgttttacaaaagccttttaaccttgtcattattgcttatcacttgggaattatatatctgtcctgcttggtttgacaasttaatatgacattcatgtgagaaaggagttgtgaaagaaatttgtaagttggctgggcatggtggctcatgcctgtaatcccagcactttgggaggctgaggcaggattgcttgagtctggtcattcaagaccagccaagaaaacatagcaagaccccatgtctacaaaaaatttttaaaattagctgggtataaagtggcaca

SEQ ID NO: 177290 - DNA, 488 bp, Homo sapiens
atccccaggccgtgatccccttcacccagacccggccaatccctcgcccgaggcgagcgggaggatgcggttctaggacccggaggcgccgccgagcgcgccgccgcttggcctcgcctcggtggcctcccgctccggcaggtgaagcggcgccggcgccccctctgcggcaggtgaagcggctcggcagcccactccccgcccgccatggttgcgggggtcccccggccagcgcccgccccctccctccagcccagcccccytgggctgggtgcccggcggcggcggcggcgaactgcggtttgcgcgcacggggagcgacagcagaagttcgaaaatcgccgaggggggagccagcgccgcagcttcctgcccccggcccagccctctggccccggcggctgcagcctgacttcctcccccaaccctgcagctcgccgcccggtcccacggacggggcgccccgatgggacgccgcgctccggccc

SEQ ID NO: 177291 - DNA, 488 bp, Homo sapiens
atccccaggccgtgatccccttcacccagacccggccaatccctcgcccgaggcgagcgggaggatgcggttctaggacccggaggcgccgccgagcgcgccgccgcttggcctcgcctcggtggcctcccgctccggcaggtgaagcggcgccggcgccccctctgcggcaggtgaagcggctcggcagcccactccccgcccgccatggttgcgggggtcccccggccagcgcccgccccctccctccagcccagcccccckgggctgggtgcccggcggcggcggcggcgaactgcggtttgcgcgcacggggagcgacagcagaagttcgaaaatcgccgaggggggagccagcgccgcagcttcctgcccccggcccagccctctggccccggcggctgcagcctgacttcctcccccaaccctgcagctcgccgcccggtcccacggacggggcgccccgatgggacgccgcgctccggccc

SEQ ID NO: 177292 - DNA, 568 bp, Homo sapiens
tcttgtgagttaatgtgacctgcttgtacccttcagactctratcatattagaacttttgtcttggggaaaagaaaacacaaaaacaaaggaaagtccatgggttactggcttcctggggcttccccgggctggacccttggggcttaagtaattttattagattctctctctctctctctctctttctctctctctctctctctctgtctgtctccttgtctctgtcctcctctctctttactagattctttctctctttctctttttattagattccctctctctgtctctgtctctgcctctctttctttattagattctctctctccctctctttccccctttctcccccactcccttcttatcttcctcttcttcctcctcctcccaactttttagtctgctacttggtctcattttatccaagtgtagatggactttttttaggcagttagggaaaatggttgccagaagctccacgtttatactatctgagcttagtaacttcaggaaaaggatagatgctttttcccatatatcaatctcaagaaaggattctgagttcc

SEQ ID NO: 177293 - DNA, 633 bp, Homo sapiens
agccagggccttatagaaaacgaagtcatagctccttgctgaaggcagactgacccttgatccagcactaccatgtctttagcaaagcagtggcctagattctccacatagctgagtgtgtggagctggaaagataaagattgcaaatatggccactttccaaaacagcttcctaagaaacagcctaccttcccctccctctcactcccccactatgtttatttagactccccttaattagtgaatttcagcctggaagcataatccaatctgaaggaaaatttccctggagagccatctgttagaattagactacacttagctactggacagtaaggctgtattgtaaataccacaaactgtttcgattctcgaaaggttgaaaactcattttccaagcaagcaaatgccaatccatgggacaaggctttctgtcaggaaactggatcactattttggatagtaatacytccataggtagaagaccattaaatgtagtcccaggggaatgttctcccttactggtctcacctttcttcagagatgaaattgctgaccttgacaactctatttcttttacagctgttccaggtttgtagaagatttgtttttttcatctagctcaaccctccc

SEQ ID NO: 177294 - DNA, 554 bp, Homo sapiens
taattagtgaatttcagcctggaagcataatccaatctgaaggaaaatttccctggagagccatctgttagaattagactacacttagctactggacagtaaggctgtattgtaaataccacaaactgtttcgattctcgaaaggttgaaaactcattttccaagcaagcaaatgccaatccatgggacaaggctttctgtcaggaaactggatcactattttggatagtaatacttccataggtagaagaccattaaatgtagtcccaggggaatgttctcccttactggtctcacctttcttcagagatgaaattgctgwccttgacaactctatttcttttacagctgttccaggtttgtagaagatttgtttttttcatctagctcaaccctccccatgtgttcagccatggaataatttaactgtgtgaaggggatgcagcaaaagtccacctcagctctctgcaaagccaacctgcctctcaggagcatccagcctgctgtgcagacacctgtctttggtagccacaacgccaaggcagcaagccaac

SEQ ID NO: 177295 - DNA, 566 bp, Homo sapiens
atattagactgaggaaaaatattattcaagatgtagatatgagtgagacataatcttttcaagagcacctagcacatttataaaaactgatgtgtaagagaacataaagcaaatttgaacagatatcaaataatctataaaatacactccatattatccaatcacatttttaattaagttacagaaataatgcttaaaaaaactatgcaatatgaaattttaaaaacacacctttaaacaatatatagaccaaagaaaaactcatayttgatgctagaagatgcttagataaaaataaaaatgaaaacactaaatatcaaaatttgcaaacataaagctaaagcactacttcaagggaaatttatagtcttaaatgcatattttaaaaaagtttttaaaagactgcaaattactaacctaaagatataagtaattattaaaaatatcaactgaatagactaaagaaaaaagaaagaaaatcatacaggaaaaataatggaaaacaaaaattaaatagaattaatagaattaaaagttggttatttgaaaaggccaataagactgat

SEQ ID NO: 177296 - DNA, 527 bp, Homo sapiens
atacattttattacaccaaacataacctctatttatcaaagacaccataaagtgaatacaaagacagccataaactgagagatgatgtttgtaaaacacataaccaacaagggatttgcatcccaactgcttaaaaagcctatgtgaatcaasaaggaaaggaaaacaaaagaataagtgctgaacaagaattttcacaagaaagaaaacatgaatgaccaataaacatatcaagagatggtcaaaccggacaactgaagaaatgccaataatatatcattttgcatacatgcacacacatacattgatcagtgtggcaactgcaagagttggagagaaagtggaacactagggatcatcacatttcaacagtggaaggatcaatttgtgatacgtgcaaatgactgaaaaagactgtcattatctagaaaagctgaacacatgtataccttacctctatcagggataaactctagagaaatgattgcatatgtgaaccaaaagatgtgtacaaaatctctgcgata

SEQ ID NO: 177297 - DNA, 354 bp, Homo sapiens
atagaagttatagagttaaaataataaagaaaaatcatgttcacgaaacatttaaaaaattaatcagcacatgattaattttttagacatgacaataaaaaggaaaagttaaatccaacaggtaaaaatcgcatgggccacatttactgaccataaaataatcartgagagattaagaagtaacaataacaatgccaaaactctaaacacttaaaaattgaactctttcagagatctcttgagttaaaaaaaatcagaaatggacactgaaattatagacattgagaatacaatggagtataaccaaagctatatctagatgacaatttctaattctcagttgttaatagcaaa

SEQ ID NO: 177298 - DNA, 637 bp, Homo sapiens
acagttactttaacagtgaatgctaattattagtaggatccatcgcttaagaaggactttttgccaatcttgtcatgtctggggaaaatatcaggaatagagttggcatttctgagaaaataggatgatcaaactattaacgtcgtccatgttataggtggacccggcttggaccatcagtgtgattattacaggtgaagattaaggacacttgagagaaatgttacaattaagatttcctctccccttgctaaataaatggtttcttgctgttgcctctcacaatggtttttgctttagaaagaggctctgtaagtacaggatttctcagttagccagtagtactaggaaatatggtggctgggaaggagggaagggaaaccagatgtccccagagagcccggtggctcactggacatttgatccaaagaccccaggaagctgggctactgagggtgcaacacatatccaaggaccctcraaactttccttcatttgcacatcaattcattagtgaaagaaacagggactgggccactcctaagttgcagtcactggggagaggtgggtaagtgggccttccccttgaaaagtacccagactggtggaagtgacaaatgtgtaatcaagtgtaata

SEQ ID NO: 177299 - DNA, 582 bp, Homo sapiens
atatctccgccacacaagagaagagaatatggccacttccctctttactagcyactaagagcttcttagtctatgcatgggctccccacttgggaatggtataggctctgtagtcagactgcctggttggggcatggcttcagcactaactagctatgtgagcttggacaagttaattaacctctgactctggattcttctctataaaaaggccatagcccaaggtaaaagtgccaaaaggaagaagatatagctcctgccttcagcatctcagagtggcaaatatatcaaattccatgtggtaataggaacataggcagagaattaccaaagcagagagcacaggctaggagaggccctgaagattgcacagagaggtctgggtcttcaaagatacaaaaaaaaaaaaaattaccagcagagaagtgagcaggagttattcaggaagaaacagcacacaaagaaatgaaagagaaggtttgcgatgagtcagaaggtgggtgtgggggttaagaatagtttagcctgattggagaattgagtatgttaggagaaagaactgctggaaaagtcattttttat

SEQ ID NO: 177300 - DNA, 582 bp, Homo sapiens
atatctccgccacacaagagaagagaatatggccacttccctctttactagccactaagagcttcttagtctatgcatgggctccccacttgggaatggtataggctctgtagtcagactgcctggttggggcatggcttcagcactaactagctatgtgagcttggacaagttaattaacctctgactctggattcttctctataaaaaggccatagcccaaggtaaaagtgccaaaaggaagaagatatagctcctgccttcagcatctcagagtggcaaatatatcaaattccwtgtggtaataggaacataggcagagaattaccaaagcagagagcacaggctaggagaggccctgaagattgcacagagaggtctgggtcttcaaagatacaaaaaaaaaaaaaattaccagcagagaagtgagcaggagttattcaggaagaaacagcacacaaagaaatgaaagagaaggtttgcgatgagtcagaaggtgggtgtgggggttaagaatagtttagcctgattggagaattgagtatgttaggagaaagaactgctggaaaagtcattttttat

SEQ ID NO: 177301 - DNA, 581 bp, Homo sapiens
atacagcctagtcctcctaggctacttaacctgtaccggatgtgactatactgaatactgtaggcagttgtaacatgatggtaagtatttatgtatccaaacaagaaaaggtatagtgaaaatacagtattataatcttaagggattgcyattgtatatgtgagcccatcattatccaaaatgtcattatgtgacacatgactgtatatgattctactgggcatacagagacaaaaatttatgaaataatacccttgctgtgcacaatgaggtctgatgttttctattctgttctacgctgtgttattctgttctatttaattaaacactgctcttcataactccctaaagtaatttttaaatccatggtttggaaaacattggccgaaaagataattaatttacctaagaaggtaaatattagcgtattaaaaataatggaaatcatgtaacctaagccatatacagtgagatgtttagaaataaaggtcatagttttaaggtcaagaaagactcaattcttaagaaattagaaaatagagtagcatggtttaaatgtgtaccatggttctagatttcat

SEQ ID NO: 177302 - DNA, 536 bp, Homo sapiens
ttcctctcaggccgggcatggtggctgacacctgtaatcacagcacattgttgggaggccaaggcacgtgggtcacctgaggtgaggagtttgagaccagccagaccaacatggtaaaactccgtctctactaaaaaatacaaaaattagccggacatggtggtgggtgcctgtaatccsagctacttgggaggctgaggcaggagaatcacttgaacctgggaggcggaggttgcagtgagctgagatgtgccattgcactgcagccggggtgacagagcaagactccatctcaaaaaaaaaaaaaaaaaaaagtgcctctcaatgaggtgtaaaggtagtggtacttacggcagactagaaagatgctatgtcagtcgtgctgctagggacctctgaggagctaaactctggttttagctactgaaatgggaaagaagtagctcgcctgtacccatgcttaactccaggagggaggggaaacacaagagtaacacttcccaatagtatgtctcctgagaattgggatatcttat

SEQ ID NO: 177303 - DNA, 464 bp, Homo sapiens
ctctgactatcacaggaaaatataacattaaaaatgctttggacaatcttaagaacagcattatcttaatagacagctttcatagactccaacacatgtgcacctatgcatgtgcatgccctccatcccaacacatactcacagctaaatcagcagtctcacagcgattttgyttcaactgatttatctttttccaacttgaaagtcatgttacccatttcaaagcttgaaaaatgcatcaaaacttatttatatccattttaacccaaatttaagatgacagagttaaattctcatctttccactttaaaagatgtttgcaaaaataaacacaaatcatttaaaacttattaatagggaggcagcagcattgatttgcagtttgaaaacattttcctagcaaactacatatagctccaacactaagaatttagaatattagaatctcatagaatctaatgttg

SEQ ID NO: 177304 - DNA, 491 bp, Homo sapiens
aaatgtaaagcctacttttggcaattgctcatgtggagaggaatgaatgcagtgttcttgaaattattgaaatattagatccggaagctgaagtgggagaaccatctgagtccaggaagtcgagatcatagtgaactctcatcccgccactgcactccagcctggatgacaaaagtgacactctataagacaaaaaaaaaaaaaaaaaaaggcggggagggggctggtcacacatactctcacctagacaaggatattgacgaccaattctgaagcatgatataacgcaataagaacgtgaatataacaaagtataacctttaaaacacaacgctcactcacctaaaaaaycgttcacctttgtttgaagtactacaacctcccaaccccaccgttttctccaaaaaccccctcaacacagcattctcagaaacaaaaagaaagaacgcacacacttaagctaggaaaaacacacataattacacctcacc

SEQ ID NO: 177305 - DNA, 659 bp, Homo sapiens
caactcagggctattcttagcagaagagttgtaatgaattatagatayaaagaacaacctctcaggttaaacccgagataagtaccaaagtattatacacaaagtcacattcctaaacaaaggtatttactttggtgttccaataacagctaacatttctggagcaactattgccaggtactccaataagtggtttaaagccattacttcatttaatcctcacaacaaccccatgccattggtattatccccactttacaaaggaagttctgaaaatttaagaaacttgtgacctcaggcacaaagcttgtggtggaatcaagatatgaccttaggcagtctactactttcagagcacacatgcttaaccagagcactgtactagctgttaaactacaaaaataggaaaacaatcacttttcacagagaggaaataatttttatgtatgtttatataacaatgacatagttttattttgcattttaacacagaaagatgttcacatcctcataaactctgaggtacgcatttgacttaaaaaaggcaattaaaatttttaaaaagccaaaatgttatataattgtctattttattcccaattgttcagcaaactcagctcacccaaccaagtaccccaggagctcatgaaagtcactgt

SEQ ID NO: 177306 - DNA, 659 bp, Homo sapiens
caactcagggctattcttagcagaagagttgtaatgaattatagatacaaagaacaacctctcaggttaaacccgagataagtaccaaagtattatacacaaagtcacattcctaaacaaaggtatttactttggtgttccaataacagctaacatttctrgagcaactattgccaggtactccaataagtggtttaaagccattacttcatttaatcctcacaacaaccccatgccattggtattatccccactttacaaaggaagttctgaaaatttaagaaacttgtgacctcaggcacaaagcttgtggtggaatcaagatatgaccttaggcagtctactactttcagagcacacatgcttaaccagagcactgtactagctgttaaactacaaaaataggaaaacaatcacttttcacagagaggaaataatttttatgtatgtttatataacaatgacatagttttattttgcattttaacacagaaagatgttcacatcctcataaactctgaggtacgcatttgacttaaaaaaggcaattaaaatttttaaaaagccaaaatgttatataattgtctattttattcccaattgttcagcaaactcagctcacccaaccaagtaccccaggagctcatgaaagtcactgt

SEQ ID NO: 177307 - DNA, 631 bp, Homo sapiens
gttgctttaacgttatgcagtcatttctgatagaatgaggcctgtagcattggctcttacatatataatttttcttaatatcatttaattctgaactcttgatgagatgcaccagaagtaaagttattaaagagtgaattgaagaactggttggttcaacaggtaacaaaagatgccttgtatctgcttctgatgtccaattgatgtcatcaacttctttgtgctcctttcccttaattctgtcagatatacccttgttttatttacctttcagaggcaattgtaaagttctcrctttgccattttactttccttcacattattttgtacactggatgttagtggcggatctttttctttagtgcctgctcaggcttctgcttccatggcaacataacaatctggtaatatcttcctctgcttgccccccagtttctggactctttacagttcctatcatagaatcactagccctccatgtttcttcccctcctcaaccagtcactcagcaaacctttttctaggcatcttgtcctgttcgtaagcacatttctttatcaaaaacctgcttgtcttttacctcacccctttttgcagtcctaccttacattctgttcattgcgtcttgacc

SEQ ID NO: 177308 - DNA, 631 bp, Homo sapiens
gttgctttaacgttatgcagtcatttctgatagaatgaggcctgtagcattggctcttacatatataatttttcttaatatcatttaattctgaactcttgatgagatgcaccagaagtaaagttattaaagagtgaattgaagaactggttggttcaacaggtaacaaaagatgccttgtatctgcttctgatgtccaattgatgtcatcaacttctttgtgctcctttcccttaattctgtcagatatacccttgttttatttacctttcagaggcaattgtaaagttctcactttgccrttttactttccttcacattattttgtacactggatgttagtggcggatctttttctttagtgcctgctcaggcttctgcttccatggcaacataacaatctggtaatatcttcctctgcttgccccccagtttctggactctttacagttcctatcatagaatcactagccctccatgtttcttcccctcctcaaccagtcactcagcaaacctttttctaggcatcttgtcctgttcgtaagcacatttctttatcaaaaacctgcttgtcttttacctcacccctttttgcagtcctaccttacattctgttcattgcgtcttgacc

SEQ ID NO: 177309 - DNA, 631 bp, Homo sapiens
gttgctttaacgttatgcagtcatttctgatagaatgaggcctgtagcattggctcttacatatataatttttcttaatatcatttaattctgaactcttgatgagatgcaccagaagtaaagttattaaagagtgaattgaagaactggttggttcaacaggtaacaaaagatgccttgtatctgcttctgatgtccaattgatgtcatcaacttctttgtgctcctttcccttaattctgtcagatatacccttgttttatttacctttcagaggcaattgtaaagttctcactttgccattttactttccttcacattattttgtacactggatgttagtggcggatctttttctttagtgcctgctcaggcttctgcttccatggcaacataacaatctggtaatatcttcctctscttgccccccagtttctggactctttacagttcctatcatagaatcactagccctccatgtttcttcccctcctcaaccagtcactcagcaaacctttttctaggcatcttgtcctgttcgtaagcacatttctttatcaaaaacctgcttgtcttttacctcacccctttttgcagtcctaccttacattctgttcattgcgtcttgacc

SEQ ID NO: 177310 - DNA, 592 bp, Homo sapiens
tgcttaattatgctttctgaaggtatctgttatctttaatggggtagaatcagaaaagaaggctgaacaggagagcaataaaatgaaatgaggcaaattttatgaatcatattttcccaagaaagggtcatttcaacaaacacacggtctagccatgtataaggcactgtatagaattatgcataggaatgagatacacatcccaacttcaacaagcagataagcgtgtatctggaggagacagatatatacataatttgtgatggtaaaaggtagaattattgtyatcatttattgaacacttaatacatcctatgcattgtgctaagtaattatcattttaaaattttataccaattccaattattactcccatttaaaagatgtaaaagcaaaggataagaaagctgtttaatattgcaccattcctaatgggtgaatcctgccttcaatctaaggtatgctttatggtaaggcactggtcccatatggctatgctgccatgccctgggtgggcactgtgacaggtgctaaaagaaggtagaaggttgaattccacacatcaaaaactgtgatataagcatcaatccca

SEQ ID NO: 177311 - DNA, 538 bp, Homo sapiens
ttcatcataagtgtgtcatgtttcctgcttggacttgactgataaagcccctaatcttcctttttgcttccttgcacccatttctgatagtctccccatgcaaactccttgtttcattcttttacaaggctaaatagtatgcctctgtgtgtgtgtgtgtgtgtgtgcacgcgtgtgtgtgtgtgtgtgtgtgtgtgtgtgtgtgtgtgtgtgtgtctcagtgttgggggagggatgtggtgggaggtggttggatcatgggggcagatttccctcttgctgtttgcatgatagtgagtgagttctcattacatctggctgtctgaaagtgtgtggcacttctccctttctctctctctctcctgttccaccatggtaaaacatgcttgcctccccttcaccttctgccatgattgtttcttgaggcctcccagtcatgtttcctgttaagcctgcacaactgtgggtcaattaaacatcttttctccataaattaycaagtctcaggtagttctttatagcagtgtgaaaacacact

SEQ ID NO: 177312 - DNA, 558 bp, Homo sapiens
agaaaacttctgattctcatccattttcatctttggtaaggaccatcgatctaggtttctcaatagagagcttagagctcctgaaggcaaagttgtatgaaactcagccaggatattcttggtctctgcccaggtattaaataagagccagaaaaagctgcactcaggctaactcacagctaccttagtctcacaatgtccagaagagagaagataaccaatcatctttgggtggtgggaaaacctttctagaactgtaacagagtaggcaatagaatcagtgaaacttgagttggaattttctttacctcttgcttattttataaccttggacaaattgcttcctcaagcctcggtttcttcatctgtaaaatgrcgataatattgccaccttggtaggtggctttaaggagataaatcatagatgtaaagcccctaatggaatacttggcacacagcaggtgctgaagaatgacacctgttatgaaggctccaaactcccattccgtaagctcttcttgcaatttcaagttcttgtccagtctgtagtaagtaact

SEQ ID NO: 177313 - DNA, 581 bp, Homo sapiens
caaggaagaaatcaataaatattttgttctctagctttctgctcccctttccataactatgacatgacctcaagccaccttctagaactttgactcactctgtttaattttcctcacagatcttatgcttatattgaagactaaagagaaagtatactccctctatgtagtatatgtgtcaaggcatataggctggtagaaaaatatagacatgttcttagatagtggttattagtgaacaaagtcatccagaatggcataagcatggggcaaagggtttgtgtttcatatgaggggrtctctgactcattgaagactgccgtgtgtttaacattcagattaatgtggtcaaaaatactaataaacctttataatgcatgaatatgtagaaacatgtaaagtgaatttgccagttattgacattagaaagtgattaatttttatcagtctaattatttgtatattaaatgtaagagtctgccaaaaactttcataagccagtaaaaacagcattattattacataatttctctgctcctactcacagcaaaactcctaaaaatagttatgtatactcattg

SEQ ID NO: 177314 - DNA, 503 bp, Homo sapiens
cattattctttttttcttttttatctgacttggttatttcaaacctgttttcaagttaagaaattctttcatctgcttgatcaattctattgttgaatattttgattttatttttaaatttcattcattaattcttcagttccaagatttctgttttgttctatttaaatgatattttgyattggttcattctaacattcctataaagaaatacttaaatttcccaagaaatttatttaaaaagaggtttaattggctcatggttctgcaggctgtacaggaagcatagcagaatctgcttatggggatgcctcaagaagcttctaataatgacagaagacaatggaggagctggtacgccccatggcaaaagcaggatcaagagagcaaaaggggaggtgctacacacttttaaatgacaagatatcatgagaactcactcactatcatgaggacagtaccaaggagaatggtgctaaacaattcatgagaaattcacctcc

SEQ ID NO: 177315 - DNA, 617 bp, Homo sapiens
tttgtcagaattctaggaaacagtgacaggctcatagcaacaaagcaaatgctgaattaagaaaaagacaatgtaaaaatgatagaaatgctttgacattttcacttgtccttgccacactcccccactcagctcaggggtaatcttgaagatggcagccttcatttctagtggaatccctggttccagaggaggcaaagaattgcatttgcctgctctaaattgcctgggggcttcccaaagtgttgacacaaggaacttgtctttgtttagcataactgggaactgggtctgaaaatctatagaattgactaataaacattgtaaggcaagtgcaaaacccacagccgcctggggcaaaagattacaacggaagcaacaatagagtcccaaaagcctaggagggaaaactggggagagagtttcactgggaaattagggcatycaaaagtttctgagtctacttggaatttagaaaatcacatgcatgcccagggtaagactcatgctaagaaaagacctgtgaatatgcaacattttcccctttggctaaactccatgcaagtgcaaacaggatgtacaggctaaggcagagttttaaatggcccggctgagca

SEQ ID NO: 177316 - DNA, 515 bp, Homo sapiens
gtgtgtatttatatatatacacacacacacacacacacacacacacatacacaatggaatattactgagccatataaaaatggagtaaagctatagtgtgaatattggtgtctgaggccattttatgttgcttataatacctgaatctggttaatttataaagagaaggaatgtatttcctacaattatggagactgagaagttcaaggttaaggaggtgcacttggcgagaccttcttgctgatgaggactctctgaagagtcctgaagcctcacagggtaagatagggcaaggaggatgcgcatgctactcagatatctcttgctcttaccataaagccaccagtccctcctccatgatagcccattaattctttaactcattaatccatgaatggtatctgccctcaygatccaatcacccattaaaggtcccatctttcaacactgccacattggggattaaatttcaacatgaattttggaggggacagatattcaaaccatagcagttg

SEQ ID NO: 177317 - DNA, 409 bp, Homo sapiens
gcaaactactcctcttacaagagattaataaccagaatatatatataaagaactcaaagagctccayaggaaaataatctaataatccagtcaaaaattgaaaaaagattggaatagacatttccccaaaaaagacatacagatgacaaccagacatatgaaaatgtactcaacatcattgatcatcagagaaatgcaaattgaaactgcaatgagatatcatgtctcccttgttaaaatggcttttatccaaaagacaggtaataacaaatgtttgtgaggatgtgaaaaaaaggaaacctttgtacgctcttggtggaaatgtaaattagtaaaaccactttggagaacagtttggaggttcctcacaaaactaaaaattgagttaccttgtgatccaacaattcct

SEQ ID NO: 177318 - DNA, 468 bp, Homo sapiens
tttccaaaaagtgttcattcaattttatgaactrctatgcttatgatcagttcatgaactttaggagaacacttttatgttcaaaagcatgtcttttggcatcgtattttgataaatgatgtattaaaaaaggtagagatcaaaacactggaaaggaccagtaccacagtcacatgagaccagctagagtgtttcttcaaaaactcaggcatctaagaggataagaaacatacttaggatttgtaaatacaaaatggcccccttgtcagcattacaggtttattcagtctttttatgattacagtgacatgtattttcactgtctcaatagcagaagaaagataatacacttaactacctgtgactattctgctaaagatatcaataatctcattaatcatttacatatctctctaaaatatctttaatactaagtactcaatctttgcatagtatacaatttatatc

SEQ ID NO: 177319 - DNA, 401 bp, Homo sapiens
agggatatgaatgcacagttatttttctcctaaagagctaataaattaccactacaacmtcctcctcacatttggctcaatttatttactgcatgtatgttctctcatttaatcctcacagtcttctaaaggtataaaaaatggtctgaaagtataaatgtgtaaacggaggttcagatacttgatctcttaatgagtaaatggaagttcagacatattaaccaatttgccacaaattacaaaattagtaaatgacagagtgcaggttccagcccatatccctatcaaagtccatatacacctcaaccactgtgtgattcatcctggtttcactctacatattagcttagaaaaaaattaatcaataatttttccaggaagagacaatggagaaaagaata

SEQ ID NO: 177320 - DNA, 164 bp, Homo sapiens
tctaccactttccttaagtttatgtargtcgttatgtgttaggtgagtctcctgaaggcagcagatagttagttggtgagttattatccattctgtggttctgtatcttgtaagtggagcattgaagccatttacaaccaacattagtattaaaaagtgaggta

SEQ ID NO: 177321 - DNA, 164 bp, Homo sapiens
tctaccactttccttaagtttatgtaggtcrttatgtgttaggtgagtctcctgaaggcagcagatagttagttggtgagttattatccattctgtggttctgtatcttgtaagtggagcattgaagccatttacaaccaacattagtattaaaaagtgaggta

SEQ ID NO: 177322 - DNA, 164 bp, Homo sapiens
tctaccactttccttaagtttatgtaggtcgttatgtgttaggtgagtctcctgaaggcagcagatagttagttggtgagttmttatccattctgtggttctgtatcttgtaagtggagcattgaagccatttacaaccaacattagtattaaaaagtgaggta

SEQ ID NO: 177323 - DNA, 164 bp, Homo sapiens
tctaccactttccttaagtttatgtaggtcgttatgtgttaggtgagtctcctgaaggcagcagatagttagttggtgagttattatccattctgtggttctgtatcttgtaagtggagcattkaagccatttacaaccaacattagtattaaaaagtgaggta

SEQ ID NO: 177324 - DNA, 521 bp, Homo sapiens
ttgctaatataaaagacctcatgccttttcatccagaaaacagagaacactttctattatgtaagagtattatgtttgaaggaatatgtttgcttcaactatgcrtgctatggtacagaaagcaaaaccacctccttgtagttctaaatccaaggggttttcaatgtatttgggttaagtcatgttgtaaggttatagctcactaagatttttacacgacgcacttattaaacatgaatcttctgtaccgtgtaccgcatatcttgtataaaacaatgcaatattttcttctaagtatgggatggctttggtcacccatgcttaaaaaaactttgaagagacaattcatctttttcctatgaagcaatttttattaactgacataattcttcagcagtcacgctattaccgtcactaggtagtcctttccctttcattcagaagcccaagaagttagtagaggtttgtatactacgcacctttcaccagaaaataaaaagggagaactttaagtatttgac

SEQ ID NO: 177325 - DNA, 521 bp, Homo sapiens
ttgctaatataaaagacctcatgccttttcatccagaaaacagagaacactttctattatgtaagagtattatgtttgaaggaatatgtttgcttcaactatgcatgctatggtacagaaagcaaaaccacctccttgtagttctaaatccaaggggttttcaatgtatttgggttaagtcatgttgtaaggttatagctcwctaagatttttacacgacgcacttattaaacatgaatcttctgtaccgtgtaccgcatatcttgtataaaacaatgcaatattttcttctaagtatgggatggctttggtcacccatgcttaaaaaaactttgaagagacaattcatctttttcctatgaagcaatttttattaactgacataattcttcagcagtcacgctattaccgtcactaggtagtcctttccctttcattcagaagcccaagaagttagtagaggtttgtatactacgcacctttcaccagaaaataaaaagggagaactttaagtatttgac

SEQ ID NO: 177326 - DNA, 521 bp, Homo sapiens
ttgctaatataaaagacctcatgccttttcatccagaaaacagagaacactttctattatgtaagagtattatgtttgaaggaatatgtttgcttcaactatgcatgctatggtacagaaagcaaaaccacctccttgtagttctaaatccaaggggttttcaatgtatttgggttaagtcatgttgtaaggttatagctcactaagatttttacacgacgcacttattaaacatgaatcttctgtaccgtgtaccgcatatcttgtataaaacaatgcaatattttcttctaagtatgggatggctttggtcacccatgcttaaaaaaactttgaagagacaattcatctttttcctatgaagcaatttttrttaactgacataattcttcagcagtcacgctattaccgtcactaggtagtcctttccctttcattcagaagcccaagaagttagtagaggtttgtatactacgcacctttcaccagaaaataaaaagggagaactttaagtatttgac

SEQ ID NO: 177327 - DNA, 521 bp, Homo sapiens
ttgctaatataaaagacctcatgccttttcatccagaaaacagagaacactttctattatgtaagagtattatgtttgaaggaatatgtttgcttcaactatgcatgctatggtacagaaagcaaaaccacctccttgtagttctaaatccaaggggttttcaatgtatttgggttaagtcatgttgtaaggttatagctcactaagatttttacacgacgcacttattaaacatgaatcttctgtaccgtgtaccgcatatcttgtataaaacaatgcaatattttcttctaagtatgggatggctttggtcacccatgcttaaaaaaactttgaagagacaattcatctttttcctatgaagcaatttttattaaytgacataattcttcagcagtcacgctattaccgtcactaggtagtcctttccctttcattcagaagcccaagaagttagtagaggtttgtatactacgcacctttcaccagaaaataaaaagggagaactttaagtatttgac

SEQ ID NO: 177328 - DNA, 251 bp, Homo sapiens
ctccagatttgcctgagggtagacacaaagcaatgctcagttatactcaatgttatcaacctactggacttggtataaaakactttttgagcactgtattgcctattaaaaaacagtaaagtgtaaaagatagttctttagacaaatagggccacggaaatgccaaatcattacttttggtgtctgtaatgcctcacaaagttataaacttttatgaataatttgctaagaaattagctctaatgacaggt

SEQ ID NO: 177329 - DNA, 251 bp, Homo sapiens
ctccagatttgcctgagggtagacacaaagcaatgctcagttatactcaatgttatcaacctactggacttggtataaaatactttttgagcactgtattgcctattaaaaaacagtaaagtgtaaaagatagttctttagacaaatwgggccacggaaatgccaaatcattacttttggtgtctgtaatgcctcacaaagttataaacttttatgaataatttgctaagaaattagctctaatgacaggt

SEQ ID NO: 177330 - DNA, 251 bp, Homo sapiens
ctccagatttgcctgagggtagacacaaagcaatgctcagttatactcaatgttatcaacctactggacttggtataaaatactttttgagcactgtattgcctattaaaaaacagtaaagtgtaaaagatagttctttagacaaatagggccacggaaatgccaaatcattasttttggtgtctgtaatgcctcacaaagttataaacttttatgaataatttgctaagaaattagctctaatgacaggt

SEQ ID NO: 177331 - DNA, 494 bp, Homo sapiens
atatatagcaagagctttcttgagtaagcaaattttatacatttaaaaataatttacatgcaaatgaccaagaggaaaggttaagtgactctggtgtaaataattagtttactgattctgccagagcatattaagaaaaattcactttggcaaaatwatatggatttaaagaagtaacaagtgggtttctctaaagcacagtttggctttttactagaatatcaagtcacttttttgggtgaggagagcacaatgggagtgggcagctggtgcaaataaacatttaaaattacttaaaacttcaacaaatgggatctgtatttaaatctgttttggtctgtcttccctttgttttttctaatccattccaacaatgcaaacctcagccactgtcaagggcaatctcagactggaggttgctgcctagggtgagattctagcaagactgacaagcagagctcagagaaaagtctgcatgggaaaacagaaccaga

SEQ ID NO: 177332 - DNA, 494 bp, Homo sapiens
atatatagcaagagctttcttgagtaagcaaattttatacatttaaaaataatttacatgcaaatgaccaagaggaaaggttaagtgactctggtgtaaataattagtttactgattctgccagagcatattaagaaaaattcactttggcaaaattatatggatttaaagaagtaacaagtgggtttctctaaagcacagtttggctttttactagaatatcaagtcacttttttgggtgaggagagyacaatgggagtgggcagctggtgcaaataaacatttaaaattacttaaaacttcaacaaatgggatctgtatttaaatctgttttggtctgtcttccctttgttttttctaatccattccaacaatgcaaacctcagccactgtcaagggcaatctcagactggaggttgctgcctagggtgagattctagcaagactgacaagcagagctcagagaaaagtctgcatgggaaaacagaaccaga

SEQ ID NO: 177333 - DNA, 248 bp, Homo sapiens
tggacattataccaagtcacaacatgaggcatgagatacctcagatgttgttccctctaaatctcatgttgmattgtgatatccccaatgttggtggtaggtctggagggaggtgattggatcatgggggtgaatttctcggaaatggtctagcatcctgtccctggtgctgtccttgtgatagtgagtgaattcttgcaagatctatttgtttaaagggtgtggtgcttcccctgccttgccaggtg

SEQ ID NO: 177334 - DNA, 248 bp, Homo sapiens
tggacattataccaagtcacaacatgaggcatgagatacctcagatgttgttccctctaaatctcatgttgaattgtgatatccccaatgttggtggtaggtctggagggaggtgattggatcatgggggtgratttctcggaaatggtctagcatcctgtccctggtgctgtccttgtgatagtgagtgaattcttgcaagatctatttgtttaaagggtgtggtgcttcccctgccttgccaggtg

SEQ ID NO: 177335 - DNA, 248 bp, Homo sapiens
tggacattataccaagtcacaacatgaggcatgagatacctcagatgttgttccctctaaatctcatgttgaattgtgatatccccaatgttggtggtaggtctggagggaggtgattggatcatgggggtgaatttctcggaaatggtctagcatcmtgtccctggtgctgtccttgtgatagtgagtgaattcttgcaagatctatttgtttaaagggtgtggtgcttcccctgccttgccaggtg

SEQ ID NO: 177336 - DNA, 248 bp, Homo sapiens
tggacattataccaagtcacaacatgaggcatgagatacctcagatgttgttccctctaaatctcatgttgaattgtgatatccccaatgttggtggtaggtctggagggaggtgattggatcatgggggtgaatttctcggaaatggtctagcatcctstccctggtgctgtccttgtgatagtgagtgaattcttgcaagatctatttgtttaaagggtgtggtgcttcccctgccttgccaggtg

SEQ ID NO: 177337 - DNA, 564 bp, Homo sapiens
taggggggctgcctagtggagctgtgggaggggggctgctgccctccagatcccagaatgatagagccaccagcagctcatgccttcagagtagaagagctgtgggggcagagcagcccaaagccttgggagcccaccctatgcatcatgggaatgctctaygttcccaggatgtgggacatggtttcaaaggagattattttggaacattgagttttactgactgccctgctgggatttgaactcgtgtggggcctgtagcccctttcttttggccaatttctctcttttgtaatgggaatgtttacccaatgtctgtaccccagttttatcttagaagtaaataacttgttttgattttacaggcgcatcagtggaagggacttgccttgtctcagaagaaactgcccttttgagtgatgccgaaacaggttgagacttttgggggactattgagaagggatgattgtattttgcaatgtgagaagaacatgagatttgaagggtcagggatggaatgaaatagtttggatgttgtcccctttaagtctcatgtcgaattgt

SEQ ID NO: 177338 - DNA, 564 bp, Homo sapiens
taggggggctgcctagtggagctgtgggaggggggctgctgccctccagatcccagaatgatagagccaccagcagctcatgccttcagagtagaagagctgtgggggcagagcagcccaaagccttgggagcccaccctatgcatcatgggaatgctctatgttcccaggatgtgggacatggtttcaaaggagattattttggaacattgagttttactgactgccctgctgggatttgaactcgtgtggggcctgtagcccctttcttttggccaatttctctcttttgtaatgggaatgtttacccaatgyctgtaccccagttttatcttagaagtaaataacttgttttgattttacaggcgcatcagtggaagggacttgccttgtctcagaagaaactgcccttttgagtgatgccgaaacaggttgagacttttgggggactattgagaagggatgattgtattttgcaatgtgagaagaacatgagatttgaagggtcagggatggaatgaaatagtttggatgttgtcccctttaagtctcatgtcgaattgt

SEQ ID NO: 177339 - DNA, 353 bp, Homo sapiens
atgtgggacatggtttcaaaggagattattttggaacattgagttttactgactgccctgctgggatttgaactcgtgtggggcctgtagcccctttcttttggccaatttctctcttttgtaatgggaatgtttacccaatgtctgtaccccagttttatcttagaagtaaataacttgttttgattttacaggcgcatcagtggaagggacttgccttgtctcagaagaaactgcmcttttgagtgatgccgaaacaggttgagacttttgggggactattgagaagggatgattgtattttgcaatgtgagaagaacatgagatttgaagggtcagggatggaatgaaat

SEQ ID NO: 177340 - DNA, 466 bp, Homo sapiens
tgtagtgcttaggtattcctttatagtaaygcaagaatgccataatacaaggcataatggtttgcattttaaaaatgaaaattaaatttttgtaatttatcatgaaaagatgaaatgagttaataatgagcaatatctacatgttgtcttagaggtgctgacaatctgtcaaggaattacatgcattgatcaagcagtttaccttcaagttgaataacaagatattcctatctaacataacaaaattttgacattatttgggagactggaaataatgctaaataatatcagattgtcaaagtcaaataaatatagagacaaacatctgaaattaaaatgttttatttgagatacaagtattacagtttcacacatacatgcagaatgggtgtctttagtatgtccaaaacataaagagaaagttagaggttttataaaaaagggagacagagagaaaaacggtatg

SEQ ID NO: 177341 - DNA, 466 bp, Homo sapiens
tgtagtgcttaggtattcctttatagtaatgcaagaatgccataatacaaggcataatggtttgcattttaaaaatgaaaattaaatttttgtaatttatcatgaaaagatgaaatgwgttaataatgagcaatatctacatgttgtcttagaggtgctgacaatctgtcaaggaattacatgcattgatcaagcagtttaccttcaagttgaataacaagatattcctatctaacataacaaaattttgacattatttgggagactggaaataatgctaaataatatcagattgtcaaagtcaaataaatatagagacaaacatctgaaattaaaatgttttatttgagatacaagtattacagtttcacacatacatgcagaatgggtgtctttagtatgtccaaaacataaagagaaagttagaggttttataaaaaagggagacagagagaaaaacggtatg

SEQ ID NO: 177342 - DNA, 330 bp, Homo sapiens
tacagcctgcagaactgtgagccaagtcaatcttttttttcagtataaattatgtagtgcttaggtattcctttatagtaatgcaagaatgccataatacaaggcataatggtttgcattttaaaaatgaaaattaaatttttgtaatttatcatgaaaagatgaaatgagttaataatgagcaatatctacatgttgtcttagaggtgctgacaatctgtcaaggaattacatgcattgatcaagcagtttaccttcaagttgaataacaagatattcctatctaacakaacaaaattttgacattatttgggagactggaaataatgc

SEQ ID NO: 177343 - DNA, 469 bp, Homo sapiens
gtctttagtatgtccaaaacataaagagaaagttagaggttttataaaaaagggagacagagagaaaaacggtatgtatttctctttgagaaagttcactggcaccagtaargtttttgagagctggcaggctctgataggtgagggacagtggtgggtaaagctagtcttagtgttcaagaggttgtttcagtaaccatttgataaaactggtttcagcttaaagcaggtaatttcagcagccaggcatgcagagaattacgcttttggagtggtgtttttgccctgaatgcctcctccccctggcttgttgatggttttatttggtgtgataagaatgacccaattcatatgatcaatttttacatttacccctttccatcaagatctttctcttaaagcatcaaccatgtttatagttgtacaacaaccacaagttaggtttaatcatcccttagtgctaggatgg

SEQ ID NO: 177344 - DNA, 469 bp, Homo sapiens
gtctttagtatgtccaaaacataaagagaaagttagaggttttataaaaaagggagacagagagaaaaacggtatgtatttctctttgagaaagttcactggcaccagtaaggtttttgagagctggcaggctctgataggtgagggacagtggtgggtaaagctagtcttagtgttcaagaggttgtttcagtarccatttgataaaactggtttcagcttaaagcaggtaatttcagcagccaggcatgcagagaattacgcttttggagtggtgtttttgccctgaatgcctcctccccctggcttgttgatggttttatttggtgtgataagaatgacccaattcatatgatcaatttttacatttacccctttccatcaagatctttctcttaaagcatcaaccatgtttatagttgtacaacaaccacaagttaggtttaatcatcccttagtgctaggatgg

SEQ ID NO: 177345 - DNA, 469 bp, Homo sapiens
gtctttagtatgtccaaaacataaagagaaagttagaggttttataaaaaagggagacagagagaaaaacggtatgtatttctctttgagaaagttcactggcaccagtaaggtttttgagagctggcaggctctgataggtgagggacagtggtgggtaaagctagtcttagtgttcaagaggttgtttcagtaaccatttgataaaactggtttcagcttaaagcaggtaatttcagcagccaggcatgcagagaattacgcttttggagtggtgtttttgccctgaatgcctcctccccctggctygttgatggttttatttggtgtgataagaatgacccaattcatatgatcaatttttacatttacccctttccatcaagatctttctcttaaagcatcaaccatgtttatagttgtacaacaaccacaagttaggtttaatcatcccttagtgctaggatgg

SEQ ID NO: 177346 - DNA, 404 bp, Homo sapiens
agttgatctttttgtactgtggtggaaagattttctgaacatagttcaggtaaaaaaatgaccactgttgaataatgcttctggtataacacaaagtgtttgaaaatgtacacaatacactgtaatatccaatgcatacatcaaagtaaatatattttattctaggataattattaaaacattaagaaatactctttaatcatatatgttaaaacttgtacgaaaatcaataacatacaagtaaagaagttcaagaagcctaaaaaagtaattccaagtgtagaaagcatggtgaaaagtgatggaagaaaastgcagatatttaaaatgtgaaattaaaatatataattattaattaaaaaacataattcttaattaaaatacataattcttcattgaacccc

SEQ ID NO: 177347 - DNA, 404 bp, Homo sapiens
agttgatctttttgtactgtggtggaaagattttctgaacatagttcaggtaaaaaaatgaccactgttgaataatgcttctggtataacacaaagtgtttgaaaatgtacacaatacactgtaatatccaatgcatacatcaaagtaaatatattttattctaggataattattaaaacattaagaaatactctttaatcatatatgttaaaacttgtacgaaaatcaataacatacaagtaaagaagttcaagaagcctaaaaaagtaattccaagtgtagaaagcatggtgaaaagtgatggaagaaaagtgcagatatttaaaatgtgaaattaaaatatataattattaatyaaaaaacataattcttaattaaaatacataattcttcattgaacccc

SEQ ID NO: 177348 - DNA, 404 bp, Homo sapiens
agttgatctttttgtactgtggtggaaagattttctgaacatagttcaggtaaaaaaatgaccactgttgaataatgcttctggtataacacaaagtgtttgaaaatgtacacaatacactgtaatatccaatgcatacatcaaagtaaatatattttattctaggataattattaaaacattaagaaatactctttaatcatatatgttaaaacttgtacgaaaatcaataacatacaagtaaagaagttcaagaagcctaaaaaagtaattccaagtgtagaaagcatggtgaaaagtgatggaagaaaagtgcagatatttaaaatgtgaaattaaaatatataattattaattaaaawacataattcttaattaaaatacataattcttcattgaacccc

SEQ ID NO: 177349 - DNA, 196 bp, Homo sapiens
atattccctatgcttcctcccacaaaacagcttagggtgactgccaacttgtgggcagagaccctcacttccaatccccacaaggggctgggcagtggggaggatgaggccccctcctctgactgtcwcctccaagaccctgttttctgaggaaggtcactctgggaactgttggcctctgcagatgagggcctgg

SEQ ID NO: 177350 - DNA, 478 bp, Homo sapiens
ggtttgctagtgactgtggtggggtgtgtctggatgtccatcagtacctttgtcccaggatcaggctgccaactctatygccaacgcctgggtgtcacagttgccgtgatagtctcacacacgcaggtgtgttcatctcgttcattttcacgtagacaacgagagcgaaaccacagagaaaagaaacatcccgtgcatcacggcctgacaatggattcctgtttcctgtacaatgtggagtctccaatatagcctgtttgaaaactggaaaggagagcaccgacacgatgctggtcttccacgcattcctggaagtttctggggccccacagagctcgcgaaacaaacagtcaacatggtcacgctttcggggggcagaaacttgagcaacaggcacctttacagagggcaaagaaacgtggaatccagaatcacgcttcagttggcctgggtgtgactcctgtgtggatgggactat

SEQ ID NO: 177351 - DNA, 478 bp, Homo sapiens
ggtttgctagtgactgtggtggggtgtgtctggatgtccatcagtacctttgtcccaggatcaggctgccaactctattgccaacgcctgggtgtcacagttgccgtgatagtctcacacacgcaggtgtgttcatctcrttcattttcacgtagacaacgagagcgaaaccacagagaaaagaaacatcccgtgcatcacggcctgacaatggattcctgtttcctgtacaatgtggagtctccaatatagcctgtttgaaaactggaaaggagagcaccgacacgatgctggtcttccacgcattcctggaagtttctggggccccacagagctcgcgaaacaaacagtcaacatggtcacgctttcggggggcagaaacttgagcaacaggcacctttacagagggcaaagaaacgtggaatccagaatcacgcttcagttggcctgggtgtgactcctgtgtggatgggactat

SEQ ID NO: 177352 - DNA, 478 bp, Homo sapiens
ggtttgctagtgactgtggtggggtgtgtctggatgtccatcagtacctttgtcccaggatcaggctgccaactctattgccaacgcctgggtgtcacagttgccgtgatagtctcacacacgcaggtgtgttcatctcgttcrttttcacgtagacaacgagagcgaaaccacagagaaaagaaacatcccgtgcatcacggcctgacaatggattcctgtttcctgtacaatgtggagtctccaatatagcctgtttgaaaactggaaaggagagcaccgacacgatgctggtcttccacgcattcctggaagtttctggggccccacagagctcgcgaaacaaacagtcaacatggtcacgctttcggggggcagaaacttgagcaacaggcacctttacagagggcaaagaaacgtggaatccagaatcacgcttcagttggcctgggtgtgactcctgtgtggatgggactat

SEQ ID NO: 177353 - DNA, 595 bp, Homo sapiens
tttgtgattgatgggaggaggatgaaatattaacattaacaggagtttggaagaagttgattccagccctcatggatgactttgagggctcaggatgtcagtggaggaagtccctgcagatgtggtagaaatcacaagacaactagaattagaattagggccttaaggtgagatgaaattgctgtaaactcatgatgaaacttgaacaaatagggagttgcttcttatggacgagcaaagaaaatattttcttgagatggaatataatccaggtggagatgctatcaacattgttgaaatgacaacaaaggatttagaatattccataaacctagttgataaagcagcagcagggtttgagagggtttactccaattttgaaagaagttctactgttgataaaatgctgtcaaacagcatcacatgctacagggaaatcttttgtgaaaggaacaaacttcattgttttaaaaaattgacacaggyttccaaccttcagcagcccccacgctgattagccagcagtcatcaatatagaggcaagactctcaccagcaaaaagattatgacgtggtaagtctcagatattcattag

SEQ ID NO: 177354 - DNA, 595 bp, Homo sapiens
tttgtgattgatgggaggaggatgaaatattaacattaacaggagtttggaagaagttgattccagccctcatggatgactttgagggctcaggatgtcagtggaggaagtccctgcagatgtggtagaaatcacaagacaactagaattagaattagggccttaaggtgagatgaaattgctgtaaactcatgatgaaacttgaacaaatagggagttgcttcttatggacgagcaaagaaaatattttcttgagatggaatataatccaggtggagatgctatcaacattgttgaaatgacaacaaaggatttagaatattccataaacctagttgataaagcagcagcagggtttgagagggtttactccaattttgaaagaagttctactgttgataaaatgctgtcaaacagcatcacatgctacagggaaatcttttgtgaaaggaacaaacttcattgttttaaaaaattgacacaggtttccaaccttcagcagcccccacrctgattagccagcagtcatcaatatagaggcaagactctcaccagcaaaaagattatgacgtggtaagtctcagatattcattag

SEQ ID NO: 177355 - DNA, 595 bp, Homo sapiens
tttgtgattgatgggaggaggatgaaatattaacattaacaggagtttggaagaagttgattccagccctcatggatgactttgagggctcaggatgtcagtggaggaagtccctgcagatgtggtagaaatcacaagacaactagaattagaattagggccttaaggtgagatgaaattgctgtaaactcatgatgaaacttgaacaaatagggagttgcttcttatggacgagcaaagaaaatattttcttgagatggaatataatccaggtggagatgctatcaacattgttgaaatgacaacaaaggatttagaatattccataaacctagttgataaagcagcagcagggtttgagagggtttactccaattttgaaagaagttctactgttgataaaatgctgtcaaacagcatcacatgctacagggaaatcttttgtgaaaggaacaaacttcattgttttaaaaaattgacacaggtttccaaccttcagcagcccccacgctgattagccagcagtcatcaatatagaggcaagactctcaccagcaaaaagattatgacktggtaagtctcagatattcattag

SEQ ID NO: 177356 - DNA, 475 bp, Homo sapiens
tctcaccagcaaaaagattatgacgtggtaagtctcagatattcattagcattttttagctctgacgtattttaacttaaggtatgtacacagttttttagacatgctattaattaataaytaataattattaaatactcattagactacaatatagtttaagcataacttttataagcaccgggaaataaaatgtttatgcaactaacttgattgtaacatttgccttattgaagtgttctggaacaaaacttacactatctctgaggtgtgcttgtaggtttttgtttgtaacatttgccttactgcagttgtctggaaccaaacccacaatatctctgagtatgcttctaggtttttggttgttctttgttttgagatggggtttcgctctgtcgcctaggccagagtgcagtggcatgatcatagctcactgcagcctcaaactgctgggtcaagtgatttttctaccaca

SEQ ID NO: 177357 - DNA, 475 bp, Homo sapiens
tctcaccagcaaaaagattatgacgtggtaagtctcagatattcattagcattttttagctctgacgtattttaacttaaggtatgtacacagttttttagacatgctattaattaataactaataattattaaatactcattagactacaatatagtttaagcataacttttataagcaccgggaaataaaatgtttatgcaactaacttgattgtaacatttgccttattgaagtgttctggaacaaaacytacactatctctgaggtgtgcttgtaggtttttgtttgtaacatttgccttactgcagttgtctggaaccaaacccacaatatctctgagtatgcttctaggtttttggttgttctttgttttgagatggggtttcgctctgtcgcctaggccagagtgcagtggcatgatcatagctcactgcagcctcaaactgctgggtcaagtgatttttctaccaca

SEQ ID NO: 177358 - DNA, 475 bp, Homo sapiens
tctcaccagcaaaaagattatgacgtggtaagtctcagatattcattagcattttttagctctgacgtattttaacttaaggtatgtacacagttttttagacatgctattaattaataactaataattattaaatactcattagactacaatatagtttaagcataacttttataagcaccgggaaataaaatgtttatgcaactaacttgattgtaacatttgccttattgaagtgttctggaacaaaacttacactatctctgaggtgtgcttgtaggtttttgtttgtaacatttgccttactgcagttgtctggaacmaaacccacaatatctctgagtatgcttctaggtttttggttgttctttgttttgagatggggtttcgctctgtcgcctaggccagagtgcagtggcatgatcatagctcactgcagcctcaaactgctgggtcaagtgatttttctaccaca

SEQ ID NO: 177359 - DNA, 421 bp, Homo sapiens
aaactattaactttatcaattctactcagaaaatatatagctaagtatgacgtatgaatcaatttactcacttattcagcaaacttttttaagtgactacaatatgttatgagctaggaatatgacagtaaacaaatctcaccttgtctcaaacttcagtggatccaggagtctctagaagtttaattcttgctcaatcagcaattccttttcactgaagacttgacargaaggtttgagaaggcaagagtgtgtgaactcagcagatgtttgtgatgcacctacctactgtgtgccagaagcgctagttgtgtacgtctgcctgtgtctcctagaaaggtgaaaactaaggacaatattttacacaacaaataagcaagtatgccatgtgatggagagggaaagtgctggatcccaagag

SEQ ID NO: 177360 - DNA, 283 bp, Homo sapiens
ccatagatggtcttcattaatttaagcaatgttttcagggmagttattctgtgaatatgcctgtaggatttaactggtctttgaattatggatattatttggaaagctggagaggagagtgaaggacactatataggtgggcaaacatcttgaaattttgaaacattgtgtaattattttacacataactggctggacatgaccaacaggtataagaatagaatctgttggttgctaaaactatacatttttagttaatgtccaacatgtaccaatagatgcc

SEQ ID NO: 177361 - DNA, 585 bp, Homo sapiens
aagctttgtggttgagttctccttgcttctctaattctttcagttgtgatgttaggttgttaatttgagatatttctaattttttgatatgggcattacttcttatgccctactctaaattttgktcttctagaaaactcagaactatgctttctaaaccaattcaaactttctcagtgaatcaacctggactccctgaggccaagttagcaattttccattacacgtggttctctttctctgtaagaatatctaatgcaacaatgcaagtgtttctttccctcctggtaatgcggggaactccttttggctgagaccaagacttaaaaccttgttctttcaacattaatgaagatctatttagaaagcctccatttttgcagaaaagatatataaacaccaatgaaaatcaatatgaaattatatgacatacaattatattgtggaaagactgaataaataagtgaactaagctctaagaaaaaaagatgatgatataaaatgatatagaagtaaaaacctgggctggtatagcataattaatgtatcagtaaagtatgtacattgtagaagtggtagaaagac

SEQ ID NO: 177362 - DNA, 585 bp, Homo sapiens
aagctttgtggttgagttctccttgcttctctaattctttcagttgtgatgttaggttgttaatttgagatatttctaattttttgatatgggcattacttcttatgccctactctaaattttggtcttctagaaaactcagaactatgytttctaaaccaattcaaactttctcagtgaatcaacctggactccctgaggccaagttagcaattttccattacacgtggttctctttctctgtaagaatatctaatgcaacaatgcaagtgtttctttccctcctggtaatgcggggaactccttttggctgagaccaagacttaaaaccttgttctttcaacattaatgaagatctatttagaaagcctccatttttgcagaaaagatatataaacaccaatgaaaatcaatatgaaattatatgacatacaattatattgtggaaagactgaataaataagtgaactaagctctaagaaaaaaagatgatgatataaaatgatatagaagtaaaaacctgggctggtatagcataattaatgtatcagtaaagtatgtacattgtagaagtggtagaaagac

SEQ ID NO: 177363 - DNA, 585 bp, Homo sapiens
aagctttgtggttgagttctccttgcttctctaattctttcagttgtgatgttaggttgttaatttgagatatttctaattttttgatatgggcattacttcttatgccctactctaaattttggtcttctagaaaactcagaactatgctttctaaaccaattcaaactttctcagtgaatcaacctggactccctgaggccaagttagcaattttccattacacktggttctctttctctgtaagaatatctaatgcaacaatgcaagtgtttctttccctcctggtaatgcggggaactccttttggctgagaccaagacttaaaaccttgttctttcaacattaatgaagatctatttagaaagcctccatttttgcagaaaagatatataaacaccaatgaaaatcaatatgaaattatatgacatacaattatattgtggaaagactgaataaataagtgaactaagctctaagaaaaaaagatgatgatataaaatgatatagaagtaaaaacctgggctggtatagcataattaatgtatcagtaaagtatgtacattgtagaagtggtagaaagac

SEQ ID NO: 177364 - DNA, 585 bp, Homo sapiens
aagctttgtggttgagttctccttgcttctctaattctttcagttgtgatgttaggttgttaatttgagatatttctaattttttgatatgggcattacttcttatgccctactctaaattttggtcttctagaaaactcagaactatgctttctaaaccaattcaaactttctcagtgaatcaacctggactccctgaggccaagttagcaattttccattacacgtggttctctttctctgtaagaatatctaatgcaacaatkcaagtgtttctttccctcctggtaatgcggggaactccttttggctgagaccaagacttaaaaccttgttctttcaacattaatgaagatctatttagaaagcctccatttttgcagaaaagatatataaacaccaatgaaaatcaatatgaaattatatgacatacaattatattgtggaaagactgaataaataagtgaactaagctctaagaaaaaaagatgatgatataaaatgatatagaagtaaaaacctgggctggtatagcataattaatgtatcagtaaagtatgtacattgtagaagtggtagaaagac

SEQ ID NO: 177365 - DNA, 556 bp, Homo sapiens
gacaaggtagctcctagatgcactgatttctctaccacattgtataaacaagccatcaactatgggatttgtaattaaaaatgagtctatttgaaacaccacactataaaaagctattaagtaaatctttaaagtgrcagtaaatgatgacttaacattttaaagagatacagtcacatcgcatgtgtgaatgcagtcatctgtataaaatgtcatcattaccttgatcatttcttcttctgctgttttactttttgcttctatgtcccctgcttcattgtatctaataaagcatctatttgaggccaacaaagccattttcccctaagtgaaacaaaataacaaaatagccatgaggatacttcttgtagaagaaacattaagtgtttagactgaatgaatttttcctccctgatttaaaaatcacagaaaagaacttagagaaaaacctgaaaaatataatacaagaacatatagaaaaggaaaccaaaatcacctttcattttgctattcaaagattgccacaataaatatttgtagtgtatcttcctagtag

SEQ ID NO: 177366 - DNA, 501 bp, Homo sapiens
  misc_feature (1)...(501): n = A,T,C or G
attttcttgatttttaaaagtcagtgtactctcaaagaaacaaaactattattcatggattctgttatttgaaaatatttactgatcatttttactttacaccaagtgatctccagctcgtggaaaaatatgtaaagttgcccagcttcattaagcttaaactcttctgaaggagaaaagaagcaatggagtagggacattaaaggaggagtgtggtgatacggctgagacttctacttgcacactgtggtagctgtgtggagactggattgaaaaaagggcaatgacagaagcttaaattagtatcaaatatggcaatcytataattttaagggtccttgaaataagaatgtataatagttctcattatttcctcaagaaatctctgcacttggccttgtgaaggaagcgctatagttaccaagtggtgggggtgggaatgtgaatttggaaacaacatttggaattattacactttaaaggtaaagctggcnnnnnnnn

SEQ ID NO: 177367 - DNA, 476 bp, Homo sapiens
agaattctcttgaccaatctattttcttgatttttaaaagtcagtgtactctcaaagaaacaaaactattattcatggattctgttatttgaaaatatttactgatcatttttactttacaccaagtgatctccagctcgtggaaaaatatgtaaagttgcccagcttcattaagcttaaactcttctgaaggagaaaagaagcaatggagtagggacattaaaggaggagtgtggtgatacggctgagacttctacttgcacactgtggtagctgtgtggagactggattgaaaaaagggcaatgacagaagcttaaattagtatcaaatatggcaatcttataattttaagggtccttgaaataagaatgtataatagttctcattatttcctcaagaaatctctgcacttggccttgtgaaggaagygctatagttaccaagtggtgggggtgggaatgtgaatttggaaaca

SEQ ID NO: 177368 - DNA, 438 bp, Homo sapiens
tttatcatgaaagtatattgaattttgtcaaatgtgttttctgcatccattggaatgttatttttatctttcattctgttaatgtggtatatcacattattaatttttacacattgaaacatccttgtatcacatagataarttacaattggtcatggtgtatgaccttttcaatgtgcttttgaattcagtttgctagttagtattttattgagaatttttgcatctatattcgttaaggatactggtctgtaattattttttcttgtgttgtcttcgtctagcttttaagtcatggtaacatcggcctcatgaaatgagtttgagagtattctctcttctattttttctgaagagtttaagaagttttggtgttagttcttctttgaatgtttggtagaagttgcccatgaaagcatctgcacctgggcttttctt

SEQ ID NO: 177369 - DNA, 382 bp, Homo sapiens
tctcagaagtctcatccccatatttttgttcttaacacatctcaccacaaactctaccacacctatggtttgcaaactttgggaartgtcagtatatgccattatcatggttattagtactattatttgttaaaagcactttgaaggcaatttatgtgacttatatatagttagtattttaatctggacattctccagttatatgcaaagattaaaactcggcagcttcattttatagaattggcatcttttatatggctatggggactgcttggtgtctataaattattataaattattatgtatatttgttggactgaaatcaaacttaaaatcttccacatttcaagtgcttttattctgagcagtacgtacaaaaaat

SEQ ID NO: 177370 - DNA, 382 bp, Homo sapiens
tctcagaagtctcatccccatatttttgttcttaacacatctcaccacaaactctaccacacctatggtttgcaaactttgggaaatgtcagtatatgycattatcatggttattagtactattatttgttaaaagcactttgaaggcaatttatgtgacttatatatagttagtattttaatctggacattctccagttatatgcaaagattaaaactcggcagcttcattttatagaattggcatcttttatatggctatggggactgcttggtgtctataaattattataaattattatgtatatttgttggactgaaatcaaacttaaaatcttccacatttcaagtgcttttattctgagcagtacgtacaaaaaat

SEQ ID NO: 177371 - DNA, 382 bp, Homo sapiens
tctcagaagtctcatccccatatttttgttcttaacacatctcaccacaaactctaccacacctatggtttgcaaactttgggaaatgtcagtatatgccattatcatggttattagtactattatttgttaaaagcactttgaaggcaatttatgtgacttatatatagttagtattttaatytggacattctccagttatatgcaaagattaaaactcggcagcttcattttatagaattggcatcttttatatggctatggggactgcttggtgtctataaattattataaattattatgtatatttgttggactgaaatcaaacttaaaatcttccacatttcaagtgcttttattctgagcagtacgtacaaaaaat

SEQ ID NO: 177372 - DNA, 602 bp, Homo sapiens
gtatttttataaagacccttggctggcagaatggaacagaaatagaarctaaacgatctagatattgatgtagtgatcaaaggcatacagctgatttactttgttataatattttatgtggtacatgaagactttgatcccttgacaatatgtcatttgtaggtgagcaattattaataggattgtacgtcttaatatgcaaggatcaccattaataaaagtagactattgtaaagcgaattagcaataattttacttatgaataaaaacttatactatttcagatcattttcttattatttcttgaaaaaataagtcctttataagtccagttaaatattacctaatttttagctcaaatttcatggtacacaggactattttcttactttactgatgtctaaaagctaaatttcactggtgatatatcatttgtttaagactaggtaactgataacctaagctgagacccaaaatttgttattttctttatttccagcacaatattttccatcatggtatattacatcttgctaaagaagctatgtttctttagcaagacaattgaaaagcataaacattggtttactggaaagattttt

SEQ ID NO: 177373 - DNA, 687 bp, Homo sapiens
gtatttttataaagacccttggctggcagaatggaacagaaatagaaactaaacgatctagatattgatgtagtgatcaaaggcatacagctgatttactttgttataatattttatgtggtacatgaagactttgatcccttgacaatatgtcatttgtaggtgagcaattattaataggattgtacgtcttaatatgcaaggatcaccattaataaaagtagactattgtaaagcgaattagcaataattttacttatgaataaaaacttatactatttcagatcattttcttattatttcttgaaaaaataagtcctttataagtccagttaaatattacctaatttttagctcaaatttcatggtacacaggactattttcttactttactgatgtctaaaagctaaatttcactggtgatatatcatttgtttaagactaggtaactgataacctaagctgagacccaaaatttkttattttctttatttccagcacaatattttccatcatggtatattacatcttgctaaagaagctatgtttctttagcaagacaattgaaaagcataaacattggtttactggaaagatttttaatattccatattatttacaactgtttgcttatttccatgtataaaatgacattgattcaatagacttcttccacatttgcatga

SEQ ID NO: 177374 - DNA, 687 bp, Homo sapiens
gtatttttataaagacccttggctggcagaatggaacagaaatagaaactaaacgatctagatattgatgtagtgatcaaaggcatacagctgatttactttgttataatattttatgtggtacatgaagactttgatcccttgacaatatgtcatttgtaggtgagcaattattaataggattgtacgtcttaatatgcaaggatcaccattaataaaagtagactattgtaaagcgaattagcaataattttacttatgaataaaaacttatactatttcagatcattttcttattatttcttgaaaaaataagtcctttataagtccagttaaatattacctaatttttagctcaaatttcatggtacacaggactattttcttactttactgatgtctaaaagctaaatttcactggtgatatatcatttgtttaagactaggtaactgataacctaagctgagacccaaaatttgttattttctttatttccagcacaatattttccatcatggtatattacatcttgctaaagaagctatgtttctttagcaagacaattgaaaarcataaacattggtttactggaaagatttttaatattccatattatttacaactgtttgcttatttccatgtataaaatgacattgattcaatagacttcttccacatttgcatga

SEQ ID NO: 177375 - DNA, 687 bp, Homo sapiens
gtatttttataaagacccttggctggcagaatggaacagaaatagaaactaaacgatctagatattgatgtagtgatcaaaggcatacagctgatttactttgttataatattttatgtggtacatgaagactttgatcccttgacaatatgtcatttgtaggtgagcaattattaataggattgtacgtcttaatatgcaaggatcaccattaataaaagtagactattgtaaagcgaattagcaataattttacttatgaataaaaacttatactatttcagatcattttcttattatttcttgaaaaaataagtcctttataagtccagttaaatattacctaatttttagctcaaatttcatggtacacaggactattttcttactttactgatgtctaaaagctaaatttcactggtgatatatcatttgtttaagactaggtaactgataacctaagctgagacccaaaatttgttattttctttatttccagcacaatattttccatcatggtatattacatcttgctaaagaagctatgtttctttagcaagacaattgaaaagcataaacattggtttactrgaaagatttttaatattccatattatttacaactgtttgcttatttccatgtataaaatgacattgattcaatagacttcttccacatttgcatga

SEQ ID NO: 177376 - DNA, 524 bp, Homo sapiens
ggttttaatgatatggaaagttgaagtttagagtgagaaaagcaccaaaaaagaaaataatcagtctcctgactttcatatctggtagtcttagactgaatgtcagaactgtcacaggtcaaataatggcccagtatgttttcaaataagtgacacggaacaccatgttttagaagtacatgattgtccttcttgatgttaatctcacaacttaaggacatgcttgccaaacatcataatttctcttaataactcatatcagataaatctccagtggagacctatgctctggactccagacttaygccaagtagcctaattactatctccacttgcaggcaaaataggcatctcaaagcgaacctacctcaaaaagagctcttaatctcctactattctccccacttacccagcatcttccccattctcaccttctctcatcatgttcctcatatcaggaggtaatagactccatccttatagttatacagttattaagccacaaaacaccctgtttataccct

SEQ ID NO: 177377 - DNA, 438 bp, Homo sapiens
tttatcatgaaagtatattgaattttgtcaaatgtgttttctgcatccattggaatgttatttttatctttcattctgttaatgtggtatatcacattattaatttttacacattgaaacatccttgtatcacatagataagttacaattggtcatggtgtatgaccttttcaatgtgcttttgaattcagtttgctagttagtattttattgagaatttttgcatctatattcgttaaggatactggtctgtaattatwttttcttgtgttgtcttcgtctagcttttaagtcatggtaacatcggcctcatgaaatgagtttgagagtattctctcttctattttttctgaagagtttaagaagttttggtgttagttcttctttgaatgtttggtagaagttgcccatgaaagcatctgcacctgggcttttctt

SEQ ID NO: 177378 - DNA, 463 bp, Homo sapiens
cccataattaccatattgtaatattcagtgtttttccatgtgctattgctagtgagttctgtaccttcagatgatttcttattgctcactaacttgttttcttttaggttaagatatccctttagcatttcttgtaggacaggtctggtgttaatgaaatccctcagtttttgtttgttggaaaaagttcttatttttcygtcaagtttaaaggacgtttttgccagatacattattctaaagtaaaagtctttttttccttcagttttttaatatgtcatgccaatctcacagcctgtaaattttcccctgaaaagtctgctgtcagatgtattggagttccgctgaatgttatttgtttctcttctctcgatgcttttagaatcatttctttatccttaacctttgggagttcagtttagtgccttgaggtggtcttctttgggttaagtctgctttatgt

SEQ ID NO: 177379 - DNA, 463 bp, Homo sapiens
cccataattaccatattgtaatattcagtgtttttccatgtgctattgctagtgagttctgtaccttcagatgatttcttattgctcactaacttgttttcttttaggttaagatatccctttagcatttcttgtaggacaggtctggtgttaatgaaatccctcagtttttgtttgttggaaaaagttcttatttttccgtcaagtttaaaggacgtttttgccagatacattattctaaagtaaaagtctttttttccttcagttttttaatatgtcatgccaatctcacagcctgtaaattttcccctgaaaagtctgctgtcagatgtattggagttccgctgaatgttatttgtttctcttctctcgatgcttttrgaatcatttctttatccttaacctttgggagttcagtttagtgccttgaggtggtcttctttgggttaagtctgctttatgt

SEQ ID NO: 177380 - DNA, 391 bp, Homo sapiens
ttattatttatttggcaacctcatgagctttggcttcaaaaatacctgatttacaaagcataatcctagtgctggagaacagatcagtggctgccaaaggttagggttggttggaagatgtgattagtgagggataacatgaaaacatgtactttctttgtggtgatagagcagttctgcatccagattatggtgatggttacataaatccgcacttcatagatctatacacacacatcacacatacactcacacacacctacacaagagtacatgtaaaatccttagaaatatgaatagggtctgaacctragttaatggtatgtaaacaatgtcaatttcctgattttggcaatgtgctaggttaagttatatataattattggggaaa

SEQ ID NO: 177381 - DNA, 391 bp, Homo sapiens
ttattatttatttggcaacctcatgagctttggcttcaaaaatacctgatttacaaagcataatcctagtgctggagaacagatcagtggctgccaaaggttagggttggttggaagatgtgattagtgagggataacatgaaaacatgtactttctttgtggtgatagagcagttctgcatccagattatggtgatggttacataaatccgcacttcatagatctatacacacacatcacacatacactcacacacacctacacaagagtacatgtaaaatccttagaaatatgaatagggtctgaacctgagttaatggtatgkaaacaatgtcaatttcctgattttggcaatgtgctaggttaagttatatataattattggggaaa

SEQ ID NO: 177382 - DNA, 372 bp, Homo sapiens
gaattctactaaacttcctgcctcaacatacagagacactccctgaagcctaaaactatgcagatttgacacagggctgattttaacttctgttttgcttttaccatatagctagctgcagatgtcacatgtgtcctccatgacatcyaaatagcactacacctgcaccagctttcctctcaaattaactactcatcagttctattattaaacaaacaaggagcagctgtaatactgaaggaatgagtgggattgtgctttaaaattacatctctgccaacacttttagtttgcttgttgaataactacaagttttccagttaaattaatagaatacattatacccataaaatcctgaaatactggcaatac

SEQ ID NO: 177383 - DNA, 372 bp, Homo sapiens
gaattctactaaacttcctgcctcaacatacagagacactccctgaagcctaaaactatgcagatttgacacagggctgattttaacttctgttttgcttttaccatatagctagctgcagatgtcacatgtgtcctccatgacatccaaatagcactacacctgcaccagctttcctctcaaattawctactcatcagttctattattaaacaaacaaggagcagctgtaatactgaaggaatgagtgggattgtgctttaaaattacatctctgccaacacttttagtttgcttgttgaataactacaagttttccagttaaattaatagaatacattatacccataaaatcctgaaatactggcaatac

SEQ ID NO: 177384 - DNA, 372 bp, Homo sapiens
gaattctactaaacttcctgcctcaacatacagagacactccctgaagcctaaaactatgcagatttgacacagggctgattttaacttctgttttgcttttaccatatagctagctgcagatgtcacatgtgtcctccatgacatccaaatagcactacacctgcaccagctttcctctcaaattaactactcatcagttctattattaaacaaacaaggagcagctgtaatactgaagsaatgagtgggattgtgctttaaaattacatctctgccaacacttttagtttgcttgttgaataactacaagttttccagttaaattaatagaatacattatacccataaaatcctgaaatactggcaatac

SEQ ID NO: 177385 - DNA, 372 bp, Homo sapiens
gaattctactaaacttcctgcctcaacatacagagacactccctgaagcctaaaactatgcagatttgacacagggctgattttaacttctgttttgcttttaccatatagctagctgcagatgtcacatgtgtcctccatgacatccaaatagcactacacctgcaccagctttcctctcaaattaactactcatcagttctattattaaacaaacaaggagcagctgtaatactgaaggaatgagtggrattgtgctttaaaattacatctctgccaacacttttagtttgcttgttgaataactacaagttttccagttaaattaatagaatacattatacccataaaatcctgaaatactggcaatac

SEQ ID NO: 177386 - DNA, 588 bp, Homo sapiens
aaaaacattgccacgatctaaggttactctgtgatgtcaagtcatatttcwtatgccatatatattcatatttatattcataattcaaaatgcacatattcaatcaaaataacaggactaaaaaggaaattttctaaaatttatacactaagtacattatatttttctaatgatcactttgatagagcaaacttagaaactatggtttcaacaaatgaagaggcttatgcaagagaaaaccaccacctaacacaagattttcaatgtgatcatcattgctacttttcactagcaattatccagtcaatatattgtgaactgctttgttactatggtgatttatttaaacttagtgatcctttgattatctcaaaaatatgaataataccaattttataaacttgttctaaaaattaaatgagagaaaaataatcctccttctctatatattgaaaacctacaaaattagtaacattgtgtccagatattacacacttaccttattgaagcctcatcacaaccccgtcttttaaattacagggattattcccagatttttaaacacttaccttatgcaagtctcataac

SEQ ID NO: 177387 - DNA, 588 bp, Homo sapiens
aaaaacattgccacgatctaaggttactctgtgatgtcaagtcatatttcatatgccatayatattcatatttatattcataattcaaaatgcacatattcaatcaaaataacaggactaaaaaggaaattttctaaaatttatacactaagtacattatatttttctaatgatcactttgatagagcaaacttagaaactatggtttcaacaaatgaagaggcttatgcaagagaaaaccaccacctaacacaagattttcaatgtgatcatcattgctacttttcactagcaattatccagtcaatatattgtgaactgctttgttactatggtgatttatttaaacttagtgatcctttgattatctcaaaaatatgaataataccaattttataaacttgttctaaaaattaaatgagagaaaaataatcctccttctctatatattgaaaacctacaaaattagtaacattgtgtccagatattacacacttaccttattgaagcctcatcacaaccccgtcttttaaattacagggattattcccagatttttaaacacttaccttatgcaagtctcataac

SEQ ID NO: 177388 - DNA, 588 bp, Homo sapiens
aaaaacattgccacgatctaaggttactctgtgatgtcaagtcatatttcatatgccatatatattcatatttatattcataattcaaaatgcacatattcaatcaaaataacaggactaaaaaggaaattttctaaaatttatacactaagtacattatatttttctaatgatcactttgatagagcaaacttagaawctatggtttcaacaaatgaagaggcttatgcaagagaaaaccaccacctaacacaagattttcaatgtgatcatcattgctacttttcactagcaattatccagtcaatatattgtgaactgctttgttactatggtgatttatttaaacttagtgatcctttgattatctcaaaaatatgaataataccaattttataaacttgttctaaaaattaaatgagagaaaaataatcctccttctctatatattgaaaacctacaaaattagtaacattgtgtccagatattacacacttaccttattgaagcctcatcacaaccccgtcttttaaattacagggattattcccagatttttaaacacttaccttatgcaagtctcataac

SEQ ID NO: 177389 - DNA, 588 bp, Homo sapiens
aaaaacattgccacgatctaaggttactctgtgatgtcaagtcatatttcatatgccatatatattcatatttatattcataattcaaaatgcacatattcaatcaaaataacaggactaaaaaggaaattttctaaaatttatacactaagtacattatatttttctaatgatcactttgatagagcaaacttagaaactatggtttcaacaaatgaagaggcttatgcaagagaaaaccaccacctaacacaagattttcaatgtgatcatcattgctacttttcactagcaattatccagtcaatatattgtgaactgctttgttactatggtgatttatttaaacttagtgatcctttgattatctcaaaaatatgaataataccaattttataaacttgttctaaaaattaaatgagagaaaaataatcctccttctctatatattgaaaacctacaaaattagtaacattgtgtccagatattacacacttaccttattgaagcctcatcacaaccccrtcttttaaattacagggattattcccagatttttaaacacttaccttatgcaagtctcataac

SEQ ID NO: 177390 - DNA, 623 bp, Homo sapiens
tgtataaaaattaactgtaattctacatgctggcagcaaacaaaaaagacaacttcaaacatctattcttcagaagataccattaataacaggaaaagacaactcacaaactggagagaagataatttccatatcagtgactgctaaaaagattactttctggaatatgtatttttaactccaaaaaaatcaaatgacaaacagcccaattaaaaatgggtaaaagcaccaatgtatgctaaaatgaatgggtgaaattaagcagaaacagaatattacacagactcaaaaaatctttccaaaaatacagtataataattacaagggaaaaaagtagtaagttaggaatcatggcagatgcctccttaaccaggtgatcaaggtgaacatcaccagtattacttactgacattatgtgcccccgataagatgcacatcacctctgtggtatctttcccaataatgtctaatctygatctaatcatgagagaacattagacaaacacaaactgagaaacgttttacaaaatcactggccagtactctttaaaagtgtaaagttcgtgaaggacaagtaaagagtaagaaatgtcacaaattggagagactacagagacacagct

SEQ ID NO: 177391 - DNA, 567 bp, Homo sapiens
tagaaaggcccaacactggctctccaaaattaaaagatcacttggatctcatcatcatcagaaaagtcctctggaaattggaggaagtcatcctgtgggcaataaattgagcagaacaatatttaactctattcaactctagaaatctgttagctaaattggagaccatgaaaggagaaacatgggctgcaatatcctcaaggacattaaagtttaatacaaatgagagttattacrgagctgtgaacttcttggggaaagagcatgtttagaccctgagacctaagagagtgccaacaaagtttgtttagtaaaactctggtgttctaagagaaaaaacaaaaaaaaacaaacaaaaggaatctgttccatcttttctcctggaatgacccacattatatctactttggttttctcttccacctccccaaggtttttggttattatccactttacaataaaaatcctcttactacctttcattccacagttagtattaaaacaaaataataattattacaatgtaataggccttcttttataactctacaggcattttaattacac

SEQ ID NO: 177392 - DNA, 279 bp, Homo sapiens
agacttgaaaggaggacctcaggagtctgcctgttgccctattctactatggctgagctggtatccaagttgtaagacaaagttctatttacccttccctttcctcttgttaagcagaaggaaagagtctcccaagggttgcaaactgcacagcctggggttgggggacggatgacacaagcactcccttggctgycccagctggaggctcactatgtcatatgtacgccaaatccactgactcttagcaagtcgccaccaggacttgcccgggaatca

SEQ ID NO: 177393 - DNA, 548 bp, Homo sapiens
gaagaatgccattggtattttgataaatattgcattgaatctatagattgctttggactgtatgattactgcagcaatattattattaacaatgagcattgagatgtctcyttgtgtgatcttcaatttctcttatcagtgttttgtaatattctttgtagatatcttccacttccttgttcaaatttattcctagacattttagattttttgtagctattacaaacagaattgcattaaatttatttttcagctagttcattattggtgtatagaaaactattaattttgtatatttatttgatgttctgcaaatttactgactttgttaatcagttctatgagttttttgatagaatctttaagattttgtatgcataaggtcatatcatctgcaaagagagacaatttgactttctttttaaataacttgtacacattttatttatttcttttgcctgtttgtgatggctagaacttctgctattatgttaaataggagtggtcaaagtggtcatccttgtcttgatccaattcttaggtttcag

SEQ ID NO: 177394 - DNA, 548 bp, Homo sapiens
gaagaatgccattggtattttgataaatattgcattgaatctatagattgctttggactgtatgattactgcagcaatattattattaacaatgagcattgagatgtctccttgtgtgatcttcaatttctcttatcagtgttttgtaatattctttgtagatatcttccacttccttgttcaaatttattcctagacattttagattttttgtagctattacaaacagaattgcattaaatttatttttcagctagttcattattggtgtatagaaarctattaattttgtatatttatttgatgttctgcaaatttactgactttgttaatcagttctatgagttttttgatagaatctttaagattttgtatgcataaggtcatatcatctgcaaagagagacaatttgactttctttttaaataacttgtacacattttatttatttcttttgcctgtttgtgatggctagaacttctgctattatgttaaataggagtggtcaaagtggtcatccttgtcttgatccaattcttaggtttcag

SEQ ID NO: 177395 - DNA, 528 bp, Homo sapiens
ttatgttgatgctattcctttctgtttgttagttctccttctaacagtcaggcccctctgatgcaggtctgctggagtttgctggaggtcaactccagaacctgtttacctgggtatcaccagcagaggctgcaaaacagcaaagattgctgcctgttccttcctctggaagcttcatcccagaggggcaccccccagatgcctgccagagctctcctgtatgaggtgtctgtcaaaatccctgttgggaggtgtctgccagtcaggaggcacggggggcagggacccacttgaggaggcagtctgtcccttagcagagctcgagcgctgtgctgggagatctgctgctctcttcagagctggcagacaggaatgtttaagtctgctgaagttgcacccacagctgccccttcccctaggtgctctgtcccagggagatgggagttttatttataaacttctgactgggtctgctgcctttctttcagagatgccctgcccagasaggagaaatctagagattcagtc

SEQ ID NO: 177396 - DNA, 584 bp, Homo sapiens
catatgtcctctaaagtgttagcagagaaaattcacaaattatctccgaaaccacaaatcagtctaggtttcaccaagtttttaatgtatgtctagcagtgttccaactgtccacaagcatttctctgcactctgacacatggagaaaaaaagagatttaacattctgtttaaaaaaaaatgaaggaattgggtagcacctctctggggaactggaattgtattgagaggccaaatttgggtaattgatactttgttatttgtttccctcccacagggcccttctatgcaaaaagtatcacaaatctggactactccacattcaagttctgttgtttttactataatttgttttctcttctcatattgtcartggattgcaaatgttctttctccttttcaaggactacttcttctgtcatcttattttttccatgcttatgactattatacacaataatttttctccttattatcttattatttctctgagcaggagatacttctggatgatgctagagaaagcccgtgttgaggcttctttgccataatcatgtccccatttaatgtaccaattaggacagt

SEQ ID NO: 177397 - DNA, 603 bp, Homo sapiens
aacataccagaatacgtggaatacagctaacgtgatgttacaagggaaatttatagcactaaatgcccacatcaaaatgctagaaagatctcaagttaacaacctaacatcacaattaaaagaactatagaaccaagagcaaagaaaccccaatgctagcagaagacaagaaataaccaagatcagagttggacctaaagaagatagaaccatgaaaaccacttcaaaaaaatgaattcaggagccagttttttgaaaaaattaataaaatagatggctagcttgaataacaaaggagaaaaaagagacaaatcaaataaacaatcagaaatgacaagggggatattaccactgaccccacagaaatacaaagaaccatcagagatgactatcaacacctctatgtatataaactagaaratctagaagaaatagttaaattcctggacactctcccaagactgaaccaggaagaaattgaatcccgaatagaacaataatgagtactgaaattgaggcagtaataaataacctaccaaccccaaaaaaccccaggacaagatggatttagagttgaattccaccagtggtaaaaagaagagc

SEQ ID NO: 177398 - DNA, 537 bp, Homo sapiens
ggtggctggatgccgcagttgggaggtcccaccgggtgagaaggaatggaattaggcaccggcttaaagcagcagtctggccacaagttttggtagagcagctgtgctgtgcttggggatcccttccaccccaggttggctcagactctccaaagcctgaaggctggaattgctaaggtgcccaaacagcaaagatggtggcccatcccttgcctcaggagctcctttttaggaagtgtaatgccactactggtagctggctggaattgcaatccagtgtggcttctattgtgaggtgccatgggagtggggcctgggggccattgctgctcagccccctggattcagcctctttcctaggggaacatacaaaagcctaagcttccactttgctgaagctgccgctacttttgccagaaagcccaattatctaaggctccagtgtctccatgcatgcctgagyggctgctgtgccaagactccatgtagctctgtcagactgaaggctgaaggccccagtggagtgggttcacaagg

SEQ ID NO: 177399 - DNA, 571 bp, Homo sapiens
atggctgtcaaggcctgatgcttagtccctgtatgaatagccatgtgtcaattcccagaggtatgaaggtgggaatctatattttttctttatttttttactttgtgaataagtaaaatttatgacttctgaccacaacttgaaaatttgaaaaaaataacttatttaagacagtaagaaacaaaaattttcctattttgtataagcaaaatagatgagtacacatacatcagtaagtcaagcaaagatgattcataattgcgatgagttctactctctcattgcaattatgtaaactattatttgaaaaatgatacacagatcctggcatacttcctctaagaacaatggtaacacctgcgaattgcatctatttccatgagragaaaaccatactttcaggttggttactaggtagtctcagtttccatacaggaaatattctcagtagtttgcatatttgaagatgttcattatggcctttttcataatagctaaagattgaaaatattctaaattttcaaaactaaacaattgaaataacgaagtattaaaaatagaattgagcatg

SEQ ID NO: 177400 - DNA, 571 bp, Homo sapiens
atggctgtcaaggcctgatgcttagtccctgtatgaatagccatgtgtcaattcccagaggtatgaaggtgggaatctatattttttctttatttttttactttgtgaataagtaaaatttatgacttctgaccacaacttgaaaatttgaaaaaaataacttatttaagacagtaagaaacaaaaattttcctattttgtataagcaaaatagatgagtacacatacatcagtaagtcaagcaaagatgattcataattgcgatgagttctactctctcattgcaattatgtaaactattatttgaaaaatgatacacagatcctggcatacttcctctaagaacaatggtaacacctgcgaattgcatctatttccatgagaagaaaaccatactttcaggttggttactaggtagtctcagtttccatacaggaaataktctcagtagtttgcatatttgaagatgttcattatggcctttttcataatagctaaagattgaaaatattctaaattttcaaaactaaacaattgaaataacgaagtattaaaaatagaattgagcatg

SEQ ID NO: 177401 - DNA, 613 bp, Homo sapiens
aaactttcatacccatgcctctgttcactattactagtatgctattcaagaaggtgtttttatatttactcttcattaatctaaggatattccagtcatatggctaaattaatggagtcacatttgataaaaagtacatggcataaactttatttttatgagaatttcagctgaaagatgagcagaacagttgytgaggaataataaaatcttgcagttgtcatccagtccggcttctctgcagtgagcacaagccactggtaacaacgtttgtgaaactaaccaaaaagatgtccctggtgacccatatctatttatttatatttagagacagagtctcgctctgtcccccaggctggagtgcagtggtgcaatctcagctcactgcaagctccgcctgccaggttcacaccattctcctgcctcagcctcccacatagctgggtctgcaggtgcccgccaccacgcctggctaatttttttgtatttttattacagacagggtttcaccatgttagccatgatggtctagatctcctgacctcgtgatccacctgctttggcctcccaaagtgctgggattacaggtgtgagccattgtgcccggcccacc

SEQ ID NO: 177402 - DNA, 523 bp, Homo sapiens
gttagtgaaagtaacagacaacagttttatgaggatgcagaatacacatgtgtgtgttatgtgtgtgtatgtaagagagacagcaggtgaatctacgtgtgtgaaagtaacagatgtattgtgtgtaaaagtttttatggaagagacttgcrtctcttccccttacgaggggaagcatcttctgaggaggacatgtttactgatattgcagttatagggtataaattgaagtttcaaagtcccagagggtcagaacagtatacaaccaagagacagtgtatactttgatattttaaagaaggaaggggtaagaaaaattgaaaatgtagatacgctgatatgaatagctgggtgctggatgaacaataaattaataaaattcctgactaatggctctctgaagaagaaagtaaagccactattgatcctcaagtagatgttcattgcaacggtcagcaaaacttttataaatgattttttagtaaattagaaaaaaactttgaacataacatgtagacaaatt

SEQ ID NO: 177403 - DNA, 523 bp, Homo sapiens
gttagtgaaagtaacagacaacagttttatgaggatgcagaatacacatgtgtgtgttatgtgtgtgtatgtaagagagacagcaggtgaatctacgtgtgtgaaagtaacagatgtattgtgtgtaaaagtttttatggaagagacttgcgtctcttccccttacgaggggaagcatcttctgaggaggacaygtttactgatattgcagttatagggtataaattgaagtttcaaagtcccagagggtcagaacagtatacaaccaagagacagtgtatactttgatattttaaagaaggaaggggtaagaaaaattgaaaatgtagatacgctgatatgaatagctgggtgctggatgaacaataaattaataaaattcctgactaatggctctctgaagaagaaagtaaagccactattgatcctcaagtagatgttcattgcaacggtcagcaaaacttttataaatgattttttagtaaattagaaaaaaactttgaacataacatgtagacaaatt

SEQ ID NO: 177404 - DNA, 552 bp, Homo sapiens
aaaatatccaaggtcattcattcacttaataaaattgtttgcatactttttaaggttaaggcagtattcatgttactaggaatattgcattgaacaaaaacagtgttcctattttcatgaaacaaatattttgttaaggagtgacaggcaataaattgtaagccaataaatgtgtaattaattaagaagaaaataaagcaatggttcatgggcaagaaaggctgcttttttatattattggttatgaaatatttgataaagtgaccttttaatagagacctgaataatacaaggttcaacttttcaatctttaatatagaagttgtctctaaaggtgaaaatggaatatgttctactcatttatttatgaactgctttaggaaagacacagtgagaaggatgccattgaggcaagattgttgtggtttactttaatttagtttagttttgttcagagcactagatcccttgggctkaaatttacataagcataataaatatgtaatatttttggttctttgaaatttctaggtatttttacagtgaggcata

SEQ ID NO: 177405 - DNA, 552 bp, Homo sapiens
aaaatatccaaggtcattcattcacttaataaaattgtttgcatactttttaaggttaaggcagtattcatgttactaggaatattgcattgaacaaaaacagtgttcctattttcatgaaacaaatattttgttaaggagtgacaggcaataaattgtaagccaataaatgtgtaattaattaagaagaaaataaagcaatggttcatgggcaagaaaggctgcttttttatattattggttatgaaatatttgataaagtgaccttttaatagagacctgaataatacaaggttcaacttttcaatctttaatatagaagttgtctctaaaggtgaaaatggaatatgttctactcatttatttatgaactgctttaggaaagacacagtgagaaggatgccattgaggcaagattgttgtggtttactttaatttagtttagttttgttcagagcactagatcccttgggcttaaatttacataagcayaataaatatgtaatatttttggttctttgaaatttctaggtatttttacagtgaggcata

SEQ ID NO: 177406 - DNA, 557 bp, Homo sapiens
taagttttttaaaatgagaagaatgacagaagcatatgaaaatttttatgttttctataattctattggtgatatcattagtattgttaagtgtataaaatatgaaataaatcttagattgaattatggcatattttatttctatcaatgtctatgttccttggaaccaatatactcaatatgtaatcttacatttaattatggctgtattctatttctatcaatatctatgttccttagaaccaatgtactcaacatgtaaatacaatgtaatagagagtagaataataaaatctctgtggtttaattttgaattagaattttaatatgaactcatgaatatatatgtttgtaccctagctctrtacactgaaattgccaagaaaaatgactaaatcaatgggaagtaccatccttaccttacagatttttgtcttgaaataatatttctttaaaagaatgtaggactttttgtaaagatgctaggagatgattaatacagttgatagaatcattattttctctaggaagaggaaggatgttggattgggtcgagg

SEQ ID NO: 177407 - DNA, 507 bp, Homo sapiens
gcaagggcaagggccttatagaaacaagcagcacttaacaaggtcattgggttcattttgcctgctgcccagatagagccaatttatcacaacaggggaattgcaatagaaaaagggtttaatacacgcagaaccagctaattaggagaccagagctttattattactcaaatcagcctccctgaaaacacagaggctagggtttttcaaagacagtttggcaggcaaaggaatgggttcagctgattggttggggatacgatcatagggatgtggaaactccagtccttgtgtgttgagtctacttctgggtgggggccacaggaccagttgagtcaagagtcatgggtctgggtgaggctatctggttgtcagaaaygcgaaacgctgaaaagacatctcaaaaggccaatcttaggttctacaatagtagatgttctacagtagtgatgttatcagtaggagtaactgaggaagatgcaaatcttgtgacctctaataatggct

SEQ ID NO: 177408 - DNA, 543 bp, Homo sapiens
cctgtgggagaaagcaagggcaagggccttatagaaacaagcagcacttaacaaggtcattgggttcattttgcctgctgcccagatagagccaatttatcacaacaggggaattgcaatagaaaaagggtttaatacacgcagaaccagctaattaggagaccagagctttattattactcaaatcagcctccctgaaaacacagaggctagggtttttcaaagacagtttggcaggcaaaggaatgggttcagctgattggttggggatacgatcatagggatgtggaaactccagtccttgtgtgttgagtctacttctgggtgggggccacaggaccagttgagtcaagagtcatgggtctgggtgaggctatctggttgtcagaaacgcgaaacsctgaaaagacatctcaaaaggccaatcttaggttctacaatagtagatgttctacagtagtgatgttatcagtaggagtaactgaggaagatgcaaatcttgtgacctctaataatggctggtcattatttgcacctagatct

SEQ ID NO: 177409 - DNA, 657 bp, Homo sapiens
cacaaaaatctccatgagacaatgaaagcccaagtcaacactgttgtaacctacctgccagaggatggcatataggattcttctactcctagacattcaggattaaaacaaacaaacaaacaaaaaacatttttaaattagaggaattacacataaaaattcagatctctgacttctcttaaagaatcacaagatctggccaggtgcagtggctcacacctgtaatcccagaactttgggaggccagggtaggtgaatcacttgaggccaggagttcaagaccagactggccaatatggtgaaactctgtctctactaaaaatacaaaagttagccgggcatggtggtgcatgcctgtaatcccagctacttgggaggctgaggcatgagaatcgtttgaactcaggargtggaggttgcagtgagccaagattgtgccactgcactccagcctgacagaacgaggcactgtcttaaaaaaaaaaaaaaaagaaaaaaaaaagaatcagaagatctgtccctgattataattatcagccttcttttggacacagatgtgctctctgtttgccacagtccccaccattccctattattgtacatctagcctgcttcactcattgatctgcttgatcaatgagtgaagaatttgaattc

SEQ ID NO: 177410 - DNA, 482 bp, Homo sapiens
ggaattcgagactagtctggccaacatggtgaaactccatctctactaaaaatacaaagattagccgggcgtagtgcatgcacctatagtcccagctactcaggaagctgaggcacgagaatcccttgaacttgagaggcagaggttgcagtaagcagagatcgcgccattgcactccagcctgggtgacagagcaagactccattccatctaaaaaaaamaaaaacaaaaaaaaaaaaaccacacacacaacaacaacaacaaaaaacacaaaaagaaaattcgctgggcatgatggcttgcacctgtagtcccagctacttgggaggatcatttgagcccatgaggcaaaggctgcagtgagctatgattgaaccactgtactccatccaccctaggcgacagagtgagactctgcctcaaaaaaaaaaaaaaaaagaaaaaagaaaaaactacaatttgattttgctttcccttgaaga

SEQ ID NO: 177411 - DNA, 526 bp, Homo sapiens
tgactttgtgtactgcgaaagaagtcaaacaaagatcacactactgccagcatgcaaaatcaaagtcgaagtatcttaatcaacaacacgtacacaacctcagaaaaaaaaaaaaaattcccctaccaaagcaatttcaaaaaattggaacaagcaactgctacactagatgcaaagacatcaatggaaaaacacaggaagcatgaaaaagcagggaaatgggatatcatcaaaggaccataattgtccagcaacagattccmacaaaatgaatcccttgaaatgccagataaataatttaaaatattgatttttaaagaagcttaatgagatgcaaaggatatctgaaaatcaggccaggcatagtgtctcgtgcctgtaatcccactgtaatcccagcactttgggaggccatggcaggtagatcacatgaggccaggagttcaagaccagcctgggcaccatactgaaaccctgtctttctactaaaaatacaaaaaaaaatgtaagctaatacaagaaaatc

SEQ ID NO: 177412 - DNA, 620 bp, Homo sapiens
atgttttaaagctacttattcagtgtttaactgacactatatagagtccttttgctamttttaagctaatcaaaagagatataatataccctgttagtgcttctgatcagttcaagcattttttttttctcgtcaaggtgctatgagcatttggcagggtagttcttcactatgtgggtctgtttccagaatagcaagcattcagcatccctgagcctggcatttgaaatgccaatagcaccctccaatcattgtgacaatcagtgtccccacatattttcaaaagctcttgtggtaagtgttgccccttcccctccccgtgacaaacctgccccttatacctttactgatgtttctagcctgtgtggcctacaaaaaaagtgtgaatggggaattgttcacattaaaaagagataggttttcatttctgctttttgtaagccattgctaaagttaaatttaattgcaaaatactaaactcttgaaccaattctaggacaggtttgcagaatgattttcttaaaggacctttataatatcttacccttaaatgaatttctgagacttaacattcgtaacactagggcatgattatttaaatatatgggagcaagattggg

SEQ ID NO: 177413 - DNA, 471 bp, Homo sapiens
aaatgaaatgggggatgacctccacttttcccattttactgtaagtctttgagtaaaggagtgactcctcaaccttattgtatccacaacactaaacaggatatgtaagccaaataaaattttgttgaayaaaagacataacactttatgggtccacatatacatatgcatccagaaaactcacttctgcattttgtgtctgctccttcttgtgactttaaacagtaagtcctcagcaacagcgtcttctcatcctaaaatggatatgatatgtcccaaatgcataatgctaaattatttgatcataaattgggagtctccactctcaatcctaaagacaagcattatctccaataccaaacacttgaaaaaagtgtaatgagattacatttagatattattcagaagccaaaaccacaaataaggcaacaattctcaaagtttaattttctcaaaaaggttctttttaaa

SEQ ID NO: 177414 - DNA, 471 bp, Homo sapiens
aaatgaaatgggggatgacctccacttttcccattttactgtaagtctttgagtaaaggagtgactcctcaaccttattgtatccacaacactaaacaggatatgtaagccaaataaaattttgttgaacaaaagacataacactttatgggtccacatatacatatgcatccagaaaactcacttctgcattttgtgtctgctccttcttgtgactttaaacagtaagtcctcagcaacagcgtcttctcatcctaaaatggatatgatatgtcccaaatgcataatgctaaattatttgatcataaattgggagtctccactctcaatcctaaagacaagcattatctccaataccaaacacttgaaaaaagtgtaatgagattacatttagatattrttcagaagccaaaaccacaaataaggcaacaattctcaaagtttaattttctcaaaaaggttctttttaaa

SEQ ID NO: 177415 - DNA, 457 bp, Homo sapiens
gtaatattttttatgtcagagaaggtagttttcatatattgtgcatcaacctatggatctccaatttccaaatgtgcagtacatgctcaacaaactgtggaacagaatgatgaatgagtaacattaaccgaactctttagaaaattggcatactaaagttcatactaaaacatgaatgcattctctttattcaagtaattaatttctaataatcccattcatcttagatacaaaacttaattagcttagtaataaaattactgrtgatagcatattattttactaaatatatgctttagaatgtactaacagtttctgtccaagtttatccttatggaaaccatagtagtaaaagcattcttatgtccagctttctttttatcaggttctaaagagaggacatattaatagtacacacgtaaacagtagctgactgaatttttaaaagattaaataa

SEQ ID NO: 177416 - DNA, 459 bp, Homo sapiens
attgaataaaattatttctaaaatgaaaataagcccatgtgtagtgatcttctatgcccataagatggcagcagaagaatgtctattgatctacttgagtrtgaagctagcaaagaccgttttgtgtttggatgagttcgcagatgagcctttctatcccattccatttaagtgttttagtatagggaatgcagatttttttttggcacatgaaggccctttgtgcacattcaccctggcacttcttcacacaagagcaacaggtacaaggtataaagctccctggattgcaagagaggatacctagtttactctccagctaagcccacaatttatgccttctcaggcaagccatttaacttctcttgttcagtttcttactcagctaattggtggagttaggagatctatagggaatattagattataaaataatagcattctaagtcatcagtgact

SEQ ID NO: 177417 - DNA, 459 bp, Homo sapiens
attgaataaaattatttctaaaatgaaaataagcccatgtgtagtgatcttctatgcccataagatggcagcagaagaatgtctattgatctacttgagtatgaagctagcaaagaccgttttgtgtttggatgagttcgcagatgagcctttctatcccattccatttaagtgttttartatagggaatgcagatttttttttggcacatgaaggccctttgtgcacattcaccctggcacttcttcacacaagagcaacaggtacaaggtataaagctccctggattgcaagagaggatacctagtttactctccagctaagcccacaatttatgccttctcaggcaagccatttaacttctcttgttcagtttcttactcagctaattggtggagttaggagatctatagggaatattagattataaaataatagcattctaagtcatcagtgact

SEQ ID NO: 177418 - DNA, 459 bp, Homo sapiens
attgaataaaattatttctaaaatgaaaataagcccatgtgtagtgatcttctatgcccataagatggcagcagaagaatgtctattgatctacttgagtatgaagctagcaaagaccgttttgtgtttggatgagttcgcagatgagcctttctatcccattccatttaagtgttttagtatagggaatgcagatttttttttggcacatgaaggccctttgtgcacwttcaccctggcacttcttcacacaagagcaacaggtacaaggtataaagctccctggattgcaagagaggatacctagtttactctccagctaagcccacaatttatgccttctcaggcaagccatttaacttctcttgttcagtttcttactcagctaattggtggagttaggagatctatagggaatattagattataaaataatagcattctaagtcatcagtgact

SEQ ID NO: 177419 - DNA, 459 bp, Homo sapiens
attgaataaaattatttctaaaatgaaaataagcccatgtgtagtgatcttctatgcccataagatggcagcagaagaatgtctattgatctacttgagtatgaagctagcaaagaccgttttgtgtttggatgagttcgcagatgagcctttctatcccattccatttaagtgttttagtatagggaatgcagatttttttttggcacatgaaggccctttgtgcacattcaccctggcacttcttcacacaagagcracaggtacaaggtataaagctccctggattgcaagagaggatacctagtttactctccagctaagcccacaatttatgccttctcaggcaagccatttaacttctcttgttcagtttcttactcagctaattggtggagttaggagatctatagggaatattagattataaaataatagcattctaagtcatcagtgact

SEQ ID NO: 177420 - DNA, 389 bp, Homo sapiens
aagcacagcacttatgtttttataacaggacaatgggcagcgccgggccttccctctcacatgggcaaaggtcagcaagtgatctgagccgggcagtgcccacatccggaatcagaagccggagagcctagaggaaggccctcctcaccgcatcttccattaccccaagacgtgacttgcccgatttcctttccaatccacgtttytgaggcgagcagctatgaaaagtagcatgtttatctctgcgtgggaattggtggcacgttgtgtattaactgcgcagcatttgtgaaagttttcagagctcttggggaaaccgagaatgagaggagaaagaggcagggagaggggttctggaagcccagcggagttcacagaaggaattccag

SEQ ID NO: 177421 - DNA, 493 bp, Homo sapiens
aaaagataactctaaaaataatcacaacatgggcaagtgagcactactctgagatggggtccggagctgcctgtcactcactgtcttccctaaggacataagatgtcactacccaccagggcccaaaccatagattggccattagatgtgaatccttcctgcgtgacatgagatgcacttgatttagtcaacccaagagaggctgaaacagcagtggcttctgcagagatgctagaatgatctactcatcaaccggtttgactgaatttaccctttgtaacctgatgcttggaatcctggtcacgygtgctcccatacacactagaaattaccaccaaatcagtattctcacaaagcaaataatagaagtaagaaagggtgacctgggccaggtgcagtggctcatgcctacaatcccagcactttgaaaggaggccgaggtgggcagatctcagagctcaaaagtttgagaccagcctaggaaacatggcga

SEQ ID NO: 177422 - DNA, 564 bp, Homo sapiens
cactcactgtcttccctaaggacataagatgtcactacccaccagggcccaaaccatagattggccattagatgtgaatccttcctgcgtgacatgagatgcacttgatttagtcaacccaagagaggctgaaacagcagtggcttctgcagagatgctagaatgatctactcatcaaccggtttgactgaatttaccctttgtaacctgatgcttggaatcctggtcacgtgtgctcccatacacactagaaattaccaccaaatcagtattctcacaaagcaaataatagaagtaagaaagggtgacctgggccaggtgcagtggctcatgcctacaatcccagcactttgaaaggaggccgaggtgggcagatctcagagctcaaaagtttgagaccagcctaggaaacatggcgaaaycttgcctctacaaaaaaaaaaaaaaaaaattagtcgggtctagtggtgcacacctgtagtcccagctacttgggaggctgaggtgggagggctgcctgagcccaggaagtcgaggctgaagtgagctaagattgtaccaata

SEQ ID NO: 177423 - DNA, 564 bp, Homo sapiens
cactcactgtcttccctaaggacataagatgtcactacccaccagggcccaaaccatagattggccattagatgtgaatccttcctgcgtgacatgagatgcacttgatttagtcaacccaagagaggctgaaacagcagtggcttctgcagagatgctagaatgatctactcatcaaccggtttgactgaatttaccctttgtaacctgatgcttggaatcctggtcacgtgtgctcccatacacactagaaattaccaccaaatcagtattctcacaaagcaaataatagaagtaagaaagggtgacctgggccaggtgcagtggctcatgcctacaatcccagcactttgaaaggaggccgaggtgggcagatctcagagctcaaaagtttgagaccagcctaggaaacatggcgaaaccttgcctctacaaaaaaaaaaaaaaaaaattagtygggtctagtggtgcacacctgtagtcccagctacttgggaggctgaggtgggagggctgcctgagcccaggaagtcgaggctgaagtgagctaagattgtaccaata

SEQ ID NO: 177424 - DNA, 350 bp, Homo sapiens
atttattgctgctcaggaccctccagttgtctcttttcctctggcatagtgactggcaatttggagaatcagtgtatcctaccaacttacaatggtcatgtggtacgaatgggaaataaaccatgtttatttttaatttgagtcactattgtttggtttattcattagtgaagactagtctagtctctccgattaaacttacataatyataggctatttttgaaaagatatacaaaaatttggcaacagaaagataactagaatcaagagtgagagagattttatactctttttttttgtactatgttttgtttatcatgtccatacatgaatcccttcctctaccgcta

SEQ ID NO: 177425 - DNA, 550 bp, Homo sapiens
ataacacatgatttaaaaaaaggtggaagagggcactcacaagaattgaaagatattccatgctcatggattgcaagaattaatattgttaaaaagttcatacttctaaagtgatctacagattcagtatagtctctactaagatgccaatgacattctttacagaaatagaaaaaacaatcctaatattcatatggaaccacaaaagacctgaatagccaaagcatcctgagcaaaaagaacaargctggaaacactacttgactttaaaatttaccacaaactacagtaaccaaaacagcatggtactaacataaaaacaagcatatagaccaatggagtaaaatagagaattcagaaataaatccacacatttacagccaatccattttttacaaaggtgccaagactatacactagggaaaaagacagtctcttcaataaatggtgctgagaaaactggatatccatatgcaaaagaatgaaactagatccctatttctcaccatatacaaaaatcaaatcaaaatggattaaaaacttaaatata

SEQ ID NO: 177426 - DNA, 623 bp, Homo sapiens
tgttgaacttgggacacaaatccagggtctgtcttccttctggtgaatctccttttctatttttatttttttgtaaatttcatctttcattttagattcagggggtctgtgtgcacatttgttatatggatatattgtacccaataatgagcatagtacccaataagtagtttttcaacatacacttccctctttactttccccctctagtagtccacagtggcaattgttcccatgtttatgcccatgtgttctcaatgtttagcttccacttataaatgagaatatgtggctttctttttctattcctgcattaattcacttaggatacaatattttttatggctgtgtagtattccatggtgtatatgtaccatgttttctttatccagttcacattgatggtcaccctagattaatttcatgtctttgctgattgggaatagcatggcratgaatatacaagtgtatgtctctttttggtataatgatccattgtcctttgggtatataaccaataatgggattgctgtgtcaaatgagagctctgttttaaattctttgagaaatctccaaactactttccacaatgactaattcccaccaatagtgtatgtgctcca

SEQ ID NO: 177427 - DNA, 584 bp, Homo sapiens
cataataatagtccccttggcacgctatatcctctcaagtcttaaatgttgtgtaggcagacawccattgagagttgaatggtctcactccaactgggtcagcaagaacataaaaatcattcagctggtacaaagctgtgacttgtgaattccatattgacaccaaaaacttgtgaaactccatactgaaactaaagaagacttgcgacttccacactgagattgaataagtctttatgatggtgacagagagtggcatcaattcctaaagttttggttaatctctctaaattgagaggctgaccaaaaggggggaattattaaagcaaactaaatatggtctgagaatgactccatacttccatatgtgagtcttatggatgaaacctaacctaataggcagatgggattgaaaaccttccttaggagtatgtgcctgtaacaatagctgagtgatgggcaatcccagcagtcatacttcaatcactcatagactgctgagtgttcaaattgtgttcaaataaggcaaaggccaacatgtaaccaatctagctgtttctgtacctcacttctgattcctgtac

SEQ ID NO: 177428 - DNA, 553 bp, Homo sapiens
gggctggcatcacagttattactgtggtgcttggatggaaaaaaagagtggttgttgattacaagttttctgccttgctagggttccctttccttgtmctttggctacagaaggcaacttgttgttagaatttttgtctgggcttgttggcatgtctcggtttctagtttattcagcctcaagtctaaggatatctgaggcaaaaagataacccaaggaattcaccactgtgtaattccttctttaatttttattttttgagatggagtttcactcttgttgcccaggctggagtgcaatggcacgatctcagtgcaccgctatctctgcctcccaggttcaagcgattctcctgcctcagcctcccaagtagctgggattacaggcatgtgccaccatgcccagcagttcttagccaatactgctacttctttccacctttcagagtcttcttataattctttaaataaataatgttgagggtttttactggtacatggtgggagggatagggaaaagcacattcattccatcttcctgtaagcaatagtcc

SEQ ID NO: 177429 - DNA, 583 bp, Homo sapiens
aggaaaggcagcccataaagagtgcattattaatcatatagggatattaattgtcatagctggggtgagggagctacaatatctatattacacatccagaagtcactgcttaagggctgcctctggaaaatattatctccctggactctctaacctaccaagtgcatgagggaaataggttctgaaaatctaaaggcaacactccaaaaataaatgcaggaatgaccattagataatggattggtgtgcatggatcagaaaggatgtggatagagcactgattatgcctgctatccctactaaacatctttatagtgattgtccttggattgcttacgttctcaaaaggtttagacctaaagctttaaattgaaactaggatgtctattgttttaagaattttatgttgaaatacttcacaataaaataactgtaaaattaaatgaaataaaagaacaagacctctgttgctataatcttgccagttttaagttagctattgcayaagcatcaaggtctattggtaaaagtataggggtaagttgcaaacgaattgggtctggtcctgctcagtgctctgaaa

SEQ ID NO: 177430 - DNA, 509 bp, Homo sapiens
gccaataataaaagcagaaaatttaaataagaaattaacaagataatttcctgccttgatccttgccaaaaagtaaaataggtaagtctgattttaagacccattctttatatgagacaagccattagtgggaaaagaaaaacaaagaggcagattttgctcccacctcacattgatccctgtcctttctttccatggatcagttggttctgattctgtggctttgtgactttagaaatggaaacacaggtgttcaaagttatgtggaatgccttcccttactgatccgtgtcctccaccttccttttctctggaaggactaaagccaagagcctgcctcttgggagccccttcctacccacacacatgcagctgctaatcctctccttccctctctttcttccatgtactctcaaaagtgwctcacagagtgttttaaaagctttattcatctgcattggatgattctcacttaggttgacacggacatcatcttcagtctctattta

SEQ ID NO: 177431 - DNA, 523 bp, Homo sapiens
ttgctttaactattcagggtctcttgaggtgccatataaatgttatgattttttttctatttccatgaaaaatgacattggcattttcataggaattgcattaaatctatagatcactttcagtaatatagacaagtttccaatattgattcttctgatccataaacatgaaatatctatttatttgtgtcttcttcaattttattcattaattcattatgtttcatagttttcagtatacagatatttcacctttttggttaaatttatttctaattattttattccygttgatgctattataaatgtgactttttaaaaaatttcttgttcagatagtttattgccaaagtatagaaacacaagtgatttttatatgtagatgctgtatcctaaaacttaactgaattcatttattaattctaacacttttgggtagaatctttaggttgttctatatataaaatcttgtaatcagcaaacagagacattttgacttcttttctgatttggatgactttta

SEQ ID NO: 177432 - DNA, 468 bp, Homo sapiens
gacaaaaaaaaatattaatccaatgtgaggacagaatacaaacttttttctttacacgccaaatctctataagcactggaacacagtctctacccaaacaagggagaatactaaggaaaataagacataggatttaataaatagagagtctagcacagaggagagacaatggaaattctgaaaatggcggttaggagacctttctccgtcaccgaggctggagtctggaatgcaatggtgtgatcatagctcactgcagcctcaaactccygggatcaagcaatcttcccacctcagccttctgagtagctaggattacaggcacacaccacaaagctaaattttatattttttttgtagagacatggactcactatgttgttcagactgtacttgaactcctggcctcaagcgatcctcccaccttggactcccaaagcactaggattacaggtatgagacactgta

SEQ ID NO: 177433 - DNA, 468 bp, Homo sapiens
gacaaaaaaaaatattaatccaatgtgaggacagaatacaaacttttttctttacacgccaaatctctataagcactggaacacagtctctacccaaacaagggagaatactaaggaaaataagacataggatttaataaatagagagtctagcacagaggagagacaatggaaattctgaaaatggcggttaggagacctttctccgtcaccgaggctggagtctggaatgcaatggtgtgatcatagctcactgcagcctcaaactcccgggatcaagcaatcttcccacctcagcctyctgagtagctaggattacaggcacacaccacaaagctaaattttatattttttttgtagagacatggactcactatgttgttcagactgtacttgaactcctggcctcaagcgatcctcccaccttggactcccaaagcactaggattacaggtatgagacactgta

SEQ ID NO: 177434 - DNA, 468 bp, Homo sapiens
gacaaaaaaaaatattaatccaatgtgaggacagaatacaaacttttttctttacacgccaaatctctataagcactggaacacagtctctacccaaacaagggagaatactaaggaaaataagacataggatttaataaatagagagtctagcacagaggagagacaatggaaattctgaaaatggcggttaggagacctttctccgtcaccgaggctggagtctggaatgcaatggtgtgatcatagctcactgcagcctcaaactcccgggatcaagcaatcttcccacctcagccttctgagtagctaggattacaggcacacaccacaaagctaaattttatattttttttgtagagacatggactcactatgttgttcagactgtacttgaactcctggcctcaagcgatcctcccrccttggactcccaaagcactaggattacaggtatgagacactgta

SEQ ID NO: 177435 - DNA, 614 bp, Homo sapiens
gacctggggttagatacttaaagcacaatacaaagaaaatgacwaataaacattaccaaaattaaaatattttgttctatgaaagatacagttaagagaatgaaaagacaagctacagactgagaaaaaatatttgcaaactacatatccagtaaaaaacacacatcaggaatttaccaagaaatctaaaaattcaacactaagaagacaattcaattttaaaaatgagcaggagatttaaataggcacttcaccaagaggatatacagacggcaaataagcataagaaaaggtgggccaggcgtggtgactcatgtttgtaatcccagcaatttgggaagctgagatgggaagaggatcatttgagcccaggaattcaagaccagcctgagcaacatagtaagacccctgtctctacaaaaaaatttttaaaaaccagccatgcatggtggcacacactgatagtcccagctgctcaagtgggtaaagcaggaggaatcacttgagcccaggaggtagaggctacagtgagctagctataatcatgccactgtaccctagcctgggggatggagtgaaaccctttctctctaaaaaccaaaaaaaaggaaaaa

SEQ ID NO: 177436 - DNA, 603 bp, Homo sapiens
tgctctgtgatctaccctttacttttggttgtgagtggactaaatataggtgctctgtttgccatttccataatgtttgcattttctcgcctccagaccttcgtacacaccaccacccatggaatggcctctgttggggccacgattgttcatgtggaaaatgcctgcttatccttcaggacttatttcagattttaactcaccctgatcttttcagagttaaatacttctttgtcttactatagcatctcatttataactctattagtgtgtgtgtgtgtgtgtgtgtgtgtgtgtgagagagagagagagagagacagagagagasagagtcctgctctgtcattcaggctggagtgcagtggcacaatcacggctcagcagcctcaacctcctgggttcaagcggtccttccacctcagcctccctagtagctgggaccacaggtgcatgccgccacatccagctaatttttttttctggtttgttttggttttggttttggttttggtagagatggggtctccctatgttgcctaagctggtctcaaactcctgggctcaagtgatccttctgccttagcctcccaaagtgctgggatt

SEQ ID NO: 177437 - DNA, 587 bp, Homo sapiens
aaatttatttttctttaaaaaggaagcaaggaccccgatatctgggtctatgatacctaaataagccaaattattcaccagtggttctcaactggggttcataggggacattcagaaatgtccargggcttttagatgtcactatatctgaaagaaatgctagcatttagttggtggggccagggctgcttaatgtcctgacatgtacagtctcacacaagaaattattctacctcattggtctcttggagaatatcaccatagaggcagctgaggacaaaggccaaggtgggctgtctcacctgtgcagaactaatcctttatttccttgccttatcagtaataaaacaccaatcatccatctatttggaaacaattgatatcttggcagctggaataaataaatgacttgctttaaaaaaatagccaattcttcctttccacgtcaattggaagtgaattgtgcacattcacatacagtcatggttttgtgaaaggagatctcaggagtggaggtgaactgtgcacttcctaatactgtgggtctgggatggggagtatgaagttatgccacaaacgatgtgact

SEQ ID NO: 177438 - DNA, 609 bp, Homo sapiens
tgtctacaagacaccttgctggaattttgatagaaattgcattaaagcaatttgggaggagctgacgttattactatgttcagtattccaatccatgagtattttatgtctctccatttattcagattttcttcaatttctttcattagtattttgtaattttcagcattcagatcatttttttggttaggtatatacctaagtattttctttgaaataattgtgaatgatattatgctttaaatttcagtttctacatatttattgttrgcatatagaaatgtgattgatttttgtgtgttgattttgtatcctctggtcttgctgaactcacttattctaagatttttttatagattccttggaataatatttaatcacattatttacaaatagagataattttatttcttcctttgcaatgtgtatattttctgcagcatcttttaatctagtctagtttactacttttttcccctaaaaaggggaatatttttgaagatatcagtacagttgtcttgtaggacatgccaactgggtttgttcattgttctcctgcggtgtcatttagcctggtccttcatttctgcttttcttgtaaactggacc

SEQ ID NO: 177439 - DNA, 583 bp, Homo sapiens
gccgaggagggcagatcacgaggtcaggagattgagactatcctgtctaacatggtgaaaccctgtctctactaaaaatacaaaaaaaaattagccgggcgtggtggcaygcacctgtagtcccagctactcgggaggctgaggtaggagaatcgcttgaagctgggaggtggaggttgcagtgagccaagatccgcaccactgctccctggcctgggcaacagagcaagactccatctcaaaaaaaaaaaaaaaagaaaagaaaagaaaagaaagcaccatgtacaggagaagaggtttttttttttttttttttttttttttgttttgttttgttttgttttgttttttaatttggactttctaggagggcagtgggactatatttacctgctcccccaccctagtgtgatgactttgtaagattgtaagtacacaacctcaggtcgacccatttgaaatgttcatggtgcaattaattaactgatgttctgtttatataatgttctctcctctgcccaccagtaaataaaagagaaaaaagggaaaacattcttaaaacaaccattttattcttggaagc

SEQ ID NO: 177440 - DNA, 583 bp, Homo sapiens
gccgaggagggcagatcacgaggtcaggagattgagactatcctgtctaacatggtgaaaccctgtctctactaaaaatacaaaaaaaaattagccgggcgtggtggcacgcacctgtagtcccagctactcgggaggctgaggtaggagaatcgcttgaagctgggaggtggaggttgcagtgagccaagatccgcaccactgctccctggcctgggcaacagagcaagactccatctcaaaaaaaaaaaraaaagaaaagaaaagaaaagaaagcaccatgtacaggagaagaggtttttttttttttttttttttttttttgttttgttttgttttgttttgttttttaatttggactttctaggagggcagtgggactatatttacctgctcccccaccctagtgtgatgactttgtaagattgtaagtacacaacctcaggtcgacccatttgaaatgttcatggtgcaattaattaactgatgttctgtttatataatgttctctcctctgcccaccagtaaataaaagagaaaaaagggaaaacattcttaaaacaaccattttattcttggaagc

SEQ ID NO: 177441 - DNA, 591 bp, Homo sapiens
aggccgaggagggcagatcacgaggtcaggagattgagactatcctgtctaacatggtgaaaccctgtctctactaaaaatacaaaaaaaaattagccgggcgtggtggcacgcacctgtagtcccagctactcgggaggctgaggtaggagaatcgcttgaagctgggaggtggaggttgcagtgagccaagatccgcaccactgctccctggcctgggcaacagagcaagactccatctcaaaaaaaaaaaaaaaagaaaagaaaagaaaagaaagcaccatgtacaggagaagaggtttttttttttttttttttttttttttgktttgttttgttttgttttgttttttaatttggactttctaggagggcagtgggactatatttacctgctcccccaccctagtgtgatgactttgtaagattgtaagtacacaacctcaggtcgacccatttgaaatgttcatggtgcaattaattaactgatgttctgtttatataatgttctctcctctgcccaccagtaaataaaagagaaaaaagggaaaacattcttaaaacaaccattttattcttggaagcaaccgt

SEQ ID NO: 177442 - DNA, 249 bp, Homo sapiens
gagggcagtgggactatatttacctgctcccccaccctagtgtgatgactttgtaagattgtaagtacacaacctcaggtcgacccatttgaaatgttcatggtgcaattaattaactgatgttctrtttatataatgttctctcctctgcccaccagtaaataaaagagaaaaaagggaaaacattcttaaaacaaccattttattcttggaagcaaccgtatttcccctactgaattaagaaagctt

SEQ ID NO: 177443 - DNA, 612 bp, Homo sapiens
ttaatactctgttaaatgtgcatactctcacgtctatcatctcagtctttagattttcaaatatgcacaagaagatgtgcaaggaacttcactgcaatgctgtttgcaatagaaaaaaagttagaagaaaacaacctaagtaacactagattaaaaaatggactaataaactctagttattcaaacaatgragtactatacaatagtgaaattgaatgactagctcttaaaaacataatactgagtacaaaaagcaatttagatccatatagtataatatcatttatttaagcattagaagccccacagaaaacaatatatggtggttttgaatatatatatgtaaaatattaaatataaacattgaaatatcaatttccaggaaaaggagggaagaataaagagtgggtaaaaaaacttaccctttaaagaagacagaatgtgatttttgaacaatattataaaatctttacatttaattatttaaatttaataagttaataacaatacaattaacataaattaatataatttcataaattaatttctttaaatattaaaggattgaatgtaatatctttatttaatcttgatagtattaaaaataatttt

SEQ ID NO: 177444 - DNA, 481 bp, Homo sapiens
ggacgtacttggagttctattcaaaacttaattttctattctgaatttattctaattcattctatctatagagattccccaccagctccttaggaatcaagtcctgggaagtatcaactactggatcacagttggttcttcctcatgggctgcacctccaggacacctgggtggctggcccctccctcctctctgccaggctctgcatcagcttgcacagcttgcctgtggttcccacttgtctctaatgcagggtgttcagtgtattcacatgcctctttctatttgtcttcrtaccattgggcaaacagggaagatcttagccaaaactatgactttggcagaaattatttgcagagtctccaactgtttccttttaatatacttcagttcagctttacaagcaatagatgttaagctgatacataatagatgttcatttattgatagataaatgatacataatagatgttcattcatt

SEQ ID NO: 177445 - DNA, 585 bp, Homo sapiens
aaagagtcaccaccattggggaattccagatttatttactaagtggaggttaaaccttccccttaccataattccctgtcccacccctccctgcaagaggaatcaggatggagggtgttattagagtgcagacaggaaggttttccttttcttccccatgggtgggctgctctcctccctaagaagccaagtgaagggcttccaatgggaaatcagtcatagaggttggggtatctaygagaaggagagacttgtatcttctttatgacaggtgtgtactaagctctagaacctgcagcctcactctctactgactttggagtggtacagatcagggcaagaaagttttaggagagcctgagatgtgcttcgtgtgctaccagtctggagatttctgagcagagaagcttgttgtaatagctgtcaccagcagagtaagaagggtgccatagtgttaggtactgaagaacaggatgtggccacacttaccctagtctcctgtgaccttttgagggcacagaggaaaacacaccgagatgaggggagggacagaggaagagggctcactgggataaagcaagaggc

SEQ ID NO: 177446 - DNA, 585 bp, Homo sapiens
aaagagtcaccaccattggggaattccagatttatttactaagtggaggttaaaccttccccttaccataattccctgtcccacccctccctgcaagaggaatcaggatggagggtgttattagagtgcagacaggaaggttttccttttcttccccatgggtgggctgctctcctccctaagaagccaagtgaagggcttccaatgggaaatcagtcatagaggttggggtatctatgagaaggagagacttgtatcttctttatgacaggtgtgtactaagctctagaacctgcagcctcactctctactgactttggagtggtacagakcagggcaagaaagttttaggagagcctgagatgtgcttcgtgtgctaccagtctggagatttctgagcagagaagcttgttgtaatagctgtcaccagcagagtaagaagggtgccatagtgttaggtactgaagaacaggatgtggccacacttaccctagtctcctgtgaccttttgagggcacagaggaaaacacaccgagatgaggggagggacagaggaagagggctcactgggataaagcaagaggc

SEQ ID NO: 177447 - DNA, 585 bp, Homo sapiens
aaagagtcaccaccattggggaattccagatttatttactaagtggaggttaaaccttccccttaccataattccctgtcccacccctccctgcaagaggaatcaggatggagggtgttattagagtgcagacaggaaggttttccttttcttccccatgggtgggctgctctcctccctaagaagccaagtgaagggcttccaatgggaaatcagtcatagaggttggggtatctatgagaaggagagacttgtatcttctttatgacaggtgtgtactaagctctagaacctgcagcctcactctctactgactttggagtggtacagatcagggcaagaaagttttaggagagcctgagatgtgcttcgtgtgctaccagtctggagatttctgagcagagaagcttgttgtaatagctgtcaccagcagagtaagaagggtgccatagtgttaggtactgaagaacaggatgtggccacacttaccctagtctcctgtgaccttttgagggcacagaggaaaacacacsgagatgaggggagggacagaggaagagggctcactgggataaagcaagaggc

SEQ ID NO: 177448 - DNA, 498 bp, Homo sapiens
attgcttgagtctagaagtttgagaccaacccaggcaacatagcaagaccccatctctaccaaaacaaacaaacaccacacagtgtttcctcaaaaaattaaaaattgatacataaactctacttcttgatatatacccagaactgaaagcagggactcaaacagataagctgtacagccatgtacactgcagcattcgctattcccaaaagccaaaaggtggaagccatcaacatatgagtggataaacaaaatgtggtgtatacatacaatggaatattattcagccttaaaaaggaagggaattataacacatgctgcaacatggatgaactctgaggacattaygctagtgaaataggccagttaaaggacaaatactgtatgattccacttacatgatgtacttacagtatcaaattcagagacagaacagtggttgccagagacttagggggtggaaaaagagagttaattgttcagtaggcacattgtttc

SEQ ID NO: 177449 - DNA, 579 bp, Homo sapiens
ctacattttatactaaccttgctttttcttgtgaactaaccagaaatccctggctgcagctcagaaaggacaaaagggatggatgatgtaaaaatctggatcaatactctagttctgagcaattattctgtgaatcctgccaggtgatgggaataaatagaatgcccatcaaccagagatttcctttttgggaaagtaagaccaagggagttaactaaagccaagccccacatacctaaatctcagcaagcataactatagccaccaattatctgggcatgtcacaggacatccttttctctcccttgttcgaggagggcttgattccatagtttcaccttagcattcaacttatgataaggagtccatgcaacactgcctcccccttccagagacrcatttttgtcccaaactcaactccgagctttggattgaagccctaggaaataaaactgggtctgagggatccagaggcagatgataatggaagttaaaaggcacagcagagtgtgactgattcctgctgattaatccaagcttcctgtttgatggataaaggttatgttagtatccatggca

SEQ ID NO: 177450 - DNA, 524 bp, Homo sapiens
aattcctggcctcaagcaatcctcccrccttggcctcacaaagtgttaggattataggcatgtgccactgcacccagcctgaagtttttgtaatggtgtaagataattctagagtttggtagtcaaagttgaaaagaaaaggggagaaagcaatgtaaataggtagaatgaactttaaaatatgtttaaatgaaatggacagagaatatattgaagctatagttaggaatatacttttggatgttgagaccatttttgtgccatcccctagcattgtctcttttatttgtctttgttttttaagagtgaaagtagaaataacaaactatcagaataccatgagatccaaaatacatggaggaaaaattgactgaaaggagtagtggaaaattcagtgattatggttggtgattttttaaataatgaatacccttttttgataattaatagaacaactagaagaaaatacagagaagacttgagcaacactattaaccaccctgatttaaactgacatgtatggt

SEQ ID NO: 177451 - DNA, 556 bp, Homo sapiens
atactcataagtgggattgctggatcatacggtatgatcttttttttttttgtagagacagggtctcactgtgttgcctaggctggtctttttttcttcttctttttctttgttttttgtagaaacagagcctcacttttcttctttctttctttcttcttcttgttcttcttcttgttcttacttgttcttcttcttcctcctcctcctcctccttctccttctcctcctcgtcctcctcctcttcctcctcctcctcctcgagacagggtctcaccatgttgcctaggctatcttgagctgctcttgaactcctgggctcaagcgatcctcctgtctcagcctcccaaagtactaagactatgtgtgtgagccaccacayttggcctgtatgttctatttttaatttttggaggaatctgtgtatctgcatgttgttttccataaaggctgcaccaatttacattcccatcaacagtttcatgggttcccctgtttctataccttcactaatgtttctaatctcttgtctattttgtaatagccatctcagtag

SEQ ID NO: 177452 - DNA, 531 bp, Homo sapiens
aacccggtaccgcagatggaaatgcagaaattacccatcttctgtgtcactcatgctgggagctgtagaccagagctgttcctattcagccatcttgtctcctccgatatccgctctttaatcccaatatggatgatgttgtcttctatcctttttactcttcaattagcttagacatagtcgtatcaattttcttatttcaaaaatcagtttttgattttattgcttttatctattgttctactcttttctattttattattttcttataattaatatattttttcttccacttctagagttcaataggctgtactttttctaacttctttggttgaaaggctaattactttytaatatttatattttagtattaagtatatcagttgatgagatgcagtctttaaggtgtgtatctcatccattctcatacacttggttttgattttttaaaatttattttaatgatagatttaaccataaccacaataataatttcactaaatataaatatctaaacattccaaataa

SEQ ID NO: 177453 - DNA, 551 bp, Homo sapiens
ctttctaatatttatattttagtattaagtatatcagttgatgagatgcagtctttaaggtgtgtatctcatccattctcatacacttggttttgattttttaaaatttattttaatgatagatttaaccataaccacaataataatttcactaaatataaatatctaaacattccaaataraaggcagagattgctaaactcagtttaaaaaaagaaacgaggcccaactatatatactgtctataagcaatccacatcaaatatatagacatatataaaagttttttttttttaaagaaaaaagtaccacgtaaacaaacattcttttcttgtattttttatcctttctgcaatttctgggtttgtttctagtagtaatttgttctctggttgtgaattgcttttttcttattcttcgtatgtctgcagctcacacaaatggagagatgttagagcatcaaccaattagagcagggtatccttggtgatcacagagtacacttagtgaattctctttagagggaaagagtgtcacacttcagcagtaga

SEQ ID NO: 177454 - DNA, 567 bp, Homo sapiens
ttgtatcacaagaataccatcaactgcttttaaaactatattcttgggtgtcagcattctgatttcttgactatcagtctcagtcacaagatggggactgagcatgtcaagctcagttttcacttcttccccatccaccaattttaaagaaacagttctgcatttatttaattaatgttgtcaragataaagggtttctctacctccacctcttcttacctgagtccagtgtaaggagtttctctacacttacatcctacctttctactctctttgttggccaaacatatatcaaatttaaaaaaaataaaggaagtcttttgtattagaattcaaagcataaaaaagaaacagaatttcttagcttaataatactaaagaggtatggaaaaaagaaactgtaaaagcctgattgccttatgaatgttcgaatctgcaaaccaatattcccttcacctcttttttcacctgcatacaactcaaaccctctcagttatacccagggaaaaatctaatgggctggaaatactcctgaggccagaaagaagagtaatgaggcagagcatc

SEQ ID NO: 177455 - DNA, 551 bp, Homo sapiens
aatgtctacattcgcatcatcagaactaggaactttatgtatgttgtatcacaagaataccatcaactgcttttaaaactatattcttgggtgtcagcattctgatttcttgactatcagtctcagtcacaagatggggactgagcatgtcaagctcagttttcacttcttccccatccaccaattttaaagaaacagttctgcatttatttaattaatgttgtcaaagataaagggtttctctacctccacctcttcttacctgagtccagtgtaaggagtttctctacacttacatcctacctttctactctctttgttggccaaacatatatcaaatttaaaaaaaataaaggaagtcttttgtattagaattcaaagcataaaaaagaaacagaatttcttagcttaataatactaaagaggtatggaaaaaagaaactgtaaaagcctgattgccttatgaatgttcgaatctgcaaaccaatattcccttcacctctyttttcacctgcatacaactcaaaccctctcagttatacccagggaaa

SEQ ID NO: 177456 - DNA, 669 bp, Homo sapiens
agaattgtttacctccctaagggatataaatacatctaaagttttttggaaaacaattgaatttcattcatgttcatatgtttagatataggcatttcacctctaaaaccctcttaagaaaataattcaaaatgtagtacagatttttcaaatataaagatataaaaaattcctagccatgaccataaaaaaatattccctttgtttttctttcattctctttcttcttttagtagaatttaagttttgtcaggtcaagaaacatgtttgttttcttcactgctgtatccccactatytaaaacagtgcggtaatggtaaccatggtaaatgtgcagtaaatatttgataaatggttaaatcttcaaacgtgcagaaggtagttggaaaaacatgaagtttaattgagatataaagaagacttgcatacaagaagagtagtactttatttctggttggaaagagttaaccttgtaaagatgccaaattccctgataatctatatatttacagtatttttcacttaacatacaaatggaaaaaaatagtacttttctttttatgaggagaaataggaaaggttttgtcctaccatatatatgtgtgtatacatctatgcagatacacacacacacacacataaacagaaataaaaatggtgtggtactga

SEQ ID NO: 177457 - DNA, 607 bp, Homo sapiens
catcattctcagcaaactaacatgggaacagaaaaccaaacactgcatgttctcactcacaagtgggagttgaacaatgagaaaatatggacacagggaggggaacaacacacaccaggacctgtcaggggttggggggcaaggggagggagagcattagtataaatacctaatgcatgcgggggttaaaacctagataacaggttgataggtgcagcaaactaccatggcatatgtatacctatgtaacaaacctgcatgttcagcacatgtatcccagaacttaaaagaaagaaaaaaacgattgcccaaatcaagagctcataactcaacatcaataataattttwaaaaaatattacgtactatagagcacttaaccattctaaaagttttttgtgtaacaacattttcaatcctcaccacagccccaggagattagttctgctactattcctgctttataaataaggaaaataaagcacagagaagttaagcaatttcccaaggtctcacataaagtaaacagtagagcaagggactgccatgtggtcatctgcttatagtcacctctctcactgctatgacacactgcatctgattggcat

SEQ ID NO: 177458 - DNA, 621 bp, Homo sapiens
cctttcaaccaatagaatattgccgttttcaatatagcctgactatcccctattctgagcccataaaagccccagactcagccacattggggagactttcccaccttcaggtagggggacaccccagcataccctctccatggaaaactatttcatcactctctgccttgctcactctccagctgtcagtgcatcctcattcttggatgctggacaaaagctcaggacctactgagtgcaggtatccagaaaggctctctatgtcaggaagccgtgtgctggtaagctgaccaccaaaaggcaatttgtagcattttaccattcccctagtgtaaatacccccaagagagttgatttcaagcagacttgggataaggtgcatacaatcaacccttagggcctgctgcatgccagcttctgcattccactgagttgggagaaacaaataccagttgcccaaaaagcsaaggttctgagtcagaacgtatgtgaaaagatatgcaggtacttaggaaatttaaatgattgatcctaaactgactagccatgaaaattcaattggtaaacaatttttcccatctacagagcagaaattaagatgagattaatattgtgttctat

SEQ ID NO: 177459 - DNA, 630 bp, Homo sapiens
atcctgtcacctacttttgagtttcttgtcatgaagaagtattctcatgaaagttcttttccagctgtgatagccagcctaagactgtagggttcagatcactccaccctactcgagacagaaatactcataaaggagtttartcattggcaatgtcttaacctattaagattccagagtattaagcatatacaggtttattgatgattatctccagaatacatttgtaagttgtttgtctaagtcagttttctggaatttagagtgcattagcccatataaattacaatataaataattctgagacaaaagtccattttactaaaaccaatgaatgcttacagattttcactaaatggcagaaaatgatagctgttataaaaatcaataagttgaatagagaaacaaccaacatgagtaaagtattttgaaattctttctttcttttttaacacagtcaaatcaggttcaataggagattaggagggccactagatgtttttgtgaagatgggaggtttcttaacatttctaatagtttccccattttcacttaagtcatttgtagcactacacttcatgcacttcacgcatcctaatgattactattgtgtttggagaaatcacaagt

SEQ ID NO: 177460 - DNA, 630 bp, Homo sapiens
atcctgtcacctacttttgagtttcttgtcatgaagaagtattctcatgaaagttcttttccagctgtgatagccagcctaagactgtagggttcagatcactccaccctactcgagacagaaatactcataaaggagtttagtcattggcaatgtcttaacctattaagattccagagtattaagcatatacaggtttattgatgattmtctccagaatacatttgtaagttgtttgtctaagtcagttttctggaatttagagtgcattagcccatataaattacaatataaataattctgagacaaaagtccattttactaaaaccaatgaatgcttacagattttcactaaatggcagaaaatgatagctgttataaaaatcaataagttgaatagagaaacaaccaacatgagtaaagtattttgaaattctttctttcttttttaacacagtcaaatcaggttcaataggagattaggagggccactagatgtttttgtgaagatgggaggtttcttaacatttctaatagtttccccattttcacttaagtcatttgtagcactacacttcatgcacttcacgcatcctaatgattactattgtgtttggagaaatcacaagt

SEQ ID NO: 177461 - DNA, 630 bp, Homo sapiens
atcctgtcacctacttttgagtttcttgtcatgaagaagtattctcatgaaagttcttttccagctgtgatagccagcctaagactgtagggttcagatcactccaccctactcgagacagaaatactcataaaggagtttagtcattggcaatgtcttaacctattaagattccagagtattaagcatatacaggtttattgatgattatctccagaatacatttgtaagttgtttgtctaagtcagttktctggaatttagagtgcattagcccatataaattacaatataaataattctgagacaaaagtccattttactaaaaccaatgaatgcttacagattttcactaaatggcagaaaatgatagctgttataaaaatcaataagttgaatagagaaacaaccaacatgagtaaagtattttgaaattctttctttcttttttaacacagtcaaatcaggttcaataggagattaggagggccactagatgtttttgtgaagatgggaggtttcttaacatttctaatagtttccccattttcacttaagtcatttgtagcactacacttcatgcacttcacgcatcctaatgattactattgtgtttggagaaatcacaagt

SEQ ID NO: 177462 - DNA, 500 bp, Homo sapiens
atatacaggtttattgatgattatctccagaatacatttgtaagttgtttgtctaagtcagttttctggaatttagagtgcattagcccatataaattacaatataaataattctgagacaaaagtccattttactaaaaccaatgaatgcttacagattttcactaaatggcagaaaatgatagctgttataaaaatcaataagttgaatagagaaacaaccaacatgagtaaagtattttgaaattctttctttcttttttaacacagtcaaatcaggttcaataggagattaggagggccactagatgtttttgtgaagatgggaggtttcttaacatttctaatagtttcyccattttcacttaagtcatttgtagcactacacttcatgcacttcacgcatcctaatgattactattgtgtttggagaaatcacaagtgaaacaaagaatttgcaacatcgagaaatggaaagagagtaaaaatggagctatgac

SEQ ID NO: 177463 - DNA, 538 bp, Homo sapiens
aattgaaatttctggatcatagagtaggataattttcaactttacaatataatgggaaattattattttgatcaacttttttatcaatatacactcccaccaagattgagaaagagaactgacccatgactttttgatcttggagtttttcagtacgtagaactaaagattcaaatccaggtatatggacagggccaagactaggcatggaaggtaggratttaatagtatggcaaataaatgaacactagcatcaatagtttcttggttatcgtagtattgcctactgaggatgaatacacagttctttctgctctccaggcagaaagcaaacagggcccaaaataaacatcacgttttcaaaacactgtcagacaaagaaattcttcaggcacacatggcttcttatatcttttagttctagcatgaacatggacagaagaaagaagagcttgtttagaagggtcctttcatcctgaagccaagtggttcggctttacctttgacctgcttattttgatctctctgtccccaatac

SEQ ID NO: 177464 - DNA, 577 bp, Homo sapiens
tttctctatgctctattccttgaattgaaatttctggatcatagagtaggataattttcaactttacaatataatgggaaattattattttgatcaacttttttatcaatatacactcccaccaagattgagaaagagaactgacccatgactttttgatcttggagtttttcagtacgtagaactaaagattcaaatccaggtatatggacagggccaagactaggcatggaaggtaggaatttaatagtayggcaaataaatgaacactagcatcaatagtttcttggttatcgtagtattgcctactgaggatgaatacacagttctttctgctctccaggcagaaagcaaacagggcccaaaataaacatcacgttttcaaaacactgtcagacaaagaaattcttcaggcacacatggcttcttatatcttttagttctagcatgaacatggacagaagaaagaagagcttgtttagaagggtcctttcatcctgaagccaagtggttcggctttacctttgacctgcttattttgatctctctgtccccaatactattcttaataaaatca

SEQ ID NO: 177465 - DNA, 602 bp, Homo sapiens
atgacggaacttttcagaggactttagtcacctttttggtgcaaacagtacggattcaaaaacaaagagcggggatctcatcctccatacatcactgtctaaaaacaagacctcctgtgaggcacttactctctccaggccttttccctctccgataaaaagggactcatttccctgggtttactaattttcagagagatggtgatatctgatagccaaatgatygtgaaaatgttttgaggagtctgggactattcaatccattgtcgtagaggctacagaaatataaaacaatcttattatttttacttttatatttctgtgagctagagtcttcaaatatgagatgaggaaagtaaatggctactttgcttccaaagtttaagtgtctatcctttcccaacctaacagcaaagcctataaaggagagaatccatgttctgttttgctattaatccagcttgtagtgttcacacctcagaaaaaaaaatacaataccattataacccaccaagcaggaaatacgaattacccttcatcttcatctcaaatggaagaattagctgtttaaacaattaaggcacgtgaccaccgttggtttg

SEQ ID NO: 177466 - DNA, 504 bp, Homo sapiens
gaagacctgactatgccactagaagagaggtgacatggaagagcactgagggatcagacacatgagtgagccatctttcacattcagcccgctgtagcctacacatgacaccaatctcagccacgatgtgctgcagttgcatgagatacccaaacaagaaccacacggctaagccctagtcaacccacagagtcttgagagataataataaattgttgttttaagacacaaaatgtggaagtggtttattttgcagcaattgataacagagatagmcaggaaatgtaattaaattccctctctgggaaacataggagaagattgattgacatgtgtgcctcagatagaggatgacagactgtctcatgttaccaggggcttatgtcttctcagaagatgaacagtgaaaatttcataagacagtaccagaaatgtgaaggcaagctaatcaagtactaccaacagagagcagaggtgacagttcgagataaaagttttatgtgg

SEQ ID NO: 177467 - DNA, 407 bp, Homo sapiens
ttgggggaatgatgtctgaatttggttgtggtagtaattacacaactctgtacatttgtcaaaattcatagaattatgggtgggcacaatggctcacacttgtaatctcactactttgggaggtggagacaggtggatcacataaggccaggagttcaagaccagcatggtcaacatggtgaaaacccatccctactaaaaataaaaaaattagccaggcctggtggcgtgcacctaaagtctcacctacttgtgaggctgaggcacaagaatcgctggaatccaggaggcaaaggttgcagtgasccgagatcccgccactgcactccagcttgggcaacagagcgagactccatctccaaacaacaacaaagattcacagaattataaccagaaggagtgaattc

SEQ ID NO: 177468 - DNA, 563 bp, Homo sapiens
taagcttcgccagaactagcaggtgatgggaggggagagagatgggtgccaacatccgtgagcccagagaggcgcattcagcactgacagccacctctgtgcagaggccattctgtgtccaggcagctcaggtgtggggttagaggccttgctgagtgaagggatggaaggccctggsgcgcccagctttcccatgttgagctgagccccaccagctcccccgcagaaggaccagaggcagccctcctgcacctctgcccggggcctgcatgggaattcaagtgtgccaagcagagcaggggaaatggtaagcagggcctggggctgagaagtggccgcggagtcctctcctgagctcacaccaggggtgcctggacagcagaggccctgggccagagcacatgcaggccctctcgggaggaaagcctcatcctaggctgcagactcccccatagagggttccagggcttacaggcaatgcacagcaaacaaacagaggagatggtaccatggctggaagcaatagacacaggccccatggggggacaagcacataggcgtta

SEQ ID NO: 177469 - DNA, 563 bp, Homo sapiens
taagcttcgccagaactagcaggtgatgggaggggagagagatgggtgccaacatccgtgagcccagagaggcgcattcagcactgacagccacctctgtgcagaggccattctgtgtccaggcagctcaggtgtggggttagaggccttgctgagtgaagggatggaaggccctggcscgcccagctttcccatgttgagctgagccccaccagctcccccgcagaaggaccagaggcagccctcctgcacctctgcccggggcctgcatgggaattcaagtgtgccaagcagagcaggggaaatggtaagcagggcctggggctgagaagtggccgcggagtcctctcctgagctcacaccaggggtgcctggacagcagaggccctgggccagagcacatgcaggccctctcgggaggaaagcctcatcctaggctgcagactcccccatagagggttccagggcttacaggcaatgcacagcaaacaaacagaggagatggtaccatggctggaagcaatagacacaggccccatggggggacaagcacataggcgtta

SEQ ID NO: 177470 - DNA, 633 bp, Homo sapiens
gaattgacccaatccaccactctgctcacagcattttagggctatgcaaggacggagsgggaggcagggaaaggaaaacagaatgaggaatcagagaagattgtggaaaatcctcggggtagattctcaccattaactattttgtttactaaaaatgcttgaatagttggcacagggtgggggaaatttccttttcctcagctctttcagatgggaaattagaagaaaaagattgtccaagtatatttttcctttctctgcttcacactcatcatttgcccgcaaaaaaagtatactcagaaaatactaatttaaatgtaaaatacccacccccatttttttgacagaggaagcagaggtgaaatgctgaagaacatgcagggaaaaataagggactgaataacttctgttaactattaagatctgaggcaatggcacctgaagtattacatggctttgctggacaaaatgtgtgtgtatgtgcatgcatgtacatacatgtgcacatatattaataaaggggaaaatagtagagtagaaaagaagagcatagagcaaactactggctttttccaagcagtacaacttgtgaacatcctgatttggattctgtctttttagtgccaagactgt

SEQ ID NO: 177471 - DNA, 337 bp, Homo sapiens
atggctggaggtagaaatcatttggaggatccttcagacatatttcttgcacttggtctcagatgacattaaggttgagctcagctgggactgtcggccagaatgcccacacatggcctttctttgcagcttgaactacctcagtatgatggcctcaaggtagttaacacaatggagatggttcatcttcttagatactttcattgggtatactttgttactgagcaatgagctctctgcccartgcatatagcagtcaatgctatagcaccagcttttgagaaaaggagggcctttatagtgagttgactggcagggagacaggaggtaacactca

SEQ ID NO: 177472 - DNA, 337 bp, Homo sapiens
atggctggaggtagaaatcatttggaggatccttcagacatatttcttgcacttggtctcagatgacattaaggttgagctcagctgggactgtcggccagaatgcccacacatggcctttctttgcagcttgaactacctcagtatgatggcctcaaggtagttaacacaatggagatggttcatcttcttagatactttcattgggtatactttgttactgagcaatgagctctctgcccagtgcatatagcagtcaatgctatagcaccagcttttgagaaaaggagggcctttatagtgagttgactggcarggagacaggaggtaacactca

SEQ ID NO: 177473 - DNA, 460 bp, Homo sapiens
ttttatgcctatataaagtcccaggcaccgtgcaagattctgggactacagagcgctgtaagacttctcattcctaaccaactttcagtgtagtggaagaggcagtaaactaaatatacaaatatacctaaaacctcttctctgtgtctgactttctaacataatgtgcccagggagctattatgtatcagagatattaattgcagcattgtttttaataatgaaaaagtttattatcaatacattaagtgaccagtggtttagccaaagtaagatatgccatttatctatactaacaaaaatataccacatatactaacatgcttagggggaaatataaaaccattatagaactatargttcaatatgatatacttatttttttaatgtatacacatgcatcaaataatacatataatttacagatacacatatacacacacacgaactgagaacagtg

SEQ ID NO: 177474 - DNA, 370 bp, Homo sapiens
agcaagggggaaatctgcttctgtgatccaatcacctcccatgaggccccacctccaacaytcaggatcacaattcaacatgatatttgggtggggacacagagccaaactatatcagggatgttaatggtgtgaagtcactgagaactgggatgagatgagattcaaggcacttttggagggtgtagctagccataaagtagtgtgacagatatttctctgagattaaagggaaaaaaaaatggaaaaaaattttaagtgtcaatatggttatattggtcatctggagaggaagtcaagaaaaattctgcctatttctttctctctttttcctgtggggtcattactaaaaagtgtgagtcaggaaagg

SEQ ID NO: 177475 - DNA, 370 bp, Homo sapiens
agcaagggggaaatctgcttctgtgatccaatcacctcccatgaggccccacctccaacattcaggatcacaattcaacatgatatttgggtggggacacagagccaaacyatatcagggatgttaatggtgtgaagtcactgagaactgggatgagatgagattcaaggcacttttggagggtgtagctagccataaagtagtgtgacagatatttctctgagattaaagggaaaaaaaaatggaaaaaaattttaagtgtcaatatggttatattggtcatctggagaggaagtcaagaaaaattctgcctatttctttctctctttttcctgtggggtcattactaaaaagtgtgagtcaggaaagg

SEQ ID NO: 177476 - DNA, 429 bp, Homo sapiens
agaattctactatgtagaaaaaacaagagaaatacttattaatagaaaatgcattgctagttgaataggtgaataatgttaggctcatttcaaggtgcagaacatgaattgatagtggtttagtgatattctccaacagtgttcagcaatccatacaaaaaaataaaggtataaatgtatgcctttataagtattaaacagtaagaggtaaactcttgcaggaatctcacctcatgatgaaaagagcagaaaccccaagtcacatgactctttgctgctgctgctaataactttaaatgtcacttataatactgagaaacatttccacagctgaggtatgaaagttcctaccaacctcagtacccaaagttgtttaaaaaatgcatgatatgtatyttttttattcccattgcaggctttctccaccac

SEQ ID NO: 177477 - DNA, 582 bp, Homo sapiens
tgttcatgaactggacaaactccacctcaacccaggtggattgtcccccatttgacataccccaatctgcaacaaattctcacattccttcatagaactgtcttctagctcctaaccctcttccatgtcactcaggttggaagatcatcagaacaagaatttccctgagtataatatttgagcattctgagacttctattgtctaaggagcagttcaatctgttcggggaaaaggrgagatgttacttggtaaataacagaaagaaaaaatgcccattagtcaatagaactcctattcccctcccttttcatactctttctcccacaaataagcgtagctgaataaatactgaaagaagaccatctaagacctttttcctctccttccctttcttccttacttccacttttaggatatgaattttaagaaaggcttgtataattgctacaggaaatattaaagttgtggatttggaaaaaaaattaatcgcttgttctcaatgtagggagacatcaaatatcttcatttgaatgggcaataaagacatcaagaataagaaacagcagtttatctgagctgat

SEQ ID NO: 177478 - DNA, 610 bp, Homo sapiens
aatccaaatcaaacattgaactgaaaatgacggttggggcttcatgttcactacataatgctgaatcgcagggttccatcttaattttcaaaaaacccaagagttatgagaacatgttggtagcgtggytgtaaatggtttctaaacaccctggggtgcatgcgaataactcagatgttaaattgctttctatcccttctgctatatcttcagcttgttatttctgataatagtccaagtagagacagacaataaacctgacttcccttcttcctactaacacttcatgctgcaagacaatattgtgagatctttatctctaatcactcagctgaacaactattgagtctgatacttggacacacaagttgaaggttcctacctccaacctcccatcctaggtactgccctgcaccatctagaaagtctccttacctctctactcaggaccatttgtggtatacagagtcactagtacttccctggatatctcctgtaaatgctcacagtcttgtcaaatcacttctgtggaactctcctttcttgtccttgccctgccctggggacccaccctttttcttccacccactggtgagcttagtggcacaga

SEQ ID NO: 177479 - DNA, 508 bp, Homo sapiens
gtcagcctgggtcatagatgtaacagggcgtcatatgtaaaggacaatttgaggggtgtcaaatagtaattccactttcgctggctccagcattgcacagatatgacatcctcatatacctaccaggcaaacagctactgaggatcatttcaaatcttctggataaacccactagctcaaatcaatcctggttccaccaggatttgtttagtttcactaaactaaacggattagtttcctaatctgtgaaatgggaatactaataktgaccgccttatgggagtggctttagaattgaatgaattcatacgtgtaagacacttagaaatgtaacattacgtagtaagcatccacaatctgctagatggggttgttgttatctgtccgtttctatttgcccctctggacattctttgcaaggtaaagattcttctaatgtgtcaaatgacatgtgtacataatcatttatttgatattgcaagagatggaaaaaaatctaaattatggg

SEQ ID NO: 177480 - DNA, 641 bp, Homo sapiens
tgtaaaaccacattttagtaaaccagtgtgaatgaagggtatattaaaaaaatcaaggaactgtatttcttgaccaaatcagcattttgttttgtggaaattggattccacagaaaaatctgttgatttaggaagtgtctgcttccagtaactagataaactaggaaccaaaagtttcattttgattaagtcagtcatcctagttcaactcctgtgctggagttgatgcatgctagtgagtctggttaatacttcctcttcttcttttttttttttaaaccacaaggttgcaatttgggcatctccctttaaatgaattcatatacatgtaattaattaacatgcattctcacaatattctggaaaaaaacctgggtattcacaccacgtaaccaatggagaaatgaatgttagtgagtctggtattaagagatctttctctttgaacaggggattcatgtctcctggctctcrgttcagagattcagcttctctgtcttgaaattgtcctacaaattgtcttctcataaatattttaatagagattaaacatgttgttgtagctacaaaggcagtttattcattttacttatatttgttgagcacttgtagtgtgtcaggcactcttctagaagcagaga

SEQ ID NO: 177481 - DNA, 576 bp, Homo sapiens
cacttgctcccacagggttcctgccaaccacctcatgcagggggctttgcacatgcatgtccctctccctagaatgtcacccttccagcctcagctcaaatgccatccactctgtgaacatttctttgaatcctcctaatctcactccctatatacgtatcatacaatataaatatgttyctgaatatatcaccttttttactgtaaatttcaaaggaagaaaagaatggtagatgatctttggcctacaatattttgcttctgatctttttagattaaacacaattcccaaatttaaatatcaactaaacctatatctttataataataaagaattcgtgattgtataccacatttcttcagatttttacactttattatgaaattaatcaatgggataaataatattctgattcagattatattttttaagtgattagataccagcaacacgtaaataaataggtgtcaccacaattcacaattttccagccagacttctacatttggatttattcattttgaacctcactttgacatactgatgagtcatttgaaactcaagagatcatacta

SEQ ID NO: 177482 - DNA, 576 bp, Homo sapiens
cacttgctcccacagggttcctgccaaccacctcatgcagggggctttgcacatgcatgtccctctccctagaatgtcacccttccagcctcagctcaaatgccatccactctgtgaacatttctttgaatcctcctaatctcactccctatatacgtatcatacaatataaatatgtttctgaatatatcaccttttttactgtaaatttcaaaggaagaaaagaatggtagatgatctttggcctacaatattttgcttctgatctttttagattaaacacaattyccaaatttaaatatcaactaaacctatatctttataataataaagaattcgtgattgtataccacatttcttcagatttttacactttattatgaaattaatcaatgggataaataatattctgattcagattatattttttaagtgattagataccagcaacacgtaaataaataggtgtcaccacaattcacaattttccagccagacttctacatttggatttattcattttgaacctcactttgacatactgatgagtcatttgaaactcaagagatcatacta

SEQ ID NO: 177483 - DNA, 576 bp, Homo sapiens
cacttgctcccacagggttcctgccaaccacctcatgcagggggctttgcacatgcatgtccctctccctagaatgtcacccttccagcctcagctcaaatgccatccactctgtgaacatttctttgaatcctcctaatctcactccctatatacgtatcatacaatataaatatgtttctgaatatatcaccttttttactgtaaatttcaaaggaagaaaagaatggtagatgatctttggcctacaatattttgcttctgatctttttagattaaacacaattcccaaatttaaatatcaactaaacctatatctttataayaataaagaattcgtgattgtataccacatttcttcagatttttacactttattatgaaattaatcaatgggataaataatattctgattcagattatattttttaagtgattagataccagcaacacgtaaataaataggtgtcaccacaattcacaattttccagccagacttctacatttggatttattcattttgaacctcactttgacatactgatgagtcatttgaaactcaagagatcatacta

SEQ ID NO: 177484 - DNA, 576 bp, Homo sapiens
cacttgctcccacagggttcctgccaaccacctcatgcagggggctttgcacatgcatgtccctctccctagaatgtcacccttccagcctcagctcaaatgccatccactctgtgaacatttctttgaatcctcctaatctcactccctatatacgtatcatacaatataaatatgtttctgaatatatcaccttttttactgtaaatttcaaaggaagaaaagaatggtagatgatctttggcctacaatattttgcttctgatctttttagattaaacacaattcccaaatttaaatatcaactaaacctatatctttataataataaagaattcrtgattgtataccacatttcttcagatttttacactttattatgaaattaatcaatgggataaataatattctgattcagattatattttttaagtgattagataccagcaacacgtaaataaataggtgtcaccacaattcacaattttccagccagacttctacatttggatttattcattttgaacctcactttgacatactgatgagtcatttgaaactcaagagatcatacta

SEQ ID NO: 177485 - DNA, 510 bp, Homo sapiens
tctctagtcacgtagaactgtaagtccagttaaacctttttcttttataaattgctcagtcttaggtatgtctttattagcagtgtgaaaatggaccaatacactgcccttaattgtctttttattcactgttactggtttaaaatctgttttatctgataaaakaatagcaatccctgctctgtgttgttttccatttgcatgatgtatctttcttcacccctttacattgagcttgagggtgtcattacagattaggtgggtctcttgtagcagtagatgattgggtctctctttgttttttttttctttttatccagtttgccaatctagatattttaagtgcagcatttagactatatacattcaaaggtaatattgatatgtgaggctttgattctgtcatagtttgttaggtagttactttgaatcacccaatgtctgccttaatattcacatggaactctccctgtgtgcttgtctgtctccaaatttccccttttataagga

SEQ ID NO: 177486 - DNA, 571 bp, Homo sapiens
agactaaaatgttcctgcctgctgattctgaagagagtagctgatcacccagcacagcactcaagctctgctaagggacagactgcctccccaagtgggcccctgacccccatgccttctaacagggaaacacctcccagcagggttcaatagacacctcatgaaggagagctccagctggcatctcaggtgtgcccctctgrgacgaagcttccagaggaatgaggaggcagcagtctttgctgttctgctgcctctgctggagaaacccaggcaaacagggtctggagtggacttccagcaaactccagcagccctgcaaaagagtggcctgatagaaggaaaactaacaaacagaaagcaataacatccacatcaacaaaagaaatgaccacacaaaaactgcacccaaaagtcatgaacagcaaagaccacaggtagataaatccataaagaggagggaaaaccagggcaaaaaggctgaaaattccaaaaaccacaatgcctcttcttctccaaaggatcacaactcctcgccagcaatggaacaaaactggacggagaatgaatt

SEQ ID NO: 177487 - DNA, 487 bp, Homo sapiens
tgcatttatctgcatgtccagcatgcttcatgatgcagtgccttgtcattttcttaggtggcaaaggtgtcttttgactggtagtttctctgaactcaaagacgttatctttttattgytattgtggatgattgtttcacagtgttgcttccacttagagttgccacataaaatataggatggcccgttatgaatttcaggtaaacaatgaataatttcatttaatgtaagtatgtcccaaatattgcacaggacatacttatgtaacagaatttttggttgtttatctgaaattgttggttgtttaactggccatcctatatttttatttgcttaatctagcaaccctccatgggaagattttaggaaaagtgacactttatctggaccaataaatataagcaacagatttagagagagtattttaagagaagaaaaaggcaagaatgtctgtatatgagaaatcagatatgaatatgcattttct

SEQ ID NO: 177488 - DNA, 471 bp, Homo sapiens
tctgcatttatctgcatgtccagcatgcttcatgatgcagtgccttgtcattttcttaggtggcaaaggtgtcttttgactggtagtttctctgaactcaaagacgttatctttttattgctattgtggatgattgtttcacagtgttgcttccacttagagttgccacataaaatataggatggcccgttatgaatttcagstaaacaatgaataatttcatttaatgtaagtatgtcccaaatattgcacaggacatacttatgtaacagaatttttggttgtttatctgaaattgttggttgtttaactggccatcctatatttttatttgcttaatctagcaaccctccatgggaagattttaggaaaagtgacactttatctggaccaataaatataagcaacagatttagagagagtattttaagagaagaaaaaggcaagaatgtctgtatatgagaaatcaga

SEQ ID NO: 177489 - DNA, 515 bp, Homo sapiens
cttagctcatttcaccacctggaaacaaacattaccttatttatctgtttactgtctgccttcaaaagaacacaacttcctttggggcaagagttttgttttttgatcactattctaacctgtgcctgggaaatagaacataataaacmtttgttgaaggaataaacaaagcaaaggtttttcctgggctgtatttgtataatcaacgcatgagactcttttgcttctgttgcctcaagtagtccagtctaaaattatacttaaatatagaggagtagataaaattagagattaactagggagcagaatcattatgttatttaaccctatgtggaaacccgggaaacgagaaatcttaggagactgaatggagacagtccttagaagctttcaatgtaccctttctgcatcccagataacaaagccctgaaaccttagaaaatcaacacatccacatttgtattttcatcaaatagctttcttaaatagtaacgtcaatcctatgtatgaccaaa

SEQ ID NO: 177490 - DNA, 551 bp, Homo sapiens
cacacatacacatatttgtgtgtatattacatatatgtattttatttatatagatagatggatacagtgatagcaatgtgtagtcaatatggtttttttattcaaatctatatctttaatgattttgtgattatctttcttactatttattgggaaaagtattttaaaatatcccattatgtttatccttatatttccattatgtttagttcacatattttcacarttactattgataatattttcttggtcaatcaaaaatttttacattaaagtctttatttccgatataacacaaccattttaattgtatttaattagtatttgcatggcctatgtcctttattctttttctttctttctgtgttttagatgtgactcttgttaatatcatgcaatcttttaaaatcaagttatgtaatctttatttttaaagtagacactggtttctttaaatgtaatgtaactacttgttctgttgtatcaatttatatgcttcacttaatctatttccttctattgccttccttttcttctttcagattaattga

SEQ ID NO: 177491 - DNA, 244 bp, Homo sapiens
ggtacatatgagatatttactagagctgacaatatggkggaccattatgcaagcccacagtggagtttaggtagaaacccataagaaaaaatatagaaaaggctttgaaataaatccatatactcctaaataaccaaataaagtaacttctaaataaaatatggttttatgtgggtgtctcacataatatccatatttgcatgtaacaaattgatgctcagagagaggctgaataagtaacatt

SEQ ID NO: 177492 - DNA, 380 bp, Homo sapiens
tttattatctttccacattggacttttttatttaagctaccatcacatttttaaaatatccctaaaattattcatttaagatatatttatctgccatcacttgaaagaaaaccaatccacagtttattaagcacctactatgtgtaaggagttatgtaaagaataacataccagaagtcaaaagtataggtcactctccttatacaaaatttgtaaccatctccataatacgaattaatccatagacagtcaagtgaaagaatttgtagcttccagtgaaaagttatcstaagaatcagatttagaaggatgaagagtacatgtaatcgttcttcactataatatagatattagttaccaacatatgccaactataacat

SEQ ID NO: 177493 - DNA, 441 bp, Homo sapiens
agatctttctcactctcccctcactggactctgtatcatgggaaggctgacatctatgggttttattcccacgattccaaatgagctggcttctagttaaagtcagtcaatgagcatccttggctgaataacggtgagtagaaggaaaggaggagtcagggttttcctcctttctctctgccagaagtgtctcyagcagcacctgcatcttctcagtggctcgtgctcctgccagacaagcccactgttgaagccgttgcaggtgaaccttgtcccgaggctctaacaccatgtcttccctttaatgcttagtggtggcttctgttcctaatctgtagatggtcttaccattttctatttggcttttcatctcttccctcacttttaaatccattcatcgctttacacttctcatgttggaataattgaggtgatttcaga

SEQ ID NO: 177494 - DNA, 487 bp, Homo sapiens
ttgctttccttccaacatcaacaccccctacttatccccaaacagtgacaataccagaatcacgtgggcagcagggcagagacacatgaatctatctctcccaccatggcagcccctgggaaaggtggtcacactccacagagcaaaattactccaaagggctgggaacaaatacaaggaaagctgaatactttggtttctaattcacccagggtggtgatctcactgtccacgttaactttataaacaaagggctaatgttgtatgctagctggactgggagggaattagaatttccatagtcaaggagatrtctgaccaaaccgctcctgcacatccttagcttatacccacaaatgcaaaactggtaatccacgatctctgaaaagccatcaagggactaagaacaatgttccaggatagcacagtctccacagagcctgagtcatcaactagcttatcactaatgactttatcagatcttagc

SEQ ID NO: 177495 - DNA, 608 bp, Homo sapiens
gacttgaaggacaacgatggatcagggaaaacggtaagtcaatgaggacaatgataggtcaggtaaaagaaggagtggcaaggcagtgagattgccactgtgagtagtagcawaaaggggcagagatgagcagagaagaccacctcaaccactgtatttcctggaaaaagctagcaaatggcttgaaactaagtcaagatatcactttttttggagatggggtcttgctatgttgcccaggctggtcttgaactcctgggctcaagcaattctcccaccttggcctcccaagtagctgagactacaagtgtgtgctaccatgcctggctaagatatcatctagaaatcacagggagacaacacaaagtgggatgaataggaaaagccatgacatgcccaactttagcaggattttgaatctaccaatcctgatttatcacatcccttcttgctaccaatcaggtgtctgccatcaatcccaacactatctccctttttatttatttagtcccatcccaatcctaccagaataagggttgctggccaggctaccatccctcccagtcagcggagtagtgggtgtgggaaatgggatgctgtagtaatcc

SEQ ID NO: 177496 - DNA, 434 bp, Homo sapiens
ttcaggtcttcactcaaatattatgttctcagcaaggcattccctggcctcccatccaaggcaccatgccaccccaccctgccacaaacacacatggggtctgtctccctctcggctttagtttttctccttagcactagtcgctagcataccacatacttaatttacatcctgttaatagtctcccacactagaatgaaactcaactaagcctggggtttttgtctcttttattcatggtgtatctccagctcttagaatagtgcctggaacagagtaggaggtgttcactccaaaaatatatttttggagtgaatgaatgatcacctacacttatttaagcacttgctgtgtgttagggacttctgtaaacactytatttaataccttacttagctcatctcatcttcataaccacccttcgaggtaataca

SEQ ID NO: 177497 - DNA, 434 bp, Homo sapiens
ttcaggtcttcactcaaatattatgttctcagcaaggcattccctggcctcccatccaaggcaccatgccaccccaccctgccacaaacacacatggggtctgtctccctctcggctttagtttttctccttagcactagtcgctagcataccacatacttaatttacatcctgttaatagtctcccacactagaatgaaactcaactaagcctggggtttttgtctcttttattcatggtgtatctccagctcttagaatagtgcctggaacagagtaggaggtgttcactccaaaaatatatttttggagtgaatgaatgatcacctacacttatttaagcacttgctgtgtgttagggacttctgtaaacactctatttmataccttacttagctcatctcatcttcataaccacccttcgaggtaataca

SEQ ID NO: 177498 - DNA, 399 bp, Homo sapiens
agactttggacatcaagtactatcattttacttttgactggtgccgttacctattcagagaccttcttggtcttatttttactaacataccagatggactggtccattgcmtcccttcattattattgtagccaagtgcatattgtcatgtcaggcatgaggaagggactgatgaggagggctgtggcatacacaaagctactgtggagagccctgctaattgccttgtggtccaatctcagcaacaatgtgattacctggcagcagtccagatggcatcagcctctactctaggcatgtcagcccacaaaggagggcactgccacctgctcgagaaagagaggtgagcccattaattctgatttacaaagatgacactgattgaagagagttgggcat

SEQ ID NO: 177499 - DNA, 509 bp, Homo sapiens
caatatatgaataacttactttaaaagattcagaagcatgtggagagaaatgakaaagttttcttagtgaacctgtttaagatttttattttcccaatgtagtcactgttaatagttggaagtatcctttcctccttcctctttaacagtgcagtcaacccgcacttcttacgcttgaggcagatctgtggaagtgttgcggtttgacctctgtgtgaccccgtgtttgtcatttttcctgcttggaacatatccacctttcagatatggagaaacagaaatctctttctggatgaaagtgatgtcaaacagtgagtcatcaatatcccctaaaaaaagcttgttgtttgagcattgtttttttttttaacctagtgaaaagacaattattccgttatccatgaatcatcactttttaggctgtcattagtacacgtttgagaatgaagctgacagaagaatggtgccaaatcattcatgtggagcttgaaaatgctggataatttgat

SEQ ID NO: 177500 - DNA, 610 bp, Homo sapiens
attctagtgtcacaggaactcaaggctaggattgtctaaaatgggctggcattagccctggaatgcagtagttcattttttcatcctttcctgggttctgtggcatgaatcaacttgctccttcaaggttttctcattgcacactttcagctttgtcagatacactgagtcagttaccacttgcccatattgtttccagcatccaaaattaattaaattaacattttaaattggctgttatctcctcactaattctcaaattgcctgctttcttcctttaccttatccacctctttattcctgtaccaccattttagtggagtttagacgaagcgaggtaaatgtattggttttcattaacrtatttaactgagaatctttgtatatatttgcttcattaccctcaaacattctctggaggtggaatcaggagccaagagtggaccaaaaaaaagttgggttctgggaagaacagctctctccagtctgtatcctggactggataatttgagagaaactttcaagcctactggctaatgaagccctcacaattatagtcaagattgctggtatacctctcatggaatcaggcagggacagacctctcatg

SEQ ID NO: 177501 - DNA, 539 bp, Homo sapiens
tttaataaaggacatagaataaagccagtgaaatgcaatactwattccatttcatatttgcagagagacgtggaaaacttgttaatttcaaagtcaagaagcatccatccccttagctttcaagcataccctttcacaggggcagggagttaagtattacatacactgcacataaaaattgtaggtgtaattttattccgtgttaacattattagcattgccactgtcaacagcaaaattaatttttaaaaaggttcatttccaaagaatgtctttttactaatctgttatacgattattcaaagatttcaccatcatattaacattcttcctctcaatattcttgccccaagacaaaagcttagctttctccagaaacgtttgccccctgggtgaattattcacttttgatttgctagcagaactgcatttgtctcccaaatgtcttaatcgtgtcggaaatctcgaataaaataaagtaacgacacatcttcagtcatttcatataacacactcctgtgtttttaaaagctgtcaac

SEQ ID NO: 177502 - DNA, 574 bp, Homo sapiens
aataataattccctctatgcttttcagatgtattcttctcttccttctatggcagaccctcatgcaaacatctcgacatggctttaaaccacaggagctaaatatcactaagtgagggaagatgaccaataaaaactgaagaagaacytagaagtcacagagtcaagtgaggcttttataaattcttcaggtctagtttctgctaatatggttcgttttatttctttacaagaatgtccagtcttttggcttccctgggccacactggaagaagaattatcttgggccacacataaaatacactaacactaatgatagctgatgagaaaaaaaaacaacacacacacacacatacacaccaaaaaaaaaaaacccctcatatgtttttaagaaagtttgctaatttctgttggcctcatttaaagccatcttggcccacaggttggacaagctagctttagcatatatcaagaggatcttacacaggggaaggatcagggaagtctccctcaggaaaggatgtttaatatgcaacatgaaatataagaatgaggtaggcattgacaaaaacaag

SEQ ID NO: 177503 - DNA, 538 bp, Homo sapiens
tggtttaattttaagagtatattatgaacatgtaggtgtaaaaagataacaaagcaaaaggaattttcccttctttgtttctaatcgggcagaaactccatattgttccatagtattattagcttccagctaatcagtaataaaaagcacaaaaaagcaagtcattttcacaaaagtaaatgtgcattgctttcataaacatagaagcaatgcagtcagtcagtgagacttctctgcttttcgtggaattttatctcaatctatagagccttgatcagacttttgagttcttttcagttcttttcaccttttgcacattgacctttgtttctttcttgctcctatttttttgtttgcattcttttctcaagattttacataaaggatagacagcagaagaacagatcaaatccagaaagtaakttttgtcatttaaagcataaagtgacaacatagcattcaataaaggaaaaaatattcagaaaataaaggttctgaatgtggctagatcatataatttataaccaaaaataccagt

SEQ ID NO: 177504 - DNA, 498 bp, Homo sapiens
tcaggaaaagaggaaaccaggggttacaaaggtggagaggccaagcagaatgaaacagaccccctccatcaagtaaaaaacttggcaggataactagaaacagaccaaccctaaatcttagggttcatgagctcttagaaacataattaactgaaataaaactaatattccagtgttaaaatttcaccttaacatacatcagcagttacaataacaccaggtataaagagaatccgaaactattcattttgtttatggaatgtaccttaagctagggggaaacattccttcacayattagtgtaatttctaaaatggagaaaaattatctacacaaaaagaactgtcaagtttaccttactctatcaagaagcattacttttggggaaagtgtactgatcacttatttgaaatttcttgtaattatacagagcaccagatttccaaagcatttgttcttgagaaaggaaccactaatacccaggaaagaaatgttgaa

SEQ ID NO: 177505 - DNA, 520 bp, Homo sapiens
agcgttactctgtcatttcatgaaacatacactgtatatttmcatgttttcaaaggttagctgtgagccatggaaactgtatactttgaatatctgagtatatctgtatatctaaatatctgagtgaaaattggtaggaagcgatcatttgaagagcatacaactctgcttatgtttttaaagatatttaatatcaagatatagtaaaacgttgtgttctgttttaggcaatgcaaagagttaagtagatttacatgaatggagtgggagctgggggaggacaatgaatgtccttcctcatttcaaaggtcaaagacagcattaattatttttaactaatgtcgtatttaaccacatgcaaacttaaatcagtttgggtctaaccaattcaaagctattctttggttcccttgctctgctgcataattgactaggttcgactttacaaaggtcaaaagaatggacttggttcatattctttcagctaatagcacagttcttaaatcaaaatttgagaatt

SEQ ID NO: 177506 - DNA, 484 bp, Homo sapiens
ttggctatatttagccctggataaagtccactttttcctgagtcataatgccaacttggctaaacgatcgtacatttccaatcatgcttaaataaacataaaatttatgtatggatgagaaggacatttcatagataatttttctggcttcagtatcaagcacattcatatttttctcctaaatctgaaaccaaatgtttgctttcctaatatttttccttcctactggatttttctttccttcttctatgtggtcacccacagcctggcctttgtgtattctcccaagaaagaattgtttatttatattagcagtcctttcaggggttccctrtagactctgtttccaatggtatgtggagttactaagcttttattgttgacaagtggtaggtgggatccaagcttttgtggttaaattgtttattgataattacctgttaattaccctgctgcctgactcctgtaatttactataatcatt

SEQ ID NO: 177507 - DNA, 612 bp, Homo sapiens
ttcttagtattttacttgggagaatgagccttgtcaaatggaaagactgaaatgaatacatttctcagctgcttagcagatatgtttcgcaatataagctaaacagttcaaccaacctcattttccatgtgaatatctgcacttctgaatagatgataggaatgtgaagaagaatgggttgatcttggccttggaattatatggcttaggtgtaaattattcttaattttcaatcattatgttttacattcctagctgaaatttggctgagctatcagattgttcaaaggccagttcatgccacagcccaaggaaccgctactgggagaaggtggaaacccgtaacccacgcccaagtccatccatagggttttccccatgaaggtyaccacaacatacttaacattgttacagacaaattgctgccattaccaagccaaacaattctgtctttatgtttttaaatagctttggtaactctttagaaactttacagctggacaggcactgcatcttgatggagctacgtttatagaattttgttctatgcccctttttcatttgtttcctgatttagacaatagccccaatttccagctgcacatcagttac

SEQ ID NO: 177508 - DNA, 425 bp, Homo sapiens
catagagccatctcctaacttccgagagggcaagatgctgattcttctgaaataagttttagaataggaaagctagagctgagcaaacagaaacagcttcatggcaggctgccaggaagacagacagcacaaagatgatggatgtaagaaaaacaacttgtaagtggtccaaaaatgagaatcctgttggtttttygaaaatactgtagttttttaaaaattcaattaaaataatatccatgtttaaaagaaaaaagaatgagcaaaacaaggtaaatataaatagattggtgtacatgtacctaagctttcagcggaggctacaaatatacattataagcaccaaagagtgtcaagagcattttaagaaattggtcatccctttccactttgtgagtaatacttgggaatgggataaaaaataa

SEQ ID NO: 177509 - DNA, 521 bp, Homo sapiens
aagcttcggactagctaaagrttttcaaatcagtgcaattcctttctttactgttttattaaactatgcaagcacagtacttataaacaaaggaatcatttcagtttttgcttggaaaaatgggagccaatacattccttctgggaattcagggtaaaagttttacaaaaacagtgtccagatgtgcttaaaaattcactctgttctttcttttgtggagaagtggagggagaaacaaagggtaggagagacattttattaaaaattgaaacacttattggtttttcttggctcacccactaacctgctctccactgacaaacaacgcgggaacacctgaggcagaagcgcgtggcatccctccccctccaaccgccccgtctgacctcccccactccggcctcctggcagggagatagggcctggctgaccgctgtgttggtgtcgccaacctgagcctcaggaacttctctaacttccagaacgtcctcattgacaaatggttccaccaggtggtgatg

SEQ ID NO: 177510 - DNA, 521 bp, Homo sapiens
aagcttcggactagctaaagattttcaaatcagtgcaattcctttctttactgttttattaaactatgcaagcacagtacttataaacaaaggaatcatttcagtttttgcttggaaaaatgggagccaatacattccttctgggaattcagggtaaaagttttacaaaaacagtgtccagatgtgcttaaaaattcactctgttctttcttttgtggagaagtggagggagaaacaaagggtaggagagacattttattaaaaattgaaacacttattggtttttcttggctcacccactaacctgctctccactgacaaacaacgcrggaacacctgaggcagaagcgcgtggcatccctccccctccaaccgccccgtctgacctcccccactccggcctcctggcagggagatagggcctggctgaccgctgtgttggtgtcgccaacctgagcctcaggaacttctctaacttccagaacgtcctcattgacaaatggttccaccaggtggtgatg

SEQ ID NO: 177511 - DNA, 645 bp, Homo sapiens
gttggaagtggaagtgtgctgttggtacagataggagaacatttcggaaagaattccctcccctttgattgactgcaaaataagtccctcccttgttctcttgcaattacaggtggaccagatgggtgggcagattggcagtgggggtgcagagtttcttgttctgattgaaaggattttttcttacattttaggtttttttttgttttggagacagagtctcactgtgttgccctcctggcctcaagtgatcctcctgcctcagcctcctgagtagctgggattacagatgtgaattactgtgcccagctcttagatttcattttaagactgaagacctgagagttcatgggcctaagtaaaaggtgccatttatctgcaacaaattggtgcatgctccgtagatctagctgtagggggctgtgtgtgctaatgcagcatttgtgactcagccgtaatgaggatgaccttgcctctcctgttccgcaggctaccacmtagctgtggtgggtcactggccacagaaactgtaggtatctggggctgcctgggtgggaactcagcctgtatgagaacatggtatttggaagacattaaacatttattatagcttttatttttattgaggtataattaacataccac

SEQ ID NO: 177512 - DNA, 556 bp, Homo sapiens
tctaatcttcccctgttgctcttacacaccttgactttcctgtctgtactcagagtaaaccagtgtcatgcttccaaacagagctcactaaatactaaagagataagaagactcaaagcaaaggccctttgttagcttttaccaaatcttcatcaacttccctacagatcaagaccactamaaacaatctttaaaaatttgacattggcacaaaaggacagaaaggacaatactgtatgactacatttatatgcggtatttagagcagtcaaattcatagagacatgaatagagatagccaggggctgcggggagaggagaatggggagttattgtttaatggttatggaatttccatttaggaaggtgaaaaagttctacaggtggatggtggtgatggttgcaaaacattgtgaatttacttaaaaatctttgaactgtacatttaaaatggttaaaatggtaaattttatgttatgtgtatttcaacacaataaagaaaaaagtaaaaacaaaacaaacaaacaaaaaacattaaaggaaactgaaccaggaa

SEQ ID NO: 177513 - DNA, 484 bp, Homo sapiens
cgatttttagtaattttgttgaaaacccagtaattgtttcttagttatttcaaacaagttatttcagttgactagtaaccagtcaactgagcagtaacaggaacttccctgtggaagacagaaatatctttttcaatggaaaatatggaataagtttttctacacagcctggatccaattactagcaagtccaaagtgttggattctggttgcaaaaaatttatgtccaaatgacattttcccaaaatgcaactgaacttcaaacgtctcaggagtcaatacaagctgtgaattaaattttaattaaatgttgaagaattaaaaagaaagtaatgactaagagacaggcataggtatgtgggccaaatatttggtattrttaaaaaaacagcaagatactttaaagttttacacggagagatcctccttcacaaaccccatattaaattagagatacaaatgtttgtttgcagctgacgggaaa

SEQ ID NO: 177514 - DNA, 484 bp, Homo sapiens
cgatttttagtaattttgttgaaaacccagtaattgtttcttagttatttcaaacaagttatttcagttgactagtaaccagtcaactgagcagtaacaggaacttccctgtggaagacagaaatatctttttcaatggaaaatatggaataagtttttctacacagcctggatccaattactagcaagtccaaagtgttggattctggttgcaaaaaatttatgtccaaatgacattttcccaaaatgcaactgaacttcaaacgtctcaggagtcaatacaagctgtgaattaaattttaattaaatgttgaagaattaaaaagaaagtaatgactaagagacaggcataggtatgtgggccaaatatttggtattattaaaaaaacagcaagatactttaaagttttacayggagagatcctccttcacaaaccccatattaaattagagatacaaatgtttgtttgcagctgacgggaaa

SEQ ID NO: 177515 - DNA, 547 bp, Homo sapiens
gagtcagccctgtttatggagaggctgccagaccccacttttgcccaggccttcttgctcaggcaagcctgctgctaagctcttaggggggcagagtttgcttttggcatctctttctgcccacccttagccatcttcctcttgataccagccccttccaagaaccaagagccctccacctgatccctgggcccgactgtcttccaggccatggactgggcagaagtgaccaaatgtggaccctgctctgcaggacctccccacagggcatgtgrgtggacaggctagaagtctgaattgagagttgggggctccgggggagtggtccatcctgagggaggtcatgagggtcagaaagacttgtcagagaagatggccctggggctgggtcatcagaggctgagctgctcagtggaaaccaagcatcgcaggcctcagtgctgtttggtggcaagtgcttctgcagggctggaggccctgtgtggggatgctggggtagggatcccaggaaatgagttgaggggtaggtgaggtggggagggttgta

SEQ ID NO: 177516 - DNA, 435 bp, Homo sapiens
tgggatggagaaactggaggtagggaccactgacgaggctcgctgcagcagctccaatgcaggaggctggcccgtgtcctcggccttaccaccgtgggtgcacactggcccgccttctggccgccagcacatgcggttccttgcctgaggctttctagccacagaagtctgctttgctgttccatgcagtcgactagatttgccagggtctcagtgctccccaggagtgctctkgactgaggactgatgattaatttagttggggcatatagacccctgctccctcacatctcaggtaggatatctgttctgcactgactcccagagtttccccagtgggattcagagccactctcccacagtgccaacctgcctgagaacaacttttctggctgccttctcttccaggtctcatttcctcactcactgccttac

SEQ ID NO: 177517 - DNA, 590 bp, Homo sapiens
ttttcctatcaatgcaaatcttaactttcatgagtcctggccaagagataacataatacccctgagatagatgctatcaaatgagtaacatgaccatgtagataaagaacaaatctctagtctcgttggaaatcacattttggtttttttttttycctttcccatattcctctctgaactgtttctttccactagtgcttaatttgattttgcaagataaggagaagagagggtgccaaacaattgtagtttagttttgtgtcatcagtgaatggattattttaatttggcccagtctctctttttccagaccctgcctgaatccagatcatcaatgatgtccagtttggtaagcaaatattgggctagaggccctctgttgaaagtccagaatttcaaagggcataggcaactgtgtttaattcaattaagcaaatatagtctgagtaactattaggggcaagacacagtcctagttactggaagaaaatgacaaacgcttggcctctgaacttgaaaagcccataatcaagcatttcgcagccctctcctttaaatagcttaatacctgtttattccataaagaacct

SEQ ID NO: 177518 - DNA, 472 bp, Homo sapiens
  misc_feature (1)...(472): n = A,T,C or G
gatagtttgctctagggctctttccttttcagcaatccttttaattttttcttcctggatatgacatggttattttctgtagtccaatcagctacgcagaggtcttcattatttttgatttgctatggccaattttatcattgaacgaatgagctttataaacaccagtgttgtgcagtcctgtgcatgtaaaagccagcagtcctagtcaaggacttttgtaatntaaaagaacagaacagcacaaaaattttccaattgtgaatatgttgggatagcagatgaggtgaagaattcctactgttctaaaaattgagaaaaaacaatcatggaaagttttctcagascgaagctttcttagtgtattatgtctccctggcttactaccagcaagtgggaaagactagcttcctaaagtactatgctactgaggggctagcatgctacgaatgctctgaactagaggccagaa

SEQ ID NO: 177519 - DNA, 650 bp, Homo sapiens
gtctttctaagcttagttaatatgagctaagccctgagaaatgggatcttttttagtgttttagaaaaatcaagttcctgaccttctaaggaagactcaaaatggtaagaaatttaccaaggtataggtggagagcttctcagataggcacttcgtcctagtgaccygctctgcattgttgcatgtttgtacatgttttcaagccaaacttcatcagttattttctcgttcaaaagagagtgcagaaaggtctgaaattacttcattgggtcatggattcaagcaggattctattatggcacagtggtgaagaacataggccccagagtgagactgtctaggtttgaattctctaccactcaggagccatgcaaatggagcaaaatatttaatctctctatgtcttggttttctcatgtcattccttctcatagacggaataagaatatttgcatcatagtattatgcttagaatactatatgtaaacactcaacacatattagcaataataataattattattattctcttatttctgttggtctctcaaagattaaattattatagttttacagcaggactaaacttgaggataaaagtgaaaaacttttgaggttcattcttatttcttactctgagttactccatc

SEQ ID NO: 177520 - DNA, 650 bp, Homo sapiens
gtctttctaagcttagttaatatgagctaagccctgagaaatgggatcttttttagtgttttagaaaaatcaagttcctgaccttctaaggaagactcaaaatggtaagaaatttaccaaggtataggtggagagcttctcagataggcacttcgtcctagtgacccgctctgcattgttgcatgtttgtacatgttttcaagccaaacttcatcagttattttctcgttcaaaagagagtgcagaaaggtctgaaattacttcattgggtcatggattcaagcaggattctattatggcacagtggtgaagaacataggccccagagygagactgtctaggtttgaattctctaccactcaggagccatgcaaatggagcaaaatatttaatctctctatgtcttggttttctcatgtcattccttctcatagacggaataagaatatttgcatcatagtattatgcttagaatactatatgtaaacactcaacacatattagcaataataataattattattattctcttatttctgttggtctctcaaagattaaattattatagttttacagcaggactaaacttgaggataaaagtgaaaaacttttgaggttcattcttatttcttactctgagttactccatc

SEQ ID NO: 177521 - DNA, 650 bp, Homo sapiens
gtctttctaagcttagttaatatgagctaagccctgagaaatgggatcttttttagtgttttagaaaaatcaagttcctgaccttctaaggaagactcaaaatggtaagaaatttaccaaggtataggtggagagcttctcagataggcacttcgtcctagtgacccgctctgcattgttgcatgtttgtacatgttttcaagccaaacttcatcagttattttctcgttcaaaagagagtgcagaaaggtctgaaattacttcattgggtcatggattcaagcaggattctattatggcacagtggtgaagaacataggccccagagtgagactgtctaggtttgaattctctaccactcaggagccatgcaaatggagcaaaatatttaatctctctatgtcttggttttctcatgtcattccttctcatagacggaataagaatatttgcatcatagtattatgcttagaatactatatgtaaacactcaacacatattagcaataataataattattattattctcttatttctgttggtctctcaaagattaaattattatagttttacagcaggacwaaacttgaggataaaagtgaaaaacttttgaggttcattcttatttcttactctgagttactccatc

SEQ ID NO: 177522 - DNA, 592 bp, Homo sapiens
atcctggctcacacggtgaaaccccgtctctactaaaaaaatacaaaaaaattagccgggtgtggtggtgggcgcctgtagtcccagctactcaggaggctgaggcaggaaaatggcctgaacccaggaggcggagcctgcggtgagccgagatctcgccactgcactccagcctgggcgactgagcgagactctgtctaaaaaaaaaaaaaaaaaaaaaagtgcagtcggtagcctactaraatgaattgaccttgataggttcttacatttatctttaatctactgaaaagccttcaagtcctgaatcagtggttctcaaagtgtggttccaccagtagcatcgatatcacctgagaacttagaaatataaattcagagcccccaccccagacctactgttttggaaactgcggggcagcagcccagcaatctgagtttcaacatgtcctccagtcgattccctaaagtttgagaaccactgacctaaaccactttggcataaatagccgaaccaggacatagctattaatattacctctcagggagtaatagtgtgttggaattaaaaagtagcatggcaaggacaacc

SEQ ID NO: 177523 - DNA, 635 bp, Homo sapiens
acttatccttcactttagaagtaatatcttgacatgccccataccactagacccctagaaatttgagtgagatggaatgcctccaaattttargctttatttcctacccttcgacatggcttaccaataagtctagagtagctgctgcttcttgctcacaaggtctaatcagcgtaatgtcctcagtgtaatggacctgtgtgatgtcttgtgatgggaagagggaaaggcgatggaactaaattatgacataaagctggctggagagtggccctgaggtaggatggtgaaggtgtattactgaccctaccagctgatcttgacaatggtaataacgaagagaaaaaaaaaaacttaatgaggcaaagtatcaaaagaagacaaggaaaagacaagggtacatcttgtaaacaatcaaggatgttctggttggctgtacaagaagaggagtccacacagaaaaaagaagaatgctcatcctgcaatcctagcatgataggtaggtaggaaggggtattgatacgggttcataggtatgtaatgtgcagatacagatgtggggagctggacatatgtgaaaaagcactatgatgtagagatgtacatgatgtagagatgtacactatgatataaaa

SEQ ID NO: 177524 - DNA, 635 bp, Homo sapiens
acttatccttcactttagaagtaatatcttgacatgccccataccactagacccctagaaatttgagtgagatggaatgcctccaaattttaggctttatttcctacccttcgacatggcttaccaataagtctagagtagctgctgcttcttgctcacaaggtctaatcagcgtaatgtcctcagtgtaatggacctgtgtgatgtcttgtgatgggaagagggaaaggcgatggaactaaattatgacataaagctggctggagagtggccctgaggtaggatggtgaaggtgtattactgaccctaccagctgatcttgacaatggtaataacgaagagaaaaaaaaaaacttaatgaggcaaagtatcaaaagaagacaaggaaaagacaagggtacatcttgtaaacaatcaargatgttctggttggctgtacaagaagaggagtccacacagaaaaaagaagaatgctcatcctgcaatcctagcatgataggtaggtaggaaggggtattgatacgggttcataggtatgtaatgtgcagatacagatgtggggagctggacatatgtgaaaaagcactatgatgtagagatgtacatgatgtagagatgtacactatgatataaaa

SEQ ID NO: 177525 - DNA, 533 bp, Homo sapiens
atggtcaatatcctcctgtttagcaccgaattagtctytaaatgctgtttccgttgcttttggctttttaaccacacatcataactcataactgctataggcttggatgtttcactttgcccagaatgatactcatggattaatttcaagagcccccatgcctaaatcaccacagctccatcttaagagtagtctgcttactgctgcttcctggtcacatgatcatgaaaggcaagcaaaactggagtgggttagatatttccaagtccaactgaaattgtgaaaaataaagtgctatagtgaccacaactgtgaattggcagaaatcatttccaacaacaaactggtataggtttttaccttctaggaaggattgtatccatcatagacgttaaatttcatagatgaaaaagaatttggtaaatgaatcaatccctttgctacatctccaacaaattaattgaccagttaacaatagattctgatataaaactttgaaccgagtgaattttttttttttttttttgagttgg

SEQ ID NO: 177526 - DNA, 533 bp, Homo sapiens
atggtcaatatcctcctgtttagcaccgaattagtctctaaatgctgtttccgttgcttttggctttttaaccacacatcataactcataactgctataggcttggatgtttcactttgcccagaatgatactcatggattaatttcaagagyccccatgcctaaatcaccacagctccatcttaagagtagtctgcttactgctgcttcctggtcacatgatcatgaaaggcaagcaaaactggagtgggttagatatttccaagtccaactgaaattgtgaaaaataaagtgctatagtgaccacaactgtgaattggcagaaatcatttccaacaacaaactggtataggtttttaccttctaggaaggattgtatccatcatagacgttaaatttcatagatgaaaaagaatttggtaaatgaatcaatccctttgctacatctccaacaaattaattgaccagttaacaatagattctgatataaaactttgaaccgagtgaattttttttttttttttttgagttgg

SEQ ID NO: 177527 - DNA, 533 bp, Homo sapiens
atggtcaatatcctcctgtttagcaccgaattagtctctaaatgctgtttccgttgcttttggctttttaaccacacatcataactcataactgctataggcttggatgtttcactttgcccagaatgatactcatggattaatttcaagagcccccatgcctaaatcaccacagctccatcttaagagtagtctgcttactgctgcttcctggtcacatgatcatgaaaggcaagcaaaactggagtgggttagatatttccaagtccaactgaaattgtgaaaaataaagtgctatagtgaccacaactgtgaattggcagaaatcatttccaacaacaaactggtataggtttttaccttctaggaaggattgtatccatcatagaygttaaatttcatagatgaaaaagaatttggtaaatgaatcaatccctttgctacatctccaacaaattaattgaccagttaacaatagattctgatataaaactttgaaccgagtgaattttttttttttttttttgagttgg

SEQ ID NO: 177528 - DNA, 601 bp, Homo sapiens
catgtgcagtgaccctgtgttgacaccgagccatgatacaaactatgggattgtaatgaatctctaattacccacagtacctcagagagtcgtcagccctgctgctcagctatattccccaccaatttggtcatcaccaagcattcagactgcagccaaactctatgcctggaaactggaagcccccacagtctcagccaaatgaggctggctctgcaggcttctgggaatgacaggatgatttgctcccttgttatgaatcagagagggcgtttgcacatgaatcatttagctctgcatggagaccctgttctcaacttttatttctcctgtaggtcaggctgagtggatgctcaggaaccctccggtgattgcccttgggtgaggtgggggcggggtaaacatttttaatttcgtgggataattctgaatcctacttcttaagctaagccaaaatgggaggtgaaaacttktctaggtttcataaagtgacaagcagcagatttttatttttcaatagaaaatgtcatatcttaccagtggggaaaaatagcttcagaaaaatgacaataataatatccctccgcccccccactacatg

SEQ ID NO: 177529 - DNA, 565 bp, Homo sapiens
ctattttctctgatatttaataaaactttatcagcttttccctggttggcatttattgtacatacttttcccattagttttctggtattttgtctatatcattgtatttttttcttcaccttttattttaagttccagggtgcatgtgcaggatgtgcaggtttgttacataggtaaacgtgtgccatggtggtttgctacccagatcatcccatcaccgaggtatgaagctcagcatccattagctattctttctgatgctctccctcccactacctccccctccaacaagcctccgtgtgtgttgttcttcctcatgtgtctatgtgttctcatcatttcagctcccacttataagtgaaaacatgcggtgtctggttttctgtttctgcgttrgtttgctgaggataatggcttccaactccatccgtgtccctgaaaaggacatttacaactgtatctttaaatgacttttgtactatgcttgatttttaaaatctaaatattaggacactgtaacataatttcaaattatacgtacttaaccaccataaactcaaaatac

SEQ ID NO: 177530 - DNA, 540 bp, Homo sapiens
ccgattttgctgaaagcgttaatcataaagggatgctgacttttgcttttttgcatctattgagatgatcatgtgatttttgtttttaattctgtttatgtggtgtataagctttatcgacttgtgtatgttaaatcatccctgaatccccagtatggaacccatttgatcatggtagattatctttttgatgttgttggatttggttagctagtattgtgttaaggattttagcatctacgttcatcagggatatcagtctgtagttttcttttttgattatgtcctttcctggttttggtattagggtgatgctggcttcatagaatggattagggagggttccctctttctctaacttgtggaatattgtcaaaaagattggtaccaattctgctttgaatgtctggtagaattctggtgtgaatcggtctgrtcctgggcttttttttgttgttggtaattttttagttcctatattgtttttaagaagtccagtgaattcttgccctgaaatggcctaggaatttgtgttcctaa

SEQ ID NO: 177531 - DNA, 540 bp, Homo sapiens
ccgattttgctgaaagcgttaatcataaagggatgctgacttttgcttttttgcatctattgagatgatcatgtgatttttgtttttaattctgtttatgtggtgtataagctttatcgacttgtgtatgttaaatcatccctgaatccccagtatggaacccatttgatcatggtagattatctttttgatgttgttggatttggttagctagtattgtgttaaggattttagcatctacgttcatcagggatatcagtctgtagttttcttttttgattatgtcctttcctggttttggtattagggtgatgctggcttcatagaatggattagggagggttccctctttctctaacttgtggaatattgtcaaaaagattggtaccaattctgctttgaatgtctggtagaattctggtgtgaatcggtctgatcctgggcttttttttkttgttggtaattttttagttcctatattgtttttaagaagtccagtgaattcttgccctgaaatggcctaggaatttgtgttcctaa

SEQ ID NO: 177532 - DNA, 568 bp, Homo sapiens
tgggccaaggggcaggggtgaggactgaaatagagatgttcatgtggaagtcgtaagagtttgcacaaatatatactgacacgtatccaccattagagcaccacacagtatttctttggggtaaccaattaaatgtaagtttaaacactgagcaccataagaaaaaactcactgtagaaaaaattcaatctgaaaactatccattagctgactctggaatacacagtaatattttatcagagaatcctaattccttttcttttctcttttttctttcttttcttttcttttcccttctctcttcatctttcatttgctattcttttttagtagattttrtgttatgtttagagtagttttaagtttactgcaaaattgagaggaaggtactgagatttcccatatacgctccaccctgacacatacatcagcctcccccatatcaacatcagccaccagagtggtccatgtgttacaatggatgatcgcacattaacacatcattatcacccaaagttgcagtacatgttagagttcactcttggtgtaagttctctgggtttgcaca

SEQ ID NO: 177533 - DNA, 560 bp, Homo sapiens
tcaccagtgagaatacctgaaatggacaaaacatgacagatcctatgaagctcagatgtgggtgtagctctttccatctctagcctcattcacctctgcctcctgcccccgtgaatgtcattctccaacaaagtatttgaaaaggtatttttctttgaaaaaagtacacagatggatagttagcaaaggaagagatgctcaacgtcgttagccatgagggaaatgtaaatcaaaaccacagtaaggttatacttcacaactrctagggtggctgtaattaaaagacaagtaataactaatgttgatgaggatgtggagaaatggaaaacttcataattcctggtgagaatataaaataatgcaacccctttggaaaacagttggatgttcttcaaaaagctaaacatagttgctaaatgacccagcaattccacacgtaggtatatacttaagaaggatgaaaatgtgtgcacacaaaagcttgtacaggaattttcagagcaatatagtcataataatcatggaatgaaaacaacccaaacgtctgtccacttgaatgc

SEQ ID NO: 177534 - DNA, 638 bp, Homo sapiens
agagaatacaattcttaatactaagacctgaccgtacatttttgctaatttctcttctttcctcattgaacaccaggatggcttttctatgcagataacttgacacacagagcccaactttggtcctgaattstgagaaccacagttcagaatagacgctaaaacgtctcaatgttagcagccttcccctatgactttatgaagtgcagccctacaggagaactcaggaagccacatcttccatctgtcaccttctgactgttgatcctgtgagttcacaggccagggtgatgctggtgaggacccttttcactgggacccccaggagttcctgacagagacagacttggagacaccagtagtctggtgagaaaggggcttaatgtcatgaagtattaaaaaatcgaatatattcaaaaatttacgagagaatattttggaaggaaacttcaagaaatgtagaagagagggagaagaaagaatctctgaaagtcacctctttgggtggaattttctcatttctatatttgtggtcaccattgtatactggtaacaagatttcttgccataaaaatttctcagatggtgaaattatttacaatatggatacatttatttcttcctgtgtgcctttgttt

SEQ ID NO: 177535 - DNA, 638 bp, Homo sapiens
agagaatacaattcttaatactaagacctgaccgtacatttttgctaatttctcttctttcctcattgaacaccaggatggcttttctatgcagataacttgacacacagagcccaactttggtcctgaattctgagaaccacagttcagaatagacgctaaaacgtctcaatgttagcagccttcccctatgactttatgaagtgcagccctacaggagaactcaggaagccacatcttccatctgtcaccttctgactgttgatcctgtgagttcacaggccagggtgatgctggtgaggacccttttcactgggacccccaggagttcctgacagagacagacttggagacaccagtagtctggtgagaaaggggcttaatgtcatgaagtattaaaaaatckaatatattcaaaaatttacgagagaatattttggaaggaaacttcaagaaatgtagaagagagggagaagaaagaatctctgaaagtcacctctttgggtggaattttctcatttctatatttgtggtcaccattgtatactggtaacaagatttcttgccataaaaatttctcagatggtgaaattatttacaatatggatacatttatttcttcctgtgtgcctttgttt

SEQ ID NO: 177536 - DNA, 483 bp, Homo sapiens
aagtaaggtgcttggattattttaaaattatacattagttatatgaccttgaacaaaaacttaacttctgttagattaattttccccatctgcaaaactaggacttgaattaagtgatttccaaaagtctcataagattgaaaatgctggaattacatcaattgcatacaattcagctaatttttaataactgcttcgcatgtatacagtgccctgtgcactgaaaaataaaaagttaacatcacayacatacgtgaaatcttactgcatctgtgagtctgtctagcttggccaggacaagatgtagagtgtgtggccattgcaccacattgatgcgaaccctgagagtgccattcctggctcagctgctcccttcacactcacaatgtcaagacccctgtttccctgtctggaagcaagagcatggcatccccattcactcatctactaagcaggtatttgcagatggcctgctgtgccaca

SEQ ID NO: 177537 - DNA, 616 bp, Homo sapiens
aagtgagatggtgcacaaaattgtccaaataattaaacttgctggctcttggactggaacacatagagtagaattggagtcagttccaggcacctgccatacatccccactgtaggaacaaagggtcttaagacactgggagaggagaagtctgctctgaaattgcctgggagaaggtggtgcagrtcgctccaggtggcgagttatgaacaggtgctcagcacacttgagaaaatgaaagaattctagtggtgcctcctttggatgagacccgaatctcatgggtgaccaccgcctgctgcagaagcccagcctgctattccccatgccgtgctggaccacatggtagtgtcagaaccaccagcccaccgggatgtcggtggtgctaagagttcagacgcagcccccgtaccacataggcatgacgtttcagcttgtcacttggtagctctgtgatgttgtaaagtttcatagcccttctatgtctcactatatttttaaccggtaaaatggaggtaataacgcatgtttcaaaggctcactgtgagagtcaatgagcctttgaaggacgtacccttattatccacattttcccgctatttcaacctccctgcac

SEQ ID NO: 177538 - DNA, 616 bp, Homo sapiens
aagtgagatggtgcacaaaattgtccaaataattaaacttgctggctcttggactggaacacatagagtagaattggagtcagttccaggcacctgccatacatccccactgtaggaacaaagggtcttaagacactgggagaggagaagtctgctctgaaattgcctgggagaaggtggtgcaggtcgctccaggtggcgagttatgaacaggtgctcagcacacttgagaaaatgaaagaattctagtggtgcctcctttggatgagacccgaatctcatgggtgaccaccgcctgctgcagaagcccagcctgctattccccatgccgtgctggaccacatggtagtgtcagaaccrccagcccaccgggatgtcggtggtgctaagagttcagacgcagcccccgtaccacataggcatgacgtttcagcttgtcacttggtagctctgtgatgttgtaaagtttcatagcccttctatgtctcactatatttttaaccggtaaaatggaggtaataacgcatgtttcaaaggctcactgtgagagtcaatgagcctttgaaggacgtacccttattatccacattttcccgctatttcaacctccctgcac

SEQ ID NO: 177539 - DNA, 585 bp, Homo sapiens
gacactatttttttgtaagtatattttcaagtgttttcaggatattacactaaaattagtatggttatgacatcatcatcacctttaaattcccctttttcaattttctaatgtgtcttggtcatcatattgttgaagtcaaaatatagagttgaatctctaagttaaagcttctaaytgggaatcgcagaattgcgattcagaggacaaacgcagaccaatgtggtcttcagtatatcagaaaaacaataatgaattaaggttagtttctgggaaaagtagtgggtgtatgagggtgaggtaggaatggttaatgcatacagaaaaaaatagaaagaataagacctactatttgaaggcacaatagggtgactatagtcaataataacttaattgtacattttaaaataaagagtgtaattggattgtttgtaactcaaaggataaatgcttgaggggatagataccccattccccatgaagtgcttatttcacattgtatccctgtttgaaagcatctgaggtagcccataaatgtaaacacctaatatgtaaccacaaaaaattttctaaagttagtggttt

SEQ ID NO: 177540 - DNA, 585 bp, Homo sapiens
gacactatttttttgtaagtatattttcaagtgttttcaggatattacactaaaattagtatggttatgacatcatcatcacctttaaattcccctttttcaattttctaatgtgtcttggtcatcatattgttgaagtcaaaatatagagttgaatctctaagttaaagcttctaactgggaatcrcagaattgcgattcagaggacaaacgcagaccaatgtggtcttcagtatatcagaaaaacaataatgaattaaggttagtttctgggaaaagtagtgggtgtatgagggtgaggtaggaatggttaatgcatacagaaaaaaatagaaagaataagacctactatttgaaggcacaatagggtgactatagtcaataataacttaattgtacattttaaaataaagagtgtaattggattgtttgtaactcaaaggataaatgcttgaggggatagataccccattccccatgaagtgcttatttcacattgtatccctgtttgaaagcatctgaggtagcccataaatgtaaacacctaatatgtaaccacaaaaaattttctaaagttagtggttt

SEQ ID NO: 177541 - DNA, 585 bp, Homo sapiens
gacactatttttttgtaagtatattttcaagtgttttcaggatattacactaaaattagtatggttatgacatcatcatcacctttaaattcccctttttcaattttctaatgtgtcttggtcatcatattgttgaagtcaaaatatagagttgaatctctaagttaaagcttctaactgggaatcgcagaattgcgattcagaggacaaacgcagaccaatgtggtcttcagtatatcagraaaacaataatgaattaaggttagtttctgggaaaagtagtgggtgtatgagggtgaggtaggaatggttaatgcatacagaaaaaaatagaaagaataagacctactatttgaaggcacaatagggtgactatagtcaataataacttaattgtacattttaaaataaagagtgtaattggattgtttgtaactcaaaggataaatgcttgaggggatagataccccattccccatgaagtgcttatttcacattgtatccctgtttgaaagcatctgaggtagcccataaatgtaaacacctaatatgtaaccacaaaaaattttctaaagttagtggttt

SEQ ID NO: 177542 - DNA, 586 bp, Homo sapiens
aataatagcaccaaaaacaataaaatcaacagtaatttattcagctctggctgtttggtgagatgaaatattttctgtaaacatttaagtaacactgtaacaataaatataactttcacattatttttctgcttaataatagagtcagagagaagttgaagacttaggccaaagcaacacaatgttttaagtgacaaacaagattctaatctatgtctttgtttttaatcatagcagtgcacttyccctaattaattttatcatttgtttagttattttgttattcatatttatttgtctgtttgttcagtacccatagaatttcctaaatgacaggcaatatgctaagcaatgaaagaataggaaataaaaataaggcctgtagctgttgtttggtaatttagtctattgggagacataaacacaaaaataattgcaacatggacaaaaataattaacgcagaacattcaccacttttcctttcacctcaacatgacttctcccacaaacgtccccccaccctacacacttatgctgcgtgcatgcacaaggatgtattttcttaaaaaacgtaatttatcacta

SEQ ID NO: 177543 - DNA, 586 bp, Homo sapiens
aataatagcaccaaaaacaataaaatcaacagtaatttattcagctctggctgtttggtgagatgaaatattttctgtaaacatttaagtaacactgtaacaataaatataactttcacattatttttctgcttaataatagagtcagagagaagttgaagacttaggccaaagcaacacaatgttttaagtgacaaacaagattctaatctatgtctttgtttttaatcatagcagtgcacttcccctaattaattttatcatttgtttagttattttgttattcatatttatttgtctgtttgttcagtacccatagaatttcctaaatgacaggcaatatgctaagcaatgaaagaataggaaataaaaataaggcctgtagctgttgtttggtaatttagtctattgggagacataaacacaaaaataattgcaacatggacaaaaataattaacgcagaacattcaccacttttcctttcacctcaacatgacttctcccacaaacgtccccccaccctrcacacttatgctgcgtgcatgcacaaggatgtattttcttaaaaaacgtaatttatcacta

SEQ ID NO: 177544 - DNA, 599 bp, Homo sapiens
tttggacacttaacccaaatagattatgaggagcacagatataaaagttaactagtagtcacttatagagaaggttgttcagtggtgtgcaaagaagtcagtgttgtgcatactatacagactacactcaaggagtgttcaaaaactattctttgccagttttggacacttaacattgagggtaacttttcagcacttccagtgattctatgacctattcaaaataatttcatgtaagtgcattttcaggtatctcacccacattgtttcaagtgaccrtgttttatcatttagattttcaggtctctgatctccttgtagtttgttatatacactccactattcatacatttgaactttattcatcattcttcatcttttagaataactttccttgcctattcatgttactatctttaataggaaataccaagggaagttttctcagataggcctccctgtttcctgggctgaaatcagtgtctatataagtttcccaaagcaccttacgcaacttctgtcatgaattagccactgtattatgtacttttattatgtattaactacgcttcagttttattttagtcatctctagagta

SEQ ID NO: 177545 - DNA, 599 bp, Homo sapiens
tttggacacttaacccaaatagattatgaggagcacagatataaaagttaactagtagtcacttatagagaaggttgttcagtggtgtgcaaagaagtcagtgttgtgcatactatacagactacactcaaggagtgttcaaaaactattctttgccagttttggacacttaacattgagggtaacttttcagcacttccagtgattctatgacctattcaaaataatttcatgtaagtgcattttcaggtatctcacccacattgtttcaagtgaccatgttttatcatttagattttcaggtctctgatctccttgtagtttgttatatacactccactattcatacatttgaactttattcatcattcttcatcttttagaataactttccttgcctattcatgttactatctttaataggaaataccaagggaagttttctcagataggcctccctgwttcctgggctgaaatcagtgtctatataagtttcccaaagcaccttacgcaacttctgtcatgaattagccactgtattatgtacttttattatgtattaactacgcttcagttttattttagtcatctctagagta

SEQ ID NO: 177546 - DNA, 481 bp, Homo sapiens
gtataaaaattaaattgaatcaaagattgcaactcaaaaaataacaaagcattgtgacagaaccgaccaaacctttttgatgaagtcatgtttctatatggggtaagtctaagacatgctaaaactctttctcaatgaatactataatctaggaatggtgattacaattcccaaagacccataaactgaaaatatgctacattatgacatttcattgacaattacatgattaaataatttagtaagagaagacattaggaaatattcaaatttgaataaatgggaatgtgtaatgatcawatcagagtaattgagatatctataacctcaaacatttatctttttgtgtatggggatcattacaatttttctcctatagctgtttcgaaaaacacaataaattattgtcaactgtaattttctactgtactatcaaatgctagaacttattccttctataaaactgtattttttgcacata

SEQ ID NO: 177547 - DNA, 481 bp, Homo sapiens
gtataaaaattaaattgaatcaaagattgcaactcaaaaaataacaaagcattgtgacagaaccgaccaaacctttttgatgaagtcatgtttctatatggggtaagtctaagacatgctaaaactctttctcaatgaatactataatctaggaatggtgattacaattcccaaagacccataaactgaaaatatgctacattatgacatttcattgacaattacatgattaaataatttagtaagagaagacattaggaaatattcaaatttgaataaatgggaatgtgtaatgatcaaatcagagtaattgagatatctataacctcaaacatttatctttttgtgtatggggatcattacaatttttctcctatagctgtttcgaaaaacacaataaattattgtcaactgtaattttctactgtactatcaaatrctagaacttattccttctataaaactgtattttttgcacata

SEQ ID NO: 177548 - DNA, 576 bp, Homo sapiens
ataaattaaaataaagaaaagcatatgaaaagcttatcactatatgatctaagacaagttatataccatccataaattttactttctttctctgcaaaatagatctcattatagcacttaacatataagcatattatgaggaaaaatgtcagtatataaaaaatgcatggaacatagcatagcgcatagtatgtgcttatatagcagagactgtcatcattattataatgataataatgaaattataaggtgtgtattaatagcaatttgataatgatagtatggaaaatggattgtgtgtaggaatggtgaccttccctctactctgaaaattcaataatttaagtccgtaaaaaatattaggcagattaacaggagaaaaaagtaggaattttaatatgtacaytgtatgtcattaggaaacctcaatgaaaggtaactcaaagtaatggcatagaattctggcttacataacatcttcaacaaagaacagtaaattttagagaggtggtaagacaagaaaagcattccggatgcaggaaactgtagaaaggtaaaattacgcaaaaggaaaca

SEQ ID NO: 177549 - DNA, 422 bp, Homo sapiens
agtaaaaaatgtgtgtttttttttagatggaatcttctcttggtgaagatgctgtgaacattgttgaaatgatagcaaaggatttagaataatacacaaacttagttgataaagcagcagcagagcttgagaaaactgatgmaattttgaaagaagttctacattgggcaaaatactatgtcagcattgcattctacagaaaaaaaatattttatgaaagaataaattggtacagcaaattttattgttgccttattttaataaattgccacacccaccccaatctttagcaaggaaaatcctgataagtcagcagccatcaacataaaggcaaaacctttcaccaacaaaaagattataacttgctgatggctcagatgattgttaacattttttggcaattaagcactttttaaacaaca

SEQ ID NO: 177550 - DNA, 490 bp, Homo sapiens
gagctataccaaaattatttaaacattttttgttttaygtgctaatattttatgcgtaattcagaggaactttgtactagatatcaataatgtgattggcaatagaaatatggtcatatgataattgttttattccagatatgatggtggcagctgcatatcagtgtggtggcaaaatgagtgaacctaggaggtttgtgttgtcagttttggcatggaacatcacaagatgaacaaataatagagggaaagatatcctttttcattccctgaagagcgactgtaggtttctgagctgagctaatgacactgagtctgtgcaaactgttgctttcccaaatgcaggacatctttaccttgggttacaacttaagtcaacttggatagaacatcactggactcttttgactgtaagaactataagacaatgcaatattcaaaagaaagaggaaagtttttccaatttttaaaaaattcagatgtttgcctt

SEQ ID NO: 177551 - DNA, 571 bp, Homo sapiens
tttattagccaggatgacataacaattcaaaatatatttccctcataaagtaacttcaaatataaaacacaaatattagtagaactataagaaggaattaataagtctactagcatattatgagtttaaaacaattctctcagtaaatgacagctcaaacatgaaaattcaataaagcatacattgaaagaaatcatttatgactgccataatatacatgtataaaaaatgatttcacaaccctgaaataacgtatgcttcctaaagcacataggaaatgttttgtcaaattttaacctatttatccaaagagaaaatctgcacaatacactaaggcatagggacatccagactacttgttctatacaccagatgaaggcattgaaaatcaatgacataaagatamcaaagaaaagatcttttacttaaaaactaaataacagattttaaaataatactgaatttatatctgcaaaataatatactaacacccgtttaagtgttataactacaaatatttaaacaatctttacatcatttatgatcataccactttaaattataaaataat

SEQ ID NO: 177552 - DNA, 650 bp, Homo sapiens
aaacatatccttatatgttaatgatggctttcagtgaaattttcaagaacatttctacatatagtgtaaatcttcttcttttatttcccaactcaatcttctaaaatgaatgaaaatagagtgcagtgttagcatttcagaaaggaataacataaggttatcttaatattggaattatttatatctctcttttattctaaaatgctatttattgtagcagtggtatggcatcattgttaagttctctgtatctaaaatttgaagaataatgtagaagcataaataagtctgatgtgaactaattggaactaatgaccagttaagtcatatttcaaactcaatgcatagacattaacatttttctcagtataaagtatatataggcagagggaagtgagaaatacgccttagcagagaaagacaggggtaaaaggtattaccaatttracacgtgggactacagggcatggtggcacgcgcctgtagttccagatacttggtaggctgagggatgagaaacacttgaacccgtgaggcagaggttgcagtaagccaagatcacgccactgcactgcagcctgggcaacagactgagaccatgtcttaaataaataaataaataaataaataaatgtattttttagagtcta

SEQ ID NO: 177553 - DNA, 459 bp, Homo sapiens
ggatggtaaagcaaaagcctactgagtgagcactttgtttttgtttgagtgaacaaaactattaagtgtgcaatagcattatgtctaaaaacaatttagataccttaattaagaatactttattatttaaaatattaaaaaaataatctgagctgccagtgagttgtaatmattttgctgatgaaaggttttgcttcaatgttgatagctattgactgatcagggtagtggttgctgaaagtgggggtggctgtggcaactttttaagataaggcagcagtaaagtttgctgaattgattgacttttcctttcacaaaagatttctctttggtagcatgtaatgctatttgtgcattttacccacagtagaacttccctcaaaattggagtcactcctctctgaccctgaagctactttatcaactaaatttatgtaatattctaaatcctttattgtc

SEQ ID NO: 177554 - DNA, 497 bp, Homo sapiens
tgtgtgtgtgaggcagagaaagagaaaatatttaaaatcattctcttagcaagggtacaatacatcattactaactgtagtaaccacatttttcatcaggtctccagaacgtattcatcttttaatcaaaaaattgtactctttgacgaatatttccccaattcccctccccagcccctggcaatcacctttctgttcttcttctgtgagttcgaggcagtggtggtgcagggagcaaagggacataaggaaacttttggaggtaatgggtttgttcattaacatgattgtgttgatcgtattcttggtctgtgcatatgtatgtcaaactcatcgcactgtatacattaaatatgcacagatttttgtactatarttataccttaataaagctgtaaaaaaataagaatggtgtcaaaagtgctaccttgtttctctctctgttttttgtattcttattaaacctgaatcaatctttttaaataggtaaaataatt

SEQ ID NO: 177555 - DNA, 623 bp, Homo sapiens
aaaaaaaaccagtccatatgtttctaagtttttgttgtgagaaagtcaatcctggaaacttcttatttggtaaacactgggataagcatgtttgaagaaaacaagaagtttgsttttggatattttgggtgtgagaagcctatgaaacattaaagttgagatggaaagtagtgagtctgaaatatgagtctggatatagtagaaatatcatgactctaaatttgagagtcatcagaataaaaatggcattgaaggtcatggagctgaaagagatagcctacagagtgaattaaaataagaaagataagggagcagagagccctgagccctgggccatccaatgactgggtggtcagaaaaataacaacattccagcagaagtgagtgggaagaaacagccaggaaattaggaagaaaatcaggagagtgtggtttcccggaagcagaagtggagatattgttgcaaaagagaattaacaagtatgtcaattgattccaaggatatgaacaaataagaaaaagaatttaatctgacaaagaagtcattgatgacttttacatgaatgggtttagggagataataggtatagaagcctgaaaggagaagaatgaatggtaaagga

SEQ ID NO: 177556 - DNA, 630 bp, Homo sapiens
atcttttcttatactccatatatggacataaatttgagatgaaacaaggatcacttttggggacctgctggatccccacaagcatggaaacaaagaaaaactcttgagtcccttcaagtgaaattccaggcacttaactctccctgaaaagtaagtgagcaacctgataggcaagaatatattaatagtagtcttccaagcaaatcagtcacaaggtgtttttggttccctgcttaaactaaaaaatagcaccttaacatatattcttaaattgtctttcagaaacccctaccagatggaaaatattgattactatcacatagaccttatataagggggaactgagtactgaactctgaccaccattcttttttctaaattacttcctgaagagcctgaagagagtcacactcatggatcaagcccatgcmcaatctccatgtattggtttacaatgttgcctgcaactcctcctttcctgacgtatactccagtctataaaaacctttgcttgtaagcgatcaggatgtttgggtcttaagtgttagttacccattctccttgcttggcaccatgcaagaaatgtctttttctcctactgcaaatctcagcattagtgtctggctttac

SEQ ID NO: 177557 - DNA, 579 bp, Homo sapiens
tgttgccagtccgctggtgctaaaatttaaatttctaaaggccactctaccatatatcaggccatatacttcattttgattgtgtgatggttgattttacrtgttaaacttgctgggccacagagttcccagctatttgtttaaacgttattctgggtgtgtctgtaagagtgtttctggatgagatgacatttgatttagcagactgaaaaaagcagattgtcctccccattgtggatgtgcctcatctaatctgtggaggagctgagtagaattaaaaggctgagtaaaaacaaatgtattccctctgcctgactgtctttgggctggaacatcaggcttcttctgcctttggactcagacttgaactgaaacttaccccaatttgctctcttggttctgaggccttcaggcttgaattggaaggacaccattggctcctctgaatctgaagcttactgactgcagatcttcggacttttcagcctccataatattaatatcttgtaaaccaattccttaatttaaatctctctctctctccctccatttctctttctctctgtttctttctctctc

SEQ ID NO: 177558 - DNA, 579 bp, Homo sapiens
tgttgccagtccgctggtgctaaaatttaaatttctaaaggccactctaccatatatcaggccatatacttcattttgattgtgtgatggttgattttacatgttaaacttgctgggccacagagttccmagctatttgtttaaacgttattctgggtgtgtctgtaagagtgtttctggatgagatgacatttgatttagcagactgaaaaaagcagattgtcctccccattgtggatgtgcctcatctaatctgtggaggagctgagtagaattaaaaggctgagtaaaaacaaatgtattccctctgcctgactgtctttgggctggaacatcaggcttcttctgcctttggactcagacttgaactgaaacttaccccaatttgctctcttggttctgaggccttcaggcttgaattggaaggacaccattggctcctctgaatctgaagcttactgactgcagatcttcggacttttcagcctccataatattaatatcttgtaaaccaattccttaatttaaatctctctctctctccctccatttctctttctctctgtttctttctctctc

SEQ ID NO: 177559 - DNA, 564 bp, Homo sapiens
agaattgcccagtcttaaataaacagaatataactattcaagcaactacaacaggtagagagccacctgacttatgtccaagatgtaaaaaaggaaaacattgggctagtcaatgtcgttctaaatttgataaaaatgggcaaccattgtygggaaacgagcaaaggggccagcctcaggccccacaacaaactggggcattcccaattcagccatttgttcctcagggttttcagggacaacaacccccactgtcccaagtgtttcagggaataagccagttaccacaatacaacaattgtcccccccacaagcggcagtgcagcagtagatttatgtactatacaagcagtctctctgcttccaggggagcccccacaaaaaatccccacaggggtatatggccccctgcctgaggggactgtaggactaatcttgggaagatcaagtctaaatctaaaaggagttcaaattcatactagtgtggttgattcagactataaaggcgaaattcaattggttattagctcttcagttccttggagtgccagtccaggagacagg

SEQ ID NO: 177560 - DNA, 382 bp, Homo sapiens
aattccagtctaacagttcctttacaaagttgcgtaaagcccccttatatgctagttgtaggaaatatagttattaaaccagactcccagactataacctgtgaaaattgkagattgcttacttgcattgattcaacttttaattggcaacaccgtattctgctggtgagagcaagagagggcgtgtggatccctgtgtccatggaccgaccgtgggaggcctcactatccgtccatattttaactgaagtattaaaaggtgttttaaatagatccaaaagattcatttttactttaattgcagtgattatgggattaattgcagtcacagctacggctgctgtagcaggagttgcattgcactcttctgttcagtcagtaa

SEQ ID NO: 177561 - DNA, 382 bp, Homo sapiens
aattccagtctaacagttcctttacaaagttgcgtaaagcccccttatatgctagttgtaggaaatatagttattaaaccagactcccagactataacctgtgaaaattggagattgcttacttgcattgattcaacttttaattggcaacaccgtattctgctggtgagagcaagagagggcgtgtggatccctgtgtccatggaccgaccgtgggaggcctcrctatccgtccatattttaactgaagtattaaaaggtgttttaaatagatccaaaagattcatttttactttaattgcagtgattatgggattaattgcagtcacagctacggctgctgtagcaggagttgcattgcactcttctgttcagtcagtaa

SEQ ID NO: 177562 - DNA, 410 bp, Homo sapiens
taaattccagtctaacagttcctttacaaagttgcgtaaagcccccttatatgctagttgtaggaaatatagttattaaaccagactcccagactataacctgtgaaaattggagattgcttacttgcattgattcaacttttaattggcaacaccgtattctgctggtgagagcaagagagggcgtgtggatccctgtgtccatggaccgaccgtgggaggcctcacyatccgtccatattttaactgaagtattaaaaggtgttttaaatagatccaaaagattcatttttactttaattgcagtgattatgggattaattgcagtcacagctacggctgctgtagcaggagttgcattgcactcttctgttcagtcagtaaactttgttaatgattggcaaaagaat

SEQ ID NO: 177563 - DNA, 410 bp, Homo sapiens
taaattccagtctaacagttcctttacaaagttgcgtaaagcccccttatatgctagttgtaggaaatatagttattaaaccagactcccagactataacctgtgaaaattggagattgcttacttgcattgattcaacttttaattggcaacaccgtattctgctggtgagagcaagagagggcgtgtggatccctgtgtccatggaccgaccgtgggaggcctcactatccgtccatattttractgaagtattaaaaggtgttttaaatagatccaaaagattcatttttactttaattgcagtgattatgggattaattgcagtcacagctacggctgctgtagcaggagttgcattgcactcttctgttcagtcagtaaactttgttaatgattggcaaaagaat

SEQ ID NO: 177564 - DNA, 201 bp, Homo sapiens
tagtcaacacattattgaagaagaacaaagtttgaggcctgacactattcgacttcaagatttactataaagctacaataatcaagtcagtatkttattagcaaaagaagagctaaataagtaaatgaaaccaaatagagagcccagaaataggctcacataaatattgtatttggaaattagcaaaggcaatacattgga

SEQ ID NO: 177565 - DNA, 199 bp, Homo sapiens
catttggtttagtccagtgcttgatattccatcctctatggtctaataacsttaaaatccaacactacttcagtttctgtcactaaaaattagcaacattttgcaactattttgaaatctaaactatttctttccatattagactttgtacttgtccccctggagctaactgagatctgattttagttatagctctaga

SEQ ID NO: 177566 - DNA, 428 bp, Homo sapiens
gatcacagtgagctcttccagctgcattctcttctagttttgtggtactaatatgtcgatacaatgatgggtctcaaatgtccagttctggacttgtttgtccaactgcctgcttgtcagggttttccagagaaacagaaccaaaaggatccatatttatctctatatatagatagatatagctatgtagatatccatatatgtatatatggatatccgtctctctatatataatctatattatatatatatgtacaaacacacacasagagagagagctagagaaacagagagatttatcttaaggaattggcttacacaattatggaggctggtgaccaaaatctgcagggtgggctagcaagctggaaacccagagaagagccaatgccacagttcaagtctgaaggccatctgctgcagaattc

SEQ ID NO: 177567 - DNA, 555 bp, Homo sapiens
ctcagatgaagtgatgtgtagacattgtattaggtattataagtaatctactgataatttgagtatataggaggatatgcataggtcaggtgcaaataaattatgcaagatacttgagaatccttggattttgatatcagtgggggtcctaaaacgaatctcctacaaatgaggagagactgtagtacttgaytggctataactaggcatttgccttatttgggtatgacctggtggaaagaccctagttagaggttagctgtcagtttctgattggtaaagtctctagttggaggtttctgattggttaggcttaaattaattttattgtttctattgagatgggttttggtttgcttatgtaggaacccaaggcactggagttgtctcggcctaatggttgattcttttaacacaggctacatcacagcctctttacccaaacacccatttttgttttaagccatgtgaggaacaagctgggttctgtcaggtacaactgaaagcaactttattctttcctcatgactgccttgcctacccagtttgtaggat

SEQ ID NO: 177568 - DNA, 595 bp, Homo sapiens
cttctgtccatacaaaaccctgcacgcacatgaagtttataacagctttactcactatcgccaaaacttggaagcagccaagatgtccctcagtaggtgaatggatacataacaatggaatattattcagtgctaaaaacaaatgagctatcaaggcatgaaaagacgaaggaaaattacagctgggcattgtggctcaygcctgtaatcccagcactttgggaggtcaaggcagatggatcagctgaggtcaggagttcgagttcagcctggccaacatggtgaaaccctgtctctgctaaaaatacaaaaattaaccaggtgtgatggtggacacctgtaatctgagctactcaggaggctgaagcaggagaatcgcttgaatcagggagatggagtttgctgtgagccgagatcgtaccactgcactccagcctgggtgacagagcgagactctgtctaaaaaaaaaaaaaggcaggaagaaaacttaaatgcttgttactaaatgaaagatgctaatctgaaaaggccacgtactgtacgattccaactatacaacattctggaagagacaggaataggtggagtagagaa

SEQ ID NO: 177569 - DNA, 595 bp, Homo sapiens
cttctgtccatacaaaaccctgcacgcacatgaagtttataacagctttactcactatcgccaaaacttggaagcagccaagatgtccctcagtaggtgaatggatacataacaatggaatattattcagtgctaaaaacaaatgagctatcaaggcatgaaaagacgaaggaaaattacagctgggcattgtggctcatgcctgtaatcccagcactttsggaggtcaaggcagatggatcagctgaggtcaggagttcgagttcagcctggccaacatggtgaaaccctgtctctgctaaaaatacaaaaattaaccaggtgtgatggtggacacctgtaatctgagctactcaggaggctgaagcaggagaatcgcttgaatcagggagatggagtttgctgtgagccgagatcgtaccactgcactccagcctgggtgacagagcgagactctgtctaaaaaaaaaaaaaggcaggaagaaaacttaaatgcttgttactaaatgaaagatgctaatctgaaaaggccacgtactgtacgattccaactatacaacattctggaagagacaggaataggtggagtagagaa

SEQ ID NO: 177570 - DNA, 595 bp, Homo sapiens
cttctgtccatacaaaaccctgcacgcacatgaagtttataacagctttactcactatcgccaaaacttggaagcagccaagatgtccctcagtaggtgaatggatacataacaatggaatattattcagtgctaaaaacaaatgagctatcaaggcatgaaaagacgaaggaaaattacagctgggcattgtggctcatgcctgtaatcccagcactttgggaggtcaaggcagatggatcagctgaggtcaggagttcgagttcagcctggccaacatggtgaaaccctgtctctgctaaaaatacaaaaattaaccaggtgtgatggtggacacctgtaatctgagctactcaggaggctgaagcaggagaatcgcttgaatcagggagatggagtttgctgtgagccgagatcgtaccactgcactccagcctgggtgacagagcgagactctgtctaaaaaaaaaaaaagrcaggaagaaaacttaaatgcttgttactaaatgaaagatgctaatctgaaaaggccacgtactgtacgattccaactatacaacattctggaagagacaggaataggtggagtagagaa

SEQ ID NO: 177571 - DNA, 448 bp, Homo sapiens
atagacatcagatacttcagaaggtgggaggatagtgaaggttaaaaaattacctgttgagtacactcttcactatttgggtgatgggtacattaaaagcccagaactcaccactacacaatatatgcatgtaagaaatctgtacttctacccactaatattaaaaagtggtgccagtaaagactgtataatgggaaagcccacgactgaaggtaagagagcttgcttgtacacaaatattgcaacttttaaaatatatatatagacrtggagacccaggttggaaaagaatgattaaaaatgaaattattactatgttcagctagtgatattatagataatatttatttttaaaacaaattattctagtcataatattgttttacaaacacaaagagattttaaaatgtttttacttaagaaaacccatctttatagacaacaaggc

SEQ ID NO: 177572 - DNA, 615 bp, Homo sapiens
ttccctgcctacttggcctgcccagaccaagtctggcttgcacactggctcagcccatggttgggcacaccccagcccacctgtattatagcttgtgtacctgtgttcagcagttcctgagctcttgtcctgcatccaagaagaatggggatatgctgaaagttgaagggtgaggatggacagagaaaaattttaatgagtgacagaacagctctcagtggagaggagatgaggggacatagggtcccccacccccacagtcaggtgttkattttattttatttttttctctctgtggctgggtctggggctttttatggactcagaatggggagtgggtgctgatttgtttgtcagtatgcaaaaaaagtttaaagcaaagacaccactcaaaggtgggcatggcagtatagaaaaccaaattaggaaagggtaggtatatgtaaaataggtgaagagtggggatcagtcagaggaaagtgtgccaaacaggaagacaggttctcaatctggtctgaggatttaacttgtagcttggctttcaggcttgaaaatctctttggcttggaggttggcccctcccctatctgcctaggcaattgactgcctccagtc

SEQ ID NO: 177573 - DNA, 557 bp, Homo sapiens
ttttatttttttctctctgtggctgggtctggggctttttatggactcagaatggggagtgggtgctgatttgtttgtcagtatgcaaaaaaagtttaaagcaaagacaccactcaaaggtgggcatggcagtatagaaaaccaaattaggaaagggtaggtatatgtaaaataggtgaagagtggggatcagtcagaggaaagtgtgccaaacaggaagacaggttctcaatctggtctgaggatttaacttgtagcttggctttcaggcttgaaaatctctttggcttggaggttggcccctcccctatctgcctaggcaattgactgcctccagtcactatcgattccctgatctgaaaagatacagaaccatcatccaaggctccagttgcacaackgtttggagttgatggcctgaaggtgagaagggacaaaccaggttattagacaacatgtataaaaatgaaacaagggggtaaagacagcttaaaagtcctgaggctgccaacatgccctgataactggtggctatagttattgctgctaagatttgg

SEQ ID NO: 177574 - DNA, 497 bp, Homo sapiens
gggagtgtcttgtggtacagggacaaaattacccatctgtgaagagaagacagaggaagaaaaaggaaaaagaagactttttttccacccccaaaggatagtgattcaggacattggtgtagctaaagaattcattactaggaccctaaaagcaaatgcaacaaaaacaaaaataaataaatgggacctgttaggcaaacagatttttgcaaaaatatggcaaaaaccacaattacttttgcaccaacctaataattmaactaaaaagtttctgcaaagcaaaataaattatcagcacagtaaacagacaacccacaaagtggaagaatgtatttgcaaatcatgcatccaaaaaaggactagtactcagaatctaaaaggaactcacagaaatcagaaagaaaaatacaaataataccatcaaaaagtgggaaaaggacatgaatagacatttctcaaaagaagatacataaacagccaacaaacatgtgaataaa

SEQ ID NO: 177575 - DNA, 321 bp, Homo sapiens
gttatttttaaaaaatcatttctgataattccaaaatctggcccacctctgcagctatttttattgagagtatcttcactttaccatttttttttattctttatgtgctcataatctcccattttattctgaactttgtgtgtgtagagaagtaaataatttttattcctctaaaaaggagggcttctggtattggtggcttggttaacctragctccatttgaggtaggtttgagttttgttgcagctttagttggaggcagttaaccattgtcttagaatgtttctgataattgaatatagacttcttttgtagcaggg

SEQ ID NO: 177576 - DNA, 493 bp, Homo sapiens
cagtttaggagcattgtatttttcttgagtttatttatggaaagtttcatggttcttgaaattagcccatttcatataattttccaaaattgttaccatagtaatattccattgtcttatcttcttaaagttaaattttataggagtatcacatataatatgcacaaaacacttttaaactagattttcacaaaaatgaatataaataaaagcagtactaagtaaaagtaatacaatcttgtcaaatatcagaaatgccctttattctccctgagggaaactatgctrgagtaaccactatcctgtgttataccattatagactaatagtgcctgtttttgaactttatatacgttgagtcatatggtaggtacttttgtgtctagcttttctcttaagaatgcatccacactatggcatatagttatgttattcatttttattaatgtgtagtatttcattgtgtggatacaccacactgtatttattcatt

SEQ ID NO: 177577 - DNA, 493 bp, Homo sapiens
cagtttaggagcattgtatttttcttgagtttatttatggaaagtttcatggttcttgaaattagcccatttcatataattttccaaaattgttaccatagtaatattccattgtcttatcttcttaaagttaaattttataggagtatcacatataatatgcacaaaacacttttaaactagattttcacaaaaatgaatataaataaaagcagtactaagtaaaagtaatacaatcttgtcaaatatcagaaatgccctttattctccctgagggaaactatgctagagtaaccactatcctgtgttataccattatagactaatagtgcctgtttttgaactttatatacgttgagtcayatggtaggtacttttgtgtctagcttttctcttaagaatgcatccacactatggcatatagttatgttattcatttttattaatgtgtagtatttcattgtgtggatacaccacactgtatttattcatt

SEQ ID NO: 177578 - DNA, 607 bp, Homo sapiens
tgtgcttagctttttaattttcaggatttattctttcctaatttaaatactttatcactgtatatttattgaagttccactcttcttatatcctacaaattttcatacatagtatatttgttatcatagatgtaaaaatattgaaaaaaattttaaattaggwtttttcctctgacccatgacttatttacaaatgtgtttttaaaatttccaaatatggatgggttttttatttagcattttgttattaacttctaaattgtacagataagatttgtagataactactttttaaatattattaaggattttttataatttttgcaattcagaaagaatatcgatgatctaaacaacacaattatgtaacttgacctactgagtgtgtatattgttctcctacctatgattagagatgcatgattaaagaacgctcattttctcaagtacacaatgataaaactgaacaaaatcaggcattttgtacatggtttatggcagtaagtgttggtatatcttttcttgagttgatgatttggcaggacatagcaacattttacatgtgcatacttttcatattaacagttgtgtttctaggaatttgtcc

SEQ ID NO: 177579 - DNA, 607 bp, Homo sapiens
tgtgcttagctttttaattttcaggatttattctttcctaatttaaatactttatcactgtatatttattgaagttccactcttcttatatcctacaaattttcatacatagtatatttgttatcatagatgtaaaaatattgaaaaaaattttaaattaggatttttcctctgacccatgacttatttacaaatgtgtttttaaaatttccaaatatggatgggttttttatttagcattttgttattaacttctaaattgtacagataagatttgtagataactactttttaaatattattaaggattttttataatttttgcaattcagaaagaatatcratgatctaaacaacacaattatgtaacttgacctactgagtgtgtatattgttctcctacctatgattagagatgcatgattaaagaacgctcattttctcaagtacacaatgataaaactgaacaaaatcaggcattttgtacatggtttatggcagtaagtgttggtatatcttttcttgagttgatgatttggcaggacatagcaacattttacatgtgcatacttttcatattaacagttgtgtttctaggaatttgtcc

SEQ ID NO: 177580 - DNA, 601 bp, Homo sapiens
actactgaagtattaccataaaatgattaaatgtgggtcctagaatcatattgtctatgttttaattttacctttactgcttcttaattatggattttcagggagcaattaacctctaaatgcctctgttttctgatgtgtaatgtaacgataccaataatagttctcactacgtagagataatctaatagctaggtgagataatgcatagcgaacacttagaacagtaagtagcataaaataattgctaaataaatgttagattgtataatatagtatctattaatatgaagtaatcttgaagacattgttaacataccaagttacaaatcaagacacaaaatataattccatttatgtttaaacagcaatgagtatgtgcagaagtacatatttacatgaatgtatagaaaaatgtataaaggacactaatacatcaataatggcaacttctggggatgaaagtggagtggggaaatgtaagagacattattatgtatctgtgtgtgcgtatgtgtgtttgtatagatatctaaatatagacayaggtatagatatagatatattgcaatgagactgtgtttgaattttatttacatcc

SEQ ID NO: 177581 - DNA, 457 bp, Homo sapiens
ctctccctcctcccaaccacagggcaaggatcagaaagaatacctattgagtactatgcttattacctgggtgatgaaataatctgtacaccaaacccctgtgacacgcagtttacctatataaaaaacctacacrtgtacccttgaaactaaaagttaaaaaagattaaaaatacagaattatgaatatatatatagtctgtagatgctatgtgccttgaaaaagtatacagtatccataaaggtatctggaggtatgggttcccagagaaggagtagtcagtgtaaatgcctgacttttattgtttgtttccccactatatataaaccccatgaaggaaggaatatatttttcctcctgccagttcctaagctcttatatttgtgcctaacacatagtatgtacccagtatatatccgttgaacaaagaaatgaatgaaatatcatattctgcaa

SEQ ID NO: 177582 - DNA, 575 bp, Homo sapiens
gaaacatttcttcaattccactcaaaatgataactgctttgtcattagtcttcaggcaatgttctgtcccaagctaacctcttccagaaggatttaaagcctgacatcttttctttccacgttcaccctctcatcttttgcctgcaccttagtctccatctttatacaattcttccaggcagttgatcttctcagagaagccagaatcacaaagtatccaagaaattgttctgaagaacttgaatggatccacttgacacaatatgccacatgttctctgaaactcttttgctcttgttattgtgtcaccttttatttgactaaaatytgccatcaaattattttaaggactattttctctccaaaataatgcttttcaaagcagaaatgttgaggaggtggagcaagatggcaggatagaaagctccgccaattttcaccccaccatcccgcaacaaggacaccaagctaacaactatttacacagaaaaaacatcttcatgagaaccaaacatcaagtgaagagatagtcttgaatagccgacgctactccttcacctggcagcagcagagta

SEQ ID NO: 177583 - DNA, 557 bp, Homo sapiens
ctgtctgggccataaagactgagattcttaggtgagtactagtgctgaactatgcccagagacagtggactggggcagggcaggcacacaacatagtgaaataccagctgggacagccaagggagtgtggcaccgctcctcccctaactgcaggttacacagctcacatctccaaaagggaccccctccttctgcttggagagtggagagggaagagtaaggaggactttgtcttgcatcttgaataccaactcagccacagcaagatagggcrttagtcagagacatgaggcccctgttccaggccctactctcagacatttctagacataccctgggccagaagggaacccattgccttgaaggaaaaaacccagttctgccagcgttcattgtctgctaaatgaaaagtccctggccccagaataattagcagtgatacccaggtactgcattgagggccttgggtgagcctgtgagaccttgctggcttcaagtgagactcagtacatcattatcagctgaggtggctgtggggcaaaactccttctgtttga

SEQ ID NO: 177584 - DNA, 600 bp, Homo sapiens
caaatgtcagctctgtttttaactttttaaataactcttaaaacagaaatactgggggatatacaggcataagattaatcacacatattttatttgtattattgctaaatgataagtcccaacttacccctccacttctgtaatcaaggaatttagtgacacacttgattagcagcagggacactgaggarggaattgggcttcagtcatgagtagcatgaactagtacagatagggaaagcctcatcgttactaactctgtccccacacactttgtgaagataatgccagttttcagaaatcagtggggcaggaaatgtcagcagagagagcagttatctgtgagattgcttcaagggaatgagtcctgagtctgataggcacagcacaggcagctaccaatctttggacaatttgtcagaaatacttcctccttttctttattctaattattttctgggaacatctgcttttccttttccaccccacagattatttttgttaacaatctgggagctaatttcttagtgaagatcaaaacatttgaaagacaactgatcctgaagctgattctggaatgtacctgaacctgtattccca

SEQ ID NO: 177585 - DNA, 569 bp, Homo sapiens
tgcttttccttttccaccccacagattatttttgttaacaatctgggagctaatttcttagtgaagatcaaaacatttgaaagacaactgatcctgaagctgattctggaatgtacctgaacctgtrttcccatctacaatgatacctatttcaggggattgttttgagaaaatatgacataatcaatgaaaactgcctgaggtggtgtgatcacacagaagaattctaaatggacctttcaagtactttcccttctctccaatataatgcaaatttggatggtccaaagaatagtagacttatagtcagaagacatagatttgggtttcaatttagtttctacttacatttgtttttctagttctatgaacttggacaattcaatctagcctgttttggtgtctaagatggagataatcatgcctcctttgcagctgcctacctctcaagactttcaagagagtataaagaagtgctttgtaaatgtatgggtatgtttactctgactcacattctacgaacgtgtattaataggatttcttttttcctccattcccttgactggttc

SEQ ID NO: 177586 - DNA, 569 bp, Homo sapiens
tgcttttccttttccaccccacagattatttttgttaacaatctgggagctaatttcttagtgaagatcaaaacatttgaaagacaactgatcctgaagctgattctggaatgtacctgaacctgtattcccatctacaatgatacctatttcaggggattgttttgagaaaatatgacataatcaatgaaaactgcctgaggtggtgtgatcacacagaagaattctaaatggacctttcaagtrctttcccttctctccaatataatgcaaatttggatggtccaaagaatagtagacttatagtcagaagacatagatttgggtttcaatttagtttctacttacatttgtttttctagttctatgaacttggacaattcaatctagcctgttttggtgtctaagatggagataatcatgcctcctttgcagctgcctacctctcaagactttcaagagagtataaagaagtgctttgtaaatgtatgggtatgtttactctgactcacattctacgaacgtgtattaataggatttcttttttcctccattcccttgactggttc

SEQ ID NO: 177587 - DNA, 596 bp, Homo sapiens
cagcgcattgaccaagaaagattcatgctaagcaatcagaaaatgcatttattttgtttcccagtctccctttaaaatgtatttagtgggaatggtcctttccttgcttcttgatggaaacttaggagaagctccagaagctttcaagtcactcttaaataatgaagtttgatggtcacattaaatcacaattgtcatctcattagcagttgaaaattatctgttacaaaccgtaatcaaaaccaagaacctgactgaatgttagagcatcttccctctctcctccaggaggactggggcggaggtggagcatatgtgccttttctctttccagctttaccttctcttgtatcagtggctactgactctgaccctgccagyggacagggagaagaggggtcagaaagagggggtaaatgtggcagaatgtgtttacccatccaccaaagtccaaagtcagccctgagcaacctgtccccatatgatgatttaagttgactcttaccagagcttgggtggattctcaggtgaccccattatggggccccactggtagtcaaagttcttggggcctttcctgccaggaggcttcttat

SEQ ID NO: 177588 - DNA, 606 bp, Homo sapiens
cccttttccaagatagatgctgctactaataaggtagcctcagatatgcttctagacaccaagagcatgattttattgctttttctactttctcccacccacatagaaatcagttcaatacccattataacaggggcggcactgaaggccctasagatcactcagaatgttcacctctctgccaacaccgaatttacctttggaaaagcatttcagcaactgcatgagtgctcagggagttccttgttgataaattttctgaaagagcttgcttgtggccctctggacattttccagtacttattaatgccttgccaagttaaagtgtctaaatttcccataactagattagtatcagatttttcaagctactatctgtaatgttgctaaaagaaagggaaacgccaaaacagaataggacatcggtgtcatgtgattggcagctgatcctctgctaataccatcttggatgtgaatattcatcacacacctatattttatgatagaacatgaaaccccaactcatagcatctatgtgggtccattggatctaagcttaatatctattttatattattttagcactcctccatttaacttttaatt

SEQ ID NO: 177589 - DNA, 592 bp, Homo sapiens
tttattcctactgtctttttttcttttccacctcgtaaagcaccctgacatgcatgataaaccatcaagaagctcaataaagaaaagtactcccaacaggaatcttagctggtactttttgtttgtttgttgtttgttgttgaattcttttctgtcatgtttgttattgaatttttttctgtcaatagcatttgagaaatttgcccttttcaaaactgacattttacccacaattctgcaaacaaaaagtttttgatgatatcttaaacccttgaagtactttatacaattcaaattttaaataagtttctatttttaaaaacatcagaaagtgactgctgtgtatttttgtatagagactrttccccatctgtgcagtctgtgtcagagaataagatcttacaaggtgccaggggtcctcctcacacaagctttggctgccttttcagggttgctcttgagataggccttagacacaatatgactgatgtctctgccatgagggctactggagtttggatttatatgaccaacatctcctttattcctttacaatagaatgggtctcaataagcttttcctcaacaaatat

SEQ ID NO: 177590 - DNA, 617 bp, Homo sapiens
aagctttggctgccttttcagggttgctcttgagataggccttagacacaayatgactgatgtctctgccatgagggctactggagtttggatttatatgaccaacatctcctttattcctttacaatagaatgggtctcaataagcttttcctcaacaaatatttattcagagcctattttgaaccaggccctaattcagcaactggggatataagaatgaataagagcaaggttttttaggatcagtaggtgttcgtgaggagaaaagcagaggaacaacatctccaagtggcaggaacagtggtttcatcctttacatgcattgcttccacttggtccataactcaactcttctctcttgcaaagattctctcaatcactcattctggagggaagatctgttccggtttttcttttcattcaaagatgcttgccttataagtctggtctctttagaacaccttagtccactgttaaataattttcaaccattaggcacatgtttgaaagtacttgtggcagggtgctgtgtgagacccttttaaatcttcttccaatcacatgactttgacttaaagggactgatcatctttcctttggtaccacagataccct

SEQ ID NO: 177591 - DNA, 550 bp, Homo sapiens
gaattcacaccatttttgccctagccttttctcccttactcttactccctcttctccatctccatttcctgctaaatttccttgggtaatgacctacatgagaaactgctgtggaggctttgactccatttggagtgaactgaacatctgtattttgggcctccacctgatggctggtacagttttgtggaccttctgctcagggtgcctgatgcaaggcattgactgcttgggcaaggttttctactcgatatttgacttgttggcyatcccacagatcgggcccaaactgattttcttgatttattttttcatgttgaaatagttctgtaactggaaaacataactgaagcatagcaaccaaagaaggaactgccctgcactactagtttttctctgctcacaggtttgctctctgaggaaaagttggcaggttggagggaatcattctgtgcttcccactgtgtgtctggcctcagagagaagctccttcctgaccggtggtttgttgtgagggtgctacctctgcttactgataatcaggaataaa

SEQ ID NO: 177592 - DNA, 482 bp, Homo sapiens
gggatgagcttggttcccattcactcagaaaggggaagaatgagagaggggttctattccaagcagtaaattgttccctttagggatatttaaattcaaacacatcacaataccataaggtttaatttctttcctaagtctcaagtctgaaagtcttgagaaacaactattcctcatgttaatttaattttggttttctttcataaactaatagcatggccttacaatgactacaaaagcattcacccctttccccgagttaattcaaaaagcatttgtattaccatgacagagactctctaagcccaaatcacaaattcctaatccctggaaragactaatcaatacaacacaatgttagttatctcaagtttctaactaaaggaaagcattgtatccttcagaatttttggtgagggtgagctattgaggtaaattaatcagacataaagataatatttttcatttggtttaaaaatgaa

SEQ ID NO: 177593 - DNA, 566 bp, Homo sapiens
cacctttaaaagacatctcttttggtgaattccaggtacagcaygccacaccctaatctcctgaataaaaagctcagacattacctaggtttttcaagaaacaggtccacacatgtgtggagatgtagaaggtgctagaagggcagaggttccagctgattacaactctcaggtcaaaaattacacaagaaatgtaataaatgacattaacaggagctcagtcattttcttgcaaggtgataagtggttatagtttttgatataaagccttcattaaaggatgtcttcaaataaaattaactccattcttttctgacaaccaatataaaagatttgagaccatttattctgtgatacagtttaaatcaaacctatttttggctagatcaggttcaacttgacagtgaaactatgttgctggctagaataattaagctggttttacaaagcctctgactccatgtattttaatcatgagcttcataatcattaaatttaagggccagagcacaataactacaaaaatgatgataatgatagacagacagatagggagatagatagat

SEQ ID NO: 177594 - DNA, 512 bp, Homo sapiens
cctccacttatcatgtcttaagatgagacttcataaaacgaaaggactaggcaatgtgacattggtggagcaaagggctttgcagatagctaactggctctgctcttgcaggatgctttctaagttttagtttcctcatctgtaaaatgagaaaaataatatctacttgataataaatgttgtgagaactaggaaagatggaaacagaatcttgcactatgccaaataaatgataaccattgttagggaaaggtggaattatttgataagasattctttatctgtggcttatgcacaggattcctcagttcatgtgaatataaaaagtcttgttaatggtgaagtgctgaaaatatcagtttaagtcagtcctgtttgtcctcctaaagacttactccaggcaacacttttccgagattttcttcttcctttctcgtatctcattcacctcttctcacagcagttggctcctgtgggagcccaggaactggcagggctgtctgtgggaatga

SEQ ID NO: 177595 - DNA, 431 bp, Homo sapiens
agaattcaaaggagtttttaagcttgtatcctgagaacatacagagttctcaggatagcaaccaacatagcataacctaaaaaaaaagaaagaaagaaagaaagaaattgataacaaaattgaagcagaaatggaactggctcctaacattcttctggtgagatagattgcacctcaccttcaraaaggagtgcttatagaggcttagggaatgggaatgactgaaacaagactgcctgacattttgtttactgtggtaagagaatgcttcttccttcacctccattcccccagggaacttgtcccttcttaacaaaagaattgttcaacgttggggaagttctgtgcggaatttaacctaccactacagcctctacattatctacattatccttgggaatttaaaacatgagaaagttttaatgctgaaa

SEQ ID NO: 177596 - DNA, 602 bp, Homo sapiens
tcatagctgctttattcataatagatccaaactgataactcaaatgtccattaaaaaataaatgggttaaaaatattgatatattcacacaatgaaatatgacccagaaatgaaaaaaaggaattaccaatatacacaaaacatgcctaaatatagaaaacattatgctgcactaaataagccaaatataagagtacatggtgtagtatttcatgtatatgaagctctaaaacaggtaaaactattctataatgtaagcagaaaagtagtttcccagggctggggatggaaagtgacttacttcaaaggacacaaggaaactttctggggtaatggaaatgttccaaatcttgacttgcaaggtgctaacatttgtaaagtttgtsaaactcattcaacagtacacttaaaatacatccattttatgttatgtaaattgttcctgaatgaaggtgatgtaaaacaaaattacaaaacaaagtaagtataaaagcaaatatttatttagaattaattgagaaaactcaggagatcaatcatttttaaggttgtcaaaaataaatatagcccaatccagaaaagcatattattttcattttacc

SEQ ID NO: 177597 - DNA, 615 bp, Homo sapiens
tagaactgatggcatttatggaacacttactatgcaccaagtactttctttggagtatcttaatgagtccttacaaactcccctatgagacagtcttttgtgaatgagaatcagagacacaggagttaagtaattaatacagagtttgtaagcatagcaggcattgaaacccagtctgtcaactccagaacctatgaacattttatccactgtgctgccttatggtcatcaactttactacctaaagttgctgattcctcagacctagagttttgcagcctcctacatgatggttttatttttcaaatagcacaaaaatagccctttgtgagatttatgtaggtaagagggaacctctgccmttttgagacacttagccttctccaacccaagttagggtatctttgggcctaatatttctgctctcggaaagccctagaggtcctaggcagcaatagtctctttaaatgtttatttattgcaagggacaatcagggtcagctaatccaggacctgtggcgaggcatgcagagcactgtggccaggctctgctcatggtacacacaccccagggccatgggcttttcaccccaaccccaccaaacttgctaaaag

SEQ ID NO: 177598 - DNA, 606 bp, Homo sapiens
attaccttacctaatgtgggtgaacctcactcgatcagttgaaagctgaatagaaaaaaaygctgaccctccctcaagtttgaggaaacttttcctgcctaaccactttgagctggaacattggtgttttgttttgctttgtttcattttgttttgttttgttttccttcaaaaacattagctcttcttgagtctctagcctgtggcttctggtctgaaacttacacaacagactgtcttggttctcaggctttcagacttggactgaaacaacaccattggctttcctgggtctccgaataactaactgcagatcttaggactccttagcctttataaccatgtaagccaattccttataacaattctctttgtgtgtgtgtgtgtgtgtgtgtgtgtgtgtgtgtgtgtatgtgcacactttacattggctttgtttctctggaaagctctgagtaatacactctgactctaattctcttgcctccctcttataaagaccctcatgattatattggtcccactcagataatccaagataatctccctgtatcaggacctaatcatacctgcaaattcccttttgccatgaaagaaaacatatag

SEQ ID NO: 177599 - DNA, 606 bp, Homo sapiens
attaccttacctaatgtgggtgaacctcactcgatcagttgaaagctgaatagaaaaaaatgctgaccctccctcaagtttgaggaaacttttcctgcctaaccactttgagctggaacattggtgttttgttttgctttgtttcattttgttttgttttgttttccttcaaaaacattagctcttcttgagtctctagcctgtggcttctggtctgaaacttacacmacagactgtcttggttctcaggctttcagacttggactgaaacaacaccattggctttcctgggtctccgaataactaactgcagatcttaggactccttagcctttataaccatgtaagccaattccttataacaattctctttgtgtgtgtgtgtgtgtgtgtgtgtgtgtgtgtgtgtgtatgtgcacactttacattggctttgtttctctggaaagctctgagtaatacactctgactctaattctcttgcctccctcttataaagaccctcatgattatattggtcccactcagataatccaagataatctccctgtatcaggacctaatcatacctgcaaattcccttttgccatgaaagaaaacatatag

SEQ ID NO: 177600 - DNA, 615 bp, Homo sapiens
gaaagacaaaaatgaaaggtattctctacaacccccaatccaaaagcacctaggactgttttacaacaaagtgctctggagttggagtcaacccaattctgctttaaattgtagtttaacacttcagagctgtttgactttggatgagttaccaaatttctcctagcctcagatactttgtttttaaaaacagggataaaaatatctataaagcatggctatcatgttgactacaaaaaatcaagtatataaaatttctagaaaatgagtggcccttagctgctatgcaataaatgaaaggttctttctcctttccatttcttttctgtgataatctgtatttaaaaccccacaaggtgaacttatcaaatccaattctcaagagctctgttaaactgagatcaggatgattttccatctggcatgtaacatgaccatttggagatgctcacttctaatggacagatttgagaaaccacaattaaaatgagagaagctcattcttcatatatctacctggcgagaagggatcaaaggcaatgactggcaycagtcgctgctagagaatttaggagaagagagagtgagaggcaaatgaccttaggaagctgggag

SEQ ID NO: 177601 - DNA, 532 bp, Homo sapiens
tttgctgggctcagccatgcagcacctctcatgcctgcagctttcccagactaacattgcatactggtaggtctacagatctacagacttagaggtggtcacactcccatgaatccactagacattaccctggtggggactctgcagtagctttgcccctctggcaagtttttcctgggtttacaggcagccacaacattctttgaaatctagatgggggcagccagggcccacaactcatgtactctgcaagcctgcagaattagcactacatgagtgctgccaagacccacatattgcatcctccagggtggcaggytgagctccacctgggccagcttgagccatgactggggcagctgaggagactgcactggggaatgggggagcaaagtcctaaagttgttctgggcagcagatgctaaggtcttactggtgcctctcttgtcctcaagattctagcttgcttagaagatctctgaaatacctttggggtcactctcacattatcttggtaaatagaacctgaatt

SEQ ID NO: 177602 - DNA, 554 bp, Homo sapiens
gatgtgagcaggaagggtttttaagtaggatgtgagtgaaaggtrtattaggtgtgaggaaatagataaaatgagaatatttatgctggcaagggtgtagaaataaggtgaaaccttgttctggatagacatgtatgagaaactcagggtcaaaatttgctccttggttcaacatctgacaagctgtgtgatcacaggcaaggcctttagctgtctttgtatttaaaagagagttttggctatcatctctgttacacttatgtcattctaatgtatgatactgtacatctattcagaagaatgcatgaaaatgagtgaaataaataaatgaaggagatgaactagacattgctaagagagacggtagttcaaaacatagaaagaaaggctaagaaagaactgtaagagtggagaaaaaaataatttaaaagaaaatacttttaggatcacgtgcttagccttaactttactggaaaataaaaaaatacaaatcaacaccaagtgcataactaaaaggaaatgagaaacaagccattggaaactggagtaaaggc

SEQ ID NO: 177603 - DNA, 616 bp, Homo sapiens
cttaatttccattatttgtgagtttcatctttatgtagagttcagaattgttaaaagaaaaatatttacaggcatttgtaatcaggtccaaaaaataatcattttcttttttccttggagaagctgtgtggtatagtggctaagatcagggactctaaagccagactccatggattagtatcctatgtctgccatttaatggttttgtgactataaaatctctggttctcagttttctcatctaaaaaaatgggagaataatcttataaggttgttgtgactattaagtgaattaattctgtaaaacacttagaatagtgcatggcatgccattcagtgctgtgtatatttagctaattttttttcttttagtccaacatttcattagtttaatagtccygttaaagtaacattgggtgacaattgggaatcaaccacaaataaaaatttggagttcacaaaagtcttctataaattactcttgatattattatctactcttttttttctttatttcttctaaaaaaggaaaacaggatacatgtgcagaaatgtacaggtttgttacataggtatacgtgtgccatgatggtttgcttaacctattgacccatcc

SEQ ID NO: 177604 - DNA, 562 bp, Homo sapiens
tgcataaaaacaaattatgcaaaaatgacaatatcatattcatttttaaaaatcatctatttctctttttttgatgtagccttgagtttgcaaagtcatttaattaagtagaacagaattatttcaggcccaccactaaagctgagattattcactcagagttgttggtcagakatttgataacaacagtatggatttggggtcactggtcactggacaaggaattaaaatctggaacatgtggactaatgcagagcaccttctgagaaaattcagctcaggtttataaggaaaatcccctctcaagagttctgctgttaatggagaactcattgatattatcaatttactgtatcacataaatttttgccatctttcaaatttaccctgagacaaattctgtcataactgcctataacattttatcacttgattggatagatgaatacgcacaaccagatttgaatctctttgcttcctaattagaataaacacagtagtgtaagattttatattctatggcttagcaaacacgattccattattaatagctagtattctg

SEQ ID NO: 177605 - DNA, 575 bp, Homo sapiens
agtacacagggagtcagaataacttccaataatgataatggccacttatggaatgcctaatgtgaactggacaatattctaagcacttcrcatatattatcaaagccaagactatgtctcccttggaatcaagaatagtgaaaaggcattctccttttgctttagctgtaatattctccccacgtgacacacgacagaaatccgggctcagtaagattaaagaactcatgcttacatcacgtaagaaacaaagatggcattgaactcaagtctgtctggttctgaagctaatcatagtaaccattatgctatctatatagaaactgctaaatgccatttttcaaattacaatcaggcagttgggctaagactgaggcttcagaaaacagtacaattcctgtgtgctgtgctaacacttctgtttaggaacgtctcattgaaaagtttctgaaaatgaactccgttcagcaaacgcaccagtttaatggctacccgtgtgtgctaggtgctagctgacatcagcatataaagcattttatgaagtctttattgacctgtaaatgttgctcccacta

SEQ ID NO: 177606 - DNA, 456 bp, Homo sapiens
gtggaaaaaagaagtcatgtataattctttatactgttggcctgagcaactagagttaccattaacttagatgggaaaactgccaatggagcaattgtagagagagatgaggagtcagctggggacactcatgttcaaagcatctattccatggagatgtaaatggtggtgttggatgcaagactctgaaatagaatggagatgtctggctaagagatataaacgtgggagtcaccaatttgtatgtgatatttaaagctatgaaactggatgagatcactcaggcagtgagtgcagatggagaagagaagaggaccaaggactgagccctggggctctccaatagtaggaaataaaggtcagagagagagagagatgaaaaaagagtgagagaaagagagagacaccagaaaggagaaaaaccaagggasgatggtgccctggaagtcaagggaa

SEQ ID NO: 177607 - DNA, 573 bp, Homo sapiens
aattcaatattaatcttttatgccttgcttagagcagttcagtgtttcctcatgactttgtacgtaaacctgaactcttcctcatgacttacagggccctgtacaccttcctaacctcatctcttgtcactctctgccttgaactctgtactcaagccatgtttaacttccaattccttaaatacatcatattctttctgtttttggatttttgcaaatgcaagtccttactgtataatcttctgattggctaactcctacttattctataggcctcagtagttggatacacaggggaatactcatttaatgagatggaaaagastcaagaaagaagcatttggttttaaatgtattaagtttggaatattgattaatgatcaaagttgagatgtccaggatacagttcaatacaggagttggaagctgagaggaaaagtcacagctggagatacaccttcaggagtcaacaacatcaagattgtatttgaaaacatggaaagaatgagagcagttggtgaaggaatagagataagcagggtgcaggaccaagcaacacttggtggtctaggg

SEQ ID NO: 177608 - DNA, 468 bp, Homo sapiens
ctaacttccgtctgactagagagccaagatttggtgaaaacttcattattagggatgattttggtgaacacaatagggtaatgattagatagatgtctaagaaaggaagttctgactcttaattttctacaacatctagcatagaactgtctatgtggtaggcatttcattaaaaattgctggctcatttattgaataatagattgatatacccagggtgaggcttgagggcatctcctgtacatacagtggcatgtgaagatctgctagtggaaccagcccaacaatgccttcttcaacacaatagaggaaaactggttattgaaggtccattctgctctgttaggktcatgtctgggaagtctacagcctccataagacaacagggaatgatatgagaccccaaatcaggaggttgggaaatgatccaatgtgccactctacctattgccaggaaggggctgacaa

SEQ ID NO: 177609 - DNA, 503 bp, Homo sapiens
ttgacttcatattgctttggtgacagattatagggagmgtttatctagaaggtgttttgtggtctgtctacaatgatgtaaactgttctgcaagagatgcctggttcaaatgtctaaactggctttatccataaacatgattaagtttcataataaccatgaaaacaaaattttcaataggagttaatcgtggcttggataggtataaatgttagtgactggaacagatgagcatctccttttaagataattgcttgtacgaacgatgaacaaggacatctaaaagccatttcatggggaattttttccattgactctttgcttgattttaactacatgcaaaaagcgctttaacccagcaccttggaaatagtcattgggaatagttcatcatcctttgcttggcagacagacattgtgctttaaagtacaaaaacctgatctctgtctcctctgggtagagcacactgtattttaaaaaatttataccctcctttgttttt

SEQ ID NO: 177610 - DNA, 503 bp, Homo sapiens
ttgacttcatattgctttggtgacagattatagggagcgtttatctagaaggtgttttgtggtctgtctacaatgatgtaaactgttctgcaagagatgcctggttcaaatgtctaaactggctttatccataaacatgattaagtttcataataaccatgmaaacaaaattttcaataggagttaatcgtggcttggataggtataaatgttagtgactggaacagatgagcatctccttttaagataattgcttgtacgaacgatgaacaaggacatctaaaagccatttcatggggaattttttccattgactctttgcttgattttaactacatgcaaaaagcgctttaacccagcaccttggaaatagtcattgggaatagttcatcatcctttgcttggcagacagacattgtgctttaaagtacaaaaacctgatctctgtctcctctgggtagagcacactgtattttaaaaaatttataccctcctttgttttt

SEQ ID NO: 177611 - DNA, 503 bp, Homo sapiens
ttgacttcatattgctttggtgacagattatagggagcgtttatctagaaggtgttttgtggtctgtctacaatgatgtaaactgttctgcaagagatgcctggttcaaatgtctaaactggctttatccataaacatgattaagtttcataataaccatgaaaacaaaattttcaataggagttaatcgtggcttggataggtataaatgttagtgactggaayagatgagcatctccttttaagataattgcttgtacgaacgatgaacaaggacatctaaaagccatttcatggggaattttttccattgactctttgcttgattttaactacatgcaaaaagcgctttaacccagcaccttggaaatagtcattgggaatagttcatcatcctttgcttggcagacagacattgtgctttaaagtacaaaaacctgatctctgtctcctctgggtagagcacactgtattttaaaaaatttataccctcctttgttttt

SEQ ID NO: 177612 - DNA, 503 bp, Homo sapiens
ttgacttcatattgctttggtgacagattatagggagcgtttatctagaaggtgttttgtggtctgtctacaatgatgtaaactgttctgcaagagatgcctggttcaaatgtctaaactggctttatccataaacatgattaagtttcataataaccatgaaaacaaaattttcaataggagttaatcgtggcttggataggtataaatgttagtgactggaacagatgagcatctccttttaagataattgcttgtacgaacratgaacaaggacatctaaaagccatttcatggggaattttttccattgactctttgcttgattttaactacatgcaaaaagcgctttaacccagcaccttggaaatagtcattgggaatagttcatcatcctttgcttggcagacagacattgtgctttaaagtacaaaaacctgatctctgtctcctctgggtagagcacactgtattttaaaaaatttataccctcctttgttttt

SEQ ID NO: 177613 - DNA, 556 bp, Homo sapiens
ttgtgggttgcattttaagccagttacttagaatttactcattgtactttcttcttttcccctctattgaggaaaattaaaacgttaaaacatataatcgtgatgataggtttttctatttcttctyttagttctgttaaatcttgaataactgattgatcatatcagcatgcaggagttcatgcagcacgttggatgttggggaaggagaactactgggctgatcagtgtctgaatcctggttttgtcactttctagatgtgtgacgttggccaaagagcatagcctcccttagtcttggattcccgttcctagaattcaatggagtgaacaagacagttatagtcctagatcctacactactgtctaggtgagaaagaggaaaaaagaacccaccaataattcattaatgatacattaattttattgctgagagaaaggttgctgagagagcacactcatggaaggggatatatattttaggggaagtggtcaaggatgtcctctttgaagggaccttaaaggtatgaaggagccagttgtgatgatgatgata

SEQ ID NO: 177614 - DNA, 484 bp, Homo sapiens
accttgtgctataagtatatatttaatatgattgttcttatttaaatggcaatggaacacaaagtcaagttatatttaccatcagctcacttcctggactttgatgtgaaataggtacattaaccctttctggatgacatgttaaccatttcttgccacttacttgttacttactaaaactgggttattcttattccttgttaaaataagtcctgctactatgttttataaaaccatctatcaactcgctttttccattcaaaacagaatcagagtaacatttgtttttttatacctyataggaacatttttaataaagaataatactttaaaattctttgagttttaaaaaggacaatttctgctcaacagtttcaaagtatcattatgataacaaatacacaaaaactataatatgaacaatagttttataatacaggaaacactagacaagaccctgagagttaagtgagtaaactgctaa

SEQ ID NO: 177615 - DNA, 451 bp, Homo sapiens
atgggagagcctttacgtgtatttaaaaatggtagtcaaaataggtcctaattcttggaattttaatctagcctggtaattcaataaattatgctgttgttttaggaaaacaaatgataaatccaaaatgcaattcttagaataacyaataactctggctcactgaatatgtactaaggtcttctttttttaaggttttcaatgatgctaaatcaatattaagaatctgaaaaccttttgttaccactctggtccaagccatgaataactttgaccagaattattacaatgattcccgagttgattcccacacttctatccttcatccctacaggatactctcagcacagcttccagagtgattcctttaaatagttcagatcattcccatattcaaaaccctaagtaaaaggaaaattgcttacaatggccaaaatccctacacaaagtg

SEQ ID NO: 177616 - DNA, 601 bp, Homo sapiens
ccttagtatataactttctgaaagttctcaccattttcccaaccataataggtctttgacttgttcttgtattttttaatggtaaataaaactgcagagtaatgaatatacaggtaatttaaattctaggrttgtcagaatgctagtctttccttgattttctgtctatagtaaactagcactgagtgaatatatagtaacacaactaatttgggataaattgaaaaaagtgccacttaatttttaatatgtattttgcttgtttactattcacattttactcaatctgagcaatacaattagatttcagtattcttttccttcattttgttctcccaggctacactaaatatttaaattagtaaagtgttattgattttctgttattttatcatgaatatgttcctggtcttattaggtcggtgaatttatttcttaatggaacttacattttcaacttaaattactttgtagtacaacctaatgtcccatgcaatgaggttatacctgtatttgtgtcaaatctaattatgaagccttgatttgtgtaatgtgaaagaaattatttccactttctctaccatgcaaatagattaatttt

SEQ ID NO: 177617 - DNA, 526 bp, Homo sapiens
caacttcttttgttattagtttatttgttgttagccttgcctgcctctcctgttaggtaagcctactttgtgtatagggggacacatatcttcatttccatgtcactgacatctgagagttcctagacagtcaaaagtcaaaaaatatttttctaaggaatcaaataatggaaaatgaaataataatgcataaagtgctagtttatttgtataagattacatatccaaattataaatatttgcatttcckgaacagatcgtcctgtttgtagctgtttgcacaataagtacagaatgagaacttaggggagtgaatttgatcatcttaatgcataaagggcacaaataggaaagcctaataaataatgcattatgtgtgtgtgtgtgtgtgtgtgtgtgtgtgtgtgtatcctgctaccgtagagtcatacccacccaccagacaggagctctcctgctgttccatactctgcatatgcattttatagggctcatcaagaccaaaatattcattttgtgggtggga

SEQ ID NO: 177618 - DNA, 492 bp, Homo sapiens
tgggttgaactccactggggttactactgtgtcaattttaaaagtttcaaataggtgaggaattaagggtgacggtgacatatatttgatcctataaaatgctaacactcctcctgtttgtcctttcatagtccttaaagctctttaatagtgtaatattgtttctatgctctaatatcttaacaaaatttcatgtgagctaatgtgatatttcttaccatagaagagtaaattgaaacctcatgcatttctttttactatgcatattggtcagagtctaataatttgtcacagaaaacatactgtgtatattttgtgtgtctatatataacaggaaaatgttaaggctagtctgatcggtcttgttctattttctataagtttaaaatcatcaactaaatacatayacaaaaggaaattttgtgacaactttactaaaacattcaggtcgacattttgaaacgtcctttagctaaaccaagacacacgaag

SEQ ID NO: 177619 - DNA, 594 bp, Homo sapiens
tttgtgtgtctatatataacaggaaaatgttaaggctagtctgatcggtcttgttctattttctataagtttaaaatcatcaactaaatacatatacaaaaggaaattttgtgacaactttactaaaacattcaggtcgacattttgaaacgtcctttagctaaaccaagacacacgaagagaaaaaaaatcaaagccaaggaagagcttatgaaaggcagagtaaatcctttaggatgattagttcagtgaaatattaaaagaatattttgtctgcaagtcaggtctcttgctggtctcaaactagtaatttggattcacttcattatagccactgaagtaccttagcaaagtctgggaagaggagcaaagagccagaaagaaaaagagcaataacacttatatgatggagttactctcataattcagcaccagataactcaaacaagyaccttgcaaacgacaatgcagggcttagcttcactctttgcgaataaaaatgcatcacacacagaagccctccaggagctcccttgatgagcctcaaaatgagtattctaaagatgtaacaaatttctctctttgtttcaagag

SEQ ID NO: 177620 - DNA, 601 bp, Homo sapiens
cccatcacaggtccagaggcctaggagggaaaaatggttttgtgtggcaggcctaggatccccctactctatgcagccttggggcatagtgccctgtgtctaagctgcatcagctccagccatggctaaaagacacaaaagtacagcttggaccagtgcttcagaggatgcaagtcccaaaccttggtggcttccacatggtgttgaacctgtatgttcacagaagtcaatgattgaggtttgggaaccacaactttgatctcagaggatgtatagaaatgcctggatgtccaggcagaagtttgccgcaaggcagagccctcatgaagaaattctgctagggcggtgcagaagggaaatgtgggattagagcccccacacagttcccactggggcactgcctartggagctgtgagaagaaggccaccatcctccagaccatagactggtagatccactgacagcttgcactgtgcacctgggaaagccacagaccctcaacaccagcctgtgaaagaagctgagagggggctgtgctctgcaaagccacaggggcagagctgcacaaggccatgggagtctgcctcttgcatcagcatg

SEQ ID NO: 177621 - DNA, 398 bp, Homo sapiens
ccccggggttttttttttttttttttttttttttttgccttctgtaatactataatcattaagagagaatacatccaaggaggctaaacaaaaaaatcatagcccctgatggaccagggataaattaattaccatataccttctagaagatatacagacactaatttaaatgatccttacatttarcttttcagctgtgatgcttttattgcattcaaacataggcaaaacaaaatgattttagcatgtgcttagtaatagaatccgtgtatttttttatttgctcctaaaatagaaatcacctttcagcagtttttttcttgtaataaatgacaatgagggtgacagatatgtgtttattttaaaaatctttgcaatatgtctattttaatactcta

SEQ ID NO: 177622 - DNA, 398 bp, Homo sapiens
ccccggggttttttttttttttttttttttttttttgccttctgtaatactataatcattaagagagaatacatccaaggaggctaaacaaaaaaatcatagcccctgatggaccagggataaattaattaccatataccttctagaagatatacagacactaatttaaatgatccttacatttagcttttcagctgtgatgcttttattgcattcaaacataggcaaaacaaaatgattttagcatgtgcttagtaatagaatccgtgtatttttttatttgctcctaaaataraaatcacctttcagcagtttttttcttgtaataaatgacaatgagggtgacagatatgtgtttattttaaaaatctttgcaatatgtctattttaatactcta

SEQ ID NO: 177623 - DNA, 550 bp, Homo sapiens
ggagacagtaatagtaacttgaatttgaggggttacttttgatctatttctcttgattgttacagagttgagtccctttttgctaaaagggtttcttcctaagaacttatctctattttgctacacttaacattcctgaggccagasagctgcaggcaggaagcagtcatccccagaattttacaaagtgcaccaaaatcacaagagcttctgtccacagagttaaactttattattttgtgtgaacatttctaacgagaatatttactaaccacgactcagccccattattctttaaattcctatgatttaagttattaaaatttaaatgatgtgtaaataattggactgatgatcagacaaaaccaaggcttgctgaacaaacatatatgctggagtatggaaatagaggtgaattaatacagaaagagcacataacaaattgattatattcatcctagtcagttgatttacagaggatttttggataatgtatttcaagtcaaagaatcgtataagggaatctaaaccagagctgcagggtgtaagt

SEQ ID NO: 177624 - DNA, 497 bp, Homo sapiens
aaaacatgcaatgtataagaaatataaggatgatggcataaattaaatcatattattcacacagcatttaaatgtacatcatttcagtgttttgaaactgttttttttttcatactattttcacacagatggacactacaattcatttgctggtcctgagtgggtctggacaaacattagaaagagcaagaccggaaaagtactattgtaatcattttgatttaaaaaagaggaattggagtaagcactagaagtagaaatggagaaatacgaattccagggctattaggacacagcaataaattttgacaggcctatttaatatagaagccataggaaagggaggaatccagaaagactcccaagtttcaggctcaaggtgactatcttttgaatgggaaaaaaatgatgaagaatgcaaaataaaaagtgtttgttgatttatttatgcatccaagttgagccaaataatgatgygtttgtttgtgctttaacat

SEQ ID NO: 177625 - DNA, 607 bp, Homo sapiens
aaatcatcagtttacaagtagataacttatcttaagaagggactggacagtgttgaagatagagctcacagcagtagaccattcacatacatttgcaagaaaaaattaatgttgtgtgtacgttcatcgaagaggaccaatgattcagcagaaataacagcccataccatagtcatctctgttggctcagcttacacaattctaagacattaaacttgaacaaacattccattcaatgggtaccaaaactgctgtactcaggttgrctgcagacaagagcagaaccttcaatggaaatttttaacagtgggatcaagatcctgaagcatttcttcaaagaattgtaacacatgatgaaacatgactttacaggtatgatcctgaagataaagcacaatcaaaacaatggttaccaagaggtgaaaatggtccactcaaagcaaaagtggaacagtcaagaacaaaaatcatggcaacagtttcctgggatgctcaaggcattttgctgttgactttctggaaggccaaagaatgataacatctgcttattatgataatattttgagaaagttggccaaggctgtagcagaaaaatgtccaggaaagc

SEQ ID NO: 177626 - DNA, 564 bp, Homo sapiens
tgaagtttaatctactatagttagtataaaatatgtcaagcaaatataatcctggaaatactttagggagtcataaaagctcacttcatttaaattccagtgtactgtatgcaatatgccattttaatartacgatcctgaagagaaaatactatactgcatggattgtctgaaaggcagtgtttgattccagatttcttgaaagagtatgagtatgggatgatcaatgtacatttaaatacattacttgtttttgaacaattatctttatagattgatagagaaagagaggaatttattataaggaattggttcacatgatttgggagtctagaagtttcaaaatttgttgtcagcattctagaaaccctggcgagctgccagtatagcttcagtctgagtccagaaacctgaaaaccaggagaatcaatagtgtcagttccagttccagttcaagtctgagtccataggcagaaaaagaccaatgttctagtttgaaaacagtcaaagagcagattttcccttactcagcccttttgttccatccagacctccaaccgattg

SEQ ID NO: 177627 - DNA, 546 bp, Homo sapiens
aactaaaggactaagaaattctgtgaagagtccaattttaataagtgagttggtgtgagagccagaaactagaaaatgtctcttgaacttcctctagggtacttttcattacatcatgctgtttctgtattattaccataaatttttgcctattcaacttaacatattaatgcatgttttaaccaaggtgtgaaaatacagagattctgtcagttggctggcattaataatgaccccagatattaatggttcagcagtttttacccctagttgtgctccagaatcaatcagtgtatataattattgtaaatataaatgtgcaagtgtaaaccttggagtttctgacatagttggtctatcttgaggccctagaatttgtgttttaataaagttctaccaatatcatcatacaaacagtaacaacaacaattttagctaacatataatcacttaacaaagcggtctcagtgccagacaatgtctaaggcttgtagayaggataactcatttaaacctccaaagaaccctatcatctaagtactatta

SEQ ID NO: 177628 - DNA, 612 bp, Homo sapiens
cctcacagtggctgaaggaaaaaacaaacaaacaaacaaaaaaccctaaaaacccaygtgcttggtttctgtgtttgcttcctgtcttaaaaaaaaatgttcttttgtttacttatcttccactcttatacctccttccccctttgccatctggagtaccaaaaaatctagagaaggcttccaatgacttgaacccctttaaaaaattcagaacaaagacaccactcaccccttttgggatgttctgtttgctttgcggacttttaagagtcttgggaagattattcttaggtctaaagctctgctttcctgtattgcataatgtgatctttttggctttggagctaccagagattaccttgtactgtgagagtacttaaccttggcatgtataatggcagacaagagctacaaacttaggaggtggctgagcacagtttacaggaagtggtcttggctgttgttgtcattctcctaggaagtcttcatttaaggatcctaattctagtttggacatgcattctaaagggtcttttctattgctttttttaccaaaattaatctcaattcagcttgtcggtgcacatttgtgtgaggaactgaattgttttc

SEQ ID NO: 177629 - DNA, 635 bp, Homo sapiens
acaagaaaatccaagcatgtcatgaacagttggtgtaagtcataataagaggatttataaaaggaaaaatacttttatatgatcaagttgtctataattaaggaaaatttataatggtctttctagagattgggatcgatgtaaaaacacttatacattgattttctaaggtattaatttactcttaataaattataagaggttttaattattttaacccaaagttcaacttttattgcatctcactgtttttggttttctcctccctcttaaagagtgctaaatagtaatgctctccttcaactcattttcagctcatataagttttttttcctcmagttctgtttattgtagcctgaggctaaaaatattttctaaaagatctaaaggaaatgttttcttccaacataatattctgtgcagtgcagaaagtcttttctttttcattttggcctaacagattttatggtttatcaaaacaattcctatgccattaagttttggctcacttaggagaaaagctgagatgattttttttaattaaggttattacctccgtgtatctttctgtatgttcttttaaagtacttgtgacattgagttacagggctttgactcccgggcctaaaaatgac

SEQ ID NO: 177630 - DNA, 456 bp, Homo sapiens
gaattcgaataaactacaataatgacagaattaaaggaacgtactttaatccactgggaaacatttagggaaacatttatagtagttccttgaagcaagttgtcaaagggaggcagaaagcaatctaatctgggcatttggagagttggttagtttccttaatgttaaatccctttgggtttttccccaagccctgcaatactaatatctgtgagctcaccaatgaaaaacatgattggaggggcattttaatagcaatatgctcattggaaaagattattcaaataaaaggaaaagaagcctgtctgaaataaagartttaccgtacaaaataagtttgaaagaaaaaaaatcaacatatgtacaaaaattaacaaacaaaatatctgaaaaacactattaaaattattagtgagaccttctcctatgccactataaaacataaaacaataaact

SEQ ID NO: 177631 - DNA, 538 bp, Homo sapiens
cactgtccacgtagttgaacttctggaatgaatacaatatatttaaattgttcccatcataactagcgggacacatctaactcaactgtgaaaagacatattacacaatcacgttgttgctaattacatggcctgagatctctgccttttcttgctagccctcacccctgcttctcaccttccctgcaatagccctctagcctggggctttgttagattagattagatgtgaaggtttcaggtcacagcctgtgggactaatggtgggtgtgtggggtgcttcagatgcatccctgctatcttcctttaagtcttaaatgatgccccctccaagctatatgtcctgtccctacattcctycacttccactcttggccaaagcatagattgtaacccctctgatcccctctgagattggccatcaatgagtaatttagtgctttccccatatcttttcttccccacctttatggagaggtgctgcttttttctccctcttcctcaagttcctttttgtaccatcactacacaatgcttt

SEQ ID NO: 177632 - DNA, 630 bp, Homo sapiens
aaaattgaatggaaaagaattggctgcatttctcatcctgaggcactaatgcaaacctggatttcatttcctaaattcttgctcatgtaatccagtttacttgagtttgctaattttctctatttctctatctgtattaaggataagtttcatttcaaaataatcaaggtataagaggaaacagcatctgttacaaagaaaactgcaaaggcagaacaaaagttacacatactggatttctactggaatcatttttgtattaattaatgcaggactacaaataaaaatcsatgtgtcccttgagttcaatgagattatagtttctggattaagacagtacaaaaaatactccaattggtgtacattaatttaacactcactaatggcttaggtactttcacatagttgtcttaaagtgaatattctccacactttacagatgaaaaaatatgaattgcccatatggtgaccatatgttttcttttttgccctggccagttccaagttacatctgctttcttagtataattttcaacagcatcctgcttcattctccaacgttacccagttttgattacaaattttatggtcactccaattgtgacagtaatagatggcagacatgagatt

SEQ ID NO: 177633 - DNA, 500 bp, Homo sapiens
gtagtaaagacactaatgtctattacattttaatgagaaaaaatgcatgttgtaatcttcagggtaatcatgaaacaacatgaaaacagtttattaccagcgaggcaacaaaataaataatagaattaaaaacacttgattaatccaaaagaatgcaaagaaaaagagacaaatataaacaacctagtccaaaagaaagtagatataaacccacaaatatcagtaattacattaaataaaaatgactaacgactccaaataaaagacaaatattgtcagctaaatatgaaaataaaagccaaatatatgctgtgtacyagtgacatacttaaatataggaaaatataaaacttgacattaacagggtggacaaaatacatcatgcatacgactaacccaaaggaagctaatctaaccatactaaatatcggagaatttaaggtaagaaaatagagctggaaggagacaaagaggcaaatttaataatgataaaaagacaa

SEQ ID NO: 177634 - DNA, 539 bp, Homo sapiens
gacctctaagttaagggaaacaggtatgattatcttgtgtctattcctcaagtattctccaggaaggttagaacaggcatatacaataacttgtgaatgaagcctgttctgctccctttatatcctgaaatcagtctcacacactgggaatgcaggcttccttcttcaagattattaccatagtagagagagcatgccaagggtactaaaaatgccacaaagttttatgttatgaaattgcccttttcttgattcactgttttcttagttgttctaaatctttgactgataaattctactttttaaattttttaaaaatatttttctgtgggggaacgagagcttggacctgccaataatgacattttgctgtcataatgcccctactgtaatcctttttgaggctcactttcccatacttgtttaataaatttggcttcaaattagtctgtgagttcttttaacatgrccctaatagttctttgtagcatactcactattttatatgataatatgtgcctgacctggaaacagccaat

SEQ ID NO: 177635 - DNA, 510 bp, Homo sapiens
ataccttggttgccagtgaaggagtcaaatgcttattatggtttttttctatgggagcctccaaccgcccctgcttccagttgccatcttgccctgcccccctgtgatttttatttattttcaacatagcttaattctgctttaattctccagaattcttgccagatatcaaattcaggaggtataagtaccactctcctccccctcaacacacaaagtggatatacattttgcgttaaaactgtgcacattggagaagaaatagcctaaaagcattgcaraattcttgataggggggtggatactgctgtttattcacttggtcctgacccaaaatgataggcagtgcttcaattggaggagacatttaagacttatagtgggctctgtggtattttatttaaatattattattatatagagtttgaaggggcctaatctccacattgtttatactcaaagcaaggagacacaaatctatgcttgattttacaaagtgatagagaatca

SEQ ID NO: 177636 - DNA, 533 bp, Homo sapiens
tcaaggcctgccgttcagatttttttgtctcacggggtgttcttttgatgtggtgcactcccacttttcctaggagtgggagtccctgggggccagactattgtgaatgttgtcgctcctttgggtctagctgcccagtgaagtttccatacttcagggtggtgctgggaaatgtctgcagtggatctggtgatgtgatctgtcctcacgtcttccagtaatgggtggcagcaccagctctaatgagaacggcaggggagtaatgtagactctgagattacttggctgttgagacccttagtatgttggctttcatgatggccagttacagtagtaataaactggtcatgtggacagactcaggagctcctggttagccagagtgatgcaggaagtggtgatagctgagattgtgcagccattttctccttcctgggagcagtattmttctaccaagagatgttgtaatgacctgtgttggttggcctccagccaggaggtggtacttgcaaaacagcactagctgcagtagt

SEQ ID NO: 177637 - DNA, 468 bp, Homo sapiens
tgtaaacgttctctagagctgacctacagcacattgccagatttttttttctttaaacctcagcygagttgacttaaagaaaaatctcgactatgtcaacttactgcttaaataaatttaataagccacagtgttgacaatttggaagttgaatgtgcattagttaatttgtctgtactgaagaatattgacttcatttctaaagctggctgctccttccaggaggtaaatagattgcaaaatagacttttaaaaaatttaaccatcgtaaaatagcagtttccataggtgagcaaacaagttaatatctagtcagcaattatttgcaagactacaattaaattggacagtaactgtataaccctcagtactcagaaaaaaaatagacaaggtcctgaaagggtatatgacacataattgatcatttcagccagttcagaaactctaattactgcccacagatagaag

SEQ ID NO: 177638 - DNA, 582 bp, Homo sapiens
tccttccttccttcttcctccagtcatatccctaaaactaaacatgattgggttctgcttcctgtataaaagctttggggcttcccccattattccttgggataataatctagaacaatttcacagctacctctccatgacacaaaggcccttttgactggctgttccatgaagcctgtttctttctctccgctctctcagtttgctttcacgcttcctgcgacttcagtgtccctctccctgagccctttccttggccacttctaaattcccattcaattcttcacartctctctcaacactttggacgtagcaacttcttcttttgagcgcccacagcaccttctataccctgccaatagatttactacattgtattaaaatctatttttggcttatcacatccttgaaatgtgagctcccccaaaacaatgcttgttttatttatctttgtatccccagtgccttgctcagtgcctgggatgatcctgggcctgatggatgtttgttaataaaggtaggaagaggtagagcttggcttcattacttcgcttctttcaggtgtttatcctgaatgttcct

SEQ ID NO: 177639 - DNA, 575 bp, Homo sapiens
ctggtgcctcctccctctctcttttgctcactctctccatgtgacacaccatctccccttcaccttctgccatgatcgtcatcttcctgaggcctcaccagaggcaggtgctggtaccatgctgcttgtacagccaaataaacctcttttctttataaattacccaccctcaggtatttctttatagcaatgcaaatgaactaacaaaattgccaacttttaagaatggcagatggctgggtgcgggggatggggggtggtccaaattcaaatggttcagaattctattcaaacacgataatctgccaagtttttaaaatcctacrattagttctccaatttccccaaatctgcacctcattttggtggcattgagctggtctcagtactgagtttaattattaaggaagtttcctgaggcatcttttcccctctgattcaaatcccatctctctgtgccccccattaaagaggtactgagatgcaaacaatcatggtgaaatatgggttttaataggtatttcagctgcgtgggaaatgtgcagatttctgagaatacagaatccaaacctctg

SEQ ID NO: 177640 - DNA, 433 bp, Homo sapiens
acaatcactataactaattgtatgagatgtccattttttccargatcagtttgaagtgattcaaatatcaggacttaaaatttaacccttgttacatatattatcttttattaatgaaagcaaatgtttactggtttttttttttttttttttgctctctctactccaagtctggaggaagtggactccacctgatatggtgcatattttccaagggtgcatattttcacgaaggaagaatggtttcctaaggccggtgtttctcaaattgaggtccaagcacttcctgcctaaaatcaaatatgagtccagttaacaatacagatccttggagtctactgaaaacttaatgaactagaaacactaggattgtgactcaacaatctaaatatacaacagactccccatataattcttatgcatgctaatgttt

SEQ ID NO: 177641 - DNA, 433 bp, Homo sapiens
acaatcactataactaattgtatgagatgtccattttttccaggatcagtttgaagtgattcaaatatcaggacttaaaatttaacccttgttacatatattatcttttattaatgaaagcaaatgtttactggtttttttttttttttttttgctstctctactccaagtctggaggaagtggactccacctgatatggtgcatattttccaagggtgcatattttcacgaaggaagaatggtttcctaaggccggtgtttctcaaattgaggtccaagcacttcctgcctaaaatcaaatatgagtccagttaacaatacagatccttggagtctactgaaaacttaatgaactagaaacactaggattgtgactcaacaatctaaatatacaacagactccccatataattcttatgcatgctaatgttt

SEQ ID NO: 177642 - DNA, 433 bp, Homo sapiens
acaatcactataactaattgtatgagatgtccattttttccaggatcagtttgaagtgattcaaatatcaggacttaaaatttaacccttgttacatatattatcttttattaatgaaagcaaatgtttactggtttttttttttttttttttgctctctctactccaagtctggaggaagtggactccacctgatatggtgcatattttccaagggtgcatattttcacgaaggaagaatggtttcctaaggccggtgtttctcaaattgaggtccaagcacttcctgcctaaaatcaaatatgagtccagttaamaatacagatccttggagtctactgaaaacttaatgaactagaaacactaggattgtgactcaacaatctaaatatacaacagactccccatataattcttatgcatgctaatgttt

SEQ ID NO: 177643 - DNA, 587 bp, Homo sapiens
gattctacatccacaaaacaagagtttcaaccacagaagggcacaaggagacaaactcagactccaaggttgtcaagtacaaataatacaaagcagccgggcacagtagagcacacttcccacagtggagcactttgggagggcaaggcaggtagatcattcgagcccaggaattcaagactagcytgggtaacatggtgaaaacccatctccaaaaaaattttaaaaattagctgggcatggtggcacacacctatagtcccagctacccaggaggctgaggcaggaggattgcttgagcctaggaggttgaggctgcagtgagccttgatcacaccactgcactccagcctgggtgacaaaaagagaccctgtccccaaacaaacagtacaaagcactgagccagaagacctgggattgtgaaccacccaagttttttaaacaatctgggccttgttttcctcatagcaaacctgggaaaaatattataattcccaatagaattatcttgaagtgaagttcacatgtaaaaaacactacgcaaactgtgtgatatatacaatggcacccatcattattaacaaac

SEQ ID NO: 177644 - DNA, 587 bp, Homo sapiens
gattctacatccacaaaacaagagtttcaaccacagaagggcacaaggagacaaactcagactccaaggttgtcaagtacaaataatacaaagcagccgggcacagtagagcacacttcccacagtggagcactttgggagggcaaggcaggtagatcattcgagcccaggaattcaagactagcttgggtaacatggtgaaaacccatctccaaaaaaattttaaaaattagctgggcatggtggcacacacctatagtcccagctacccaggaggctgaggcaggaggattgcttgagcctaggaggttgaggctgcartgagccttgatcacaccactgcactccagcctgggtgacaaaaagagaccctgtccccaaacaaacagtacaaagcactgagccagaagacctgggattgtgaaccacccaagttttttaaacaatctgggccttgttttcctcatagcaaacctgggaaaaatattataattcccaatagaattatcttgaagtgaagttcacatgtaaaaaacactacgcaaactgtgtgatatatacaatggcacccatcattattaacaaac

SEQ ID NO: 177645 - DNA, 419 bp, Homo sapiens
atagcccccttttggcaccagtttttggtcttagtctattttctgttactggaacagaataccatagactggataatttataaagaaaaagggtattcatctcctgattagggaggctgggtagtccaagagcatggcacctgcatctggtaaaagcctttttgctgtgtcttaatactgcagagggtatcacatggcaagagggcaagagcaagagagccagggagagctcacttttataacaaagccactcctgagatgacaaactcacacccatggtagtgacattaatttatggatgggagcagagccctcrttaacctattaatctattcttgagggcagagccaacattaatttattcatgaaggaagagggatcaaattttcaacacatgaacttttggggacacattcaaa

SEQ ID NO: 177646 - DNA, 419 bp, Homo sapiens
atagcccccttttggcaccagtttttggtcttagtctattttctgttactggaacagaataccatagactggataatttataaagaaaaagggtattcatctcctgattagggaggctgggtagtccaagagcatggcacctgcatctggtaaaagcctttttgctgtgtcttaatactgcagagggtatcacatggcaagagggcaagagcaagagagccagggagagctcacttttataacaaagccactcctgagatgacaaactcacacccatggtagtgacattaatttatggatgggagcagagccctcgttaayctattaatctattcttgagggcagagccaacattaatttattcatgaaggaagagggatcaaattttcaacacatgaacttttggggacacattcaaa

SEQ ID NO: 177647 - DNA, 503 bp, Homo sapiens
taaaagcccatgaagaatggaatcccgacaaaaatctcttgagtaaacttagaakaagatccatccccagtcaagcctgaagatgagactgcagcccagccagcaccttgattaggccttgttagggaccagagaactcagctaagccatgcctagattcttgatgcacagaaactgtgagataatgactatgggttagtttaagtcactaatttggagagagtaatttattaaacagtaataaataactagtacagcaatgttcctacacatatacatctatagaacttaggaaatccacaataaaataaccaactcaacaatggaagttacagttttgaagaatgaccatccatcaagatggggcaagcaaccagaagaaaatttttacaattatccatttttgaaacttgaaatttatgtacttccttgtttgatgatgcattagcatgaagtgcttaccataataaaaggttttccatcatgatgtagaatatttttta

SEQ ID NO: 177648 - DNA, 651 bp, Homo sapiens
ctgagtcccagagaaacaaagtgacttggttcaaggccacagaattcataagtgaaagaggctggatttgaacctggatctcccaatgtctcaagccacactgggttgcctcttgaaattgcttgttcagaggactaaggagagacactaaagcatcaggacaccatccaagaaaggagaggaagggagggaagcaaaagtcagtaagggtccctgaacaagaatgtggtggcagcatctttatcaggagtatctgggtctgtgggcctagatccccatctaggggacctcaaactctactcagcaaacaacagttctggggagaaacattgtgtcccagggaggaacggaaaagggaattcrctcactccttctgtcatttattcattcagcaaatattattaaatgctgattctgtgccacgcactgcatcaggcacttgaatataacaatggataagaagagaggtgaagttccccactctaacaagtctacattctaacacaagaaacaggtagaaatggagacaggcagatttttttagaagaatgatttcaaacacagttgacccttaaacaaaatgggtttgaactgcacaagtccacttataagcagattttctttcacctctgccacccaagagacagacac

SEQ ID NO: 177649 - DNA, 651 bp, Homo sapiens
ctgagtcccagagaaacaaagtgacttggttcaaggccacagaattcataagtgaaagaggctggatttgaacctggatctcccaatgtctcaagccacactgggttgcctcttgaaattgcttgttcagaggactaaggagagacactaaagcatcaggacaccatccaagaaaggagaggaagggagggaagcaaaagtcagtaagggtccctgaacaagaatgtggtggcagcatctttatcaggagtatctgggtctgtgggcctagatccccatctaggggacctcaaactctactcagcaaacaacagttctggggagaaacattgtgtcccagggaggaacggaaaagggaattcactcaytccttctgtcatttattcattcagcaaatattattaaatgctgattctgtgccacgcactgcatcaggcacttgaatataacaatggataagaagagaggtgaagttccccactctaacaagtctacattctaacacaagaaacaggtagaaatggagacaggcagatttttttagaagaatgatttcaaacacagttgacccttaaacaaaatgggtttgaactgcacaagtccacttataagcagattttctttcacctctgccacccaagagacagacac

SEQ ID NO: 177650 - DNA, 435 bp, Homo sapiens
tcaacctgtgctatgtgtcagtatctgctgtaagcacttcgcttacattaaagcttttactcttcaaaaccacaatttgagttaggcacycttttccttattttgcaaatgagaaaattgaggaacacagattcagcacccaagatcacacagctcatgaatggcatagctggaatctgaacccaggcattttgactccagaatcccctctctgacacagcatgctaggctgatgctctttgatgttcaaagagcacccaagggcaggacatcacagggagacataaagaccaagaaagtgagtggagtcagcatttggggttcaccctgaactcaagaacaagcaaagttattcttcactttttttctgtcctatgtatttattcaagaagtatttattgagcattcgttaagtaccagactccaggtcagatg

SEQ ID NO: 177651 - DNA, 435 bp, Homo sapiens
tcaacctgtgctatgtgtcagtatctgctgtaagcacttcgcttacattaaagcttttactcttcaaaaccacaatttgagttaggcactcttttccttattttgcaaatgagaaaattgaggaacacagattcagcacccaagatcacacagctcatgaatggcatagctggaatctgaacccaggcattttgactccagaatcccctctctgacacagcatgctaggctgatgctctytgatgttcaaagagcacccaagggcaggacatcacagggagacataaagaccaagaaagtgagtggagtcagcatttggggttcaccctgaactcaagaacaagcaaagttattcttcactttttttctgtcctatgtatttattcaagaagtatttattgagcattcgttaagtaccagactccaggtcagatg

SEQ ID NO: 177652 - DNA, 542 bp, Homo sapiens
ccccttgtgatccccactctgcccgccagaaaacaaccccccccttgactgtaattttcctttacctacccaaatcctttaaaatggccccacccctatctcccttcgctgactctcttttcggactcagcccacctgcactcaggtgaaataaacagccatgttgctcacacaaagcctgtttggtggtctcttcacacggacgcacatgaaactctctttgcgctttccctactccacacagyaaccagagtgatcctttgaaaccatatggcagcccctgtcactgctttgcacagaatcttccagtagcttcccattacaataagaggaaaagtcaaaatcattactagaccctggacaatcttctctcagctccccacgtctctcagatctcatctgctcatctgctcctccctctcctaatcattctgctctagcctcaccagcctcctaactacatttacaacattttttaacacaccaaatgtatgtgtgtgcaggacttttgcacttactgttttctttgctggaactctctc

SEQ ID NO: 177653 - DNA, 415 bp, Homo sapiens
aatttaatttttccttgaacttgtattcactatcatttcttggccttttggctaagatcaagtgaacctgcacccactggaaggcagacaatcagtttattttattgctcccctctgtctcactccagggatttgcagaagccccaaagagaataagggaagtggaaaaatctgattctctgttttggggttctagtggtttaattttataggtcaacttggctgggccactgsatacagatatttggtcaaacattagtttggatgccactgagaaggcatttttaaaatgagattaacatttaaattagtagcctgaataaagcagattatgctccatcatgggagcaaatctcatccaatcagttgaagccctaaacagaaaaccaactgacctccccataggaagagagaa

SEQ ID NO: 177654 - DNA, 572 bp, Homo sapiens
agatcttatgtatagcaaaatgtgaaaaaagtcccattctcagggggtggaaaataaaataaaaartgtaaaagaaaatttgagtataagaagatatgctgatgttccaagatgtctttttgagactgctaggatgaaacaatattatttctgatattcagaaggagcgggggagaaattaaaagagttaactaaaaaaaaaaaaaaaaagaaatgatgaagaaggagcatcagcctgttattatcacccactcatttatggaattaataaatagtgcctgagtactaaaagtatgaaagagttagcatttattgatagttgaacatgggtcactcactgtcttaagtacatgcatggattgaacaatcacattgtaggtatgattataatcccaatatgatgtatgagggaattgaagtaagaagttaatcaataaacccaaggtcatacacccagtgtaggatagaatcaaaactatctcaggcagtctaattccagaactgtacccttaaccaccatgaattgctaagtggaaaacaaagataaatcaaagttagttaatcactttttt

SEQ ID NO: 177655 - DNA, 467 bp, Homo sapiens
gaatcaggtgcaggttatatctagtaggtatttctgattttctgttttgaagttagtattatatggtagtggtcaagagcacagattcagaatccagccaagttcaaatttaacattgccattcattaatagtgtattcttcgatgattatgtagataatttacttaacctctgccttgctttcctaatctgtaaaatggagaaaataatgatgcaccaacctaatgggaatttgtaagaatgaggttactatttgtaaagcaattacaagaaaatataccatgtgtgttagwtgttgttcataataatcactttaaaaaaaaatttcatcctttacctcagctacgaattttggatgttgtttacaaaagaaaataatgggttgaattgtctctttgtgcaggtttcagctttttgatgggatgatattaccatatccctctaaattgttttataaggttttatcc

SEQ ID NO: 177656 - DNA, 435 bp, Homo sapiens
ctgcttataaatcaaaaaaatagcagaaatttcaaggacaaaacacatgctctactcattttctgaggccttcttgggtgggtcaggttttttccttgattctattaagtcagtaagccagaattctagtgcttatctttttctattccttgttatgtccataatcacaaggtctaataaatacacataatgaaatgatatggtatgaactcctaagattaaattgcaaaatctatgaataagaaatcaagtaggatcttacaaacttacttaataaatagaccttaacatggaaaatgatacataaacaacaactgagcttgttcagtggttatgaataaccataagaaygtttattctgttatattacaaatttacttaacttttgcaatcataagaagtaggctttcttatgcctcccttttagccaataaa

SEQ ID NO: 177657 - DNA, 522 bp, Homo sapiens
gaattctctaggaatatctgtatttgataaaaaattttttacacatctattcttttgttaatgttacacaaagaaatgagtgctttctaaagtaataccatccagattttacctcctatctttcaggcaagtgccatggtatacaactttcataaactacattgctcaatgacagcatcaatacctccaatttgggcatcctccagggaaatggtcataatcgtaatcactatcagttgagtactcactgtatctcaggtactgtgataagccctttgcatacracaacatccacattattatgttcattttgctattattattttagcagagacgaaatctcactatgttgcccaggctggtcttgaactcctggcctcaagcaatccttccaccttggcctaccaaagtgctgggattataggcatgagccatcaattccagtctatcatgtcaattttgaagatgagtgaagagatcttagaagacttgagctctcaatgttgtacaaccagtaaatgg

SEQ ID NO: 177658 - DNA, 524 bp, Homo sapiens
ataaaaaattttttacacatctattcttttgttaatgttacacaaagaaatgagtgctttctaaagtaataccatccagattttacctcctatctttcaggcaagtgccatggtatacaactttcataaactacattgctcaatgacagcatcaatacctccaatttgggcatcctccagggaaatggtcataatcgtaatcactatcagttgagtactcactgtatctcaggtactgtgataagccctttgcatacgacaacatccacattattatgttcattttgctattattattttagcagagacraaatctcactatgttgcccaggctggtcttgaactcctggcctcaagcaatccttccaccttggcctaccaaagtgctgggattataggcatgagccatcaattccagtctatcatgtcaattttgaagatgagtgaagagatcttagaagacttgagctctcaatgttgtacaaccagtaaatggtggagctgaagcttcctaatttgaattc

SEQ ID NO: 177659 - DNA, 445 bp, Homo sapiens
ctccagtgcccaacgaattaactttgcagtttaaaccagaactaaagtctaataagcattgcagtaagccacatcaaaatcattgcccggktcattctccaggcagtctatactcaggcaaattaaataacttctctttaaaaggttttctctgcatttaaacacctttggctatattaaacaaacactgttccacaaaaatattacaataaaatatatataaagtgtgtcatccctgtttccgtaaaattgtttatttgtttgcttatttattctttatttttagagatggggtcacactctgtctcctagactggagtgcagtggtaaaatcttagccattgcaatctcaaatttctggcctcaagccatcctcccacctcagcatcctaagtagaatctacaggcatgcaccgccatgctcaactacttttttaaatttttt

SEQ ID NO: 177660 - DNA, 445 bp, Homo sapiens
ctccagtgcccaacgaattaactttgcagtttaaaccagaactaaagtctaataagcattgcagtaagccacatcaaaatcattgcccgggtcattctccaggcagtctatactcaggcaaattaaataacttctctttaaaaggttttctctgcatttaaacacctttggctatattaaacaaacactgttccacaaaaatattacaataaaatatatataaagtgtgtcatccctgtttccgtaaaattgtttatttgtttgcttatttattctttatttttagagatggggtcacactctgtctcctagactggagtgcagtggtaaaatcttagccattgcaatctcaaatttctggcctcaagccatcctcccacctcagcatcctaagtagaatctacaggcatgcaccgscatgctcaactacttttttaaatttttt

SEQ ID NO: 177661 - DNA, 528 bp, Homo sapiens
aatctttcttattattcatgtgaccttctcacacattcataaaaatgaatcaagaggaaattatcactcaaaagtagtcagaacatataatgagayaagaaggtcaaaaatcttctgacaatttgaggggaaaaaagcaaatgcttttaaaagtcaatttcataaaattagaagctacatgtgatctttagaaaaagggattgttggctgggcgcggtggctcatgtctgtaatcccagcaatttgggaggctgaggcaggcgaatcatctgagatcaggagtttaagaccagcctggccagcatgtgaaacctcgtctctactaaaaatacaaaaattagccaggtgtggaggtgcatgcctgtaatcccagctactcaggaggctgaggcaggagaatcacttgaatccaggaggcggaggttgcagggagccaaaatcttgccactgcactccagcctgtgtgacagagcaagactccatctcaaaaaaaaaagaaaagaagaaagaaaacggattgtcctcaaa

SEQ ID NO: 177662 - DNA, 528 bp, Homo sapiens
aatctttcttattattcatgtgaccttctcacacattcataaaaatgaatcaagaggaaattatcactcaaaagtagtcagaacatataatgagataagaaggtcaaaaatcttctgacaatttgaggggaaaaaagcaaatrcttttaaaagtcaatttcataaaattagaagctacatgtgatctttagaaaaagggattgttggctgggcgcggtggctcatgtctgtaatcccagcaatttgggaggctgaggcaggcgaatcatctgagatcaggagtttaagaccagcctggccagcatgtgaaacctcgtctctactaaaaatacaaaaattagccaggtgtggaggtgcatgcctgtaatcccagctactcaggaggctgaggcaggagaatcacttgaatccaggaggcggaggttgcagggagccaaaatcttgccactgcactccagcctgtgtgacagagcaagactccatctcaaaaaaaaaagaaaagaagaaagaaaacggattgtcctcaaa

SEQ ID NO: 177663 - DNA, 528 bp, Homo sapiens
aatctttcttattattcatgtgaccttctcacacattcataaaaatgaatcaagaggaaattatcactcaaaagtagtcagaacatataatgagataagaaggtcaaaaatcttctgacaatttgaggggaaaaaagcaaatgcttttaaaagtcaatttcataaaattagaagctacatgtgatctttagaaaaagggattgttggctgggcgcggtggctcatgtctgtaatcccagcaatttgggaggctgaggcaggcgaatcatctgagatcaggagtttaagaccagcctggccagcatgtgaaacctcgtctctactaaaaatacaaaaattagccaggtgtggaggtgcatgcctgtaatcccagctactcaggaggctgaggcaggagaatcacttgaatccaggaggcggaggwtgcagggagccaaaatcttgccactgcactccagcctgtgtgacagagcaagactccatctcaaaaaaaaaagaaaagaagaaagaaaacggattgtcctcaaa

SEQ ID NO: 177664 - DNA, 543 bp, Homo sapiens
ctgcaggctattttcagaagctaagtactctgcccaaactattaaccacttcatttagcccaaagtggaaagggggcttttatgagtacaaatatatagaggtagcagtcaaattcataatttrgtaatgcatcatgaatccttaactttcccatttaaatattctactttgagggcaaatataggttctctttcaaaagtatgaccataaaatattatctccaggaaataaaaaattattctaatgtggaatagcaccaaggtattacttctcagtcaacttttagctatatttttccttagggcaatatttaatgttgtcattataaaatactttgacagaacataatttatgtaaacctaaatgctgcaagggattttttgaaaagatatactcaactttattgtggaaaaatcaaactggcttttttaaacataggaattatgtataatagaaggaaatatgactaatatctagaaaaaacaatacatttttggttgaaacaacatgattcctgccgtattatattcagaacacatcca

SEQ ID NO: 177665 - DNA, 591 bp, Homo sapiens
ctggtagtatttgtaggttacacaaggatcagctgtggcttatatgaagtcggttgggtttattctgatggtttacgagcttatactctgccagagcagtcaataacaagtaatataaayttgctacagcaagctggagagaaaacaaaaagcaaagttgttattgtctacatttcaagagaaaacctgaagaaagattttgaaacgaacaatgagaaaatgtgaaagataaagaaatcaacatgaggagggaagctcactaaaagggagacacaaatagctaggattcaagtaaatgcaaattaaatcataaatgatatattgtctttgcccatcaatatgaaaatatttttaaatggtaaattaaaatattaagaatggtatagtacaggggttctcaatgattgttccaggaacctttggggatccccaagaacttttcaggaagactatatggtcaaagtattttcacaattatataatgacactatctgccctctcactctcatcttttcccaaaatgttttgtagagtttttcagaggttacctaatgtgtgatgggtcatcactccgataactaacagaacgtg

SEQ ID NO: 177666 - DNA, 411 bp, Homo sapiens
gaattcctctatgtactgtctttgagtcttatggagacgataatcttggtgaraaaagggaccagccatattcactgcaggatctcccgtggatgcatagcatggtgccagaggcatggtaccccaactcagcacacactcactaataattcatcgctaaagttcactttggcctatgtgaaatttattattgttgatgtccaacattacactaaaattataagaatttatgtacaatctctgtacaggatctgtagggagcacacagtttttcattatgaaagaggcttcgttgctcatctcagctcctgtgctgttgaacaaaaggtgttagacacacacccattccctacttggggtattcacaaatgtcagacctcaaagtctcttctgagtaaattactgcctttg

SEQ ID NO: 177667 - DNA, 541 bp, Homo sapiens
caggcagcggcggcagcctaaaggaacgggagaggccaggcggtgccccgccaagcctgggatcgccgagggtagttggaccacagaaaatggggaaggagggtaggttgtttagaagcctctggttgctaacggaaaccgaggcacgtggactgcaattatgcattttcattggtcctcaggatcacgcgacaggaagtattgcgtaaccggttgactgccacatgcgcattggcttccagggccggaagtcccacctttttgtgccagttcacttttgggagctgactgcagttgcagaaggtagcgggagggttgggctgcctggagttgcgtgtggccaccaacgcgcttcgcgcctcgtggcgtccgcttatggattgttgggaagttcttgtccagaacttcctgtggcataggtgaccccaaggatgaatggacatcccagacctttcaatggtctcatagggcgcggcccagacatttttttttttcaggagttcctacctgagcaycagggtggctgagacaggccaacaac

SEQ ID NO: 177668 - DNA, 586 bp, Homo sapiens
gggtctaaaatttttaaggactttccttcctccatctccaagaatgctgaaaccaagggggatgacatgtgactcctatgatctcaggttctccttgattgggactggggctgaaggttgaagaggtgagcacggccaacaaagctgttgatggtaggtggcacactgggtgcccaagctcagaaggctcttctgactactgggcaaagagtgtagatcagagcagcagtgaaaacaagtgctggcaccaccaggcacctcacagaaatgagatcaggctctgcctcaccttggggyttgacttttgtataggtagatgttcagattgctttgattaatccagaataactagcaccagggactatgaatgggcaaaactgaattataagaggctgataattccagtggtccatggaatgcttgaaaaatgtgcaaaacagcgtttaagactgtaatgaatctaagcagcatttctgaagtggactctttggtggctttgcattttaaaaatgaaattttccaatgtctgccacacaaacgtatgtaaatgtatatacccacacacatacacacatatgtcatatat

SEQ ID NO: 177669 - DNA, 551 bp, Homo sapiens
ctggttttggctgtgccataaacggtaaaaatatacttcccaatgggtgctttcatatcagacagtttgaaagagctgtgagatatcagtcaagccagtgggacttctctcgtgctctttttattgacctggaatgccaggggattggaacccrccagggttttctgaagcaccttctctggagccctgatttcatgggctgttagtacatgttccgtgaaaagagatgctgtgtcgggttaattgggatatcctggaacttcttagggactttagtttttccctatagttcttcaaggggaatatagagtatgcaggtgtgctgtgtttaaccaatttatttgaccgggaaaatttctatttatacagcagcctgtggggctagaagggttcctgagagcatactttgggaaacagtaagataatttttaaggtttcttccaactttcaagtgtatggttctgtgaatatactaaaaaccacttaacattatactttaaaagaatgaattttctggtttgtgaattatatctcagtaaatctcattataa

SEQ ID NO: 177670 - DNA, 649 bp, Homo sapiens
gttgaatatgtaaatttctttgggcagtatggccattttaatgatattgattcttccaatccaggaatatgacaaggaatatgacgggtatttccatttatttgtgtcatctccgattagtttcagcagtgttttgtagttccccttgtagagatcgttgacctccttggttagctgtattcctagggatttaaatttctttgtagctgttgtaaatgggattgtttttgatttgactctcggcctgtatatattggtgtatrgaaatgctactgattcttatacattgattttatatcctgaaaccttgctaaaatcatttatcagttctagtagccttgtggcagtctttagcattttctaagtacagaatcatattatcagcaaagagagatggtttcacttcttttactacttggatgccttttctttctttctcttgcctgattgctctgggtaggacttccagtactctgttgaataggagtggtgacagtgggcttccttgccttattccagttctcaaagggaatggttctagcttttgcccattcagaatgatgttggctgtgggtttttcatagatggttcttattatctttagatatattctttggatgcctagtctgttgaggatttttcatcacga

SEQ ID NO: 177671 - DNA, 615 bp, Homo sapiens
cttttgtttcagaggtaggattgtcagcagtggagtgtaaataaggcaatccgtagagcatctcataaggagaaagaccartatctttccacagggcagttcagattctcagcagggcaataggaaggctcttggtccatggtaaccaagtcaccagtaccaattttgttaagtggttctttaaagtctgatttattctttctactctccctgatgaaggtgggtgccagggagtatggtattcccatctaatgtctaatgtttgggacagctttttaatgatgtatgcagtgaaatgagttccattgcctgagtcaatattttctattagttcaaacctgggcactatattttcaatcagggctttggctacattgttggctgttgcatttgaaaaggggatagctttgacccagtgagtgaggtgatctactatcactagtaagtattttagacgacctattggaggcatttctgtgtaatcaacttggatactttggaatggccttaagcctggactctttcccccaaggggtaatcttttatagtttattaggttcttttttttcatactgagtaactgtctgtacctgtttggccaggatataaattcct

SEQ ID NO: 177672 - DNA, 615 bp, Homo sapiens
cttttgtttcagaggtaggattgtcagcagtggagtgtaaataaggcaatccgtagagcatctcataaggagaaagaccaatatctttccacagggcagttcagattctcagcagggcaataggaaggctcttggtccatggtaaccaagtcaccagtaccaattttgttaagtggttctttaaagtctgatttattctttctactctccctgatgaaggtgggtgccagggagtatggtattcccatctaatgtctaatgtttgggacagctttttaatgatgtatgcagtgaaatgagttccattgcctgagtcaatattttctattagttcaaacctgggcactatattttcaatcrgggctttggctacattgttggctgttgcatttgaaaaggggatagctttgacccagtgagtgaggtgatctactatcactagtaagtattttagacgacctattggaggcatttctgtgtaatcaacttggatactttggaatggccttaagcctggactctttcccccaaggggtaatcttttatagtttattaggttcttttttttcatactgagtaactgtctgtacctgtttggccaggatataaattcct

SEQ ID NO: 177673 - DNA, 345 bp, Homo sapiens
atgacaaggatgcccactgtcaccactgttattcaacagagtaatggtagtctgagctagagcaatcaggcaagagaaagacataaaaggcatgcaaattggaaatgaagaagtaaaattacctatgcttgtagatgatataatcttatatttsgaaaaacctaaagattccagaggaaatctattagaactgttaaacacatttagtaaagttgcaggatacaaagtcaacctacaaaaatcagtagcatttgtatatgccaacagtgaacaacgtgaaaaagacatttaaaaagcaatcccttttacaatagccacacataaaataaaatacctaggaattaa

SEQ ID NO: 177674 - DNA, 527 bp, Homo sapiens
agttgacctgctctgtgcacggcggtcagtgtgaaattcctgattagaagtgagagtaggctcattgtctagaatattgtttctcccctctcctctttgcctgggaaacacctaaacatttttcaggtctcagtttacacatttcttgatggtgtcattctagtcaatctttytgattttccaggaaatatgagggctgctcatcaaacccacccagagtgccaactcctctctcccagcgctgctcaccaccctgacatcaggcgtgtttgtaaaacgtgctttgacggcattaaaccttcataagcacagggccctgcctgtcttgttcatcacggattacctagttatcagttcatttttttaaatgattctttcttaattcaataaaatgttgcacttccaacttaaaaacaaacatttgttttacaccaactacttgccagacagcacactaggaattttctcaagtgttctctcattgtatctgtacagccgtcagtgtttatcagcatttggtgggagag

SEQ ID NO: 177675 - DNA, 426 bp, Homo sapiens
gatgggggatgtttccaaagccatctttggaaaatacaatctgtcacatgtcactcactcaagattaggcaaagaaacagtctcctaaggtacatatacctagatatgarggtcatattatatgtatcatttaggaacaagtgcatttattggtaatggaaatgtgggtggtagaatattatagaattccatctttacagaatgtttactctgtttctttgcatattttcttggcatttttgagaaaagcaaactcatatcacatgcacattttaacatttatttcatttgtcctacacactttcttcatgagcgagacttcaataatcagtgcgtccaatgtattgcatagccttggaatgtttgaatgtactcatgagccaattttagatttatatatcctctgacttttcttgagttttaaaa

SEQ ID NO: 177676 - DNA, 513 bp, Homo sapiens
tcttcttttgaaaactgtctgttcatgtccttcacccactttttaataggcttgttttcttcttgtaaatttgtttaaactccttatagatactggatattagatctttgtcagatgcatagtttgcaaacatcttctcccattctgtagattgtctgtgtactctgttgatagtttccttttctgtgcagaaactctttagtttcactagatcccatttgtcaatctctgcttttgttgcaattgcttttgggagtcttcatcatgaaaattttgcaatttcttatgtccagaatggtattgtgtagattgttttccagggtttttatagtttttsgttttacatttaagtccttaatccatcttaagttgatttttgtctatggtgcaaagacattttgtctacggtgcaaggactttttgtctacggtgaaaagacttttaagttgatttttgtctgtggtgcaaagaaggagcccagtttcagtcttctgcagtatggctagccagttg

SEQ ID NO: 177677 - DNA, 514 bp, Homo sapiens
gtggacagttagtgctataaatttccctcttgacactgccttagctgtgtcccagagattctggtatgttgtatttttgttgttattagtttcaaagaacttcttgatttccaccttaatttcattatttacccaaatgtcattcaggagtagttgtctaacttccatgtaattgtatgcttttgagcaattttcttagtcttaaattctatctttattgtgctgtggtcctagaaagtggttggtgtgatttttgttgttttgcatttgctgaggattgttttatgtccaattgtgtagtcagttttagagtatgtgccatgtggcaatgaggagaatgtatattctgctgttttggggtggtgagttctgtagatgtctatcaggtccatttagtccagtgttgaaktcaggtcttcaacatttttgttaattttctgactcgatcatctatctaataccgtcagcagggtgttgaagtctcccactattattgtgtgggagtctaagtctc

SEQ ID NO: 177678 - DNA, 525 bp, Homo sapiens
gtggacagttagtgctataaatttccctcttgacactgccttagctgtgtcccagagattctggtatgttgtatttttgttgttattagtttcaaagaacttcttgatttccaccttaatttcattatttacccaaatgtcattcaggagtagttgtctaacttccatgtaattgtatgcttttgagcaattttcttagtcttaaattctatctttattgtgctgtggtcctagaaagtggttggtgtgatttttgttgttttgcatttgctgaggattgttttatgtccaattgtgtagtcagttttagagtatgtgccatgtggcaatgaggagaatgtatattctgctgttttggggtggtgagttctgtagatgtctatcaggtccatttagtccagtgttgaagtcaggtcttcaacatttttgttaattttctgactcgatcatctrtctaataccgtcagcagggtgttgaagtctcccactattattgtgtgggagtctaagtctctttgaagatct

SEQ ID NO: 177679 - DNA, 636 bp, Homo sapiens
ctttattaaccattgttttcatatacccaattttttttatttttgcatttttttgaagtagagctaaccaactctgaaatatattgtttgtataataaaatattgttttaaatataactaatattttccaggagatcatagattataattggatatgtgttacatcagagcatatcaaagaataatatgctttttaaaatatagaaatatacatatgcagatgcaccttgacttatgattgggttacatccctataagcccattgcaagttaaaaatatcataaatcaaaaatgtatttaataccccaataaacccaccagaagcaaaaaaaaawcataagttaaaccatcataagttggactatcatcaggaatacaggattgtctgtatttctttctaaatattagaatacatacaccatgtgtatatgtatcatatatacatattatatatatgtgtatatatatatataatgcaaagaaagaaaagcgtgcaggattttattcttcctttatctactaaaagcccatagacattccacttatatatcacaagatttcagcatttcagtattattctcaattcatttgagaaaacatcactgaaattctgtatgcagacaagcaaacatgcta

SEQ ID NO: 177680 - DNA, 636 bp, Homo sapiens
ctttattaaccattgttttcatatacccaattttttttatttttgcatttttttgaagtagagctaaccaactctgaaatatattgtttgtataataaaatattgttttaaatataactaatattttccaggagatcatagattataattggatatgtgttacatcagagcatatcaaagaataatatgctttttaaaatatagaaatatacatatgcagatgcaccttgacttatgattgggttacatccctataagcccattgcaagttaaaaatatcataaatcaaaaatgtatttaataccccaataaacccaccagaagcaaaaaaaaatcataagttaaaccatcataagttggactatcatcaggaatacaggattgtctgtatttmtttctaaatattagaatacatacaccatgtgtatatgtatcatatatacatattatatatatgtgtatatatatatataatgcaaagaaagaaaagcgtgcaggattttattcttcctttatctactaaaagcccatagacattccacttatatatcacaagatttcagcatttcagtattattctcaattcatttgagaaaacatcactgaaattctgtatgcagacaagcaaacatgcta

SEQ ID NO: 177681 - DNA, 636 bp, Homo sapiens
ctttattaaccattgttttcatatacccaattttttttatttttgcatttttttgaagtagagctaaccaactctgaaatatattgtttgtataataaaatattgttttaaatataactaatattttccaggagatcatagattataattggatatgtgttacatcagagcatatcaaagaataatatgctttttaaaatatagaaatatacatatgcagatgcaccttgacttatgattgggttacatccctataagcccattgcaagttaaaaatatcataaatcaaaaatgtatttaataccccaataaacccaccagaagcaaaaaaaaatcataagttaaaccatcataagttggactatcatcaggaatacaggattgtctgtatttctttctaaatattagaatacatacaccatgtgtatakgtatcatatatacatattatatatatgtgtatatatatatataatgcaaagaaagaaaagcgtgcaggattttattcttcctttatctactaaaagcccatagacattccacttatatatcacaagatttcagcatttcagtattattctcaattcatttgagaaaacatcactgaaattctgtatgcagacaagcaaacatgcta

SEQ ID NO: 177682 - DNA, 636 bp, Homo sapiens
ctttattaaccattgttttcatatacccaattttttttatttttgcatttttttgaagtagagctaaccaactctgaaatatattgtttgtataataaaatattgttttaaatataactaatattttccaggagatcatagattataattggatatgtgttacatcagagcatatcaaagaataatatgctttttaaaatatagaaatatacatatgcagatgcaccttgacttatgattgggttacatccctataagcccattgcaagttaaaaatatcataaatcaaaaatgtatttaataccccaataaacccaccagaagcaaaaaaaaatcataagttaaaccatcataagttggactatcatcaggaatacaggattgtctgtatttctttctaaatattagaatacatacaccatgtgtatatgtatcatatatacatattatatatatgtgtatatatatatataatgcaaagaaagaaaagcgtgcaggattttattcttyctttatctactaaaagcccatagacattccacttatatatcacaagatttcagcatttcagtattattctcaattcatttgagaaaacatcactgaaattctgtatgcagacaagcaaacatgcta

SEQ ID NO: 177683 - DNA, 559 bp, Homo sapiens
aatacaaaagaaagactgtgtattatagcaaaccaaatagacaacatgcccattataataatttctgctagcatttgccttagtacaatgttaattaatataaacaataatagcctagacactgtacaagtgttcaaagtgccttccatatcctcacagattcagtctctttggctaagctctgatgttgtacaggtttttatgtatttttttaactggcacataatatacatacttatttatgtggtacactataatattttaatacatttataaaatgtgtaataatcacatcgaggtttaatatattcatcacctcaaatatttatcatttgtgttrggaacattcaaaatcccctcttctagctatttgaaaatatgcaataaattattgttcattatagccaccccacagggctatagaacaccagaacttattcattctattcagctataattttgtatttgttagccaacctctccctattcccccacccttcccagcctctagtaatcactattctagtctctcctgctataagatcaactttttacattc

SEQ ID NO: 177684 - DNA, 593 bp, Homo sapiens
tgggaaatagaaaaatgttttttgttgattgtattttgcagtgttcagcttgttcaatcagccaacttaataaaaataaaaatttcttgtaaatctagtagaaacgttttcttggccaaaaaatattcacccatgcaagtggaactattgttaaacaatgtttaagtgatgttagtttgtttggtgcacycatatttgttcttggaccttcacttctgtttaggcattgaaggaactgtagtactttatgccaaagaactaagggactagaaagccagtctgtcatttacttatatccatcaaccaatatgtatattttgagaacctatcttgacaaagggtgctatcagaaagatattacctttaaagtatacatgtattatatgtaaaaaatacagtaatgtatgcattacatatgtaaattcatatatgtatatgaaatatatatgtacctatatgaatataaaaagaaatccagtaatatatgtgtatatatgtatgtgtgtactatttctgtttgcaggaaatagcatgatgtttcacattggtgcacaagagtagggaaagctgtaataacgtgcatatgtttttgt

SEQ ID NO: 177685 - DNA, 597 bp, Homo sapiens
caatttcactttcttcttttctttttacttgttggattcttttttaacggaaatcttccaccttgctgtcaacttcatgagagatatccaaggcaggtcacattttcagtttaaatttgtttggttacacattgcagcattgtttatcatctcatttcttcctgtaactcctgctgctaatactagaatctgttttcatttacacacagtttgtgccaggtacacagtgagcattaaactaatctgtattgatgataataaatggagaaaaaaattaaacattgggaaagaaaccaagttgctcctctgctatcttgacttgctgtcttcaaggatctgggattgatamttggaactttcactagctcggaactttcacccaattaacttaatttgggtcaatatatttctttagcaatagaatattgtaaaatggtgatgtagctatagatgatcttataaatgcaaaaaaaacctaatttctttcctgttaattgtttttcttagatgataggttttacagtaaattaaaatgaagatcaggcttgaagaatctctgagcaaacaattaggcctcacaggggagctaaaccttgc

SEQ ID NO: 177686 - DNA, 475 bp, Homo sapiens
aagtggtgtagtttgaacatagcccccaaatttcatgtgttggaaacataatgccaaatttatatgttaatggtaacaagaggtggggcctttgggaggtaattaggattaaatatgtcatcaggatgagactgctataatgggattgtagcttttaagaacaggaagagagacctgagctagcacacttactctgccttgccacgtggtgcttcctgccatgtcatgacacagcaggaagaccctcaccagatgctgtcaccatgttcttggacttctcagcctccagaattgtgagctaagtaaacctctattctttataaattacccagtctatggtatacttttattgcaacagaaaacaaactaaaacacaaagyattgtggaattcacaaacttgttcttcaaaaagagaaacaacagttggaaagattatgtaacatttataaatatttttattttatataacaaaga

SEQ ID NO: 177687 - DNA, 557 bp, Homo sapiens
aaacacttgattctgaataaaatgggggtaagatgacaataaaatagctccttgagctacataataaaaaatgcaaagatatttacttataattttccttctacctcatttatgtaatttgtctctaaatccttgcaattaatctttacttatacttcttatacccatccttacccccacagacctactgtcacatccttaattaatttccttatcatctgataccttgactattgcaattatttttaaggcagsctttctaatttgttttacttgcctgtctcatcatacatcacactgattccaagctgataatttacaatttgccagcctattttcatattctgcatggattaggtgtcaaaaagagaatctagaaaggaagaaccatatcgtcaatgtcatgtgacctgatccatctcccttgtggctcctgagaatggcaggcactgaatgccaacagcacatccagtcacaaagctccaggcggtgcaacctcaaaaataattcctcagatgggataatgcacatgcaaaaggcaaggaaaaaaaccagac

SEQ ID NO: 177688 - DNA, 557 bp, Homo sapiens
aaacacttgattctgaataaaatgggggtaagatgacaataaaatagctccttgagctacataataaaaaatgcaaagatatttacttataattttccttctacctcatttatgtaatttgtctctaaatccttgcaattaatctttacttatacttcttatacccatccttacccccacagacctactgtcacatccttaattaatttccttatcatctgataccttgactattgcaattatttttaaggcagcctttctaatttgttttacttgcctgtctcatcatacatcacactgattccaagctgataatttacaatttgccagcctattttcatattctgcatggattaggtgtcaaaaagagaatctagaaaggaagaaccatatcrtcaatgtcatgtgacctgatccatctcccttgtggctcctgagaatggcaggcactgaatgccaacagcacatccagtcacaaagctccaggcggtgcaacctcaaaaataattcctcagatgggataatgcacatgcaaaaggcaaggaaaaaaaccagac

SEQ ID NO: 177689 - DNA, 601 bp, Homo sapiens
tgattttggataaacctaatgcaaatatcataatggatttattcattgagatggcaattataataaccttaaattaatccctctttccttcctcctcccrtcttattttaggttatatctatcaggccagttcagttaatcatcaggaaaagtagtctatatggattgagtactaaatatgacgatatttttcgatgaagtgactggatattttggcatccttcagtatgtcatgattcatactcataattctgttcatttaaagaggtagtcaagaaagtgccactggcagtatcactactgcactataaatgcagtgtttcttgaattccctaaggagcacatgtcttcaacagtaaaagggaactgtgtaaaactggtgacatttccctttcaatgttgtccagatagacccccagagcccaacatgtttgcttcttcactttctgtggcatcctgtcaagatcctgtaggcagtaaaatttattagaaagaaaacgttaaggtggcccaactttgagccatcttactaggtatcagtgactgtcactaattcagaggtgacttggagttttaaacctttctggtgattctaaataaa

SEQ ID NO: 177690 - DNA, 601 bp, Homo sapiens
tgattttggataaacctaatgcaaatatcataatggatttattcattgagatggcaattataataaccttaaattaatccctctttccttcctcctcccatcttattttaggttatatctatcaggccagttcagttaatcatcaggaaaagtagtctatatggattgagtactaaatatgacgatatttttcgatgaagtgactggatattttggcatccttcagtatgtcatgattcatactcataattctgttcatttaaagaggtagtcaagaaagtgccactggcagtatcactactgcactataaatgcagtgtttcttgaattccctaaggagcacatgtcttcaacagtaaaagggaactgtgtaaaactggkgacatttccctttcaatgttgtccagatagacccccagagcccaacatgtttgcttcttcactttctgtggcatcctgtcaagatcctgtaggcagtaaaatttattagaaagaaaacgttaaggtggcccaactttgagccatcttactaggtatcagtgactgtcactaattcagaggtgacttggagttttaaacctttctggtgattctaaataaa

SEQ ID NO: 177691 - DNA, 575 bp, Homo sapiens
taaaacgtcttcgaaaaatattgtgagaagaataggaagacaagccacaactgagagaaaaatatttgcaaagtatatctgatacaggtctttatccagaatatataagaactctcaaaattcagcaataggaaaacaacccaatttttttaaatgggcaaaagatgtgaacagatgcttcaccaaagaagatatagggatggtatataagcacatgaaaagatgctcatcattagtaattagaaaaatgaaaattaaaaccagaacaataccattatatgctattaaaatggttaaaatttaaaaggctgatgatacccagtgttggcaaagctgtggaggaactgaaaatctcatgcactgctagtgatatacaataaactataaatatttcaaggttataatttgataagttttgacatatgtacatgcccatctgatacataatacagacagacatatacatatgtcaaactgayatacaataaactataaatatttcaagattataatttgataagttttgacatacgtatatgcctgtctgaaactatcaccacaaccaagataatgaa

SEQ ID NO: 177692 - DNA, 607 bp, Homo sapiens
tccgtctacaatgaatctcttgtaaagtgccataaatgtggccacaaatgcttccaaatgataagttactggaaatacttcagaaataaaatactcctagttaccttgctctgccattaattattaattaataagctttggtaaatcacttaaactttcagagtttgagttttgtactgaataaaataggaataaaagtacaatgactttacgtagttctttcaaggattaagtcatatgaagaaggtcaaatgcaccgtaagtgcctattcaytattttaattctctttactacctgagtttttgtttttgtgggatatttttcttttactttttaaattttgaaatgaggtctcactacgctgccaaggctggtctcaaactcctgggctcaagggatcctcccacctcagcctcccaaagtgctggaattataggcgtgagccaccacgcctggcctgcctgagttttcgaaacagacttcttttctctctttgggacatgtcaactggttttatgttatttttcaccctttttgttaaacaagttctttgtgctaacttcatgttacttttaggtttcaaagtccattattttttatttcaat

SEQ ID NO: 177693 - DNA, 522 bp, Homo sapiens
gattttaacaaaaaataataaatgataatgatttgtaatttttcaacaattgaaattatgagccaaagggacattttattatgtacttcttaatttttaattctatgaaaatatttttctctttctttaatattttattgatgaactcatgattgaataatagtgacatttcattttgaggaaagtttgaagtgtgactttgaaaatcttattatrtaagttaaatatttcttctaggtgtaaaacttcatggcccccaagatagcatgtgggtttagatgcttccctgaagtgttcattgtttggttgaagggctagctgctgaaaattaccagaagaactgccagatgcctgttgcctggcaacaggtattgggaggacagaaagttccagttctgtctcctcagaaatccttctttggagaggaaaagctcgcctagcaaaagaaaaactttatacaaaattattagtgaacataacataatttatatactcctgtacagtgctgctgcatgcatacat

SEQ ID NO: 177694 - DNA, 352 bp, Homo sapiens
catttgtcagttgtgtgtagtacatgacttgatatttgtcagatttattgaatgatgatttgtgagtttatgagatagcttatgagagttccatataaattaaatagtaataaataagaatkattacagtcaggagtaagtatatatagagagagatatatacagatatttatatatattccttaggtagttttacaggtgggttaggaaaagtacagtcaccctcaacttctctggataacaaagaatttgattattaaaaatagtcacttacccaagatgaatatttatgacagcaagatcacatgattttatttcatttacaactcaggttcctcttagaaaaaagtgg

SEQ ID NO: 177695 - DNA, 614 bp, Homo sapiens
gtttcagcagcaagaagcacaaagtgaaatagaaactgtaccaagttaaaccaattcacataagaatacacaaaacacactcatatacctcaaacatctaaaagctatctcggtacactgagtgtattgatctcaagggtttgtttattgtcttgttacatttgaaaactactgtatataagcaaacactctttcaatatcccaaacatgtttaagtgtcctggttcaaaacaccagcagggaaaatggaaaaaaagggcatactatttgtatgtgaagactttaaacagaaattacycaatcctgtagaaatggctcccttcagtgttattaatggctaattcagtggtttcaaacatcactacaatctccaaagccttcggccatcagatgacaccataagttcaaatgagaaagccacaaaagaattttcagcagtgatattaaaattaattgaagaagatagctacacattggttcaaaaatggcaattttgaaaaaacagacacgcattaaaaatctcaaagtacctacaacccaaaggcaagaaaaaaatgcccaagtatttaagaattgcaaaagatcaagagtcaacaaatccagccaaagacaat

SEQ ID NO: 177696 - DNA, 536 bp, Homo sapiens
caaacctataagaactaatgataatcccaccaccctttgctgactccttttttggactcagcctgcctgcacccaggtgaaataaacagccttgctgctcacacaaagcctgttggtggtctcttcacacagacgtgcgtgacatttggtgccgaaacacggcacaggaggactccttcaggaggccagcccctgtcctcgccctcactccatgaggagatccacctatgacctcgggtcctcagaccaagcagcccaaggaacatctcaccaatttcaaatcgtgtaagcggtcttttcactcttcttcagcttctctcactactcttcaatcttcctctctcgctacccttcaatctccctgtcctcccaattccagttctttttcctctttagtagagacaaggagacacatattatctgtggacccaaaactccggtgcyggtcacagacttgggaagacagtcttcccttggtgtttaatcactttggggacacctgcctgattatttacccacactccattggtgtttga

SEQ ID NO: 177697 - DNA, 545 bp, Homo sapiens
cttcaccaaaaaaactgttagaagaaatactgataaacaaattcagtaaagtttcaggacacaaaatcaacatataaaaatcagtagtgtttctatacgccaatcaccagctcatyaaaaaagaaatgtggaaaacattctcatttacaataactacaaaaaaagtacataggaataaatttttccaaggaggtgaaatatctatacaataagaaccacaaaacactaatgaaagaaattgaaaagggccacaaaccaatagaaagatattccatgctcatggattagaagaattaatattgttaaaatgaccatcctacccaaagtgatctacaggttcattttaatccctactaaaataccaatgacaatcctcacagaaatagaaaaaggaatgctaaaatttgtatggaaccacaaaagaccctgaataaccaaagcaatcctgagcaaaaagaacataactgaaagcatcacactatctgactttaaattattctacaaagttataataatcaaatcagcatggtattggtataaaaacg

SEQ ID NO: 177698 - DNA, 586 bp, Homo sapiens
gatctacttttagttccttaaggaatctccacactgttttctacagtggttgtactagtttacattcccaccagcagtgtaaaagtgagagaactattttttagaaaaggagcacatggcatggccatggattctgtagagacccaatagctgaccatgaaacatcaagtggctatggggccagaactgctcatcatgacctgtactggcagacccacaaattataaatttagtgggtacagcacaaatccatcacacartggaaatggtgcagttgaggttggactcaacctgatccagaggccctcagtaacagaagacagtggttcaaactccatatgaactacatctgcagaactaacactgctcctttaactgtacttacagctcatggggtgttcctatgaccaggttttagaggggcaaaacaaaaatgtgattcacagataggctcaatttgttgttatgagccaatggtggactattaccacactaaaattttactcaggagtgtcctagaggagcatggcttggtgaaaatactcttgtgtaggcagtgctacaagcagcacaactggtcataaac

SEQ ID NO: 177699 - DNA, 576 bp, Homo sapiens
ctccacactgttttctacagtggttgtactagtttacattcccaccagcagtgtaaaagtgagagaactattttttagaaaaggagcacatggcatggccatggattctgtagagacccaatagctgaccatgaaacatcaagtggctatggggccagaactgctcatcatgacctgtactggcagacccacaaattataaatttagtgggtacagcacaaatccatcacacagtggaaatggtgcagttgaggttggactcaacctgatccagaggccctcagtaacagaagacagtggttcaaactccatatgaactacatctgcagaactaacactgctcctttaactgtacttacagctcatggggtgttcctatgaccaggttttagaggggcaaaacaaaaatgtgattcacagataggctcaatttgttgttatgagccaatggtggactattaccacactaaaattttactcaggagtgtcctagaggagcayggcttggtgaaaatactcttgtgtaggcagtgctacaagcagcacaactggtcataaacaggatacctggatgct

SEQ ID NO: 177700 - DNA, 395 bp, Homo sapiens
cttgtggatttttattttattcaatgggctatttattttgatgttcaaattgcttcagatgtggccagtgagagccctttccagctgactcctgggtttagtcatgtcatcrtcgttttctatgtactttcttacttttttggcatcataatatattccaggcttaggctcaccttgtacatttcctgagccatccctggaatcagccatttctccaaagagccccggttctttttactggagaaaggtatttagaagccaagatctggggactgagtgtgctcattcctgttggtgtgctgctgctctcagggcttattagggtgcagatctagaggagaggtgtatgcatctgcatatgtgtgtatgtgtacacagcacatgtatctgcacac

SEQ ID NO: 177701 - DNA, 395 bp, Homo sapiens
cttgtggatttttattttattcaatgggctatttattttgatgttcaaattgcttcagatgtggccagtgagagccctttccagctgactcctgggtttagtcatgtcatcatcrttttctatgtactttcttacttttttggcatcataatatattccaggcttaggctcaccttgtacatttcctgagccatccctggaatcagccatttctccaaagagccccggttctttttactggagaaaggtatttagaagccaagatctggggactgagtgtgctcattcctgttggtgtgctgctgctctcagggcttattagggtgcagatctagaggagaggtgtatgcatctgcatatgtgtgtatgtgtacacagcacatgtatctgcacac

SEQ ID NO: 177702 - DNA, 395 bp, Homo sapiens
cttgtggatttttattttattcaatgggctatttattttgatgttcaaattgcttcagatgtggccagtgagagccctttccagctgactcctgggtttagtcatgtcatcatcgttttctatgtactttcttacttttttggcatcataatatattccaggcttaggctcaccttgtacatttcctgagccatccctggaatcagcyatttctccaaagagccccggttctttttactggagaaaggtatttagaagccaagatctggggactgagtgtgctcattcctgttggtgtgctgctgctctcagggcttattagggtgcagatctagaggagaggtgtatgcatctgcatatgtgtgtatgtgtacacagcacatgtatctgcacac

SEQ ID NO: 177703 - DNA, 528 bp, Homo sapiens
ctgtcactagtaatgttaaggtctggcagtattttcctttacaaatgtgttttatatactattcaagacttcacatcaagcctactaacccactaaaagaggccttcagaatgtccttcaaacaggcacacccctgacctggaatggattamaactagtaatctgaggcgaaaggtttgcttctccatgtctgtctaagctaatgaatgtacctctgtggccagcctgccactgtgccatttatacaacagcatcttctaaagagaggataatatataatggcctcttggacagagtagtgtgtggggcatggaaatttagtagggagctgggaacaagaaagaaaggctctcaggatggagatcaactgattagattaccgatcttgcaaactatggagtcaggcacaaatacaactttaccactgcataaataatagatcatgaaggagaatgcgctacattttttcaaaattaagttttcattgatgcccatgacttccgaagagtaaaaatgcagctaagacag

SEQ ID NO: 177704 - DNA, 390 bp, Homo sapiens
atgtgttccaagctaattcttgttggaatgattcagttccttgtggctgtcggactgaggtccagttttattttttttttgccagctgtcagctctcagttcctagaggcatctgcattccttgctatgtggccctgtgtccatccacaagacagcaatggtgaacatgtggaatcctcctcatgcatcagatctctctgacttcctcttgtgcagccagccagagacaagctctcagctgggttcatgtgattaggttaggctcacctgaataatctccctatgttaaagtcaacsatatcataagatagaacctcattttggaagtaaaatctatcctattcagtcttgaggattgtgcagggcaggtattccatgggatgggaaatc

SEQ ID NO: 177705 - DNA, 522 bp, Homo sapiens
gggtaatacatccctcaaaactgctcactcccactcaactcccatttgttgaaacttgctctgaggacaatcgtcttttcatccctcagtttagatcagggagtggatattattgttgcaattttgcacattaggaaactgagacttagggggttaggtttgtctaagactattttactgtgaggtggtggcctatatttcaccttttgtccaacttgcctatagcatatgcaggctactgagaaagacagagccagaagtcactctcctgcctcctgatgttgctcattgcctcttttgagtccatttttaaaccacctaggggtaaataaatgctgagattttaaatgaaggtaatcagaatgataataatctgtgaaggctgaatggggaaggtccgtgctaattctcaaagggaaaataacaggctacctcacgtttgtgtaactctactgcagactcccagaaacccacagttactaataaaatcccrtatatgggaatgtgttttaattttcaaaa

SEQ ID NO: 177706 - DNA, 511 bp, Homo sapiens
caatgcctctatttcattctttgtaaggkttatttaccatatttgaattaacatggcaaataaatgtctaaacgtctaaaatgtacctgagattttgtttttactcaggtgtagtgaggccatagatcaggagacaactgccattgaaaagagagtgtgttacgtacagttcccaagaggaaggggcacgccacaccatgccacactgttactggtggcaaatccatgcaggtctgcagtaggtcttttttcctgtataggtctccagtaggccttgcctcctaggaggaaagaattcgaccgagaggcataagggagagggagagacggaggcaagttttagagcaggagtgaaactttattaaaaagctttagagtggaatgcaaagaaagtaaagtacatttagaagagggccaagcgggtgacttgagagatcacgtgcgtggtttgaccttttgacttagggtttgacttggtatactcccaaggtcttgtgttccttctcccctg

SEQ ID NO: 177707 - DNA, 478 bp, Homo sapiens
tggcaaatccatgcaggtctgcagtaggtcttttttcctgtataggtctccagtaggccttgcctcctaggaggaaagaattcgacygagaggcataagggagagggagagacggaggcaagttttagagcaggagtgaaactttattaaaaagctttagagtggaatgcaaagaaagtaaagtacatttagaagagggccaagcgggtgacttgagagatcacgtgcgtggtttgaccttttgacttagggtttgacttggtatactcccaaggtcttgtgttccttctcccctgattcttcccttggggtgggctgcccgcatgcacagtgccctgctagcacttggaaggagagcctgctcagtgtgtttactggagttgtacgcatgctcacttgaggcgttcttcccttaccagccgaatgtcctaggagatcatataccagttaaactccaccattttgcctcttagtgtgc

SEQ ID NO: 177708 - DNA, 478 bp, Homo sapiens
tggcaaatccatgcaggtctgcagtaggtcttttttcctgtataggtctccagtaggccttgcctcctaggaggaaagaattcgaccgasaggcataagggagagggagagacggaggcaagttttagagcaggagtgaaactttattaaaaagctttagagtggaatgcaaagaaagtaaagtacatttagaagagggccaagcgggtgacttgagagatcacgtgcgtggtttgaccttttgacttagggtttgacttggtatactcccaaggtcttgtgttccttctcccctgattcttcccttggggtgggctgcccgcatgcacagtgccctgctagcacttggaaggagagcctgctcagtgtgtttactggagttgtacgcatgctcacttgaggcgttcttcccttaccagccgaatgtcctaggagatcatataccagttaaactccaccattttgcctcttagtgtgc

SEQ ID NO: 177709 - DNA, 511 bp, Homo sapiens
caatgcctctatttcattctttgtaaggtttatttaccatatttgaattaacatggcaaataaatgtctaaacgtctaaaatgtacctgagattttgtttttactcaggtgtagtgaggccatagatcaggagacaactgccattgaaaagagagtgtgttacgtacagttcccaagaggaaggggcacgccacaccatgccacactgttactggtggcaaatccatgcaggtctgcagtaggtcttttttcctgtataggtctccagtaggccttgcctcctaggaggaaagaattcgaccgagaggcataagggagagggagagacggaggcaagttttagagcaggagtgaaactttattaaaaagctttagagyggaatgcaaagaaagtaaagtacatttagaagagggccaagcgggtgacttgagagatcacgtgcgtggtttgaccttttgacttagggtttgacttggtatactcccaaggtcttgtgttccttctcccctg

SEQ ID NO: 177710 - DNA, 392 bp, Homo sapiens
cacgctgtgttccatagtggttgaactaattcaccttcccactgatcatcagagaaatgcaaatagaaaccggaatgagataccatctcatgccagtgagaatggtgattattaaaaaggcaagaaacaacagatgctggtgaggttgcagagaaaaaggtgctcttttctgtagagaggttagggaaagcatcttggggaatgggtatctgaggaatcacctgggcgcaaggtcaggttttggaccatgtgaacatctgggaaagaatattctaggacaagagatgtaaaaagcagagatcctgagacaaaggtcctacttgaagcacrtcatgggtaacagggagaccagtgtggctgagcagagagggttgggggagtggttagaggtg

SEQ ID NO: 177711 - DNA, 410 bp, Homo sapiens
acaaataagtgatggttgcttaaaatactcttcacaagaacaaatactggattttttaaattcttacaaatattttttacctttgtcctggaaagtctttaacttgcttagagacaagttgatccagaatgacattttgtctaaggttaatatttttcactactgagacaaaccttttggaataacctgccaatattccatgacttttgacgttcttcactcttggtggtggaaaaaggaaccattttcagcctgttctcactttgaggattattccctccaaccttttcaaatagttcttttcctggcttggggtagttttgtcatgtgcatgtgcaatcagtactaagttggagactagtctgggaccttctgtctatatmcagagttctcactctctctcctctcta

SEQ ID NO: 177712 - DNA, 531 bp, Homo sapiens
tgaattccctgttagcctaattatttggaatgaatcattaccttctatggtcactaatctccatgtggtcacatttattaatatattttattcctatttaaagtgctttttttttgtttgtttactggtcgtattctctgctttagtaccttttaatagtcccacttctcagttgcaatcccgaagctggctcaccctgaaataatgaaaacagcaacttattaaaaagacattggctaactcacagacatattaggaaggctagacaactatgcgtacaataaacagctagaaaaatcaccctagattttataccagatcatatctgctgagaaaattgttgttactacaaaaatakcaggtgggagggtcaggaagagaagaaggagaaaggacaggaggtggaggaggaagagtggcaggtaggaggtggaggagaaaggtggggaggagagatgttttcttatcattttctttttggctttccacatctcatgtcaaaactctctgcaacctagctgcaagccaggc

SEQ ID NO: 177713 - DNA, 620 bp, Homo sapiens
cattgcagcacttaattccacttcagtagttattgtagagacatatgatatgtgagcacatattttatattttatttatgatatgtcattcaacaaatttatactgaggtttcaatctttgagatattgaagtgtgaagasagtttgtgaatttggtattttgttctttgtcgtttcatcttattctttctttcttccataaaattcaccccttcattttacaaatatttacattgtacaaagaaagcattaaacatgctttctttctttccaactttggaagtttctttgagcaactagagtgatgacaaagtacagatctgtccatactcagctgctgctcagaacccttgtcacattcctcagaattccagatacaatgcttaagagtcatttgataagataataggataggatgttgccaacctgaataggcactcaggatttaatttatttcagggaccgattctttactgaatctttactagatctactaggctgagaatgtgctagcaattctcaacacttgccttcaactaaagtcctcttctacctctttcccaacaacaacaaccagaaaagatgagttgctgtttgttgtgggctgctttataagatgg

SEQ ID NO: 177714 - DNA, 218 bp, Homo sapiens
ttgatttgtatttttattctactgtggtctgatagcatggctgatgtgattttgatacttttgaacttactgagacttgctttrtggcagagcatgtggttaatcttggagtatggtccatgtacagatgagaaggatgcatattctatggttgaggggtattctgtagatgtgtattagatacaatgggtcaagtgtcaaatttacatccagaatat

SEQ ID NO: 177715 - DNA, 411 bp, Homo sapiens
cctttcatttccacattcagarcacccttagagatctcttgtaagggaggtctagtggtaacaaattcccttagtgcttgcttgtctggaaaaatgttatttctccttcacttatgagccttagtttggggaatataaaattcttggtttgaatttctcttctttaaaatgctgaaaatagccctctaatgtctcctgtcttgtaacatctctgttgagaaatctgctgttaggttgatggagttccttttgtacatgatctgaccttatctccagcttccttttcattttttaatttttttaaattttattctccagcttcctttaagatttttttctgtagcattgatcttggagaatctgaagactatatgccttggtgatgttcattttctattgtatctggcaggt

SEQ ID NO: 177716 - DNA, 484 bp, Homo sapiens
cagtttgaatctcagtcaagccactgtggtttagagaataacaatgaaggtattcagtgcatttttaaaaatcaaagtgctaaataattttttaaagtttccattttctcatgcagtataatcagtggactatgaatgactsatttatccatccatcagcaagcctcagttgtatcacaaacagagaaaaccaagtgggaatagagctttcttactcaagcgttcatgtatttatacttaaaaatggtacttttttcttcttcacattttatagttaggtgttttgaaaggagaatttaaataaaacattcttaaaatgtaagtcgtattagactttgagcttacccagcctggctccaaaagttttccattggttataaaaagcagcagataaaatagtgttagttgatctgtccaagtgcagatatttctactctagctctgaatttaatagcattcattaaaggcaaatgcagattaaaaa

SEQ ID NO: 177717 - DNA, 484 bp, Homo sapiens
cagtttgaatctcagtcaagccactgtggtttagagaataacaatgaaggtattcagtgcatttttaaaaatcaaagtgctaaataattttttaaagtttccattttctcatgcagtataatcagtggactatgaatgactcatttatccatccatcagcaagcctcagttgtatcacaaacagagaaaaccaagtgggaatagagctttcttactcaagcgttcatgtatttatacttaaaaayggtacttttttcttcttcacattttatagttaggtgttttgaaaggagaatttaaataaaacattcttaaaatgtaagtcgtattagactttgagcttacccagcctggctccaaaagttttccattggttataaaaagcagcagataaaatagtgttagttgatctgtccaagtgcagatatttctactctagctctgaatttaatagcattcattaaaggcaaatgcagattaaaaa

SEQ ID NO: 177718 - DNA, 509 bp, Homo sapiens
gatacaaaggtagaaacttctgctgttcagcagggattataatccctcgattagcattcgcctctttccattctggaagaaaaagtacggaattagtataaaagcagaataaaggggtagaagttacaggaagatagttttcaactcaatatgtggaagaacttttcagattttctmaaaaatgcatgaggtggttaagttcccttcactagatgtaatcaaatatagagtcaacattcacttgcagggaagttataaaagggttcatatcttttgtggtctttccaaaacaagattgtttgaattccatattaaaatatacatctctctctttgcccctaacacatgcgcacatatagtggtggattgataagctctctaaaattggaatgtggtaaaaacaaagtctgaatgaactgtgctagttggtgtctcagtaaattgggacaatattgactctgagtttggtctccagttgcattcagagtacaagaaataacaagcagccc

SEQ ID NO: 177719 - DNA, 408 bp, Homo sapiens
tgcttcgaagtcataactacagaattactgacagaaccattaattcatgtccattcttcataaataacatttatcagctcgggggaaaaaaataatccctttgccttgctcttttctgttaccaaaaacactctaaataccagccttacaggttttgcagtatgcatctttatagcctacagagtttagaattaggaacataaaaatacttcgaaactaagatggtacagaaacaaactgcatgtgataaaatgaattgactctaattggatttaattaaaaatcagcaacacactgaagtgaaataatccatgaattgtttacgatttttttttatcatgaaagayactcatgtggtttaagtcatctattttgtttctgatggatattcatcataagatggaattc

SEQ ID NO: 177720 - DNA, 569 bp, Homo sapiens
atcccagcactttgggaggccaatacaggtggatcacttgaggtcaggagtttgagaccagcctgtctaacatggtgaaacccagtctctactaaaaatacaaaaattagccacatgtcatggtgggcmcctgtaatcccagctactcgggagactgaggcaggagaattgcttgaacctgggaggcagaggttgcagtgagctgagatcacaccattgcactccagcctgggtgacagagagagacttagtctcaaaaaaaaaaacaaaacaacaacaaaaaaacaactgtgttggggggaggcagtttccctgcacaagctctttctttggctgctgccatccatgtaagacatgacttgctcctttttgccttccaccatgattgtgaggcccccctagccatgtggaaccattaaacctctttcttttgtaaattgcccagtctcaggtatgtttttatcagcagtgttgaaaacagactaatacgtcttctaagttatatgtctatgtataagtatgcattgatctaaagacataagtgattaacttcttttaatctataacta

SEQ ID NO: 177721 - DNA, 595 bp, Homo sapiens
gcagggtgtggtggctcatgtctctaatcccagcactttgggaggccaatacaggtggatcacttgaggtcaggagtttgagaccagcctgtctaacatggtgaaacccagtctctactaaaaatacaaaaattagccacatgtcatggtgggcacctgtaatcccagctactcgggagactgaggcaggagaattgcttgaacctgggaggcagaggttgcagtgagctgagatcacaccattgcactccagcctgggtgacagagagagacttagtctcaaaaaaaaaaacaaaacarcaacaaaaaaacaactgtgttggggggaggcagtttccctgcacaagctctttctttggctgctgccatccatgtaagacatgacttgctcctttttgccttccaccatgattgtgaggcccccctagccatgtggaaccattaaacctctttcttttgtaaattgcccagtctcaggtatgtttttatcagcagtgttgaaaacagactaatacgtcttctaagttatatgtctatgtataagtatgcattgatctaaagacataagtgattaacttcttttaatctataacta

SEQ ID NO: 177722 - DNA, 553 bp, Homo sapiens
caaggccaatgttagtgttcatatgcaggtcttaccttggctttgaagacaggctgccaaaagtgattagctgagagctaacagttagagccaaatctggacactgacagctgcctcttctccctctggcacctttgcagaaggtaagttttttatcttaattttaatgtttgaaggcatagtgctagtctgyatgagacccaggagggccaatgaaaagctatgttatattaggatggccatgatagtccttgtctagctaaaaagagtcttggaatcttggcttttaagcataaagatgcagctcctttttgtacaaaagcataaaattgtagtccacagcacagaggaggcaaggagaatgcagccattagagacacctgtgagtggcagtgaattattctcctacactacaaatgctgatcattcaaataagctggatcctcgctgcttgcctttttcttgctcatagcaatgtcataaagaatgggatatccatagaattcattctcacgggagtgtcaagggatgagatgctgtcccagtatataat

SEQ ID NO: 177723 - DNA, 553 bp, Homo sapiens
caaggccaatgttagtgttcatatgcaggtcttaccttggctttgaagacaggctgccaaaagtgattagctgagagctaacagttagagccaaatctggacactgacagctgcctcttctccctctggcacctttgcagaaggtaagttttttatcttaattttaatgtttgaaggcatagtgctagtctgcatgagacccaggagggccaatgaaaagctatgttatattaggatggccatgatagtccttgtctagctaaaaagagtcttggaatcttggcttttaagcataaagatgcagctcctttytgtacaaaagcataaaattgtagtccacagcacagaggaggcaaggagaatgcagccattagagacacctgtgagtggcagtgaattattctcctacactacaaatgctgatcattcaaataagctggatcctcgctgcttgcctttttcttgctcatagcaatgtcataaagaatgggatatccatagaattcattctcacgggagtgtcaagggatgagatgctgtcccagtatataat

SEQ ID NO: 177724 - DNA, 537 bp, Homo sapiens
gggaagtcacacagatcaccatcccacaagaataactcttgacctttcaaaaaagctttactcctccaaaagttctaagaggattaagtctatttgccaaaattatgcttagacaatatttttaatgctttaagcttggacataattgagttgtctaaaactgcactgcatttccttctactgcctggatacctctggtgatttttgctaatcagtcctatgacttttggattaactaaatggtttagacaaaaagttgataaaataagaggaagaaagtataattacaaattagataaacaatttcaaaaatttacataccatgtatgccacttcctccctatggacacagctggatgatctcagcgtatgaaatagaagccatctttgtaacaatttttatatactacaggtgttattcaaagaagacttcctagatatgttagaaaatgatatatttctrtctgttcaccataaaaagacagtaggttattctttttacattgtagtaaaaaagttttaaaataataattttat

SEQ ID NO: 177725 - DNA, 391 bp, Homo sapiens
tgtgatgaattacatgaattgatttgcaaatgttgaaccatttttgcatgcctgaaataaatttatcttggtcatggtgtataattatttttattcactgttgaatatagttgctaataaattttgaagattttttgcatctctgttcatgaaggatattggtatgcagttttcttttcttgtaaggtcttaatatagttttggctttagaggaatgtaccttcacagaatgatttaggaagtattccctatgatcctgtcttctaaaaaaagtggagagagttggtaccawtatttttttctgacatatttaatagaatttaccagtgaaaccatctaggccaagtgctcttttgggggttgttttctactgataaaatttatttaataa

SEQ ID NO: 177726 - DNA, 506 bp, Homo sapiens
ctctcttctgccatcttgtgaagaaggtgcttgcttccccttagcattcccccatggttgtgttagtaagtttcctgaggcctccacagccatgtggaactgtgagtcaattaagcctctttactttataaattacccagtctcaggtatttctttatagcagtgtgaaaacagacgaatacactccccaacaccatttcaactgtaccttgatgatcatcagcaggactgtagtcagagccagctgsagcaagatggggacaattgtagaaaataaagttgcatttagtgcactttggaattattacaaattcttattctgccacatcataatagtgtttaacacaacacaaatattgtaagtcacttctggcaagttgagcagtaacctaccttttttttttttgagacagagtttcactctgttgcccatgctggagtgcaatggcacgatctcagctcatgcaacctctgcctcctggattcaagttgtgagcaacccatca

SEQ ID NO: 177727 - DNA, 408 bp, Homo sapiens
gaatatatgtaaatgttgagcctggtatgttgtctctcacctgtagtcccagctactcagaaggctgaggcaggatgatcacttgagcccaggagtttgaagctgcattgagctatgatcctgccactgcctttccgcctgggcaacaaagtgagtccttgtctcaaaaacaaaaacaaaaacaaaaacgactatacatgaatgtttatagtagctttatctataattgccaaaaactaaaaacaacccaaatgtccatcagctggtaaatggatmaacaaattgttgtatgttcataaaatatactacttggtgatagattgaactactgatacacaatgtggatatatctcaaaagcattgtgctaagtgaaagaagccagattcaaaaaattacacactgtaact

SEQ ID NO: 177728 - DNA, 512 bp, Homo sapiens
atctctttttcaccccatcaggagcatttgtgggggatgctatgcttaaactgacagtrctgccatttctactctactgtggctgccccaagtggctctgggcactgcaaacctgaatccttggagagtttgctgtttgcagacttaagtaagcttctatctcgccactcatttttttttgaggtggagtttcactctccttgcccaggctggagtaaaatggcgtgatcttggctcactgcaacttccgcctcccgggttcaagtgattctcctgcctcagcctcccgagtagctgggattacaggcatgtgccaccacatctggctaattttgtatttttagtagagatggggtttcaccatgttggccgggctggtcccaaactcctgacctcaggtgatctgcccacctcggcctcccaaagtgctaggattacagaggcaagccaccatgcccggccatatcttgatactcttgtgattgtcttcgagctcctcccagttcagaaaa

SEQ ID NO: 177729 - DNA, 527 bp, Homo sapiens
aatggaaggtaacaaatctctttttcaccccatcaggagcatttgtgggggatgctatgcttaaactgacagtactgccatttctactctactgtggctgccccargtggctctgggcactgcaaacctgaatccttggagagtttgctgtttgcagacttaagtaagcttctatctcgccactcatttttttttgaggtggagtttcactctccttgcccaggctggagtaaaatggcgtgatcttggctcactgcaacttccgcctcccgggttcaagtgattctcctgcctcagcctcccgagtagctgggattacaggcatgtgccaccacatctggctaattttgtatttttagtagagatggggtttcaccatgttggccgggctggtcccaaactcctgacctcaggtgatctgcccacctcggcctcccaaagtgctaggattacagaggcaagccaccatgcccggccatatcttgatactcttgtgattgtcttcgagctcctcccagttcagaaaa

SEQ ID NO: 177730 - DNA, 527 bp, Homo sapiens
aatggaaggtaacaaatctctttttcaccccatcaggagcatttgtgggggatgctatgcttaaactgacagtactgccatttctactctactgtggctgccccaagtggcyctgggcactgcaaacctgaatccttggagagtttgctgtttgcagacttaagtaagcttctatctcgccactcatttttttttgaggtggagtttcactctccttgcccaggctggagtaaaatggcgtgatcttggctcactgcaacttccgcctcccgggttcaagtgattctcctgcctcagcctcccgagtagctgggattacaggcatgtgccaccacatctggctaattttgtatttttagtagagatggggtttcaccatgttggccgggctggtcccaaactcctgacctcaggtgatctgcccacctcggcctcccaaagtgctaggattacagaggcaagccaccatgcccggccatatcttgatactcttgtgattgtcttcgagctcctcccagttcagaaaa

SEQ ID NO: 177731 - DNA, 627 bp, Homo sapiens
cctaggctctccatacatgtctgttgtacaaatgggagactatactgattcaatttagtgtaaccaggcttgaggcagaaatggaactgctctggatgggtttggatttgaaataggcatgtgcctcctgatgtctgtgagacaggtgggaagggctccctggcaaaactccagttgcctgtgcacaggaaggagtgcayactggggtggaacacagaagttcatgccctttgcagcaagaggaggagcctggcccctcctcttcctgggtagaacctggaattcaaactgtgaggccggaagtgcaccagcagggactggctttgcagggggtccctgtttacctttttttcccttttcacccagtaaaactctgctttactcacctttcagattgtctgcgagtctaaattttcatggccatgtgacaaagaccctgtctttagctgaactaaggagaagtcccgcaacatttggaggatcaactttgatctgtctggatgaggagaagggccctaggacttaggtagaagacagtgggtgggcctgaggggtgctgtggccagaagccgtgctaaggaactgccagtctcactggtgcctgaggtggtagcacaatagcagcaa

SEQ ID NO: 177732 - DNA, 543 bp, Homo sapiens
cccaatggaaggtaacaaatctctttttcaccccatcaggagcatttgtgggggatgctatgcttaaactgacagtactgccatttctactctactgtggctgccccaagtggctctgggcactgcaaacctgaatccttggagagtttgctgtttgcagacttaagtaagcttctatctcgccactcatttttttttgaggtggagtttcactctccttgcccaggctggagtaaaatggcgtgatcttggctcactgcaacttccgcctcccgggttcaagtgattctcctgcctcagcctcccgagtagctgggattacaggcatgtgccaccacatctggctaattttgtatttttagtagagatggggtttcaccatgttggccgggctggtcycaaactcctgacctcaggtgatctgcccacctcggcctcccaaagtgctaggattacagaggcaagccaccatgcccggccatatcttgatactcttgtgattgtcttcgagctcctcccagttcagaaaaacttcctatttcc

SEQ ID NO: 177733 - DNA, 477 bp, Homo sapiens
gtactgccatttctactctactgtggctgccccaagtggctctgggcactgcaaacctgaatccttggagagtttgctgtttgcagacttaagtaagcttctatctcgccactcatttttttttgaggtggagtttcactctccttgcccaggctggagtaaaatggcgtgatcttggctcactgcaacttccgcctcccgggttcaagtgattctcctgcctcagcctcccgagtagctgggattacaggcatgtgccaccacatctggctaattttgtatttttagtagagatggggtttcaccatgttggccgggctggtcccaaactcctgacctcaggtgatctgcccacctcggcctcccaaagtgctaggattacagaggcaagccaccatgcccggccatatcttgatactcttgtgattgtcttcragctcctcccagttcagaaaaacttcctatttccatccttat

SEQ ID NO: 177734 - DNA, 559 bp, Homo sapiens
gtttccatttcccctgttcattcatggtaactattttccattaaagtcatggacaaggctggctgtggtggtgcacacctataataccagcactttgggaggctgaggcagattgattgcttgagctcaggagtttgagaccggcctgggcaacactgcggaaccccatctctacaaaaagtacaaaaattagccaggtgtggtggtgcatccctgtagtcccagctacttgggaggctgaggtgagaggattgcttgaacgtggaaggcagaggttgcagtgagccaggatcacgccactgcagtccaggcttcacaacagagtgagagagactgtcataaataaataaataaataaataaataaataaataaataaataaagtcatggacaaatttataatagatgctacaaagtttttgtttgctaattccaaygtctggatcatatcagggttagtttctattgattgctttttctcttggctactagtcacattttccaaattctttgtacttctggcaatttttaccatctattaaacattgtaatgatatac

SEQ ID NO: 177735 - DNA, 467 bp, Homo sapiens
ttctagaagcagctgtctgccttcctccctctgtaaaggcagcaatgatgggtggagtygttctctgatttgcataaatccgatctactcttcaccttcttatttctgcttataagaacccttctgattgcattggtcccacttgaatccagtataatctccccatctcaagatcagctaattagtaacttctattccatctgagttctgggtattaggatctggacatctgtggggaactattattctgcctagcacagggttgaagcagactaaaggaagggaagaatgagttcagggactgggctgagtgggaggcaggtcatgtagggccttgtaaacaatgtggacagggagataggaagtcttaaggaggattgattcaccttggttgctgtgtggctagtagactcaatggcaaacaagagtggaagcaggagagcagttaatatgccactgcagaattc

SEQ ID NO: 177736 - DNA, 472 bp, Homo sapiens
tgggtgagaattcgtttccttgcccttttctagcttctagaagcagctgtctgccttcctccctctgtaaaggcagcaatgatgggtggagttgttctctgatttgcataaatccgatctactcttcaccttcttatttctgcttataagaacccttctgattgcattggtcccacttgaatccagtataatctccccatctcaagatcagctaattagtaacttctattccatctgagttctgggtattaggatctggacatctgtggggaactattattctgcctagcacagggttgaagcagactaaaggaagggaagaatgagttcagggactgggctgagtgggaggcaggtcatgtagggccttgtaaacaatgtggacagggagatrggaagtcttaaggaggattgattcaccttggttgctgtgtggctagtagactcaatggcaaacaagagtggaagcagg

SEQ ID NO: 177737 - DNA, 599 bp, Homo sapiens
tgatacttacaagcagcatacccacatgaaaaaagaaaggaaagaagggaccaggatatgcatrcctactttcttatttcaaggtcaccattcagatagatattgttcctccatctctagggcctaatatgtgagagtgcaaagcaaggccaggagttgttgttattggaacatttcaccggaagaaactaggagaattggggagaaagcatgttaggtactgtgtcaagcttttacaggcattctctaactcaatcctcaccaaagctctatgatgtgctattaatattatctccatgtatacatcagtaaaaggaggtttagagaggttcaataatttgccccatgtcagatgagtagctagtatccagaatctacaaagaacccaaacaatttacaagataaaacaaacaacccatcaaaagtggggagaaggacatgaacagacacttctcaaaagaagacatttatgcagccaaaaaacacatgaaaaaatgctcaccatcactgcccatcagagaaatgcaaatcaaaaccacaatgagatatcatctcacaccagttagaatggcagtcattaaaaagtcaggaaacaacag

SEQ ID NO: 177738 - DNA, 582 bp, Homo sapiens
tggtggctcatgtctctaatcccagcactttgggaggccaatacaggtggatcacttgaggtcaggagtttgagaccagcctgtctaacatggtgaaacccagtctctactaaaaatacaaaaattagccacatgtcatggtgggcacctgtaatcccagctactcgggagactgaggcaggagaattgcttgaacctgggaggcagaggttgcagtgagctgagatcacaccattgcactccagcctgggtgacagagagagacttagtctcaaaaaaaaaacaaaacarcaacaaaaaaacaactgtgttggggggaggcagtttccctgcacaagctctttctttggctgctgccatccatgtaagacatgacttgctcctttttgccttccaccatgattgtgaggcccccctagccatgtggaaccattaaacctctttcttttgtaaattgcccagtctcaggtatgtttttatcagcagtgttgaaaacagactaatacgtcttctaagttatatgtctatgtataagtatgcattgatctaaagacataagtgattaacttcttttaatctata

SEQ ID NO: 177739 - DNA, 539 bp, Homo sapiens
ctgtgtcaaacaagggacaggagatgggtccttaacgctcagaagagcagtgacagtttaggcrtttctcaagtgaagctgtcttggtctagggactttttctgatggcttgttaggaagcctcaacctctttaccatgacagcccacaacacattcttcctagtgaagcaaagagatagatggaaggctgggagcatccattctcagcagcttttagcaactttgctgcccttttttccctgctactctagcttggcggcttcttgaacacatggtctctctggccatagttttactgtggaaaatgacattttcagaactgactgtccctaggattcatctgtcactttccctccgtgttcttcatatggcagttggcacacgtggctcactcttcacttctcagatgggtttaaaaatccttggccaaatatatagcctcttcattagcacccttctggtcctcgcaccaaataaagccaaagaaatggaccgatatgtataaactcacacacacaacatgcacacacacacagac

SEQ ID NO: 177740 - DNA, 539 bp, Homo sapiens
ctgtgtcaaacaagggacaggagatgggtccttaacgctcagaagagcagtgacagtttaggcatttctcaagtgaagctgtcttggtctagggactttttctgatggcttgttaggaagcctcaacctctttaccatgacagcccacaacacattcttcctagtgaagcaaagagatagatggaaggctgggagcatccattctcagcagcttttagcaactttgctgcccttttttccctgctactctagcttggcrgcttcttgaacacatggtctctctggccatagttttactgtggaaaatgacattttcagaactgactgtccctaggattcatctgtcactttccctccgtgttcttcatatggcagttggcacacgtggctcactcttcacttctcagatgggtttaaaaatccttggccaaatatatagcctcttcattagcacccttctggtcctcgcaccaaataaagccaaagaaatggaccgatatgtataaactcacacacacaacatgcacacacacacagac

SEQ ID NO: 177741 - DNA, 576 bp, Homo sapiens
tgaaggttgttactgtataaacatttattatttttgcaatccttgctcccttatttatataaaaactattccttaccttttcttggggaaaccattccttgcccactcttaactcatgtgatttaaggttcactggttgcctccataccagggtgggtccagattggtttcagccaattataatatcccattcccctgaccatggtgattggcttgggacgggcacrtggcctaactctggccagtgagcatcatgaccaagaattatccttgactaatgtggggtgtgcagtgctttaatctcactggttgggaagctgagaggaggtaagttctggagctgcagcagctactttgagaccaggaggagagagcctgggtgagaaagaaatcacatggggagtgcagagctgatctcagggataaagagaacagattcttgagaaatcatttgaaccactgtctgaagctgagtttagatacactgttagcctaggagcttcctggttcagaagtcaaggaatttctgtttcactcaaggaagattcaattttctgccactggcaatttggaaga

SEQ ID NO: 177742 - DNA, 426 bp, Homo sapiens
atttgaaccactgtctgaagctgagtttagatacactgttagcctaggagcttcctggttcagaagtcaaggaatttctgtttcactcaaggaagattcaattttctgccactggcaatttggaagacttctctttttaaaaagtttttaatttttaattattattgttacataataggtgcacatatttatggggtacgtatgattgagccaggcaccaacaggactagtgctggccctttgcaytggggagtggggacccatattttgatgggctgacttttatctttgatgaaagatagtcatcaaagtgacggcttgcttggtttggactaactggcattccaaggtccctctacatgcaataatttcaacctgattttcttctactgattatttaattgcagttttagatttcagtaattc

SEQ ID NO: 177743 - DNA, 597 bp, Homo sapiens
aatattcatagttctagatgtcaatcagttgttcttgcaaactaatagaaaaacgtatttttatatttttaacatatctcttcaaattttactgaaastcttcatttagatagcatttaaatgaaaattctgcttccaagtgtttctaagaatgcagatgtggacatttttatgtgataatactttttaagaaacaattacataaaatggaaacatatcaaaattttatttttcagaatttttcatagtaggtttcttgtgaaattacatatgtttttctcactatttaaaaatgtccttttaccttgaaaagacagtttaaattttgagtctttttttatttttccccaaaatatcttctaggtcactagaatcagctgcttgtcgtcaggggaaaaaaaaaaggtcagcaactttgagatatgtgttctcataaaataaaaatatcgtgagataacctgggtgtaatgtaaagattttcatgggtacaattctccttcccactctcatcaccccccccccccgcccccacagtcttataacattttgcaaaagtggaactatttaggacaaggtttgccaaatgttttctgtaat

SEQ ID NO: 177744 - DNA, 597 bp, Homo sapiens
aatattcatagttctagatgtcaatcagttgttcttgcaaactaatagaaaaacgtatttttatatttttaacatatctcttcaaattttactgaaagtcttcatttagatagcatttaaatgaaaattctgcttccaagtgtttctaagaatgcagatgtggacatttttatgtgataatactttttaagaaacaattacataaaatggaaacatatcaaaattttatttttcagaatttttcatagtaggtttcttgtgaaattacatatgtttttctcactatttaaaaatgtccttttaccttgaaaagacagtttaaattttgagtctttttttatttttccccaaaatatcttctaggtcactagaatcagctrcttgtcgtcaggggaaaaaaaaaaggtcagcaactttgagatatgtgttctcataaaataaaaatatcgtgagataacctgggtgtaatgtaaagattttcatgggtacaattctccttcccactctcatcaccccccccccccgcccccacagtcttataacattttgcaaaagtggaactatttaggacaaggtttgccaaatgttttctgtaat

SEQ ID NO: 177745 - DNA, 610 bp, Homo sapiens
ttagcaggggaagaaagtcatttctctgccagtggaatgggttggtgaatcttggcatgtgtaacagtgagggcagggactgtgtctattttacatatctttgtcactctactgtctataccatgttggacacctagcagggtctcagtatatactggttgaattaattgtgtaaaaaagttacaatgtttctgtgacaaattactatactatgtgcaatagggaaatctggcaagcagttaataggaagtttctgtgttcttaatgagtattctagaatttaagtactgaagttactagcaccatagcaatgttgaagaaatgaaccagacctagaaagaatgctgctcactgactgagaatctttctcaaactgaaatagcaatcaaattgcctgggcaattttctctctgccagctcataaaaaggaccacagactcaggaaacgacctaaaagtgtaacattttagctttaatttttgcattcaaaaaataatgtagccagtggggccacagttaggatttcttggggttatcataggttgtagtgtttgcccacmaactattgagattaaaagacagagaagagaccagaatttattaagcacct

SEQ ID NO: 177746 - DNA, 238 bp, Homo sapiens
tatgctttctttcgtgatagaaaagagcactggcattaaaggcacttgagacatttttttcccctcatccttttctcatcctytcttttctaaatctcttccaacagataggtatagtagttacaaagctttagttgcaaattacagaaaacctgaatcaagctggttttaagtaatattggaaagttaatggtttatattactaaatggtccagtgatacattttcaggtaaagctt

SEQ ID NO: 177747 - DNA, 593 bp, Homo sapiens
catattttaaagcggcatctattsgctatgtgtaatagtgcatcctagctctgttgggcagtataaatacacaagcagaaagagatctatcagagctgaatttcaagagttgtgaatgtggagacagagaatcttgggcacaggtgtgatttccatggtctgaggaagagcaatatgaaaagaagggagaaaaaagaaagtaaggataggagaaaaatcagaaaagtgatacaattctcaaaggcctatcaagcatttttataaacaaaacatccaatattacctagctaatttttttctccaatggaacagctttaattttcttaaaagaaattgttagaaagacaaaactacattaatagaaaaattacttcataaacaattttactaaaatttattcactctataaaaatgagaaactcctgtgattttaatggacacttaagcaaaatataagttaagagataagctaaataatggaatcatcatagcgtgcattttaaagccagtttaaaaattctcctttattgtgaccatcatgctgttcctcccctctgtcatcatggccaatgcagagatgattgtcaaagaaa

SEQ ID NO: 177748 - DNA, 603 bp, Homo sapiens
acttcatgttaatgcatgaggcatcatgttatagctgaaacagcaagggttttgaggtcaagtgtcccagccctgacactttcagttaggccagtcacttacttctctgagcttcagtttcttcatctgacaattggagataaagacacctaactcaatgagttgctgtgagaagttaaataacaataaatgtagaagtgctttatatcactgcttgccacttgctatagctgtgtkaccttgtgcaaattacttaatctctgtgccctggtttcttcatctgtaaaatgagggtaatagtactatccttgcccctctgcgttgtgctaaggattgaataaattaagatatgtaaagtgcttaggataatgtttagcactaaatgttttctgtgatttctatttatcagatgctatacatgttatttttccagatgttcttaacttcatactaacttaaatagagcaaaacctatatttataactcaactattactgagtattttatccaaagcactaagataggttctgtatacaaatataaattaggtggatgatgatctattttgcaaaagaaaataacaaggcactgcttcaattcaac

SEQ ID NO: 177749 - DNA, 369 bp, Homo sapiens
tttttctctctgttctgaactctttaagagcaagttacaaacacgatgtccatttatcgttaaatacctcaatgtgtaattcctaaaacaaagaatgttctcttacatgaccacagtacaatttacaaaatcaggacaaataatatgaatataatactattatctaatctacagcccttatttggatttatctaattgcctaacgatgttctttatagcaaaakaaaaaatctaagattaagtgtttcacttagtgttcatgtctttttagtttctttcaatctggaatagttcttgagtctttctttgtattttgtgacattgacatttttgaagagggcaggccaagattactgaatgtccctcaat

SEQ ID NO: 177750 - DNA, 322 bp, Homo sapiens
aagttacaaacacgatgtccatttatcgttaaatacctcaatgtgtaattcctaaaacaaagaatgttctcttacatgaccacagtacaatttacaaaatcaggacaaataatatgaatataatactattatctaatctacagcccttatttggatttatctaattgcctaacgatgttctttatagcaaaataaaaaatctaagattaagtgtttcacttagtgttcatgtctttttagtttctttcaatctggaatagttcttsagtctttctttgtattttgtgacattgacatttttgaagagggcaggccaagatta

SEQ ID NO: 177751 - DNA, 369 bp, Homo sapiens
tttttctctctgttctgaactctttaagagcaagttacaaacacgatgtccatttatcgttaaatacctcaatgtgtaattcctaaaacaaagaatgttctcttacatgaccacagtacaatttacaaaatcaggacaaataatatgaatataatactattatctaatctacagcccttatttggatttatctaattgcctaacgatgttctttatagcaaaataaaaaatctaagattaagtgtttcacttagtgttcatgtctttttagtttctttcaatctggaatagttcttgagtctttctttgtattttrtgacattgacatttttgaagagggcaggccaagattactgaatgtccctcaat

SEQ ID NO: 177752 - DNA, 486 bp, Homo sapiens
aaaggtgattccaggcctgatgcactctggctgggtgtgatcctgatcgtttgttcaatcagattttggtaggtttgtgccaaaaagaagaatagaatcatgatctcctcttwtcttttggtgctcagaaacagaaaactgaaccctgcaaaaggaacacatgcttcaattatctgcaaagttcagccgtaggccttgacctcagacagggctggattcaggggatatcacaatgtcagtaagacacagtccttccctcttttggctctcctctgttctgtgttgttttattcccagattccacaagcagcaatgtggctgactgctacaagctctgagtctgcatcttcccaggttcaatttcagtgcaaatgagtacttgttttcctccaaagtcagaacaaaaatcctgagcctcattactactggcctgaattaaatcacatggtcaaatctgaaccaagcactgtggcccaagaatacaat

SEQ ID NO: 177753 - DNA, 486 bp, Homo sapiens
aaaggtgattccaggcctgatgcactctggctgggtgtgatcctgatcgtttgttcaatcagattttggtaggtttgtgccaaaaagaagaatagaatcatgatctcctcttttcttttggtgctcagaaacagaaaactgaaccctgcaaaaggaacacatgcttcaattatctgcaaagttsagccgtaggccttgacctcagacagggctggattcaggggatatcacaatgtcagtaagacacagtccttccctcttttggctctcctctgttctgtgttgttttattcccagattccacaagcagcaatgtggctgactgctacaagctctgagtctgcatcttcccaggttcaatttcagtgcaaatgagtacttgttttcctccaaagtcagaacaaaaatcctgagcctcattactactggcctgaattaaatcacatggtcaaatctgaaccaagcactgtggcccaagaatacaat

SEQ ID NO: 177754 - DNA, 552 bp, Homo sapiens
acaatggtggctctggattgaggactgaagaggccacacatgagtggatgaaggctcaggcatgcaaaactgtgaaagcaatgactccaagtcactcatctctttaaaacattaattgggtctccagttctttaccttggtccccaagaccttccctgtactgacgccatctcccacttcattcttccttctcctcatgcccacgactctgctcactctttgcaaaacgtgtctgagacactgcagtcttttctcatttccatgttccatttctcatacttaaaatgcatttcctctctcacgtctgcctccatagttctacagactctaatgcccaagtcatgtaaccctatttatgattaatcataccttgaaattgatgatagaaagtacagttaatgaaggccttccattattcactacctcatgtcaggagacttcccagagtccttcacattccaaactagtgatctctccctcctgtgagtcccaygtagtagtagcagcagaaataataataagagtgataataccaccatttaataagcacta

SEQ ID NO: 177755 - DNA, 547 bp, Homo sapiens
gctccatggggatgggatctgctgagctagaccacttggctccctgacttcagcacyctttccagaggagtgaatggttctgtctcactggcattccaggtgccactggggtatgaaaaaaaactcctgcagctagattggtgtctgcccaaatggctgcccagttttgtgcttgaaactcagggctgtggtggtgtaggcacccaacggagtcacctggtatgcaggttgcaaagactgtgagaaaaacctattatctgggctggaatgcaccattcctcaaggcttcccttggctagggaagggagttccctgaccccttgcacttcctgggtgaggcaatgccccatcctgcttcagcacatcctccatgcactgcaccaactatctaaccagtcccaatgagatgagctgggtacctcagttggaaatgcagaaatcacccaccttctgcgttgatcttgctgggagctgcagactggagctgttcctattcagccaccttgtcagctacccacttctagattacttaatggatgaaatggtt

SEQ ID NO: 177756 - DNA, 547 bp, Homo sapiens
gctccatggggatgggatctgctgagctagaccacttggctccctgacttcagcactctttccagaggagtgaatggttctgtctcactggcattccaggygccactggggtatgaaaaaaaactcctgcagctagattggtgtctgcccaaatggctgcccagttttgtgcttgaaactcagggctgtggtggtgtaggcacccaacggagtcacctggtatgcaggttgcaaagactgtgagaaaaacctattatctgggctggaatgcaccattcctcaaggcttcccttggctagggaagggagttccctgaccccttgcacttcctgggtgaggcaatgccccatcctgcttcagcacatcctccatgcactgcaccaactatctaaccagtcccaatgagatgagctgggtacctcagttggaaatgcagaaatcacccaccttctgcgttgatcttgctgggagctgcagactggagctgttcctattcagccaccttgtcagctacccacttctagattacttaatggatgaaatggtt

SEQ ID NO: 177757 - DNA, 279 bp, Homo sapiens
aactctcaccatcattaattgctccgactgctcctccaagacctacctctgtaaagctcctccttgaagggcacaacctcatctctcttccactcccaggaaggcaggctggaaacctaatagagactccctaagaaacctgcattctatctttccctgaccattcaatttcygtacttccaccagagcccaacttctatcagacaaactccatgctatctgcatgctaactccatggataatctgcatgaaaaggggggaaagagacaaaatcatgtt

SEQ ID NO: 177758 - DNA, 279 bp, Homo sapiens
aactctcaccatcattaattgctccgactgctcctccaagacctacctctgtaaagctcctccttgaagggcacaacctcatctctcttccactcccaggaaggcaggctggaaacctaatagagactccctaagaaacctgcattctatctttccctgaccattcaatttccgtacttccaccagagcccaacttctatcagacaaactccatgctatctgcatgctaactccatggataatctgcatgawaaggggggaaagagacaaaatcatgtt

SEQ ID NO: 177759 - DNA, 553 bp, Homo sapiens
gccagttttacgagacttgcacaatgcttacttaaaattyatttttaagttacaaaataatagttccccgaatgattcatttcagcactaatgtcaggttattcaaatattgtatttaattttaaaaaattatgctgaacatctgttttgggttaagccaatctggagataaagcaaattccattgtagaatcatatgatcatttagaatcatatgtttctgggaacaatgaaagtatctttaactcatgaatagagctctgattaatatttaattcaggatgaaattatatggatgaagtcagaaaaacatttattctctcttgttttggctcaaagtacagaatagagataaaagttaaaccctatctgtaaaattcaatactttagtgaccaagggatccatttgttctaaaggtctttttaggtgaagtttgctttttaatttcttgttttagcatatattagcattcacctgctttacagatctgttacagaatgtagcctcccgagttctgaaacatagataaatgcatgataaatggtttattgac

SEQ ID NO: 177760 - DNA, 553 bp, Homo sapiens
gccagttttacgagacttgcacaatgcttacttaaaatttatttttaagttacaaaataatagttccccgaatgattcatttcagcactaatgtcaggttattcaaatattgtatttaattttaaaaaattatgctgaacatctrttttgggttaagccaatctggagataaagcaaattccattgtagaatcatatgatcatttagaatcatatgtttctgggaacaatgaaagtatctttaactcatgaatagagctctgattaatatttaattcaggatgaaattatatggatgaagtcagaaaaacatttattctctcttgttttggctcaaagtacagaatagagataaaagttaaaccctatctgtaaaattcaatactttagtgaccaagggatccatttgttctaaaggtctttttaggtgaagtttgctttttaatttcttgttttagcatatattagcattcacctgctttacagatctgttacagaatgtagcctcccgagttctgaaacatagataaatgcatgataaatggtttattgac

SEQ ID NO: 177761 - DNA, 265 bp, Homo sapiens
tcggctgacctgactaattttttgaaataagttggccatcagtgtaattgattgagctatctgtacaacccccaacctacctaagcaaaggtcaaaatggaggttattraagaaaaccagccactgaactatccctaaattgagtgatgttttcctgtgctactgataaatgattcattgatggagcactaaagactaatgtcattcaaagaactgtagaccctgccctcgtggcaaagaatatgaatttaaccttagacaaagc

SEQ ID NO: 177762 - DNA, 545 bp, Homo sapiens
tactatgatacaattgccttgaataaataccttactcccagyaagtaaataaaccctaaatgttaaaaatctgaacaatttaaacatggctagaaaatgcaccttctatattattcctaaaataaaagaaataaaggctctaaaatgcaatattgaattcccccaaccatgctgatgtaggtaaactgtatttcagatattgggaaatagcctcataaactgagaagaacacggcttttagattcaagtacatatggattcaacttccacctttacccctacagctctgtgaccagtgggaagttatgtagctttgttcagccttggtttcttcatctgcgaaattaggaaaataatactccttcaaaagtgagagagcgtaacctgcagtggatgaatggataaacaaaatgtgctatgtacatataatggaatattattcagccttaaaaaggaaggaaattctgacacacgctataacatggattaaccttgagaacattatgctaagtgaaataaaccagtcatcaatagacagatactgt

SEQ ID NO: 177763 - DNA, 493 bp, Homo sapiens
gtttcaaaacgatgtgaatatccctaatgccactaaactgtacactttaaaaatggttacgatggcaaatcttatgttatatatattttactctaatttttaaaataaatttaaaaaataaatcctaaaacattgtttaaaatgtgaaatagtttaaggaaatcccctaatgtgacgcctagaatagaagcrggtagctattagacacattccttctttagttttctccctcctccccaccataaatagttgcaaaaataattggagtgtgcacatagccaaagatttaatgccacatagccaaacaaacaccagataattcaggaacccttgattctgaagtgaagcttataagaagatgaaccacattggatcaggaaataagaaaaccagtccatatgttgcaattaacttgttctgtgattgggagcaagtcacttagcttctttggacctgttttctcatctgtcaaataaggagggttgaactaggt

SEQ ID NO: 177764 - DNA, 493 bp, Homo sapiens
gtttcaaaacgatgtgaatatccctaatgccactaaactgtacactttaaaaatggttacgatggcaaatcttatgttatatatattttactctaatttttaaaataaatttaaaaaataaatcctaaaacattgtttaaaatgtgaaatagtttaaggaaatcccctaatgtgacgcctagaatagaagcaggtagctattagacacattccttctttagttttctccctcctccccaccataaatagttgcaaaaataattggagtgtgcacatagccaaagatttaatgccacatagccaaayaaacaccagataattcaggaacccttgattctgaagtgaagcttataagaagatgaaccacattggatcaggaaataagaaaaccagtccatatgttgcaattaacttgttctgtgattgggagcaagtcacttagcttctttggacctgttttctcatctgtcaaataaggagggttgaactaggt

SEQ ID NO: 177765 - DNA, 583 bp, Homo sapiens
cctagcctctgaaaattcaccaagagcaaatactgctgcaacctgcacttctttggtgactaagacccccctaaggctcagagggaaggcttgcagatatatgtttatcttgatgagcacatatcacattgcctgggcttttcaatccaggccagtaattgtccctctttgtttggaaaatgcacagggatcgaatatccatcagtctaaggyagtatataggggaaagaggaggaaggagcagggcagaagttgttgccacacacccatggccatgctactttctcagctaaaaatgtgggggtgtgtagtatagcagtgacatcctggaagaggcttctaaagaaggaaaggctaatacaggacactgcccaacccctaacccaggacacacatcccaaattggtgcagactttttcttggctgtccataaatagccaatctcaatgcagccatccaggcagtcatttccaactcatcagacctggtatataagaagaaatctgcttcatgtatttctgcataaggacatagtataatctttcccctgtaggagatgaaaacctaaaacaacctcaagctt

SEQ ID NO: 177766 - DNA, 583 bp, Homo sapiens
cctagcctctgaaaattcaccaagagcaaatactgctgcaacctgcacttctttggtgactaagacccccctaaggctcagagggaaggcttgcagatatatgtttatcttgatgagcacatatcacattgcctgggcttttcaatccaggccagtaattgtccctctttgtttggaaaatgcacagggatcgaatatccatcagtctaaggcagtatataggggaaagaggaggaaggagcagggcagaagttgttgccacacacccatggccatgctactttctcagctaaaaatgtgggggkgtgtagtatagcagtgacatcctggaagaggcttctaaagaaggaaaggctaatacaggacactgcccaacccctaacccaggacacacatcccaaattggtgcagactttttcttggctgtccataaatagccaatctcaatgcagccatccaggcagtcatttccaactcatcagacctggtatataagaagaaatctgcttcatgtatttctgcataaggacatagtataatctttcccctgtaggagatgaaaacctaaaacaacctcaagctt

SEQ ID NO: 177767 - DNA, 548 bp, Homo sapiens
taaaacgtattctctcacagtccttgaggcaagaactccaaaaccgaggtgttaacagggccatgctccccgtgagattctgggtaaaatccttccttgcctctcccgagcatctgctggtgacagcagtccccggggttccttggctggcagccaggtcatgccaatctgcctgtgttgtcacatggcgttctccctgcatctctctctcctcttcttataaggcaccagtcacatcaaattaggagccaccttaccccagaatgacctcatcttaactaatgacatstgcaacaatgctatttcccaaaaggtcgcattctgaggttttgggagttaggatttcaacacatgttttaggggcacacaattcaaccatactagctcttcaggaaatttgactcaaaagatttcaggcccgaaagagttttcatgtctcctggctaatacggcgaaaccccatctctactaaaaatacaagaaattagctgggcgtagtggcaggcactgtagtcccagctactcgggaggctgaggcaggagaatgg

SEQ ID NO: 177768 - DNA, 535 bp, Homo sapiens
tgtggttaaagctggccactttacatgaagtatgacctaggcaaattatttcagctttctgagcctctatttcttcgtgtgtgaaatgggaataataattcctttttcttatagattttatggggattaaataacacaaagtatataaaaggtgtagcctggtacctgacatttaacatatctcaaaaataactttgctattactaatcattatgaaagatggaactttgttggttctccaggacgatcattcttttgtctcaggctaactttttagtcaatamtcaatgagtatgagatcgatgagagatttctcatcaatattttccactctaatattttgctcctgtcagtgaggaggcttgttctaaaaattaagaggtaaaaagtccaactcagccatcagctcgtacgaattagtgtaattatataaaatatctctcaccctccgtctcacgtgtgagctccttctgcattttgtagcctttcttgctccttctatctcatgaagctgggaggatgaaagaccccagtc

SEQ ID NO: 177769 - DNA, 549 bp, Homo sapiens
tctgtggtggaactctgggttctgccgctcagctgggtctgctcttgcacrgcaggagaagacttctttgcaaactaccaaagagaccctctggctctcacacttggttctcagctgtttattaactgctctcagtttctcattatcccttgtagagagggtcagtgcagcttggtaataaccagccaattccattatccttgcattcattgttcctctacacttttcaaactcctgagtcagcatgctggcacaggcgttccttttcacctggacattttcccaggtcactgccagtaacatttttagcagctgggccttgtgcccaaaaataatcaaaccccactcaagatgggatccttatcaccaggcaggcagtgagtgacccagtccccaaactccactttaccacctgctttctcagactactcacactaccaattgtgtcagtgtggttcctcttaaaaagagatgccaagatgtcattaaaaatgcaagagaaagccaggcatggtggtgcacctgtagttgcagttgagcccaggagtt

SEQ ID NO: 177770 - DNA, 549 bp, Homo sapiens
tctgtggtggaactctgggttctgccgctcagctgggtctgctcttgcacggcaggagaagacttctttgcaaactaccaaagagaccctctggctctcacacttggttctcagctgtttattaactgctctcagtttctcattatcccttgtagagagggtcagtgcagcttggtaataaccagccaattccattatccttgcattcattgttcctctacacttttcaaactcctgagtcagcatgctggcacaggcgttccttttcacctggacattttcccaggtcactgccagtaacatttttagcagctgggccttgtgcccaaaaataatcawaccccactcaagatgggatccttatcaccaggcaggcagtgagtgacccagtccccaaactccactttaccacctgctttctcagactactcacactaccaattgtgtcagtgtggttcctcttaaaaagagatgccaagatgtcattaaaaatgcaagagaaagccaggcatggtggtgcacctgtagttgcagttgagcccaggagtt

SEQ ID NO: 177771 - DNA, 549 bp, Homo sapiens
tctgtggtggaactctgggttctgccgctcagctgggtctgctcttgcacggcaggagaagacttctttgcaaactaccaaagagaccctctggctctcacacttggttctcagctgtttattaactgctctcagtttctcattatcccttgtagagagggtcagtgcagcttggtaataaccagccaattccattatccttgcattcattgttcctctacacttttcaaactcctgagtcagcatgctggcacaggcgttccttttcacctggacattttcccaggtcactgccagtaacatttttagcagctgggccttgtgcccaaaaataatcaaaccccactcaagatgggatccttatcaccaggcaggcagtgrgtgacccagtccccaaactccactttaccacctgctttctcagactactcacactaccaattgtgtcagtgtggttcctcttaaaaagagatgccaagatgtcattaaaaatgcaagagaaagccaggcatggtggtgcacctgtagttgcagttgagcccaggagtt

SEQ ID NO: 177772 - DNA, 345 bp, Homo sapiens
caaggggtggggtagggacgagagtgttgtgggcttgagaaaacagcacaggcaagggccctgtggcagggaacatgagagagggaggactggaggagccaccaggctttgctggtggtcactgagaaatggctatgaaggaggaacaggttgggcaggcaggtaaattctttttggtacattgagatgccgtgagccgctaggagcaaaactctagtagctgtgggacatgagagacagatttgggaatcctcttcacgtaacagtgactrgagccagcagagtggacgagaagaccaggaaaggtatagagaaggcagagagcaatacagacgctgaagagca

SEQ ID NO: 177773 - DNA, 626 bp, Homo sapiens
tttcacctttcatgaaccaaggtgtatggattgagaaatggcattcaaagtggcagtcatctcaagtctccctggctttcactttttgctgggctctcttgggtcttccctgcttatgtttagtttcccagaaagcctagaaaagcttatttcacacctttaatgtctctgttacttgcgcgatctccctgttaaatttctggctggtctaccacccatcacaactgctaccgtgggctagtcatgctgcaggatttcccaaaatattctaacgtgagtctgcttttttagctgacaaagccacaggctttcagtgcccccatcctccaccctgaatcaagtcaatctttggctgtaaggctttggttttcgccaccagtcctgaactgacagttacatttttattttagttttagagacagggtctccctgtgtcacccaggccacartgcagtggtgcaatcatagctcaccatagcctcgacctcctggggtcaagtgatcctcccatctcagcctcctgaatagctgggactacaggcatatgccaccacactcgcctaatattttatttttttatagagacaacatctcactatattgaccaggctggtcttgaaatcctg

SEQ ID NO: 177774 - DNA, 408 bp, Homo sapiens
atgcattctcaggctaagccagcttctccaggggcctgagctactcccacagtgcatgctaggttgcagcagctgttgtgttgattcttctaacgtcaagacccagctttgtcttgtattagttctatgacattgtgcaagtggctataatcaccaagtctccattttctcatttttaagatgataataacacagctcgagtttttggtgttagggattaaatcaggtagctgtataaaaatagtacatagaggagataaataacttctcacaggtgstgaattcagggaatctctctgaagtgtgggagagatcacctttgacattgtgaaaaccgagatgcacatctgagagatttgggcacgactctgttgcaaatctaaactgtcaacatcacagactcatact

SEQ ID NO: 177775 - DNA, 436 bp, Homo sapiens
ttgaaaagatggatggtttgtgcctgcattttccttctcagcggtggctccaacaccatgtcattacacaaaataatgactgcacttgtctcaggctccattcgtagtactcacatggtgactgaatttactgaacgcaaaacaactctctccttctgatctgagaacaacaggactgcagagggagattgcacagtgtcttctcacaccttggcctcagttttgggcagtgttgttttaatgcagccactttgactcytggacaaagtgatagccacacttattttgagagcctcaaaaagaaatgattaacctttgggcatttctgaaatttcctggtgatgtgtgcaataacccccttcacccctagcaccgaggctcaagaatgaaattaaggtgtaatgggggtacagttaggtcttggggtttgggtaag

SEQ ID NO: 177776 - DNA, 537 bp, Homo sapiens
attcagtgtatttttccattttactgtagatggacatttgtattttttctggttttcatgtattataaactatagatacatataatataaacaatatagtagtgaatgttcttctacacatttcttggtgtgcaagaagggttataggatatacatatcttcaattttacttagtcatacaaactcttttccaaagtgattgtaccaatttacaatctcaaagcagtgtgtgactttctattgtgctataatattgctatcacttggtattgactttgccaaaatggtgagcatgaaataatttacgttgtgtatatctctgatgtctgttgagggttgaggttgcatatttcttcgtatgggaccaaaagcctttacttttctctgaaatacttgttcttttatcttgctcatttttttttgaccgggctatgtattagtcagggttctccagagaaacagaacaaataggagatacwtagggagagatttattgtgaggaattggctcacatgtttacagagactgaaatgtccc

SEQ ID NO: 177777 - DNA, 573 bp, Homo sapiens
ctggtgatagggtgttttattctaaactgagcagtttgaactgaagagctagagaggctgtgttgtgttataacaaaataagtgcagtagctcccccttaactgtgggagatacattccragacccccagtggatgcatgaaaccatgaatagtactgaatcacaaactgtttttccctatacatacatatctatgctaaagtttaatttataaattaaattgaatctgatgttaccagcagatagggtgtgagaattgaattgtgtcatcagcaggaatgattgcttgcttgttggtggggaaaaaccctccacatatttggtcacagaagccttctttgttgatgattgttgctgtggtgtgacagcagagaaaaacgtgtcaagtgtgtctttctgcacatatagtggataagggatactactgtatactctgttttaatggcacctcatattgtggtccagaaatcatgctctttgacacttttgactcatcacacctgttctgctaacaataccatttttactcgatctcacagggtttggctaggatgacttgcatacttcagttca

SEQ ID NO: 177778 - DNA, 573 bp, Homo sapiens
ctggtgatagggtgttttattctaaactgagcagtttgaactgaagagctagagaggctgtgttgtgttataacaaaataagtgcagtagctcccccttaactgtgggagatacattccgagacccccagtggatgcatgaaaccatgaatagtactgaatcacaaactgtttttccctatacatacatatstatgctaaagtttaatttataaattaaattgaatctgatgttaccagcagatagggtgtgagaattgaattgtgtcatcagcaggaatgattgcttgcttgttggtggggaaaaaccctccacatatttggtcacagaagccttctttgttgatgattgttgctgtggtgtgacagcagagaaaaacgtgtcaagtgtgtctttctgcacatatagtggataagggatactactgtatactctgttttaatggcacctcatattgtggtccagaaatcatgctctttgacacttttgactcatcacacctgttctgctaacaataccatttttactcgatctcacagggtttggctaggatgacttgcatacttcagttca

SEQ ID NO: 177779 - DNA, 573 bp, Homo sapiens
ctggtgatagggtgttttattctaaactgagcagtttgaactgaagagctagagaggctgtgttgtgttataacaaaataagtgcagtagctcccccttaactgtgggagatacattccgagacccccagtggatgcatgaaaccatgaatagtactgaatcacaaactgtttttccctatacatacatatctatgctaaagtttaatttataaattaaattgaatctgatgttaccagcagatagggtgtgagaattgaattgtgtcatcagcaggaatgattgcttgcttgttggtggggaaaaaccctccacatatttggtcacagaagccttctttgttgatgattgttgctgtggtgtgacagcagagaaaaacgtgtcaagtgtgtctttctgcacrtatagtggataagggatactactgtatactctgttttaatggcacctcatattgtggtccagaaatcatgctctttgacacttttgactcatcacacctgttctgctaacaataccatttttactcgatctcacagggtttggctaggatgacttgcatacttcagttca

SEQ ID NO: 177780 - DNA, 573 bp, Homo sapiens
ctggtgatagggtgttttattctaaactgagcagtttgaactgaagagctagagaggctgtgttgtgttataacaaaataagtgcagtagctcccccttaactgtgggagatacattccgagacccccagtggatgcatgaaaccatgaatagtactgaatcacaaactgtttttccctatacatacatatctatgctaaagtttaatttataaattaaattgaatctgatgttaccagcagatagggtgtgagaattgaattgtgtcatcagcaggaatgattgcttgcttgttggtggggaaaaaccctccacatatttggtcacagaagccttctttgttgatgattgttgctgtggtgtgacagcagagaaaaacgtgtcaagtgtgtctttctgcacatatagtggataagggatactactgtatactctgttttaatggcacctcatattgtggtccagaaatcatgctctttgacacttttgactcatcacacctgttctgctaacaataccatttttactcratctcacagggtttggctaggatgacttgcatacttcagttca

SEQ ID NO: 177781 - DNA, 567 bp, Homo sapiens
aagtccaacttcaaaaagatagaggttcacttgctgctkctttttcctctttatcaattatttgatttagtcaaattttctattcaagaaaatctcatgtgtacagttacagtggggttatctaaatgtgtaattatgtgtcaaagtagattagttctgctatctaaataatggttctggagaatgttctcataatgtttgttcattaatcaacctatgtctcactatcagtcttccaagtggcgtatgagctgggaaactaattcagccacataccatgtgaccttctgaaccagatcaacataaagaaattgctaaagaaacaagctctagattctagattcttttttctgtattcatttagagatgatttacatttatttaatgatagaatgggaatacaatgggagggaagcaatgactgagacaagccacaaaaacacatctagccttgagatttgcaacgaatattcccagccaaatgagtctgtttaatgtgttttcatgcatgcaagtttatctgcttagctcaaactgtttgaacttacagtcccatcatagttattt

SEQ ID NO: 177782 - DNA, 554 bp, Homo sapiens
gggctgggcaacatggctattgcctgtaatttcctagcactttgaaagaccaaggcaggagaatcacttgaggmcaaagttccagagcaccctggacaacataggtagatagctctacaaagtcaaaaatcagacagatgcaatggtgcatgcccataatcctagctgctcaggaggctgaggtgggaggatcacatgagcccaagagtttgaggctgcagtgagctatgatcaagccactgtctctagtctgggtgactacagttgcccagagcccagactagactagcaaggccctgtctcttaacaacaacaaaaaagctcacagaggtaggggaggggaggatggttaagggatacagaattacagttagataagaggaatgagttctggtgttctgtggcattgtagggtgaatatggttaactatgatttattgtatatttttaaaaagccagaagattttgaatgttcacaattcaaaaaatgaaaaatggttgaagtagtaaatgtactagctagcttgatcattacacattacatacatgtatca

SEQ ID NO: 177783 - DNA, 554 bp, Homo sapiens
gggctgggcaacatggctattgcctgtaatttcctagcactttgaaagaccaaggcaggagaatcacttgaggacaaagttccagagcaccctggacaacataggtagatagctctacaaagtcaaaaatcagacagatgcaatggtgcatgcccataatcctagctgctcaggaggctgaggtsggaggatcacatgagcccaagagtttgaggctgcagtgagctatgatcaagccactgtctctagtctgggtgactacagttgcccagagcccagactagactagcaaggccctgtctcttaacaacaacaaaaaagctcacagaggtaggggaggggaggatggttaagggatacagaattacagttagataagaggaatgagttctggtgttctgtggcattgtagggtgaatatggttaactatgatttattgtatatttttaaaaagccagaagattttgaatgttcacaattcaaaaaatgaaaaatggttgaagtagtaaatgtactagctagcttgatcattacacattacatacatgtatca

SEQ ID NO: 177784 - DNA, 554 bp, Homo sapiens
gggctgggcaacatggctattgcctgtaatttcctagcactttgaaagaccaaggcaggagaatcacttgaggacaaagttccagagcaccctggacaacataggtagatagctctacaaagtcaaaaatcagacagatgcaatggtgcatgcccataatcctagctgctcaggaggctgaggtgggaggatcacatgagcccaagagtttgaggctgcagtgagctatgatcaagccactgtctctagtctgggtgactacagwtgcccagagcccagactagactagcaaggccctgtctcttaacaacaacaaaaaagctcacagaggtaggggaggggaggatggttaagggatacagaattacagttagataagaggaatgagttctggtgttctgtggcattgtagggtgaatatggttaactatgatttattgtatatttttaaaaagccagaagattttgaatgttcacaattcaaaaaatgaaaaatggttgaagtagtaaatgtactagctagcttgatcattacacattacatacatgtatca

SEQ ID NO: 177785 - DNA, 554 bp, Homo sapiens
gggctgggcaacatggctattgcctgtaatttcctagcactttgaaagaccaaggcaggagaatcacttgaggacaaagttccagagcaccctggacaacataggtagatagctctacaaagtcaaaaatcagacagatgcaatggtgcatgcccataatcctagctgctcaggaggctgaggtgggaggatcacatgagcccaagagtttgaggctgcagtgagctatgatcaagccactgtctctagtctgggtgactacagttgcccagagcccagactagactagcaaggccctgtctcttaacaacaacaaaaaagctcacagaggtaggggaggggaggatggttaagggatacmgaattacagttagataagaggaatgagttctggtgttctgtggcattgtagggtgaatatggttaactatgatttattgtatatttttaaaaagccagaagattttgaatgttcacaattcaaaaaatgaaaaatggttgaagtagtaaatgtactagctagcttgatcattacacattacatacatgtatca

SEQ ID NO: 177786 - DNA, 355 bp, Homo sapiens
aaaaaaatttcaccttgccccagcagctcagctgactcccgccccatgacacacatgtctaaaaagttgtgctgtgagtttctgaaatacattttaaaayagaattcatttaattatgaaaatgcaaacataaaatgaatttgtatctgttttagtcaagtaaaattagcgttaaatcaattaataaatggttaacatgttctacaatatgaaaaccatacccagttgcctcttcttctaattcatcatttttctttcttattcgattcacattatacttcagtgatgatattaactcaaaaagttttcttaattcttcattttcttttttaggcttaaaaaaagtgtttaaaat

SEQ ID NO: 177787 - DNA, 355 bp, Homo sapiens
aaaaaaatttcaccttgccccagcagctcagctgactcccgccccatgacacacatgtctaaaaagttgtgctgtgagtttctgaaatacattttaaaatagaattcatttaattatgaaaatgcaaacataaaatgaatttgtatctgttttagtcaagtaaaattagmgttaaatcaattaataaatggttaacatgttctacaatatgaaaaccatacccagttgcctcttcttctaattcatcatttttctttcttattcgattcacattatacttcagtgatgatattaactcaaaaagttttcttaattcttcattttcttttttaggcttaaaaaaagtgtttaaaat

SEQ ID NO: 177788 - DNA, 355 bp, Homo sapiens
aaaaaaatttcaccttgccccagcagctcagctgactcccgccccatgacacacatgtctaaaaagttgtgctgtgagtttctgaaatacattttaaaatagaattcatttaattatgaaaatgcaaacataaaatgaatttgtatctgttttagtcaagtaaaattagcgttaaatcaattaataaatggytaacatgttctacaatatgaaaaccatacccagttgcctcttcttctaattcatcatttttctttcttattcgattcacattatacttcagtgatgatattaactcaaaaagttttcttaattcttcattttcttttttaggcttaaaaaaagtgtttaaaat

SEQ ID NO: 177789 - DNA, 587 bp, Homo sapiens
agagatattgccaatgatatttcctttcacttcccagtcacagatgtagagaaagacagataagtcaggctaatatwattgaaaaggagaactttgaaggaagtggcaactatcaaatgccaactcttctagagatttcttacatttttgagatacagaaatttatatattgcacttatctattctggggtttttaatcaagagtgtatcccaaccttgaaggttttttgttattttgtgtgtggttttttttttttttttttttttggctattattgttgttagagacaagagtctcactatgttgctcaagctggattcaaactcttaggctcaagctgggactacaggaatacaccactttgcccagcttcaagaaaacatttttaaacatgttcaggccttattaggtctattacatcaaaatcttcaggggaaagcctacaattgtagatttttaacaaaatgtcctcaggtcactgtaatgcacaattctgagaattagtgcagcaatcacttcagtctcacctctcacccacatggctaattcctttatcagttggagatgtggccaaaaagagaaaaga

SEQ ID NO: 177790 - DNA, 508 bp, Homo sapiens
aatttatatattgcacttatctattctggggtttttaatcaagagtgtatcccaaccttgaaggttttttgttwttttgtgtgtggttttttttttttttttttttttggctattattgttgttagagacaagagtctcactatgttgctcaagctggattcaaactcttaggctcaagctgggactacaggaatacaccactttgcccagcttcaagaaaacatttttaaacatgttcaggccttattaggtctattacatcaaaatcttcaggggaaagcctacaattgtagatttttaacaaaatgtcctcaggtcactgtaatgcacaattctgagaattagtgcagcaatcacttcagtctcacctctcacccacatggctaattcctttatcagttggagatgtggccaaaaagagaaaagagtaagagagagtgtcatttattaaaactccagttaagtttcctggctatgggtagaacagggacaagtaaactcaaaatc

SEQ ID NO: 177791 - DNA, 451 bp, Homo sapiens
caggctaatattattgaaaaggagaactttgaaggaagtggcaactatcaaatgccaactcttctagagatttcttacatttttgagatacagaaatttatatattgcacttatctattctggggtttttaatcaagagtgtatcccaaccttgaaggttttttgttattttgtgtgkggttttttttttttttttttttttggctattattgttgttagagacaagagtctcactatgttgctcaagctggattcaaactcttaggctcaagctgggactacaggaatacaccactttgcccagcttcaagaaaacatttttaaacatgttcaggccttattaggtctattacatcaaaatcttcaggggaaagcctacaattgtagatttttaacaaaatgtcctcaggtcactgtaatgcacaattctgagaattagtgcagcaatca

SEQ ID NO: 177792 - DNA, 546 bp, Homo sapiens
agaaatttatatattgcacttatctattctggggtttttaatcaagagtgtatcccaaccttgaaggttttttgttattttgtgtgtggttttttttttttttttttttttggctattattgttgttagagacaagagtctcactatgttgctcaagctggattcaaactcttaggctcaagctgggactacaggaatacaccactktgcccagcttcaagaaaacatttttaaacatgttcaggccttattaggtctattacatcaaaatcttcaggggaaagcctacaattgtagatttttaacaaaatgtcctcaggtcactgtaatgcacaattctgagaattagtgcagcaatcacttcagtctcacctctcacccacatggctaattcctttatcagttggagatgtggccaaaaagagaaaagagtaagagagagtgtcatttattaaaactccagttaagtttcctggctatgggtagaacagggacaagtaaactcaaaatcccacttgattttgctatttacaagctccttatctc

SEQ ID NO: 177793 - DNA, 540 bp, Homo sapiens
ttacatttttgagatacagaaatttatatattgcacttatctattctggggtttttaatcaagagtgtatcccaaccttgaaggttttttgttattttgtgtgtggttttttttttttttttttttttggctattattgttgttagagacaagagtctcactatgttgctcaagctggattcaaactcttaggctcaagctgggactacaggaatacaccactttgcccagcttcaagaaaacatttttaaacaygttcaggccttattaggtctattacatcaaaatcttcaggggaaagcctacaattgtagatttttaacaaaatgtcctcaggtcactgtaatgcacaattctgagaattagtgcagcaatcacttcagtctcacctctcacccacatggctaattcctttatcagttggagatgtggccaaaaagagaaaagagtaagagagagtgtcatttattaaaactccagttaagtttcctggctatgggtagaacagggacaagtaaactcaaaatcccacttgatttt

SEQ ID NO: 177794 - DNA, 455 bp, Homo sapiens
ttgtgtgtggttttttttttttttttttttttggctattattgttgttagagacaagagtctcactatgttgctcaagctggattcaaactcttaggctcaagctgggactacaggaatacaccactttgcccagcttcaagaaaacatttttaaacatgttcaggccttawtaggtctattacatcaaaatcttcaggggaaagcctacaattgtagatttttaacaaaatgtcctcaggtcactgtaatgcacaattctgagaattagtgcagcaatcacttcagtctcacctctcacccacatggctaattcctttatcagttggagatgtggccaaaaagagaaaagagtaagagagagtgtcatttattaaaactccagttaagtttcctggctatgggtagaacagggacaagtaaactcaaaatcccacttgattttgctatttacaa

SEQ ID NO: 177795 - DNA, 546 bp, Homo sapiens
agaaatttatatattgcacttatctattctggggtttttaatcaagagtgtatcccaaccttgaaggttttttgttattttgtgtgtggttttttttttttttttttttttggctattattgttgttagagacaagagtctcactatgttgctcaagctggattcaaactcttaggctcaagctgggactacaggaatacaccactttgcccagcttcaagaaaacatttttaaacatgttcaggccttattaggtctattacatcaaaatcttcaggggaaagcctacaattgtagatttttaacaaaatgtcctcaggtcactgtaatgcacaattctgagaattagtgcagcaatcacttcagtctcacctctcacccacatggctaattcctttatcagttggagatgtggccaaaaagagaaaagagtaagagakagtgtcatttattaaaactccagttaagtttcctggctatgggtagaacagggacaagtaaactcaaaatcccacttgattttgctatttacaagctccttatctc

SEQ ID NO: 177796 - DNA, 550 bp, Homo sapiens
tttctgacattagaactttaagtatcaggatggcagagacagtttttttctagtgcttgggaagtgtgcaatgtatagttggcactcaatatttttgggatgtgttaccatagagaagccttttgtaattgcccttcctgcccactgcataaagaaagaccacagcattgtcatagagaaagagcttaatacgggaggctgaggcaggagaatggcgtgaacctgggaggcggagcttgcagtgagccaagatcacgccactgcactccagcctgggcgacaaagcgagactctgtctcaaacaaaaaaaagcttaatagacacgaggccggccataccacgtggaagatggagtttgcactcatatyatctcgttcaaagctcacaagttaggggtttttcaaagacagtttaagggaaggggtgggagtggccaggtaacagatgcttgctgctgattggttgggacagagatgaaatagtgggccaaagctgtcttcctgaggactaaattgcttctgggtggggccacaagagtgggggcgctggc

SEQ ID NO: 177797 - DNA, 452 bp, Homo sapiens
cacatgggctcctaaatataatttttcactaagtatgtcttggtttggtttctctcagagccagaccctcaggaaataataagaaaactaatagtttagttaggagggaatctcatgaaacaccagtagtaaagggagagatgaaacaaacaagagcagccagaaaacagagggtgttgtcaagaagcttaccactgggagttaatggagcataatctcatttrcaatctctgagaaccacatagatttgtacctcaaaaatatcccaccagaggcaagggagtctctgccacttatttattgagagcttctcttaggacgcattaattttctactgcgtcagtctgccatgcacagacgcagaatgggcttgcccagtagaaaaaaattctttatgcagagaagcagatgctgacatatgaagttgaagttaggcagaaaacactattgta

SEQ ID NO: 177798 - DNA, 592 bp, Homo sapiens
aatatacaacaaatgttatctctattgaatcttgcaaaacagacagtttccacaagagagaagaatgaaggaaattctaggctggggaaatgtgagggaataaagaaggaacagcctgagaagtctctccctcagcccactctatatgggcatgtaagctagcaaagtgacaggaaaatttagcgacatccatgaacactgagatgtgcagacaccgtgaccctgcaataccacttcaatgcatactgtagaagtatttgcacatctgcataaaaatcatcacattcattttttctgcagctttgcaaaaatgtggaaacagcccaaatacctgtcagtaggcaaatggataaacagaacttacaatggtcagtaataattatagasaaggagtgtccaatcttttggcttctctgggccacactggaagaagaattgtcttggaccacacagaaaatacactaacactaacaatagctgatgagctaaataaagaaaaacgtcacataaaatctcaatgttttaagaaagtttacaaatttgtgttgggctgcattcaaagccatcctgggctgcacgcagcccatgggtt

SEQ ID NO: 177799 - DNA, 629 bp, Homo sapiens
ggtagctgtgctcatcactcacctccctgaggtaacttataaggagatgccactaaastatctgattaggttgaagcagtggtcaaaagcatctatttcaaactgcttcgaaagccatcaagtttcttacaaatgccgtcactgggaagacatttgaaaatataaaaacaattactgggttatctgccatggactaccaaacaatgtttagagcatacttttctaaattatctgcttctagcctttcatttccatagagctctgttacaactctaagttataaataactaaaaataatcccaaagaaatttgtctatagatttacaaataaattacatctgttagagggttcagttaacttcaacccttttcccactgggggaagaaacagtctggcatccatttgcacattcatttcaacctcctgtacactatatccttttgtgcttcttagacttctcctgtgaacctgttatagtatctttctgatttcctcattactaatgagttaagtaaaatctttaacacgtgttcattttatatctgtaagagactcatgattttacatcttggtgtgtgaaaattatcctttaatgctgctgattattactatgaaagaataaaaaaac

SEQ ID NO: 177800 - DNA, 457 bp, Homo sapiens
ctaaactcttagtattcaaaagtgtgctccacgtaccagaaacatcagtagcatctgaaagtttgctagaattgcaaaatatcaggctccacttcaggactgctgaatccaattacgtattttaataaaaacctcagtagattcatgggggcatcgaggtarcacaaacgttgccctaaagtacacatcataccactctcctgttaaaaaatctttcagaaatttatcttaacagacatcagttcaaagtgatatgcatatgggtgtgccaattcattttattgtataccttacagacagatcatcaatatatgaaggagcaggacatcactctccaggggcagccatgggaagggcttcaaatctctctaactaaattggcaataaagggtttgagaagtagcatagggtatgaaagttgtaacttttggtgaaatgagtagtgctagaacacatg

SEQ ID NO: 177801 - DNA, 585 bp, Homo sapiens
cacttatatttgtaaaatataggagacagttgctccgcaagtatggtatcaaggtgcagagatacctcatatcagctggttcttaccctacccccacccccccccgcccggtatcactgctargaaaaatcgcacacataggaatattttaaatgtttaacatgggaagtgtgagataaatgtaacttgctttagtattaaatggatggcaaataaccaatataaatatttttttcaactctcttttgagagttagtgaatcatttatgtattccaatatatcttcctatgtttacctcttaagataacagagaaatgacctttggaaaataccattgcacacatctcgaaggcattaaaatgtttattacagccaccataattatacagttatgactttttcaagtggttctgataaaagcaaatgaatggtgaaatgttgtgggttgtccatggtgatgctactcctggaaaggcatccagtgctaccttctgagaagttgaaatgttcctcactttctcccacctacttcaagaaatgactatgaattttctcacctcatttattttttcacttgagcactt

SEQ ID NO: 177802 - DNA, 602 bp, Homo sapiens
aaaagactggaattaaaagtaatcttgaataataaggcaaaatgatgcttcccagatacactgaaatagactgcatgttgcaaatcacaatgagtaaaggtggaggatgaccagttttgagtaaatgggtcaggttggagaaatatttagaggtcagagtggattgcaagctaaactcagcccaacgttcattgaccaggattggacttgtgcccttacaatctaatcatagtgtgaaatataaacatggagtcactgacactctaagacccattgtggaaaagccagtaagcatgctgtaacaatgccctggatatgaaccatatgttgcacagctccagggaaatcagtgcatattcatagattttgtagattcatggcktattaaagctgaaagggatctcacaagccatgaatctgtaccttgactcactctctcttttttaaacacagcagatacaaacactgtgaggttgtaagctagccccaagatcacacagccagtcagtggcctggtgaaactaggacttggatttcctgagacataaaaggcttctgtttgcagcttgaagaaagcagtctctagacaaagtaagtagtcc

SEQ ID NO: 177803 - DNA, 602 bp, Homo sapiens
aaaagactggaattaaaagtaatcttgaataataaggcaaaatgatgcttcccagatacactgaaatagactgcatgttgcaaatcacaatgagtaaaggtggaggatgaccagttttgagtaaatgggtcaggttggagaaatatttagaggtcagagtggattgcaagctaaactcagcccaacgttcattgaccaggattggacttgtgcccttacaatctaatcatagtgtgaaatataaacatggagtcactgacactctaagacccattgtggaaaagccagtaagcatgctgtaacaatgccctggatatgaaccatatgttgcacagctccagggaaatcagtgcatattcatagattttgtagattcatggcttattaaagctgaragggatctcacaagccatgaatctgtaccttgactcactctctcttttttaaacacagcagatacaaacactgtgaggttgtaagctagccccaagatcacacagccagtcagtggcctggtgaaactaggacttggatttcctgagacataaaaggcttctgtttgcagcttgaagaaagcagtctctagacaaagtaagtagtcc

SEQ ID NO: 177804 - DNA, 251 bp, Homo sapiens
gttgatttgaatccatgtttcttcttaagtgaatgtgcttttccttgccttaatttaattaaaaatcaaccctggctttacataagctcatatggaactcataactggtcaacrtatccatcactccatttgtgatttgcttatttattaaaggaccctgaggagtgctcctgggctggtcagtcagcctcggagccctggccccagcaagccccctgtgtcctctaccaaccctcacactagtttccccg

SEQ ID NO: 177805 - DNA, 468 bp, Homo sapiens
ttctatttgaccttgagtttctgaacctctgatttctcttttcactttgttgggccgggcacaggytgaggtagatgctctctggcactttgagtttgtcattggtgatctgatgcctgagtttggcttctgctctggttttgggggtgatagggtagcagcattgttgtctgggttaaatactcgggatttattgtctcacaaccatggaaaactagaatgcagacacacaagagtgaggttcagagcagaaatgtaataggcaaaagaaagagaaaagctctcttgctacagaaaggggtctcagagaaaatgggttgccacttccgcagtgaagtgtagaaggttttataggtgagcttgaggagacggtgtctgatttatatagagcatgaaagattggtcggaccaggtgtgtcatttgcatagtgcgtgaaaatctggccacccccactctaatcttttatc

SEQ ID NO: 177806 - DNA, 614 bp, Homo sapiens
tatttttaatcttaattgtaacaggaagcaaatatggcatctaccatgattttaactcatttcaaggttctgaaatttgagcaatatactatgttatataattttctttcagaaatatctttaactgttttagaatttagaagaagagagtttaatatttgccaaactccatatgtggtacaaatttgtctcaacttcatatttgactttagtaacccaatacaacgctcttggagtcagtactgctgggtggagaaaatcactggaktgggtgtcagattagacctattaaaaccctagctgtacatacatgctagggtcacagagacagttcttaaggtgcattgagcctcagtctcctcctttgtaaaaagggataatattgggacttacaaagaaagttatgaaaaccaaataaaacaattcccctaaatcacttagcatagtgtctagcattaaaaaaaaaatcaccatagatgtttttagtttgggcccagaaaataattattaggacttgtatactacttcaatcctcacaagttttaagaaatcatcttgttctatttaaatatatactttgactatttttaagcaacaaatgatatctgttcatg

SEQ ID NO: 177807 - DNA, 614 bp, Homo sapiens
tatttttaatcttaattgtaacaggaagcaaatatggcatctaccatgattttaactcatttcaaggttctgaaatttgagcaatatactatgttatataattttctttcagaaatatctttaactgttttagaatttagaagaagagagtttaatatttgccaaactccatatgtggtacaaatttgtctcaacttcatatttgactttagtaacccaatacaacgctcttggagtcagtactgctgggtggagaaaatcactggagtgggtgtcagattagacctattaaaaccctagctgtacatacatgctagggtcacagagacagttcttaaggtgcattgagcctcagtctcctcctttgtaaaaagggataatattgggacttacaaagaaagttatgaaaaccaaataaaacaattcccctaaatcacttagcatartgtctagcattaaaaaaaaaatcaccatagatgtttttagtttgggcccagaaaataattattaggacttgtatactacttcaatcctcacaagttttaagaaatcatcttgttctatttaaatatatactttgactatttttaagcaacaaatgatatctgttcatg

SEQ ID NO: 177808 - DNA, 516 bp, Homo sapiens
gttgaatatttcagcctatattctccatgaacattctctttgtttatagaataatcatagaattaccatcaaaatcaagaaattaacattactacattactaacagccattcaagttttgccaaatatcccagcaatgtcttttatagccaaaggaataaataagagtcacatttggcccacagtttcatattattttaggctstttcaatttggaatagttcctagtctttccttgaaactttttgaagagtgtaggagagttattttttaaagaaagtccttcaagtttatctgatgtttatttcatgattgaattcaggctatgcctgtttggcaggaatatcacacaaatgactccacattcttcttgcatcttatcagggagtgcatgatttcaatgtgactcatcaataatgatattcactctaatcacttaaggtagtgtttgccaggtttctttactataatgttttttcccttgcgtatttaataaatacaatcattcttcagcaac

SEQ ID NO: 177809 - DNA, 516 bp, Homo sapiens
gttgaatatttcagcctatattctccatgaacattctctttgtttatagaataatcatagaattaccatcaaaatcaagaaattaacattactacattactaacagccattcaagttttgccaaatatcccagcaatgtcttttatagccaaaggaataaataagagtcacatttggcccacagtttcatattattttaggctctttcaatttggaatagttcctagtctttccttgaaactttytgaagagtgtaggagagttattttttaaagaaagtccttcaagtttatctgatgtttatttcatgattgaattcaggctatgcctgtttggcaggaatatcacacaaatgactccacattcttcttgcatcttatcagggagtgcatgatttcaatgtgactcatcaataatgatattcactctaatcacttaaggtagtgtttgccaggtttctttactataatgttttttcccttgcgtatttaataaatacaatcattcttcagcaac

SEQ ID NO: 177810 - DNA, 516 bp, Homo sapiens
gttgaatatttcagcctatattctccatgaacattctctttgtttatagaataatcatagaattaccatcaaaatcaagaaattaacattactacattactaacagccattcaagttttgccaaatatcccagcaatgtcttttatagccaaaggaataaataagagtcacatttggcccacagtttcatattattttaggctctttcaatttggaatagttcctagtctttccttgaaactttttgaagagtgtaggagagttattttttaaagaaagtccttcaagtttatctgatgtttatttcatgattgaattcaggctatgcctgtttggcaggaatatcacacaaatgactccacattcttcttgcatcttatcagggagtgcatgatttcaatgtgactcatcaataatgatattcactctaatcacttaaggtartgtttgccaggtttctttactataatgttttttcccttgcgtatttaataaatacaatcattcttcagcaac

SEQ ID NO: 177811 - DNA, 516 bp, Homo sapiens
gttgaatatttcagcctatattctccatgaacattctctttgtttatagaataatcatagaattaccatcaaaatcaagaaattaacattactacattactaacagccattcaagttttgccaaatatcccagcaatgtcttttatagccaaaggaataaataagagtcacatttggcccacagtttcatattattttaggctctttcaatttggaatagttcctagtctttccttgaaactttttgaagagtgtaggagagttattttttaaagaaagtccttcaagtttatctgatgtttatttcatgattgaattcaggctatgcctgtttggcaggaatatcacacaaatgactccacattcttcttgcatcttatcagggagtgcatgatttcaatgtgactcatcaataatgatattcactctaatcacttaaggtagtgtttgccaggtttctttactataatgtttttwcccttgcgtatttaataaatacaatcattcttcagcaac

SEQ ID NO: 177812 - DNA, 478 bp, Homo sapiens
ggaaagtgcatctgtcctcagaagtcatcacacagggcaaaaagaacatggtacctgcctacggagtgactttagtgagatgaactgtttccctgtcctctggtattgaagacactaatctataaaaagaggccagtctagctgatacctaaggcactccacctcttacarttcttcccgtgatgccgtgaactacggaaaataggcatatataaacccttgcattatgtgacaagagcctaggaatcctagatagtcattagttacactaaatttaaatatttacttccaaatagccaaaccaagctcactttcttgatcggtcccccctcctcagtccttctcagttagaataaaagtcagatgagagttgattaaatatctaacattaaaacacttaggcttaaaaaatcctcctgcaatgatgtaataaacaagacaggatgtatttgaaattcactgaagcataaaactaaat

SEQ ID NO: 177813 - DNA, 486 bp, Homo sapiens
atatatagatatattaaaactttttcaggccagccccaatttttttcctgattggatgagtttcatccaggctttgctgctttgcatggcaaccttaaggcaactcacatatgtaatgtgaaacttcaagcaaatacataagcaagaaaaccaacaaagaagcccaataaccttggtatatgatggttttgcctacttaaaagcatgtgcatgctcattgraatgtagagaaaagaaaattttgtgagaactttgtttcccaagatctgcatttgtataactttaggcctgccacctcttagtacctccctcatcagatggttccattgtgaaggatgactgaaatgaatgatgttcccagtatgaaactctgcctgacttcctgaagctttcagtaatacttactcatcccccaggaaataaggagctgctcatctgcgtttgataagaacggagttttaggttggcccgtgtgatggtggcagc

SEQ ID NO: 177814 - DNA, 486 bp, Homo sapiens
atatatagatatattaaaactttttcaggccagccccaatttttttcctgattggatgagtttcatccaggctttgctgctttgcatggcaaccttaaggcaactcacatatgtaatgtgaaacttcaagcaaatacataagcaagaaaaccaacaaagaagcccaataaccttggtatatgatggttttgcctacttaaaagcatgtgcatgctcattgaaatgtagagaaaagaaaattttgtgagaactttgtttcccaagatctgcatttgtataactttaggcctgccacctcttagtacctccctcaycagatggttccattgtgaaggatgactgaaatgaatgatgttcccagtatgaaactctgcctgacttcctgaagctttcagtaatacttactcatcccccaggaaataaggagctgctcatctgcgtttgataagaacggagttttaggttggcccgtgtgatggtggcagc

SEQ ID NO: 177815 - DNA, 552 bp, Homo sapiens
catgcacacagtggcacatgcctgtaatcctagctatttgggaggctgaggcaggagaatcatttgaacccaggagtcggaggttgcagtgagctgaaatcatgccactgcactctagcctgggcaacagagtgagacttcatctcaaaacaaaaaaagtactgttttgaccatttcccttcccattgtctaaaacctggacttcaatcttatgaaatgaacctgtggccctcttttctttcactgtgaaatgtagttctctagtamgttcttcagacttggctgcttctgaacatcttcccccaaccaccccagtcaccatagaaacaccaagtcaagccttataaaaatcattatctaattttgtcttatttctaaagaggagcttttggttgcactttgtcttgatgtgacagacattataacctgtgattgaatgtctgatcattttatacttacagtcctcgaaggtgatttctgtgatattggcaaagatagtgaattaatttccattcattagtcaggaatcttatgaactgtatctttctgact

SEQ ID NO: 177816 - DNA, 552 bp, Homo sapiens
catgcacacagtggcacatgcctgtaatcctagctatttgggaggctgaggcaggagaatcatttgaacccaggagtcggaggttgcagtgagctgaaatcatgccactgcactctagcctgggcaacagagtgagacttcatctcaaaacaaaaaaagtactgttttgaccatttcccttcccattgtctaaaacctggacttcaatcttatgaaatgaacctgtggccctcttttctttcactgtgaaatgtagttctctagtacgttcttcagacttggctgcttctgaacatcttcccccaaccaccccagtcaccatagaaacaccaagtcaagccttataaaaatcattatctaattttgtcttatttctaaagaggagcttttggttgcactttgtcttgatgtgacagacattataacctgtgattgaatgtctgatcattttatacttacagtcctcgaaggtgatttctgtgatattggcaaagatagtgaattaatttccattcattagtcakgaatcttatgaactgtatctttctgact

SEQ ID NO: 177817 - DNA, 537 bp, Homo sapiens
ccactccttgactcctctaacacagttacttcctttgtctctgcagtcctagatctagtgatggcttcctccagatgctgatctgtagatcacaatccctttctgtgtctgttcttcttgctctgcaaaacatcacagtatccttgtataaaattctttctaccgttacttgggtgggttttgctttcctgcctggatttcctgatgaatacagtttcaggttcaggaggaggaaaaatggactctgaacacttaattgaccacctgtaaccccatcaatatccaatccaaagtccagacatgtctggtgtggtatgatatcacacaacattggatttatgactaaatccaattatartccatttctcataccctaaaaatgggcctggaaaaaaattggttgtattaatggtccaaataaaaatgtgtacatatacaaatagtatgggagaaaatttttaaaattttggcaagaagacctgtaaatttttatctcattttatagcaggcattaagaccctgcaaaggcaatgctgg

SEQ ID NO: 177818 - DNA, 546 bp, Homo sapiens
tagccaggaagtgttctttaatcctcggactttttaaaggtaatgaaaggactagttgcaagtgaccaaacccttagcaactattgccatgcattatgtgattatgataattatttagctgttcaagaaacaacacttttacaatttccttttcartaaaaggtggggaaaacctttggcatacaccagtcaaactatcttggccagatttttgttttccattgttgtccccctgctgctccttcactgtgacatcacaccatccttgccctgtcttccattcaggagctacattcttgacttgtaaccctccccactttttttttcttcttaaaaaaaagtgatacatgtagagaaagtgcaggtttgttacataggaatatgtgtgccaaggtggtttgctgcacctattgacctatcctctaagttcactcccctcacccccaaccccccaaaaggccctggtgtatgtcgttcccctctctctgtccatgagttctcattgttcaaccccacttatgagcgagaacatgtggtgtttggttt

SEQ ID NO: 177819 - DNA, 578 bp, Homo sapiens
atctaatccagtttgtcagaactaataataatacaaatgcaatttctcacacagggacacatccaaaaagttcacaaatgagcaattgtgaggtctttttaaaaagtaawatttataaattattgcaagatgttaccagcctcaaaccatggttgcaatttctaattccaatgagttgataaaaggtgctattaataaaaaggcacattttgggcagctgacataactaattgatcaagtaatttgagtaaaaatacaagatttcactaggaaacccggacagggatgaaatcactcaattttccaaaagccagaaggccttgaaaaaagaggagaccacagaacacttttatgcctaaccaaaaccaaataaaatgatcccaacgtacaaataggcttcagatgatataatgtgacgagagatttcaactatgtaggcaaacctttcattttcttacccaaatatgccaagccaaggattacctaaatagacgaagggagagtcctatttcctcagcgtgttgtctctgtaagggtggaaaggaaaactttttcccacctcttcaaatttcgctgta

SEQ ID NO: 177820 - DNA, 517 bp, Homo sapiens
aatcgtaggggacatcaacatcccactattggcagacagaaaatcaataaagacacataaggtttaaattacacaatagaccaaatagacctagcagacataaacagaacattccatycatcagttgtaggatatacattcttctcaactgcacatggaacattttctagaaaagatcattgttaggccacaaaaaaagtcctaataaatctaatgtcttactttattttgtgctattataacagaataccacaaactggctaatttataatgaacagcaatttattggctcacagttctggaggctgggatgtctaagattgaggatcaagggaccaaatatggcaagagctttcttgccatgtcatcccctggtagacgggcaagaagagggtaagagagacaaaggggagctgaacttgtccttttataaggaatccactcttataataacaaacccattcccatgataatgacatttatctgttcatgaaggaaaggctctcatgacctaatg

SEQ ID NO: 177821 - DNA, 536 bp, Homo sapiens
aaataatcgtaggggacatcaacatcccactattggcagacagaaaatcaataaagacacataaggtttaaattacacaatagaccaaatagacctagcagacataaacagaacattccatccatcagttgtaggatatacattcttctcaactgcacatggaacattttctagaaaagatcattgttaggccacaaaaaaagtcctaataaatctaatgtcttactttattttgtgctattataacagaataccacaaactggctaatttataatgaacagcaatttattggctcacagttctggaggctgggatgtctaagattgaggatcaagggaccaaatatggcaagagctttcttgccatgtcatcccctggtagacgggcaagaagagggtaagagagacaaaggggagctgaacttgtccttttataaggaatccactcttataataacaaacccattcccatgataatgacatttatctrttcatgaaggaaaggctctcatgacctaatgacctcttaaagatct

SEQ ID NO: 177822 - DNA, 592 bp, Homo sapiens
ctctgggacacattcaaagcagtgtgtagagggaatctgatagcactmaatgcccaaaagagaaagcaggaaagatccaaaattgacaccctaacatcacaaaaaatggttttttatttattaaaaataaataaggtgatccattgctaatatttttacttgtgtcactatttctgctactgctaattcttgctactaccactaccacaaccactacctacatcccaccccaatcaccaccattagcacttaataatttacaaaaagctttcaatacatgaccttattactcattacatctttataacagacctatgagatttccatacatacctcatgatccatattacagatgagaaaaatgggcagaaaaaatcaataacttgtccaaggtgaaaaagtaacagagccattatttgaagctggatctatctgatgccaagttacctcatccaaaatgaggatattacaataaaaagattccaaagcaataaaatgccatatgtgattatcctgcattttccctaacaggttaacaccttcccctgctccctgccaatttttatcctgtcaacatgaaaagaaattcttt

SEQ ID NO: 177823 - DNA, 575 bp, Homo sapiens
tgagaaaggatagcgtggtagaagctatgctttgaaggtgtcacatttgtaggaggttagsttggaagagttctgaagaggcattatcagtcaagtgtggggatagctggggtactctgccgacagctatgatgatgtttgcagacacagtatgtaaaaatagacccacaaggcttgataatgcacagttgtcgaatattagaacagagcaggagtcttgaagccagggaaacttcacagttttggaggttcgaacttgtcagtgaccaaagtgaagtgatctgaagccaggaggtaagtcatgatggcgaggagaagtccagtccagaggaggaaggcattcagattctgagaatgaggcagattattggagtggggccggtggagagaccccacagaggtgacacaggtgacactgaggcagtggtggtatgtacttctctgcttcagttaagggtcaaaaaaggctgaccagaggtgagaagaaggaaagcaaggagggaaggaacaatatcaagcactcctcctgagaagtggctgattggaaatgtgcccatgaaggacacagaggccca

SEQ ID NO: 177824 - DNA, 474 bp, Homo sapiens
ataatatgtgattttttaaaatcagttctctacctaaatacagtatgtaagtttacgttcttcagaaaatataagacacaaccatcagaagaccaagagatttgttggggttagtacctatgaatgataaaggagagaaagcaggagaaggaaaggacaatcttcagatcatggtctcagggtggtacttgtgtaatgggaggggataaaaaaaagaatgggtagaaagtgctccaaaccatggtgcagctctgagcaagtatcagccagctcagtgggaaactccattgtaaagattgctcaaaggggaatcacactgrgcaaaaacaactacttcctactgctcttcctacgctaaatcattggcttatgccatgttggaaggcacgtcatcaacttaaacactgaggcagagaccaaagtccctgcaaatggaaattattagctaaaggttctttacgtggcaagtccttt

SEQ ID NO: 177825 - DNA, 474 bp, Homo sapiens
ataatatgtgattttttaaaatcagttctctacctaaatacagtatgtaagtttacgttcttcagaaaatataagacacaaccatcagaagaccaagagatttgttggggttagtacctatgaatgataaaggagagaaagcaggagaaggaaaggacaatcttcagatcatggtctcagggtggtacttgtgtaatgggaggggataaaaaaaagaatgggtagaaagtgctccaaaccatggtgcagctctgagcaagtatcagccagctcagtgggaaactccattgtaaagattgctcaaaggggaatcacactgagcaaaaamaactacttcctactgctcttcctacgctaaatcattggcttatgccatgttggaaggcacgtcatcaacttaaacactgaggcagagaccaaagtccctgcaaatggaaattattagctaaaggttctttacgtggcaagtccttt

SEQ ID NO: 177826 - DNA, 609 bp, Homo sapiens
cctctcttcctcttatttttcagattattttcaatatgagaccatttattccatgggcatgggattgaaattcaaggacaatggttgctaggatattcactcttcattatctacagcagggtttctcagcctcagaaatttggacatttggaagcgaacaccttttatcatggtatcactgtcctgtgcttcacaggatacgtagaagcatctctgacatgtatccactgaatgtcaggagcaccagcaccccagagtgacaagccaaaattctgagatttttgtccttttgcaggagagagaaaatcaccactagttgagaayaacttattcatacaattgagatctggtttaaatgattgtcaaggataaaattaaatggggaagaaacgagtagagatattgaaggaatgcagagcggttaaataggtatagctgagtattaaaatgtgaaaatacactgaagcttattgttgcaatcaactagtcacagatattctgtacatgtgatggaaaggtatgtatttctgtgtgcttcaagatcccatttgaaaattggcttttcgttcctcttctttttgtccctgtccattttttttccacatctga

SEQ ID NO: 177827 - DNA, 403 bp, Homo sapiens
tagccccagttccaggatgctacaatgtgccagtttctcttcattttcttcctgtttatttgcaacttttgatttcactttattgatacaaccatttccatgtaaaaactagtttgtaccgaactcacaaatctagtattttagaccagttttcttccccaaggacaattaatatgcagccattaaataactccataatgacattttcaaacacaaacaagttgtttacacctatwtccccaggacaatggggctcgcttaatctacatttcacagtcaagtgattttttttttttttaaagaacaaaaacagattgcttcaaagttttaattagtacctatccatcttatgaaaaagtgaatattttctttacagaaatattttgatataaaagttaaaatg

SEQ ID NO: 177828 - DNA, 622 bp, Homo sapiens
gttaaagctttggctttctcaaaacactttcctgataatcagatgatacccttcttcagccatccagtaagtcartagcaaaatgccttgagcatcccaaaaacttgttgccatgacccttgcttttgactggttcacttttgctttgactagacctagtccaactcttgttagtcattgactagatagtgctttttcttcagggtcacactgatgaagccatgttgcatcttctgacacagttatttgaagaaatcttttatgatcttcaggatctttaaaactcccactgatagctatgctcttgtctacagctgatctgagtgcaatgaatttggcactgctcaggtggaaagtttgctcagccctaatgtttcattcagaattgtgtaagctcatcctattgagatgtctgtggtgttggctcttgtttcagttattaatcatcagtcttcttcaattagggcaaaaacaagatgaatttttttcttgcaaattgatgaggatgttctgccaccagggggttcatcttcaacatcatctagatccttcttaaaatgaattatttatttgtaaactgccaagttctttgagatcattgtgctcataaattttttgtaag

SEQ ID NO: 177829 - DNA, 622 bp, Homo sapiens
gttaaagctttggctttctcaaaacactttcctgataatcagatgatacccttcttcagccatccagtaagtcaatagcaaaatgccttgagcatcccaaaaacttgttgccatgacccttgcttttgactggttcacttttgctttgactagacctagtccaactcttgttagtcattgactagatagtgctttttcttcagggtcacactgatgaagccatgttgcatcttctgacacagttatttgaagaaatcttttatgakcttcaggatctttaaaactcccactgatagctatgctcttgtctacagctgatctgagtgcaatgaatttggcactgctcaggtggaaagtttgctcagccctaatgtttcattcagaattgtgtaagctcatcctattgagatgtctgtggtgttggctcttgtttcagttattaatcatcagtcttcttcaattagggcaaaaacaagatgaatttttttcttgcaaattgatgaggatgttctgccaccagggggttcatcttcaacatcatctagatccttcttaaaatgaattatttatttgtaaactgccaagttctttgagatcattgtgctcataaattttttgtaag

SEQ ID NO: 177830 - DNA, 622 bp, Homo sapiens
gttaaagctttggctttctcaaaacactttcctgataatcagatgatacccttcttcagccatccagtaagtcaatagcaaaatgccttgagcatcccaaaaacttgttgccatgacccttgcttttgactggttcacttttgctttgactagacctagtccaactcttgttagtcattgactagatagtgctttttcttcagggtcacactgatgaagccatgttgcatcttctgacacagttatttgaagaaatcttttatgatcttcaggatctttaaaaytcccactgatagctatgctcttgtctacagctgatctgagtgcaatgaatttggcactgctcaggtggaaagtttgctcagccctaatgtttcattcagaattgtgtaagctcatcctattgagatgtctgtggtgttggctcttgtttcagttattaatcatcagtcttcttcaattagggcaaaaacaagatgaatttttttcttgcaaattgatgaggatgttctgccaccagggggttcatcttcaacatcatctagatccttcttaaaatgaattatttatttgtaaactgccaagttctttgagatcattgtgctcataaattttttgtaag

SEQ ID NO: 177831 - DNA, 640 bp, Homo sapiens
ccaaactgctcactttcattttgaatgaacagccttggtcatttctggtggttattttgctcttggtgtttaataaaatatgttttagttaaatatcttttaaaatgtctccttttttgaaggacaaatgtttacagttcaagagaattaaaaacatgactctgcaaaccatgtctcataagcagttttcaattgacaaattatagaggtcaaaataataaacttctaaatgactattcttatactccctaaagagatagttttgcatgggccattctaaatatgatataaatgtatgataataatagtaactttgtaagtaaaaataatgtaagaaataatggctattttgagtaattaatcatagttttaacattatttgaatatagaaatataattttcttttatatgttctcattctgagrttcatctttaagtattgagataaaaccaatcttcttaaatagctggcttaaaaaaattgtttttttttttcaaataattttgaattcttctaagaagaattatcaatttaagataaaattttatttaccaaagcaaaggtttcactttccaaatattaagtttgaagtcagcattgttgggagaaaagctgagtgttggaagagaagctgaggca

SEQ ID NO: 177832 - DNA, 563 bp, Homo sapiens
caattccatgtcagttttgctaaactaataggtcatttattttttttcataaagagcctttctgtccttcttttagaaaattgagacgtagtagtgattcttcacagtaattaatcacaggaagcccctcaagccaaggtgtctgtaataaattactgcctcttcatgaagccagcttcacctgctagctgtgctaccataggatattacatttacttgccctatatgtattttttttccttttcttggaaaacacsggtgataatagtaacctgtctcataaagttttgaggcggttacattgttaagcacttgcaaagtgcttagaacagtgactgacattttgcatttatttaagttgtgttagctattattttcagaatgcagagcagtgttttgcaaagagaatttaaccgcttcttttattctcatagacttactgttgagaagctaaaagtccctttctttttgttttgcttgactcttctgtcataaaacttctgaggtttccttcttgactttatctttaaaaaatcatgactagaagctgactagccataatc

SEQ ID NO: 177833 - DNA, 563 bp, Homo sapiens
caattccatgtcagttttgctaaactaataggtcatttattttttttcataaagagcctttctgtccttcttttagaaaattgagacgtagtagtgattcttcacagtaattaatcacaggaagcccctcaagccaaggtgtctgtaataaattactgcctcttcatgaagccagcttcacctgctagctgtgctaccataggatattacatttacttgccctatatgtattttttttccttttcttggaaaacacgggtgataatagtaacctgtcycataaagttttgaggcggttacattgttaagcacttgcaaagtgcttagaacagtgactgacattttgcatttatttaagttgtgttagctattattttcagaatgcagagcagtgttttgcaaagagaatttaaccgcttcttttattctcatagacttactgttgagaagctaaaagtccctttctttttgttttgcttgactcttctgtcataaaacttctgaggtttccttcttgactttatctttaaaaaatcatgactagaagctgactagccataatc

SEQ ID NO: 177834 - DNA, 518 bp, Homo sapiens
cacttactgcattagttggactctcggacctttaaaatcacctattttcatatcctctgtacaaaaacagcaagatatattaagggcatatttgaaaaagatttttaactccaaatttctaaaattacataaatkcaatatatgtgaaataaacacgtgaaaataacatctagtacctgtcatacagtgaatataacattcattttgttgttattatgataatgaagcatcagctacttggatgtaatatttatgcagacagttttggaaaagagaaggtttctttttttgtttttatttcaaagtttctttcctaattatatgcaacttagcgtactatcaatccttaatatattcatcttggcttgcaggtttattgcctgaaaatacagtaatcatgtatttggaaaaaccatcttaggtctaaaacgtttagtatcttgaaaaatgaaggtcttttgtttgtttgtttaggttttgaagctttttaggctttatgcctttaaaaaaaaaaaaaa

SEQ ID NO: 177835 - DNA, 570 bp, Homo sapiens
aggaaaggggtcttctgctagctatcccactggcagctgggacccagaagtccctaaaactccagaggagctgtgatcccaagagagtaggtaaacccaaattgcacaaaagtgtgcaagaaaataaagtacatgaaccccagctttctggccagagaaacaaaacagaaggctgagggaaccataaaatgctgggaagatcatggagaagaaggagattgaaaaaataaccccataaacttctttaggaactcctggactcattcccaaggtgtggtgcatgaatagatctcattctaatcagaaaccaaagactggaattggctacgagggaacacatgtgggacagactgaaatagcactgcaaagatttgaaaacagactgacaccagaaccataacccacagaaagctggctagaacttggaatctgaacycaacaggatcagttactaaaacaaaaatatcaatgttctccagaggatttaaacaaaacccaaaccctcataacataatattcaaaatatccatggtatcatccaaaattattcaacatgcaaagaaccaagaa

SEQ ID NO: 177836 - DNA, 415 bp, Homo sapiens
ctcaattagttactcatgttttaactttctaagtgataacacattgaaggaattatttgttgtttggacttatttggtataacttttcttcttgtgtggaaaatgaagagttcactacagtttcctgtttgatttaggaaattaatctatctagtaaggagaaaatagttgtcataattgcatgtagtcacccatatgtttaaacctacacagtgacaaactgaagattgctaatgcatggagtggatttggtggatgatgactaatcaaatttcacaactatattaatgtttcacctggctaagttagttttgttttgttttttaatgacatgggcccactgcataattgttagtgctttctccaaaaatktgatcacttacttactctgaccccacccctgacttgaagtgtc

SEQ ID NO: 177837 - DNA, 415 bp, Homo sapiens
ctcaattagttactcatgttttaactttctaagtgataacacattgaaggaattatttgttgtttggacttatttggtataacttttcttcttgtgtggaaaatgaagagttcactacagtttcctgtttgatttaggaaattaatctatctagtaaggagaaaatagttgtcataattgcatgtagtcacccatatgtttaaacctacacagtgacaaactgaagattgctaatgcatggagtggatttggtggatgatgactaatcaaatttcacaactatattaatgtttcacctggctaagttagttttgttttgttttttaatgacatgggcccactgcataattgttagtgctttctccaaaaatgtgatcacttwcttactctgaccccacccctgacttgaagtgtc

SEQ ID NO: 177838 - DNA, 516 bp, Homo sapiens
aagaactctcaaaaaattaggcattggaggaacatacctcaacataataaagtccaaaaatgacaaaccctctgcccacatcacactgaatggggaacagctggaagccttttctaagaactgaacaagacaaggatgcccactttcaccactcctattcaacatagtaccagaagtccaagccacatcaatcgggcaagagaaagaaacaaaagacatccaaattggaaaagaggaagtcaaattgtccctctttatagctgggcatgattttatatctagaaaaacctaaagactccaccaaaaaactcttagaagtaataagcaaattcggtaaagctgcaggatacaaaatcaacacagaaaaatcagcaatgtttctatacatcaataatgaactcaccgaaaaagaaattaagaaggcaatcctatttacagcagctayaaaaaaataaataacacctaggaataaagtgaaccaaggagaggaaagacctctacaaggcaaaccacagc

SEQ ID NO: 177839 - DNA, 601 bp, Homo sapiens
tatatgcctagatctaatatatgtcaaaactgtatttttaaaaaagaaaatctggctgggtgtggtggcttacagctaatcccagcaccttgggaggccaaggcgggcagatcacctgagttcaggagtttgagaccagcctgaccaacatggagaagccctgtctctactaaaaaaaaaatacaaaattagtcgggcgtggtggcacatgcctgtaataccagctactcgggaggctgaggcaggaaaatcagttaaacccgggaggcggaggttgcggtgggccgagattgcacctttgcgctccagcctgggcaacaagaatgaaacccgtctcaaaataaaaaaaaaagaaaaagaaaaaagaaaagaaaaagaaaacctttcactgaagagaaaaataacaaaaaaagacatattttrtttattgagtcttagacaggagactgtgaaagataccaaactcttcagaggattcagacacccaattaggtgccaatactgtcttatgcccaaaggatatgccactctttgcaaaaagagacactactgactcaattttcagactgagaaagatagcaccatttaagaacctaagctt

SEQ ID NO: 177840 - DNA, 625 bp, Homo sapiens
gtttcttattaacaacttacttaatgttaaaataaaatgaaaaatttaaattaaattgatttttatatgttcaaaggaaattgttaaaaattataattcaaattacaaaaatgtaattattcaaaggcagagattaaaatgacttgtgcaattgcatcaaaatacgaattttcttttaattgttgaattttgacaaatgatttgtctagacgcatttcaagaccttaaactataatttatgttgaagaaaattataaaacttaaatatatagaattaggataaaaataaatgtgtgttttactaagatttcttcaaattgaatgggtcattgtttactctatgttccctgtacttatacagtaaacaatgaacatatttattaaacaaattgcactattcaatgaattggctggacaatttaaaccaaagaatacatttgtcgtgaaaagrtcttaaaaagtcagtatcttaaactttctggataattctctgttattacgatcatttagtatttattattttctaatatttattattattattactgtctggtgaaaatgcctattccccttataaatatctttgtactttccaagagtttggccaatatcctctacatataat

SEQ ID NO: 177841 - DNA, 571 bp, Homo sapiens
ctactttctgcacattaggcttccaggtcagttaagatgccawtagttttcctggagaccacattccagttttgacctattttaaaaaaccttctctactgcagtctagtctttcccatcctgagctcctgttgaacttctctccatcatgaagtgtacagagcttttgttgtttgtttgacattcattggtgagaatatgaaaatgtcacaggcaacttcaaagagtgatcatgcccagagaaaacaaggtttaaaaaaccataaatgaatagtatgttacaacttcttcaatgcaatgcttcagatatttgttagcttactgagcacagtacagattttatggaaaatgtttgaatataaaatgatcttttatttcacaggaaactgaatgagtatgcttgatgtgtgaaagggtaagtgggttgtgaggttgcttctttcattaacattcctcatattgtttcctcactttgaaaatgcttttttcttctttttcttacttttttttcctcctctttatccctcttgcttccattttttgtgttcccttttcaatatttttcttcctc

SEQ ID NO: 177842 - DNA, 588 bp, Homo sapiens
agcattttaattaaagtataagtcagtagaaatatgtaaggaaaactgttaatgcacttaaatttgctaaacaccccaaaaatgtttgctgggcacagttgactatgcctttgatatcagggttcttgagtgtgctagaggaacacaaaatgtgtcaactttacattgcgctttatgtttgcattcttgatttgggtctccctccttaattattaattagtcttgccattttcatttacctactcagactgggacaatgtgtttgaggaatgaactccaaccttgccactcatctgtctttatgtkcctgcttctgtctccaaaggcagccctagtgtcagtgtggtatttcccatcccagcatctataagtcacatgggcctgccttgaaaattgctcccaaagaacctacaacatgtcaaatgtcaagtgaaataggcaattattttaaattatatttctttcctttaaaaaatatagatattgcaaactgatgtctcagcagtattttgtaagtgttagcaccatatctttctgtaaactcattaataagaaagatcatattcaatcataagaatgatgcaataa

SEQ ID NO: 177843 - DNA, 588 bp, Homo sapiens
agcattttaattaaagtataagtcagtagaaatatgtaaggaaaactgttaatgcacttaaatttgctaaacaccccaaaaatgtttgctgggcacagttgactatgcctttgatatcagggttcttgagtgtgctagaggaacacaaaatgtgtcaactttacattgcgctttatgtttgcattcttgatttgggtctccctccttaattattaattagtcttgccattttcatttacctactcagactgggacaatgtgtttgaggaatgaactccaaccttgccactcatctgtctttatgtgcctgcttctgtctccaaaggcagccctagtgtcagtgtggtatttcccatcccagcatctataagtcacatgggcctgccttgaaaattgctcccaaagwacctacaacatgtcaaatgtcaagtgaaataggcaattattttaaattatatttctttcctttaaaaaatatagatattgcaaactgatgtctcagcagtattttgtaagtgttagcaccatatctttctgtaaactcattaataagaaagatcatattcaatcataagaatgatgcaataa

SEQ ID NO: 177844 - DNA, 593 bp, Homo sapiens
taaggcctgtttgagtgagttgggtaaatagatccaccacacttatatttagggagaaataatagctatactcacatgtttttacttttacaacrcatggcaaataaaaatggattgaagtaaaactagtttgttaagtttgagaaaattaatcaatgttagattaaatcaacaagttacggctatatatctttatatattaaataattgataaacatactatatgtttctatgatcctccatggcaaggaacaggtggaaatgaagaattcttaggatatttgacactggattatatcagttattttcttttcaaaaaaagcaaatagtgtatctatgcacaaacattatcttaactagtatagtcctattatagatgtgcgcctactcaggtgaccctggaatcataattcaaaacttgaagctatacttctatagtttgtgactggaatccacagtttcaaaaaacacatttgtcacatggctaaacacctgaccttttatttgttttttgaaatgtgttcctattataccctgcagaaatagggtaatagtttaatgtgagtttttaaattttttggatacaactacct

SEQ ID NO: 177845 - DNA, 553 bp, Homo sapiens
ataatattgagtgacagatgttttctacttttttttttaaacggagtctcactctgttgcccaggctggagtgcagtggcgcaatcttggttcactgcaacctctacctcctgggttcaagcaattctcctgcctcagcctcctgagtagttgggattacaggcacccgccaccacacctggataatatttgtatttttagtagagacggggtttcaccatgttggccaggctggttttaaactcctgacctcaaatgatccacctgcctcagcctcccaaagtcctgggattataggcatgagcaaccgcacccagcctttttttttttttttttcaracaccgtgccaggctattttttattttttgtagagacagggtcttactatgttgcccaggctggtttcaaacttcaatgatcctcctgccttagcctcccaaagcacctggattacaggtgtgagccaccatacccagctctgctgggtttcattggtgagtttgtcttcctggcaagggatatacaggatacccttgcacatcatccacaacc

SEQ ID NO: 177846 - DNA, 573 bp, Homo sapiens
gattctcctgcctcagcctcccaagtagctgggactacaggcatgcaccaccatgtccagctaatttttttttgtatttttagtagagacggggtttcatcatgttggtcaggctggtctygaactcttgaccttaggtgatccacccacctcggcctcccaaagtgttgggattacaggcgtgcagccactgcaccgcacctggcctttttctttcttttttgtattactattttttttttttttttgaaaaaatgtcactctgtcacccaggctggagtgcagtggtgtgatctcggctcactgcaacctcagcctcccgagtagctgggattacaggcgcgtgcaccacgcccggctaattaatgttgtttgctttctctatgtatccacctatcttacttgagacactcctatgtgttttcgaaattgagtgtctaatcccaaacctaaggaagagtaaaacttcttttaatggaataaaacatgttagttaccaagaagcagacatctggctctagtgttgcttttgcacttagtttgtgagaatgtgcccagttggaacctgggcta

SEQ ID NO: 177847 - DNA, 521 bp, Homo sapiens
taggtgaatgtatcaaacagagtaagaagggtaagttgagtgccagagccctccctacagaacacagcctgcatggacctggtacaagtttgagaatctatgggatgatagagggaacaacagagaygggtagggaaacagggcctcatcaagaaacggtgttacaaaatttagtttgccttttagggggagagaggatattttgaccttacctcactctatataccaagtaaattccagagaatcaatgagtcaccaaacactgttgcaaaattattgcaatgatcactgcttgcacttaaccttttagtaatatttcctgttttgaccaaccccttgaaacgcatcgttcccaaccagcatcagacttcctagttgtctcctacttcaatggccttcccttcttagcccagggtagcagtgggtataggtagggaggctaggtgactgggtttaggaatatttcatttgggaggctgaggtgggaggatcacttgagcctaggagttcaagaccagact

SEQ ID NO: 177848 - DNA, 557 bp, Homo sapiens
tgtcatccaggttagagactttacagagtccagcagctcctgttctccccattctcccacagccctggacatcagttcttttcatacggctaaagaacctgcatgcctgtcttgctcacaggctgtcatcagtactcagaaatgtttgctgaaagcatccattcatccatctctggttggtcacataaactgcctaggcctagacagcagtaaaagatggcagaatatgtcaaggcttgctgatgggaaaaaaatattacatgttagaaaaagaatattaatgcataaagaacttttcttacctaagcatttgacatctccaactgcataagctgaggcagctctgggtttgttggtgaccagggcaagctctccaaagtactgccccttakggcagcgggcaatctcgacctcctggttcccaccatccttgtttgatttagtctacagcaggcaaagaacatgacctaggctgactccaggatcacagctgggcatgtccagttgcacacacatacactgttctcagcatactctacacaattactgaggaattc

SEQ ID NO: 177849 - DNA, 457 bp, Homo sapiens
ttattgcaaataatagcagggtgttggttttcttcttatgaatgctttcttaaagtttcttctctaaaaagagtcattttgcctaaggttccacaggcacacttttttagaaatatatttttctttatttttctttccctagcttctatttagaggttatttctaggtttttcacagctttatctttgagcagccatagtaattggagtgaaggtagatagatattttgttacaagataggtgctcacaatagcctcaaattaaaaccatagtaaactctacctatyatcctaggtacctgccactgatactgaccatttgggtcttggtgtgagtatccttagcttctcccccaaattacgtagtcttacaactatttaaaccttccatatcatttatttgcaggcaattttgtgggatgtttgcaggttacacttccagtaacaccttgcaaaat

SEQ ID NO: 177850 - DNA, 549 bp, Homo sapiens
tatatctggtagaatttaagcatccaagttttttactgggacagccatgtaggcactttggttatcatgcaccaaaattctagactcccagaaggagattaagtgttgcataaatcatgccatttttataaaaagtttattcacagtgatacactctcatcaattagagacagttttatatcagtgtcgtcaactttaccagtccagttctcagatggaaaccaagggccaactttgaagcagactttttcaatgatagtttctcaggcctgctgtgttagcttttttctgcacacaggttctgtctcttccaagcttgcaacttcattaatttattttctgttatgttggaatatatggatttgtcctcaattattttttttcttattactatcatcaccgtttctattatttctaaaagataacatttagttacagggtgtattttgggtaattaaaatcttcyagaattagtggtgagagctgtacaactttgtgactatactacaaatgactgaatgttacaccttaagaggtcatttttaaggt

SEQ ID NO: 177851 - DNA, 607 bp, Homo sapiens
aaatacaggaatagcattggacaaaagcttggaagatgaaaaatatcagataggtttagagagtaaagagattctaattgcatagaagaaaatacatttagtatggaatcatttctggtagttaaggcaaaaaaacaaacagataatgaaagtccccaaatgctatgaaataacatttcagtgggggtgctgacaaaattggagccatcctttatgaagattacttaaaaagcaatgtgtatgatagactgggggaataagacaaattggaaagccagttatgaagttactgtcataaaaaagctgagagttaatgagaccagaatctagggcaattgccttaagactggaaagtcaaatataagtatgaaaaatgttccagagatggactccagtggctttgyaacaaccccatataactataatcaaactcccctgtattgtgaaggaaatccagaagaggcagaactcactccacttcttatctgaagaactttgttgaataatattgattagaaatctatcgatattggagagctgtcagaatcagttttgtgttgtccagtgtataagtatagtaagcaccatgctcttatatctacaagca

SEQ ID NO: 177852 - DNA, 607 bp, Homo sapiens
aaatacaggaatagcattggacaaaagcttggaagatgaaaaatatcagataggtttagagagtaaagagattctaattgcatagaagaaaatacatttagtatggaatcatttctggtagttaaggcaaaaaaacaaacagataatgaaagtccccaaatgctatgaaataacatttcagtgggggtgctgacaaaattggagccatcctttatgaagattacttaaaaagcaatgtgtatgatagactgggggaataagacaaattggaaagccagttatgaagttactgtcataaaaaagctgagagttaatgagaccagaatctagggcaattgccttaagactggaaagtcaaatataagtatgaaaaatgttccagagatggactccagtggctttgtaacaaccccatataactataatcaaactcccctgtattgygaaggaaatccagaagaggcagaactcactccacttcttatctgaagaactttgttgaataatattgattagaaatctatcgatattggagagctgtcagaatcagttttgtgttgtccagtgtataagtatagtaagcaccatgctcttatatctacaagca

SEQ ID NO: 177853 - DNA, 541 bp, Homo sapiens
aatatgtttagggtttctggggcaatgctaatcattgaaatacttaaattatgtttgctatgtatcctcaagtaataaatatgcaaataattaaatattataaaacatgactaaaagcttgatttattaatartgttattgaaataaaatattgttacttccaaacatgcaaaaatgaaaataataaacagtagatataataattaatagacatggatttgaaatcttcaaacattaaatttctagaaaattaaaataaagaattaaaaatattttttaaaatacaaatacttttaatagctttatattttcatagcagacattagaaattcaaccttgtttccagcaaataaggacttattcaagcatagaggactttttaataccataagaattctcattttatgttgcctttaattttaaaaattatcaataaagtgcctttaatttgaagaatgtttatgtgttaaataatatttttaaaggtattttagtattaatattttatataaattatattccttcattaatgagaaatgca

SEQ ID NO: 177854 - DNA, 610 bp, Homo sapiens
aatgcgtgcacgtgatcaggaatgtaaatgacttaataccattcatctatgtgactggggaaaattttaaactgaaagacctattatagataaattaacatttttatttctactatgaaaaattcctgttagttttaataagaggaatatayacccttcatagcccaagtatgaagttataagtacataacaacatatcaacagagtgactgcaaaggaagtgtcataagtagagatttacatcattacccaccccataaataaagaaataaaaaacatgcaaaaatagttgagataagagtccaatatgcatggcaaataaaaaattgcagagaaatgcatgatttatataaaatgggaagggaactttgagggcagacatagaactcttgaagttatgagcacattgcctcaaagcaagaaattaatatcttgggtggtaccactaatttttaccagaatatggtgatgagaattgattatgcctcaagaaagacaacacatacctgattacaatcccaacactgataattaacaacgtactggggctgagaaaacaaatcaacttgtgtgtcaaacagatattggagcacagttgattgagcagata

SEQ ID NO: 177855 - DNA, 582 bp, Homo sapiens
gttagaacagctaacagaactttttcactgataatttatatatctcacaaatgaagacaattctgatttctgacaaaattttattgtatttttatttcaacctcccctagaatgtcttattacatatattatgggaagactaaaatattggtctgagaagtaagacacttataggactttgggagagggaccatgaggttttggtgaagtcactactctagagacgtggagtagtctctatagtatagttcctttgcttgaggagcattcccaaaagtctttactaatatatttaacaaaaacatgaggtctccttggcaatatgtgcatacaatccaataatgtgcataagatgccccgctgatctkttttcatagtaaaacagttttctgtctgcccctgaaaaacccactccagattccagcatgagtcgggtccttgtctttccttccttcaatggcatctaagttacaaatgaatagtaaagcacttctttgactctaaaacaatgaaaaaaaaataagttttaagataaatattgatttttaaatcagcaggataacaaataatagtttaataacc

SEQ ID NO: 177856 - DNA, 619 bp, Homo sapiens
gataataagctgtagactaagtactgctctgaacaaaccttccttccattagtcagctttaaaaagttcactttccctttttcattctaattcagcatttaaatctaaattttacattaacctcaccttcttcctggaaactttccttcttgttcctcatgaaacttcagcatccttatttgtaaaattaggaaaataataatcaaccacacagagttgctgtaagaaaaaagtgaggccaaaatggaactgctctgccttcttgtttcagctgatgtgttataaacaagcacatcagctaaaactttttctggtttgtgtgtgtatgcatgctttctgttgctgatttcgctgtataaactggcccccaagcatagtgctaaagaattgtttagtgttcctgatatggtttggctgtgtccctatccatatcttatcttgaattcccacgtgttgtgcgagaaatccagtgggacgtaatttaatcayggggtcaagtctttcctgtgttattctcatcataatgaataagtctcgtgagatctaatggttttaaatagagaagttcccctggacaagctctctttctctttttgcctgctgtcatccacgtaacatg

SEQ ID NO: 177857 - DNA, 527 bp, Homo sapiens
ccagcgcctggggacctcactgctctaaatggaaggacaaaggttttcccatgcagctggctttgccacctgctgattgtagtgccccaggaccttgagcaaatataagcagtaaagaagaggcagaataaaagataggggtagaaagtttattcaaaggaataattaaagagaacttcccaaacctagagaaatatatcaatattcaagtccaagaaggttatacaacgtcaagcaaatttaacccagaaaagactatctcaaggaatctaataatcaaacttttagaaatcaagaataaaaaaggattctaaaacagcaagagaaataaataaataaatgtacaatgaagttccaatacatctggcaacagactttttattagaaacatttccagccaggagaaagtggcatgacacacttagtgctgaaggaaaagagaaatttactctagaatagtatatctggcaaaaataaccktcaagtataaaggggaaataaatattttcccacacaaaccaaaagct

SEQ ID NO: 177858 - DNA, 493 bp, Homo sapiens
aatagttccaaattatttatgcagaaaaagaaagcatcctcagccagtgttaactgatggctgacctggcaacaacaggtagttcatgatgtcttctacttaatcgaaagtgattcccacagcaacagtatcagacaggtactctctaatatgaatgagtgaaacaaaaccaaaactacrctgtatctatgtctgaaaagagaagaacaaggacagtgtttcaattaaaaaactgaacatctttcttacctggctgacataaatgactgttggttcttaactaactacagttttagttcctattcactgcttctgcctcccggatttaaaataaaagagaaagagaattaagataacgatttgtatatttagcctacttcctgccaacactcaaaccagagaaaacttcccactttcttaaactcacccccattcacctcacacaaactcaaatgctgtaaccagcctattctcacactttttcactgagata

SEQ ID NO: 177859 - DNA, 560 bp, Homo sapiens
aaattttttagattccaaatatgagtgagaatatgtgatattttatttttctctgcctggtttatttcacttaactcaatgtcctccagttccatccatgttgmtgcaaatgttaggatttcattctttcttatggctaaagaatattccattgcaaacatataccatatttttaatccattcatttgttggtaaacatttaggttgattctatatcttgaatattgtgaatattgtgcaataaatgtggatgtgcggatatctcttttatatactgatttccttccttttggatatatactcagtagtgagattgtgggaacataaggcaactctattttgagttttttgagctgcctcaatagtgttttccatagtttctatgctgattcacatttccaccagtagtacaagcattcccctttctccacattctcaccagcatctattattttccatctttttgataacagctattttaactgagactagatggtatgtcagtgtggttttgaattgcagtttgttaatgattagggatgttaaacatgtttatacaa

SEQ ID NO: 177860 - DNA, 441 bp, Homo sapiens
ttcattctttcttatggctaaagaatattccattgcaaacatataccatatttttaatccattcatttgttggtaaacatttaggttgattctatatctygaatattgtgaatattgtgcaataaatgtggatgtgcggatatctcttttatatactgatttccttccttttggatatatactcagtagtgagattgtgggaacataaggcaactctattttgagttttttgagctgcctcaatagtgttttccatagtttctatgctgattcacatttccaccagtagtacaagcattcccctttctccacattctcaccagcatctattattttccatctttttgataacagctattttaactgagactagatggtatgtcagtgtggttttgaattgcagtttgttaatgattagggatgttaaacatgtttatacaa

SEQ ID NO: 177861 - DNA, 583 bp, Homo sapiens
tgcctttgcttcatcatagcttagctctcacataccagtgagaacatacgatgcttggtyttctgttcctgagttacttgacttagaataatagtctccaatctcagtcaggtggctgcaaatgcattaattcattcctttttatggctgagtagtattccatcatatatgtatatatacaccacagtttatccatccactcgcggattgatgggaatttgggttggttccacgattttgaaattgcaaattgtgctgctataaacatgcgtgtgcaagtatcttttttgtataatgactttttttctctggggtagatacccagtagtgggatagctggatcaaatgctagttccacttttatttccttaaggaatcttcacactgttttccacagcagctgtactagtttacattcccaccagcagtgtagaagtgttctctggtcaccatgtccacgccaacatctactgttttttgattatggccattcttgcaggagtaaggttgtatcgcattgttgttttgatttgcatttccctgatcattagtgatgttcagcattttttcatatgtttattgg

SEQ ID NO: 177862 - DNA, 456 bp, Homo sapiens
tcactcactactatgagaacagcaaggggtaaatccatccccatgatccaagcacttcctaccaggtcccttccccaacactggggattacaactcaacatgaaatttgttgggggcgggggacaaagaaccaaatcatatcaatgggataattcagaattttaaccaaagtgggagactacatgtggatacttctctaggttggaagctgtattagtctattctcatattgttataaagaaatacccaagactgggtattttataaagaaaagagttttaattggcttacagtgctgcagactgtacaggaagcatagtggcttctgctcaacttctggggtggcctcaggaaacttttastcatggtggaaggcaaagcaggagcaggcacatcacatggccagagcaggaggaagagagcgaagagtaagggagaggtgccatacacttttaa

SEQ ID NO: 177863 - DNA, 594 bp, Homo sapiens
tttcttaaacctgctaactataaccttccgtaatagcagcatagactaccagaagccaaaaatatacatttcatgtaaacagctttgagctttgtsaagtgttaaatactgaactggtcatcgtacatgactcaaagtatctaactcaggggtgttttctgcacacattagtcaatgccatctcctgacaaaatatgacatgccatttgcggctctactaggcattctaaatatcaggaaaaaagaagagaactaaggtatgagattgttacacgcggttgtgagtaacagcaagggaaaagcaatagaacagaggtctctgggcagaaagttcctaccagagaaattctgctggtttgttctaatacccaggcactgagttagcttccaatgcaaaagcacaaaatattagaaggaatattaatataacctctcactctatagaggagaaagcaaaatccttcaactacctctcaattttagttgaagcatttagaggagttttctgatggatatacataaaacctgctttacacaaattggttttatggtgtccttggttggagcatctctattacataaatcatgaaatga

SEQ ID NO: 177864 - DNA, 600 bp, Homo sapiens
gtatgcagtgtaaaagcagctaggggactgcccggcactagttgcaaagagtgagcagtctctaacagctggagctacttgcttttattcagtactgacataatgccaagcctggagcaacacaatctgtgsgtaattaacattattgttcctctgtgtcacatgcatggatgatcaaaggtgggttcctggtcaacataagtaaacaggcctgtttaagataaattcccctacacttccttgtacctactccttgccctctgactcaagggcagagaacagctgccttcagctcttctcccccaaagctatgcagagccttctgaatagtcagagcctttccctgttgcttctcccaccactctgaccaatctcctacagatgtccctggagcatccctcaaccaatgatgaaaggcagttggtggataaataccccagttccttacaccttggttgggaaaactctgagatgtgttatgtgtagtgtcctagaggtcccctgtgggataagtcccagttgccacagaagtaaatggctcattatcacaccccgttattcttttttcttttctctatttcacttcacctctccctgacc

SEQ ID NO: 177865 - DNA, 459 bp, Homo sapiens
tcatatatcacattggtaaaattaataattttgatagtattaactattaaaagaggtgtagggaacatgcagtttctgatgggagtgcaagttaacayatccatttcagagagcagtttgccaatatgacctagtaattccacttttcagtgtctactcaaagtactactatttgtgtgcacgaggaggtaaatattacaacatgacttgtaatagccaaaaaaaatgggaaataaaccttactatccttttttagggaaatgtgatgctatgaaacagtgaaaagcaatgattttgcctcagcagagtggccttctctgactgaaatgccactcctgcctatatcctttcacccactttctttgtcttcatagcacatatcacttcatgttattatattagttatgcacatgcttatttggctattatctttctccctctctaaaacgtaagactgat

SEQ ID NO: 177866 - DNA, 351 bp, Homo sapiens
cataattccatatgatactttctcttcctcaatamggtggtgagctggtgagctaggggctttaaaaccgaaggctagaaatgttccccttgatgaacattcctggtaagaagaggttagaacacagcacatcaaaaaggttgactagagtgagggaaactctagacctaagactaacagctgataagtttgtgattaacaatctttctgcattcagcagtctgagtgcacaccatttattttatttgaaacaaaaactgaatctaattttacagaaatgaggggacagcactctggttttactgatgcttataaaagcagattgttgcctcaagtttaaaaatgtaaaga

SEQ ID NO: 177867 - DNA, 427 bp, Homo sapiens
agatctaggctatctgggcattytgcaaagaccatcatattggtctactatattgatgacatcatatcaattagatcttctgagcaaaaagtgagagttattatgaataccttagttaatcacatgcattccagaggtgagaagtcaattctacaaagattcagggcctgacacattagtgaagtttctagtaggccagtggtctggaccctaccatatatcccctctcgaaaaaaggacaaattatttaaccttacttcctaccactgagtagcacaacacttggttttggaggcagcctgctgcatatttgcgattactgctctgaccctctaataggatgctagtccaagtgtgctccagaccaagaaaggaatctgtaacaggtccatgctacagtataccagccctgacaataagttcataa

SEQ ID NO: 177868 - DNA, 427 bp, Homo sapiens
agatctaggctatctgggcattttgcaaagaccatcatattggtctactatattgatgacatcatatcaattagaycttctgagcaaaaagtgagagttattatgaataccttagttaatcacatgcattccagaggtgagaagtcaattctacaaagattcagggcctgacacattagtgaagtttctagtaggccagtggtctggaccctaccatatatcccctctcgaaaaaaggacaaattatttaaccttacttcctaccactgagtagcacaacacttggttttggaggcagcctgctgcatatttgcgattactgctctgaccctctaataggatgctagtccaagtgtgctccagaccaagaaaggaatctgtaacaggtccatgctacagtataccagccctgacaataagttcataa

SEQ ID NO: 177869 - DNA, 564 bp, Homo sapiens
gccatggcttttagagggtgctcatgaccacagtgggtaaggagatagtaaagacatatataaccatgtgattatatatgtatatatatgtaaatgtatgtgtgtgtatatgtatccacacrtatagaaccacaccaacttgctgtctttactctctccttacccactgaggccatgagtaccctgtaaaaggggatagactttacaaaatctaccagtccacaagataaggaatttgtaattatttcttaaggtttgagtccatttgaaaagtggtttgtgtcaagcaatgaaaaagccaaatacgatgtagtataaatcaggatccagagaggaaagctcagttcgtgccaggtgtccaatagaaataatttaatacagggcacgaggtacaaaaagactggaagagctgagaagccaaatagggcttcttaaagattagcagcttaaagattagtaacagcaggaagccactaccacccacaggactgaagggacaaagaaaggagatagtgtgtaccagagcttggaagtcagagtcacctggagctggatgtgtaacat

SEQ ID NO: 177870 - DNA, 564 bp, Homo sapiens
gccatggcttttagagggtgctcatgaccacagtgggtaaggagatagtaaagacatatataaccatgtgattatatatgtatatatatgtaaatgtatgtgtgtgtatatgtatccacacatatakaaccacaccaacttgctgtctttactctctccttacccactgaggccatgagtaccctgtaaaaggggatagactttacaaaatctaccagtccacaagataaggaatttgtaattatttcttaaggtttgagtccatttgaaaagtggtttgtgtcaagcaatgaaaaagccaaatacgatgtagtataaatcaggatccagagaggaaagctcagttcgtgccaggtgtccaatagaaataatttaatacagggcacgaggtacaaaaagactggaagagctgagaagccaaatagggcttcttaaagattagcagcttaaagattagtaacagcaggaagccactaccacccacaggactgaagggacaaagaaaggagatagtgtgtaccagagcttggaagtcagagtcacctggagctggatgtgtaacat

SEQ ID NO: 177871 - DNA, 564 bp, Homo sapiens
gccatggcttttagagggtgctcatgaccacagtgggtaaggagatagtaaagacatatataaccatgtgattatatatgtatatatatgtaaatgtatgtgtgtgtatatgtatccacacatatagaaccacaccaacttgctgtctttactctctccttacccactgaggccatgagtaccctgtaaaaggggatagactttacaaaatctaccagtccacaagataaggaatttgtaattatttcttaaggtttgagtccatttgaaragtggtttgtgtcaagcaatgaaaaagccaaatacgatgtagtataaatcaggatccagagaggaaagctcagttcgtgccaggtgtccaatagaaataatttaatacagggcacgaggtacaaaaagactggaagagctgagaagccaaatagggcttcttaaagattagcagcttaaagattagtaacagcaggaagccactaccacccacaggactgaagggacaaagaaaggagatagtgtgtaccagagcttggaagtcagagtcacctggagctggatgtgtaacat

SEQ ID NO: 177872 - DNA, 521 bp, Homo sapiens
ctcctgggtgtggggagtgatgggaaccaagtgggagcagagaaagttccctccctcctagaatgggtttaattacyccttcccttgcaaagaagcaaagagaaacagaaaacaggtagtgatgtcaccatatcaaaactggttaaaaactcatatgctgttacctttatattaccatatgctgtgtcttgtatgttcagaataatttcttataattaagggaagaaaattatgatgcccttagagcttcatgtgtgttggcttctgttcgtcctctgtttgatcatgtcccagtgggctggtggaaaggatctggtgaaagtgatttctttataaatttctcttttattattacattatctgggccctggtcaccaaatctccccagcatccttggcttaggtggaatattgttacactgagcagcttggatattcttgtagtgtggaaatgaaaaatgaataagaaaaatcagttgtgctttcattagaaaaatccttagatactacaatgtgcaagtc

SEQ ID NO: 177873 - DNA, 413 bp, Homo sapiens
ctggataggccaggcatgttctcatggagtaacgagtagaacagaacttcttgagacctgtgctcaaaacagawacattaacacttccacctcattttgttggccaaagcaaactgcataggatggataaatatgtactctctgtatggaaagaactctaaagtcaactgaaaaattacatggatagacggagaggtgaagatttagagtcatggatatactcatctgccacaaggagaaaggggaggatgagcattggaccagtgatatggcttggctgtgtcctcacccaaatttcatcttgaattgtagctcccataattcccatgtgttatggaaatcaattccatattgtagctcccataatcaattccataatcaatggaaatcaattccaattgtagctcccatat

SEQ ID NO: 177874 - DNA, 413 bp, Homo sapiens
ctggataggccaggcatgttctcatggagtaacgagtagaacagaacttcttgagacctgtgctcaaaacagatacattaacacttccacctcattttgttggccaaagcaaactgcataggatggataaatatgtactctctgtatggaaagaactctaaagtcaactgaaaaattacatggatagacggagaggtgaagattyagagtcatggatatactcatctgccacaaggagaaaggggaggatgagcattggaccagtgatatggcttggctgtgtcctcacccaaatttcatcttgaattgtagctcccataattcccatgtgttatggaaatcaattccatattgtagctcccataatcaattccataatcaatggaaatcaattccaattgtagctcccatat

SEQ ID NO: 177875 - DNA, 474 bp, Homo sapiens
tgagccatcccatgtaagtaaaaaaaaatgcctagtgataagatgtttagaaatattcatttctagtttaaaaagtagtgtggcatataatttttaaaaagctttattttcctttggacatttatcatgaaaaagttttattgcaaattggtgacattgtcaaatatagcctttggatattttccttccttcctgtttagtcacacatacaaccccagagagttcagtggtaaactttcctcatagattttatttctgtatattcaatccaattmtcaggtgtaaatgtagaagtcgactcctttctgtccatcttttaaagtaaaaattaagccctgcatcctacaagcatctgccaacatagattctcatgcatctcgtaagccaacacaatgtttccacaactgatcagggtttactaagaggtacttattctgccgaagtatctgtcactactcacctgtaacaaaggtg

SEQ ID NO: 177876 - DNA, 474 bp, Homo sapiens
tgagccatcccatgtaagtaaaaaaaaatgcctagtgataagatgtttagaaatattcatttctagtttaaaaagtagtgtggcatataatttttaaaaagctttattttcctttggacatttatcatgaaaaagttttattgcaaattggtgacattgtcaaatatagcctttggatattttccttccttcctgtttagtcacacatacaaccccagagagttcagtggtaaactttcctcatagattttatttctgtatattcaatccaattctcaggtgtaaatgtagaagtcgactcctttctgtccatcttttaaagtaaaaattaagccctgcatcctacaagcatctgccaacatagattctcatgcatctcrtaagccaacacaatgtttccacaactgatcagggtttactaagaggtacttattctgccgaagtatctgtcactactcacctgtaacaaaggtg

SEQ ID NO: 177877 - DNA, 611 bp, Homo sapiens
tgcctctgggaagcattgtcactgatggatgatgtcagcccaggacaaaaggcagagaaccacgaagggaggacagcccttcagtggctcaaggccctggagaagctggaagatgatgatgcaacttgatgggtcaggggcactgaawgtcccttattccagaaaattattctattgtcaaagatctctccacagcctggaataccagaaatgccactatttaactcattctttggaattaagcccacattttctctggaagaccatgcactatcaacagttaccttggagggctctgggctcaatgcctgttagtaccagagagtgtaaaagatctaagcagtagtcactgaagaacttggacatctgataattctttggtaggtgaagcaggagatgtgtgtctcaggctccctggggatgatgaatatagctccgggagagatgcggaggctcatgtaagtgtaccatctaaatccagtctggcatccacatcatactccgttttatgagaggcaagtcagtaaaattttgtttcctctgtgtatgtctgtctcataagagttcattaaacttcaaaggcagaagccatgcaattcacccattgcctc

SEQ ID NO: 177878 - DNA, 457 bp, Homo sapiens
ttgcccaggctggtcttgagctcctggactcaagtgatctgccygccttggcctcccaaagtgctgggattacaggcgtgagccaccacacttggtcttatgatctcatttaatcctcacaaagtacccaccagacacccaccaggtgatattctttttttttttttttttttgacagggtctcactctgtcacccagactgcagtgcaagtgacatgatattggctcactgcaacctccacctcccaggctcaagtgatccgcctccctctcagcctcccaaagtgtgttgggcatgagccactatacctgtcccagaaatgcatttttgttcaccgaccaaggtttcaatgcccttagcttccctgaattgttttgccagttcgtcagatcagcccttgggaatacggtttttactaggcccatttcagagacggggaagccaaggcccagagag

SEQ ID NO: 177879 - DNA, 482 bp, Homo sapiens
atgtacaccacgattgcactgayagagcattctatgtcccaggggaaaaaatgtagtggctgagctgagacaccctgccttacagtccataaaactctaacactctgcttccctgaagttggaatagtcccctaaaatttgagctgctggacattttctttgccaaagagtggagtcattactgtgatgctccctgcccccccggaaccccagcaacagccatactctaccatgttggagttcgtactcctgctgcatctggcttcacagagtttgggatactgccaagtctaactatcccagggtccagagtcactgctacacagtgcctcatcccctgagacctgagtttctaatgaaccttgttggttctgtttcatgcagtgcagctgtaccgtgctccctggacccaaacatctagaaaaccttctcttccccagggacgggcctgtgctgtgccctgcccgtagggtcagagttat

SEQ ID NO: 177880 - DNA, 629 bp, Homo sapiens
tagccactatggaaacagtgtggagattccttaaagaactaaaactagaactaccatttgatccaggaatcctactacccagaagaaaagaagtcattttccaaaaaagatacttgcacaaataygcagataacaagataaaacaaccatgcagctaactaacaaggaacagaagacttgaaaaatacctactaggcgtaagtaacaatgtatacagaatattccaccatcaacagcagaatatacattcttctcaagtgctttattttttccataagttattggtgtacaggtggtatttggttacatgagtaagttggtgatttgtgagattttggtgcacccatcacctgagaagtatacactgcaccgtatttgtagtcttttaatccctcacccaccacccccctaactcttgcaggccaagtccccaaagtccattgtatcattcttatgcttttgcatcctcatagcttagctcccacatatcagtgagaacatacaatgtttgctttttacattcctgagttgcttcacttagaataatagtctccaatcttatccaggtcactgcaaatgctgttaattcattcttttttatagttgagtagtattccatcgtatattat

SEQ ID NO: 177881 - DNA, 516 bp, Homo sapiens
ctacctgaattgtttgcactgaccatagtaggaagaaaaatcgttctaaagtacccaacatgtccgaaatacacattgtttttcttttcttttccttttttctttttgaaacagagtcttgatatgtcacccaggctgaaatgcagtggcatgatctcagctcactgcaacctccaccacctgggttcaagcaattctcatgcctcagcctcccgagcagctggaactrcagaagtgcacaaccacgccctaattttttttgtgtattttttggtagagatggggcttcaccatgttggccaggctggtctggaactcctgtcctcaagtgatctgcccttctcagcctcccaaagtgttgggattacaggcgtgagccactgtgccctgtcctaaataggcattcctatactcacataattatacaaaacgaaaccatgcttctttatttcctttcttttttgttattttattcaaatgtctactcagaattttgtcaaggggaggagaaggaag

SEQ ID NO: 177882 - DNA, 484 bp, Homo sapiens
agcagccaaagaggagtttattcaagactattgcagtggaggagagaaattaaactcaactcttctggggaaaaaaaaaaaaagacaggaggatatgtaagtgctggggttagctagtggaaacatactggagcacattagaaagtatgttgattcatgtgattaggtcaatttgatgtgtttgctgttgtcacttacctaagttaggctcctagacctcccacagagactgggcagatggtggctatcttccttgaggatatctttcaaagagatggctccaggtcattgagaaagaaattcctgtgttataaaactaccaagaggatgggagaatatttatatctcaaaagtgcagacaraaaatttacaattgaaagttttctaaagtgaatattgtgctaaggaaagtgaggtcagaggcctgtctaaagtttagggaaactgaggggaatgttaaggctatcttgcttttgtggacctt

SEQ ID NO: 177883 - DNA, 605 bp, Homo sapiens
ttttaatactgccatctcaacatgtggctttcaaggtcattttgactgaggaaggaagatgtggagaagactcagtggctcctaactgctttgacgcaggtatgtcacttctgttcatggttcttgccaaaaaatgcaagtctctggatccagggtttctggatcttgaccatattgatatttgggcttagatactgctttgctgtgggggttgtcctgtaccttgtgagacatttagcaatagctctggcctctgcccactagatgtcagtaacatcccctactatgataatcgaagatttctattgacaaggtcccttgagagacaaaattacccatggttgagaagcactaccctaacataattgcaaggaaatcttccaggaaaagttaagaaacacatgaaatgttatatgattgctaatgttctctgtctcargaagtttcaagtttcctttttcctagttcttccatgttcacagtgaagtgcggggagacagatttccatgatggcaccaataatccctgcctcctagaactcatgcccttgtgtaagtccttttccctgagtatgggctggcctaaggacttgcttctaacctaat

SEQ ID NO: 177884 - DNA, 234 bp, Homo sapiens
gactaaaagctatcattcatatttaaaagtacaatctgtcagggatgaaattttatatatggtgttccataggcatcaaaagttttcttcctaatagatatccagtgcatccagcctcagttactttcacwaaaaatatagcctttccttttcagaaaaaaaatacaggctttcctcatagcactgcaggatcacttttgtcataaatcaagaattggcataactgtatatatt

SEQ ID NO: 177885 - DNA, 625 bp, Homo sapiens
ctgcacaataagttcgttttaagctattacaaaagagttaaaaagttaagaaaatttagaagtttataaagtaaaagggttaccgtaagctaaggttagtttattactgaagaaagattaaaaaaatttagcgtagsctaagggtacactgcttataaagtctacaagagtagagcagtgaatgtcccaggccttcacattcactcaccactactcaccaactcagagcaacttccagtcctgcaagctccttttgtgggtaagtgccccacactggtgtagtattttttttttatcttttatgctgcatgtttactgtaccttttctatgtttagatgcacaaatacttaccactgcatgtaactgcacacaccactgagtacagcaacacgctgcgcaggcctgtaacctaggagcaacaggccatgccatacagcttaggtgtggaacaggctgtaccattcaggcttgtgtaagcgctttctacggtgttcgcacaacaacaaaatggcctaagaacacatttctcagaaaatatcacatcgctaaggacgcatgactgtatgtcaaatgctatgacaggagatggtttttattctttttaagtttatttaacgagcatgc

SEQ ID NO: 177886 - DNA, 528 bp, Homo sapiens
acattttgagggtgtttacaagactattgtaattgactttctcttttagtcttactaaataatgtgcatgatattacggagaccttgrctatcacctccactgcacacaaaacacacttaataattttcttgggttcaacaagatctttgtatagtgtaaggaagcaaccctcctttagaaggggaatcattgaggcaaggaccaggaaaggagaagcattcttgacctcaggaaaagctgatagaaagaaggtatcaagaaagatgaggaaagagagaagatcctacagctaagagaggaaaagtaatattgtagatgcatgtaaagaagacattttggtaccgggtgcggtggctcatgcctgtaattcaaacactttgggaggctgaggcaggtggattgcctgagctcagaagttcgagaccagcttgggcaatatggtgaagccccatgtctactaaaatacaaaagaaattagctgggtgtggcagcgtgtgcctgtagtctcagctacttgggaggctgag

SEQ ID NO: 177887 - DNA, 612 bp, Homo sapiens
taaaggggatgaaaattcattctcatttaagatgagcagttccagccatacataatcactcacttaccttagacaagtttaatgaccccatctttcatccatcttctctgtagaaatacagagcatgaccttgatggccttgatcttgtacagaaagtcatgttgagccactggactgatgacaccatgttagtcaggcaggggacctggatgccttgtatgccctagtaagtcacatgtcaagaagatacaggggttggccacagggttatggttttagagggccatgtgtgtcaartggcttaagaagacttctctaatttttaagtgctagttattgcaacttgcatccatttgaactatatcttgagggattccattagaggcagcatataccacatattcataaactccccttttgtagactttacagccagttacggctttaaagacttaatgttggtggtaaacagatctgggtggtacaagaggtgacttgcagcaggtccccttggtacccagtatcactgtcctgtaacccacctttgatttcaaccattgccaaagtaggcagtttgatgcaagtttgggctcaccttgtacttacaggct

SEQ ID NO: 177888 - DNA, 612 bp, Homo sapiens
taaaggggatgaaaattcattctcatttaagatgagcagttccagccatacataatcactcacttaccttagacaagtttaatgaccccatctttcatccatcttctctgtagaaatacagagcatgaccttgatggccttgatcttgtacagaaagtcatgttgagccactggactgatgacaccatgttagtcaggcaggggacctggatgccttgtatgccctagtaagtcacatgtcaagaagatacaggggttggccacagggttatggttttagagggccatgtgtgtcaaayggcttaagaagacttctctaatttttaagtgctagttattgcaacttgcatccatttgaactatatcttgagggattccattagaggcagcatataccacatattcataaactccccttttgtagactttacagccagttacggctttaaagacttaatgttggtggtaaacagatctgggtggtacaagaggtgacttgcagcaggtccccttggtacccagtatcactgtcctgtaacccacctttgatttcaaccattgccaaagtaggcagtttgatgcaagtttgggctcaccttgtacttacaggct

SEQ ID NO: 177889 - DNA, 632 bp, Homo sapiens
aataccatatcttttatagaaaaagaaacaaaaacgaagcaaggaagaaaacaatgaacattagataaatttgatactagagtggacactgcagaagaaaggatcattgaactcaaaaacctgaaaaaggtcaataagcattaactatacagaagcatatagaaaaaaaaaagtaaaaaacyaaatagaatgtaaataactagtgaataactagtggaagagcttctaacaatctaaaatatgtgtaagtagagtccaagaaagactaaaaaatatatgaaatagttttgctgacaccttcatataaatgaatcgctgagactttaagtggaatctgttttaagagatcacccatgaagcaggcaacgctaagcaatggaaacctcagtgtccagttgaattaagaggttttgagtttttcattcctatattcaggcatcaaaatgtattttccagtctcatctgagtaaactagaaagtatttacttttgtagtaaagagaagaatttaaacattcaagatggatataaaggagatatggaaaaataacattaacgcaactgcttttttttctcaatcaggaaaaatgtaaattcagtacaatgcagtggctactcactgaacagtgagtt

SEQ ID NO: 177890 - DNA, 530 bp, Homo sapiens
atggttagattctgcagcatgaggggttacaacttcaacatatgaatattggggaacacagttcaactcataacactgcrcttttcctctttgtcttgaataaacctgttgattagctgtcgaaatttggatgagtaacttgctgttgtatctttctgtgttaggtgcatccatgtgggtgagtatgtttaaaacaaacacctcaggatatgtgatatgctaaatggaaaagtaaggaaaacatacaagattgccgtgtttttcatcgagtcactagtgcaattcctcagatttctgacaagctgcctacatcccttgggaaggggatttgtagtgaggctactataaaattagtatttgattggagatgtttaaaaacttcaggagagtatccattttacacttgaaattttatgtcaagaaattttgcttctccctgaggagcaaatctcaagtgatatttgaagtcaaggtacgtttaatcctttgcttttttttttcctttttctttcttcctttttttttctttt

SEQ ID NO: 177891 - DNA, 563 bp, Homo sapiens
cccattttctaaactgatgtttttactttcatttgctaaatattagaaaagatacacacatcatttcaaaaatggtatcacccttcagcagtttacatrtatcttatatatgagttccttgaaggtaggaagcataaattcaaaagagcctttaaatagaaggcagaaacacctctctgaattcagaagtcctgtatgtctggtctaacaatttcaaaagttggctgcatttcccaatacaagtcaattttccatagtagatctgagttacattattataaacttggggttttaggctaaaaccatttacatctctgtatcagtccattttcatactgctatgaagaaatacccaagactgggtaatttataaagaaaaagaggtttaatggactcacagttccacatggctgcagaggcctcacaatcatggtggaaggtgaaggaggaacaaaggcacatcttacatagcagcagggaagacagcatgtgtaggggaactgccttttataaaaccgtgagatcttgtgagacatattcagaatcatgagaacagcacagga

SEQ ID NO: 177892 - DNA, 563 bp, Homo sapiens
cccattttctaaactgatgtttttactttcatttgctaaatattagaaaagatacacacatcatttcaaaaatggtatcacccttcagcagtttacatatatcttatatatgagttccttgaaggtaggaagcataaattcaaaagagcctttaaatagaaggcagaaacacctctctgaattcagaagtcctgtatgtctggtctaacaatttcaaaagttggctgcatttcccaatacaagtcaattttccatagtagatctgagttacattattataaacttggggktttaggctaaaaccatttacatctctgtatcagtccattttcatactgctatgaagaaatacccaagactgggtaatttataaagaaaaagaggtttaatggactcacagttccacatggctgcagaggcctcacaatcatggtggaaggtgaaggaggaacaaaggcacatcttacatagcagcagggaagacagcatgtgtaggggaactgccttttataaaaccgtgagatcttgtgagacatattcagaatcatgagaacagcacagga

SEQ ID NO: 177893 - DNA, 543 bp, Homo sapiens
tatatattatatagtattacacatgtctatggaatattgatatataacttatattatacatattatatatgtctatatagwtattatctatggcataatgcatgcatatataatgcagaacataaatatgcatagattatatatgcattgtaatatatacatataacaaatatgtaagatatatgcatatcttatatatgtatatattataaatgtatacatatatgtcatatatagcatacatatataagatatgcatatattatatatgatatgtatatatttgtaatatatgcattatataatatataatatatagatatgagatatatacattgcttatatatacatacatcataatacatacatataatgtacatatagcattatgtacatagattttatatatatacctacattgtaatatatacatgtaatacatatataagatatatgcatatatctttatcattataataaatgataaatgtgcacagcatgaggtggtatggttttggaatagtcagaaaaactcctaaggag

SEQ ID NO: 177894 - DNA, 543 bp, Homo sapiens
tatatattatatagtattacacatgtctatggaatattgatatataacttatattatacatattatatatgtctatatagatattatctatggcataatgcatgcatatataatgcagaacataaatatgcatagattatatatgcattgtaatatatacatataacaaatatgtaagatatatgcatatcttatatatgtatatattataaatgtatacatatatgtcatatatagcatacatatataagatatgcatatattatatatgatatgtatatatttgtaatatatgcattatataatatataatatatagatatgagatatatacattgcttatatatacatacatcataatacatacatataatgtacatatagcattatgtacatagattttatatatatacctacattgtaatatatacatrtaatacatatataagatatatgcatatatctttatcattataataaatgataaatgtgcacagcatgaggtggtatggttttggaatagtcagaaaaactcctaaggag

SEQ ID NO: 177895 - DNA, 610 bp, Homo sapiens
cctgcaattgcattcacttatttttatcttccttgacattacttcattctaggtcaccatcacctcttatctgatcattgcaacacttgcttacttgtcctcctatcaccagatctggctcctgacaattcaccttgcgtaatgtaagtagaatggtaatttcaacatgtataattaattttgtcattctccttattaaaactcttcaaaggttctccagtgctcttagaagaaagtctaattttattaacctgtttttaagactgttataacctggaccttacttatttccgaagtattrtttctcactactctccttgcttctaactccagcctcactggctttttttcatttcctcaaactgaaatatcagaagttacttgttcacgtaaatactttgtctctcacaatttagattcaggtgctttattatatgtgtccctagtgcaccctaaagatcccttaaaagtccactcatattgtattataattatatttattaacttctcatccacaaactataagatgacatgaagcattctgacccatttatcaatgtcttctcaaaatatagtgtgctaagcagaaaagttttcaataaatagtatt

SEQ ID NO: 177896 - DNA, 561 bp, Homo sapiens
aatcattctacaaaatatcaaaattttcctaatgaagctgggtaataaaacttagtatccatggtttgtgttggatttggagagccttaacacgtgaaataagcataagtcattcaaaacattcattcatcaaacacagtcattccacaragatttattattactgtgggctcaaaactgccatggttgctctggtgaatagagtatgcctgcacctctgaagagcttacattatatctaaagaaaaatcatgtaagtgactaaggacaataacgtgtgtgaagtgctgtgaatgagtgatgcacaaagaactgtggggtgacataggaagaaccaatgaatagtgacaagggcagggacaaaagctccactgaagaagtgatctgtgacatggagctgaacctccaagatgagatcttagtgcttttctgcagccctcaacacagccctagtcatccattcaagatccttctgtcttcaaagcctagtttcttcctgcatcttttcctaagtctccaaaaccttttcttctgctctccactttaaaatgatgactttaat

SEQ ID NO: 177897 - DNA, 546 bp, Homo sapiens
ttaagaacaagtatttgatcaacacctgtggaagaaaagaaaaataaaatagcaagtatttgaggtgatggacrtgttaactagttgatttaattattccactttatataaatgattctacatctcataaagttatacaattataaattctcccactgtctgttgttgtttccctctgtgtgtccatgtgttctcatcatttactcctacctataagtgagaacatgcagtatttggttttctgtttctgtgttagtttgttaaggataatggcctccagctccatcagtgttcctgcaaaggacatgacctcattcttttatatggctgcatagtattccatggcatacgtgttccatattttcttcacccagtctaccattgataggcatttaggttgattccatgtctttgttattgtgaatagtgccacagtgaacatacgtgtgcatatgggtggagggttggagaagagagacaatcaggaaaaataactaatgggcactaggctgaatacctgggtgacaaaataatctgtataacaaa

SEQ ID NO: 177898 - DNA, 394 bp, Homo sapiens
ttgtggtaataagtgaatcctcattctattcattcccacaagagctggctgttagaaaagaaactgacaaatcctctctctctttctcatttcttctctcaacctgtgatctctgcacatactggctgcycttcccctccatttctgccatgagtggaagcaacttgaggaccacaccagatatagatactgacaccatatttcttgtatagcctgcagaaccatgagccacctaagcctattttctttttaaattgatccattatatcaacataaatggactaagacagacaattgatactgaggaggaagttgtggctataaagttacctgaaaatgtggaagtagctttggaactggtaataggcaaaatttagaataatttttcaggctt

SEQ ID NO: 177899 - DNA, 488 bp, Homo sapiens
agctgaattctgtattatcataaatatttgtgattcagagtcagacaattcagtctaagatttgacttcagcttcttctctgcagattcccaaaggactggtttcttacattagaggcaactgaatctgcccttcagcacaatttgttgactttgagaagttattccccaagtattgtaccaagttttgcttaacaaggtgccagaggtgctggaatcattgcagacaatatttactcacatgctcatggcccttggagctagggaaggctgggaggacatacagggaacattatagataaggacagcctagttaatattataaaagaagcagggataaagctcctgtttcagaaagtgtcttggcaygagctttccctttgcaaaaggcaattgaaaatgggcaaagaaatcttttaattttctgattgtcttcataatttgactagagtatcttcacttgtggtgaaatctgaatccattctgatc

SEQ ID NO: 177900 - DNA, 444 bp, Homo sapiens
aatttcctaaaatacttagtcttctaagagcagcaccagcagcagggcaatgtcagaaacaataccaatatggatagctgttaaagctaccagaacaaaatgcatcccacttttgtaactcataaaagaagcaacagtaatgatgggaattctattctcagccaccacggaataagttggactggacttatactgtaaaaaatttaaaacaaagaaattacaatatatttttaaaaagttgttttcagacagtagatggcatrtagtacaaaactgtgtttcctgagagtaggaaagaaaacaagatgagccttaaatttgacacagatttttgcccggaagcaatatctggacagtgatgcagtgagagccatcctaaccagaaaatggcagtctcactgagttgatgagacagaataagagttcagagaaaatgaggtagct

SEQ ID NO: 177901 - DNA, 609 bp, Homo sapiens
gtatcacaattatttctcttttacaaacaaggaaactgagactcaaagaaattaacttgcccataaaagctagcacaaaaaataggcacaaatcaggtctggaatcctgttttgtataagtcctaagctgtgcccttaagctctctgccaccatgtaattamaataatatgcccttagcattcttttgtatgaatcttggttgtcaattaggaatcaccctgctaagatctcttcaggggaccttttccacagggtttcctgctttgaattcactgatgtatttctattttgtgtcccttgtgggctggttggcaaatgaaagtcaagagcaaactgaatgaaattctagcaggaaggaacctccagtgaatgcttcatttacaaggatggaggcatgcttattggtttcacccatgctctctaaagcattcacacttgctagtgtgtttacagcaaagtccatcacaaatgactatttccactttcaaatcatctctgattatctctgctcagtgactgtgagcaggtttaatctattcctctccattcaaactattttattctaactaccaaataacagttcccattttccatattcagggaaaggc

SEQ ID NO: 177902 - DNA, 403 bp, Homo sapiens
ccttgtgggctggttggcaaatgaaagtcaagagcaaactgaatgaaattctagcaggaaggaacctccagtgaatgcttcatttacaaggatggaggcatgcttattggtttcacccatgctctctaaagcattcacacttgctagtgtgtttacagcaaagtccatcacaaatgactatttccactttcaaatcatctctkattatctctgctcagtgactgtgagcaggtttaatctattcctctccattcaaactattttattctaactaccaaataacagttcccattttccatattcagggaaaggctgactcatttaaatagagttatgcatgacttacttaaagctgacagtttgcatgtgtggaatttaaacccgctagaaatctggcgaattc

SEQ ID NO: 177903 - DNA, 549 bp, Homo sapiens
tcaagtacgtgaatgaggatgcggaagacatctggatcttttgatagatattttgcattagggagatcaagagttgggactatctcttattttcaatggacttttcctaaggttaaaggaaacatgttcaaatcatgatcagcctaaataattctatgcattattcttctaagtcttataatttttttataaatagtgtccatttctgtcttgttttatgtgattattaaagacattcttcccttaatttgtagccttataagttaaaagttcatattgaatcatttgagaatagataactatactcaaagttgctaaatcatagactatttgataagactacctaacagcctttagggtattttgctgctgttaatactgctgataatgatgaaaaataatgattaaaatttattgaacatttttctatgctgaaattttgtgagatatttttgtagtttcaacaactcttattgtatgcactttgccccattccatatttacttccagaggataggctaaaattraaaacaaagggatgtattgaga

SEQ ID NO: 177904 - DNA, 630 bp, Homo sapiens
gtctcagacgacactttggacttttgagttaatgctggaatgagttatcctttggaggactgttgggaaggcatgattgtgttttgaaatgtgagaaggatatgagattttggaagggccaaggggagaatgatatggtttggttctgtgctctcacccaaatctcatgttgaattataattcccaatgttgggggagggtcctggtgggaggtgattggatcatgggggtggatttccaccctgctactcttataatagtgagttctcatgagatctggcagtttaaaagtgtgtagcacttcatttgctcactctcctgctccaccacttgacaatagtgcttgcttccccttcaccttccactcctattgtaagttttgtaaggcctccccagtcatgtctcctgtatagcctgtggaacggtgagtcaattacacttcttataaattgtccagtctccagtagttctttayagtagtgtgagaatagatgaatacagtgacattactgtttcttttttaatagtgtagaaatttgaaggttaaactgctaaatattatgtggctagttaagagcagatatgctatttgaatctagattgtttaagtcaaattggtgcccataccaa

SEQ ID NO: 177905 - DNA, 578 bp, Homo sapiens
tgataaaataagtttgtgtagttcagtgtattttatcaaatatgcagatttatgtgaccaccactgcagtcaaagagctattccatcaccacaaagatatcccttatgctacctcttaacagtcatacctgtttccctcccccaataatttctatagttttggcattttaaaatgaagattcataagaggttggctagaggattattaattgataattctaaaaaaaaacagctttagttttactgattttttttcctatgttgcttttttgttttcagtttcactgatttctgctttggttatttcctccttctacttagtttggattaatttgttgttctttttgtagcttcctaaagttgcagccgaggtcattgatttgaaaccattattattttctaatagaggcatttagtgctataaatgtatccataaatactgtttcagcagcatcccacttttagttgagataaattgtggattcacgtgcagttataagaaataatrcatagatatctatctaccctttacctagtttctcccagttgtaatatattgcaaaaccatagtacaatat

SEQ ID NO: 177906 - DNA, 476 bp, Homo sapiens
cctaaaaagagtttttctgggatgtggaagtaaaaacaagcaaagatggctgggggtcccatggtggaggcaacctgtttcccatttcccaggaaaaaccacctgagaagcagccagacctcagaaaggaaagggctgtggaacatccaggcagatgagatactacatggctgtgctgataaattcccagctacagcctgaaagcagaagaaagcccccaggacactagatatcacagtaggaaaatgggttaacaaatgctcatagccagggagagccctcccaataccttggctcccccaagaaaaagggaagttacagtttcctaaagcccagtggcgggaaggctcaaaatgaaagctgtttcatttttatacacctgggtttgtagactgagattcacactggctactttagagagccaccaaagatgaagacwggtcaacagcagtgtctgaatttgattctaagctctt

SEQ ID NO: 177907 - DNA, 476 bp, Homo sapiens
cctaaaaagagtttttctgggatgtggaagtaaaaacaagcaaagatggctgggggtcccatggtggaggcaacctgtttcccatttcccaggaaaaaccacctgagaagcagccagacctcagaaaggaaagggctgtggaacatccaggcagatgagatactacatggctgtgctgataaattcccagctacagcctgaaagcagaagaaagcccccaggacactagatatcacagtaggaaaatgggttaacaaatgctcatagccagggagagccctcccaataccttggctcccccaagaaaaagggaagttacagtttcctaaagcccagtggcgggaaggctcaaaatgaaagctgtttcatttttatacacctgggtttgtagactgagattcacactggctactttagagagccaccaaagatgaagacaggtsaacagcagtgtctgaatttgattctaagctctt

SEQ ID NO: 177908 - DNA, 397 bp, Homo sapiens
tacagaacaaactttgcacagaaatcatatgtcagaagagggagttctgccatcacagcttacagcagctgagaagctaagagttcccaggtaatctggcagcttcaagccaaagccctacccacaggctgggcagcacaggaatttgagttgggtgatgtaaggtaaaagctaatcttcaaaactagcaaacctttgcaagctacttctttcctcactctttttccccccacagaaggggaacatttgctgttttttttagagcctagagccttagcatctgcccccttgtcatttaagaattgagtatcwtggtgctgattttcaaagtagctgttaatcacttagctccacattcactatgaggacaagccagaaatcattataaactggagtg

SEQ ID NO: 177909 - DNA, 537 bp, Homo sapiens
gtgtgtttacaatcctttagctagacagaaaagttctccaagtccctaccccattagctagatacaaagcactgattggtgcatttataaacctttagctagacacagagtgctgattggtgcatttacgatcctttagctagacagaaatgttctccaagtccccacacgtcccagaagcccatccrgcttcaccattcactggcactcgcctccagactttgtggcacctagcctaggcactccggcagcccagagggagctcgtcccagacaaccaagaggaaaaggggggaagcgagaaagagatggagacctgccatcgtggccaatgaccccgtgaagaaggaacggtggtccacgcatgggacccagccttcaatcaagcccagcaggcctcggctcccaccggcgcctctgcctctacaccttcccactagcagagggagcagagggagccagccccagagaggggcccccacagcacagcggcaggctgaagggctcctcgagcacggccacagtggatgcagaggcc

SEQ ID NO: 177910 - DNA, 554 bp, Homo sapiens
gaaagtgctctattaccacatctactatgtggctttggtggttgtgtcagggtgacaaatataaataaattaagcatggtgtctatcttcttgcagctcactattagtatggggagaaggtsgcaaagaatgggatggggttgtggaatcagataagggcctaatagaggaggtaatcctatttcctacgacctagccctgaaggccgaatagcctttcctttgccatgaggaaatgggatggaaccagaggcatctctgacagagagaagtggtaatagtagccttgaagtttgaacacagcctggcatgtatagggaactgcacagaacttactggatggtacactggctacaagaggtaaatgtaaaaagagaagaaggatgaagaagtaggaaagagtcagcttctgaaaaatccctttagatagagttaaagactaattaacaataccattttctccatcttacacttataaataaaatttgtaagtcatgaaaacattaatgtgtaagggaatgacagtgttaggtagattatcatttttttattaac

SEQ ID NO: 177911 - DNA, 599 bp, Homo sapiens
acagaacatctagacagaaaattaacaaacaaacattagttttaaactgcacattaaatcaaaggacctaacagacatttacagaacatttcatccaacagctacagaacacacattcttctcatcagcacatggaacattttttagaccatatgttagaatacaaaacgaaccagcaatttaaaaaatcaaaatcatatcaagtatcttctcagatacaataaaatagaactagaaatcaataacatgaggaactctggaaactrtgcaaatacatggaaactaaacaacctgctcctgaatgaccatcgggtcaagaaagaaattaagaagaaaatgcaaaaatttcttgaagcaaatgagaaaacaaaataccaaaatatatgcgatatagcaacaactattctaaaagggaagtttatagcattaaatgcctatgttaaaaaagtagaaagatttcaaataatcactctaacaatgcatctcaagaaactaggaaagcaagaagaaaccaaacccaaaactagtagaaggaaagaaataagatcagagtggggctgaaaaaaatagagacaaaaaaaaaaaagggggttcaacac

SEQ ID NO: 177912 - DNA, 597 bp, Homo sapiens
gggaggcctgaggaagtttacaatcatggcagaaggtgaaggtggagcaggcacatcacatggtgaaagcaggaacaagagagcaagagagagtggagcggaaggtgccacacacttttatatgaccagatctcatgagaactcactcactatagtgaaaaaagcaccatgccatgaaggatccacccccatcacccaaacaccttccaccaggccccacctttaggaytgcagattacagttcaatgtgagatatgggcagggacaaatatccaaactctatcagccatataaggcaaacctgcagctaacatcatactgaatgaccaagacaaggatgcctactttcaccactcctattcaacatagtaccagaagtcctggccagagcaagcaggcaagagaaagaaataaaaggcatccaagttggagaagtcaaattgtcactctttgctaattatatgattttatatttaaaaataaccaaagaatacaccagaaaactcttagatgtgatgaataaatcagtaaagttgcaggatacaaaatcaaaacacaaaaattaatagtgtttctatacaccaataatgaactagc

SEQ ID NO: 177913 - DNA, 462 bp, Homo sapiens
ctctctttcagtctacttactcttattttagacacaattctagcaagcttggcaatctggtttctcagtccacagcagattagaagcagcaaattagggacctattgcaggaggcaggcacacaagacggcggcaaaagtgacagctgattataagggaagatagagaaactgtgaaaaacagacataactgaaaaaagcacaccartgtgaggtcatgttgtaaaggggtacctgacatatatctcagtagcccctgaggatgagtttctgtttatcaccccatgatagaaactgatattcctaaagatgacagaaaaagttaaattatattctatatactctagacaaagtagagaagtagtgcatttagttattaaattattaaaatggatttgttttagttagctgagaagttaacttaggcaaattaatcacctgtctatgatgacagataaatggt

SEQ ID NO: 177914 - DNA, 383 bp, Homo sapiens
aacctcagaggctgttttctagccaataaaggtagctatgacttgtgttctcgcctacatactattgccacactaacctctccaaaatgccattttgttaaaagcattccaatattcaaaaactctcctcctagatttcacaggccattcacagtatgatctccaacccaatgattcarctttctcacttgttccctaacaaacatccctttagttaagatcttcacaggccttttctctaccctactcaaatgtatcactcgctcttttccctaaacttgttgattctcacagacagcaaaaaatacctttccatgtgtgcccaaatccaaagtcccggctctcacttttaagcccatatacacctttcttctagaaaatat

SEQ ID NO: 177915 - DNA, 447 bp, Homo sapiens
attagtatgttaatcagtgaatgactgccaaactattcagataagtggtgataattacacaaattgctttattaacttaggcttaccaaattaaattacaggcaacttttaccaatggccctctacaaaaagcatacataaacaaagaggtcatacaataaatcaactctcagcagtgaagagccacragtgacaaaaaagtataaaaaccacattacctacctagctctgaattgggacatttatcaacaaaggttatcgatgagaagtcagtatgaatttgaagtgtcttcataaacctaagataaattgatctagtgagccagaatgtagcttaaaatgggcttaggcctaccactccaaatgatggaaaagaacagaaattttatcactaagatcatggtgaacacgggcaggatcaaaagtctggataaaaggaaatatggt

SEQ ID NO: 177916 - DNA, 595 bp, Homo sapiens
acttcattattttgtattcctttttcttttgtctcctctatgtattttccaatagcctgtcttcaagctcaccagttccttcttctgcttgatgaattccrctgttaagaggccctaatgcattgttcagtatgtcagttgcatttttcaactccagaatttctccttaattctttttaattatcttaagctctttgttaaatttatctcataggattttgaattccttctctgtgttatcttgaattttgttgcgcttcctcaaaatagctattttgagttgtctgtctgaaatgtcacatatctctgtctctccaggattggtgactagtgtcttatttagttcatttggtgaggtcatggctggtcttgatgcttgtggatattcactggtgtctgggctttgaagagttaggtatttattatagtctttgcagtctgggcttgtttataccgtttttcttgggaaggctttccaagtacttgaaggacttaggtgttatgatctaaggctttggtcactacagccatatctgtattgggggcaccccaagcccagtaatgctatggctgttgcagacttgtagaggtactg

SEQ ID NO: 177917 - DNA, 365 bp, Homo sapiens
aaatagctattttgagttgtctgtctgaaatgtcacatatctctgtctctccaggattggtgactagtgtcttatttagttcatttggtgaggtcatggctggtcttgatgcttgtggatattcactggtgtctgggctttgaagagttaggtatttattrtagtctttgcagtctgggcttgtttataccgtttttcttgggaaggctttccaagtacttgaaggacttaggtgttatgatctaaggctttggtcactacagccatatctgtattgggggcaccccaagcccagtaatgctatggctgttgcagacttgtagaggtactgccttcatggtcttgggtaagatctgggagaattc

SEQ ID NO: 177918 - DNA, 545 bp, Homo sapiens
ataatacctaaccttgctattattgtgagaattaaatagaaaattgtatttaagcttcctggttcttaataacgttagttcccttcatccttgacttttttaaaaactaaaatctgacattgataaagtttaattaacatttcaacattttccaattaatgtttgcgtttgctattaagccagaatatatgaaccttattttggttatgtgtacacaaatagacatttcagttttgttagacaccatcagtatacaagcttcacatgtyaggagtgtctgttcctgatttataatttaaattttataccagaaaaagagcatgtgttagtcattggcttaacagtaaattagcctattaacattgtgattaaactttatttgaagagtcatgagcaactactctctttatctaaacatccacaaattatatttttggaaaagcaagaaatgtgagtttacatgttaaagcaatactcatatattgaaaacaatacgcatatacacaatgtggactctaagtgacgcctataccctcaaaatatga

SEQ ID NO: 177919 - DNA, 535 bp, Homo sapiens
aggatgtgacttccctgcaaagatgcttgaaagctccaggaagaaactgagcaagaggcagcaagttctttcttgaaaggggcatctgagcagcgtatctctgtatctatcatccaaataacttcatggtttctgtaatggacagtacaaaatggactattaaacagtttcttttggtgccatttttttattataatatccaatagaatgaggaaaatgtaagagtgaacttggataaaaaactcaaccctggattccttgcaataaggaaattgtactgtaaatatagccatacctcattttcttctaaaagaatcgggcaattttactctgattttgtgtccaaagactaacgactgttccaatatccctcttgatgtttatttctttccattgcaaaaatcaagcataccaaatttacctttccatatgttttttttwacttatatttttaaatcatccacattttttgaatactcaatcttctgcttggctgaagcagttctttatatcttatgtatttgtggatttcaat

SEQ ID NO: 177920 - DNA, 546 bp, Homo sapiens
ttgagtgcagacctaattctaaaacccagccttttatccgttatgcaatattgcttctcaatactatctcacagtttaggggaagtcctatagtctgccattaattatggatagtatggtaatgtacatgtagaggcttcatgataaatgatcatgttgtaaatactttattatgactactacaaattacttagactcagtcttcttttattaatttttttcattcttttgaggtataagtgacaaataaaaattgtacggattaatagtatacaatgcaatattttgacgtactacatagacattgtgaaaaaattatcaccatcaagctaataacatatccattaatgcacatggtttccatttttttgtcatgagaacattcaatacctattttcttagcaaatttcaagtaaatgtactggttttaaactgtagccaccacactatactaatgttctccagaacttattgatcytgcgtaactgaaattttttgctttgaccaacatctcccagtttacctactcccccctcccaacagttc

SEQ ID NO: 177921 - DNA, 502 bp, Homo sapiens
tggtaacaatttgcttgattttatcaagctactgaataccttaaaactttccatgcaagtgttaaaatacaagtaggtaatttaaaaaagttatcagaggagttcactattgacaatgaagctaaaaccattttgtcatttactttttaaaaattaatattttgagtagtaacaaaattgaatttggtgacttcactgactaatataggtttttatggtatataataraaagacattgcttccaatttttaaaatttatgtaaaaacattttaagaaaaatttttacaatttgttccttcagagatctaaattagccttgtgactatttttctaagtgatagaaaatttgaatctaaaagtagaagcaaacaaacaaaacttgttgcaaacttttcctatatgttagtaattaatatgtagttttttcgaaccacctggttccatgctgactcttcagtgcttgttctgttctcaaaaattgacattggattgactgaataa

SEQ ID NO: 177922 - DNA, 529 bp, Homo sapiens
aattcaaaaaaactgtcgaaccatcctaagtcaaggacagctggatcgttaatacaaatcccagattttattcagatttcacctaatttacctataaatgtactctttctgtttattcacttttatagactccagctctctgttaaaatatatcatgttcctctgttttcttgaacattttaatactagttatttaatagtctatgtctaataacttcaatttctgggtaatttatggttctgcttttattatttattttatttcttaattttcatcaatttgattttgtttcttgatattcttggtgwtttggtaatttatgactacatactggacattgcatatgacaacatttaggttctggatgatatccaaaccagaaaagatttcatttcttctgacatgcaaagtaaatgcagattatcttgttccagtcaaggctatgtttctgtcatcatgaaggccaatctatttctggtttgcccttatttccaagtttagcctttagtcttgaaatttaactgttga

SEQ ID NO: 177923 - DNA, 529 bp, Homo sapiens
aattcaaaaaaactgtcgaaccatcctaagtcaaggacagctggatcgttaatacaaatcccagattttattcagatttcacctaatttacctataaatgtactctttctgtttattcacttttatagactccagctctctgttaaaatatatcatgttcctctgttttcttgaacattttaatactagttatttaatagtctatgtctaataacttcaatttctgggtaatttatggttctgcttttattatttattttatttcttaattttcatcaatttgattttgtttcttgatattcttggtgttttggtaatttatgactacatactggacattrcatatgacaacatttaggttctggatgatatccaaaccagaaaagatttcatttcttctgacatgcaaagtaaatgcagattatcttgttccagtcaaggctatgtttctgtcatcatgaaggccaatctatttctggtttgcccttatttccaagtttagcctttagtcttgaaatttaactgttga

SEQ ID NO: 177924 - DNA, 560 bp, Homo sapiens
  misc_feature (1)...(560): n = A,T,C or G
gggttaatatctatcggaactgcaaacactntcttgatctattttattctgtgcccagaagaccaaaaaacaaagcaatctcatttggttgcatacatcacttgcactacctccctcaatgccacagcgaaatgttttttgacattctctttctgacttaaataatgagctgcattttcactcatcttttgctctgagaccaggctaatatctcctaaaagtattctaaatttatactcagtggctttctaaggtcatttaaattcctaatgaaaagtcactcaaggccacagtacaaaataaatacattgttattgatcatgcaataaggtattaggctaatttaatarggcttctccctgagatgtacttaattcaccaatattgtcatttctcagccatcatggatcctgctggtttttcatggcctagaagtagtcatcatctctactccatgttgccacctggatattccaggatgcctcatctctgttaaacttcttctccctgtcggcaaagtacagtgacagaataaggattcattactcttgaaatgaccc

SEQ ID NO: 177925 - DNA, 621 bp, Homo sapiens
tgctctgtggcattagatatttttgtttgctaaaacataggctagccttatagatgccatcagattagtaaacaagaataagccacttctcactttgggaggccgaggcaggcggatcacttgagcccaggagttcaagaccagcctgggcaacatggcaagaccccatctctacaaaaaataaaaaaaaattagccaggcatgatgtcttgcacctgtagtcacagttacttgggaggctgcagtaggaggatggcttgagcagaggaggttgaggctgcagtgagccgtgatcacgccactgcactccagcctgggtgacacagcaagactatgtctcagaaaaaggaataagcccctttagatagtgtgggatcctggttcagagcacaggctgtggagtgagaaaatctgagtttaaatcccagctctgccaccaagcagatraataacttcatgtttgttcctcccctctctgggtctcactttcatactctgtaaaaagagaaaataatactgtcaattgcacagtgcggttgtgaagattaaatgaattaatgtaatgcttcgaacaagtcttagcacatgttaaatgctcacctgctagctccaatattatta

SEQ ID NO: 177926 - DNA, 606 bp, Homo sapiens
tacttttctttttattcatgtagcatcttcccattaaggacccaggatcactaggaagtagagtctgtctcaaagacaccaactgagcccttaatccataccaagcactttatgtatgtgtcttattccattttgtgctgctatgaccaaatactactgactgggtgagttataaacaatagaagtttatttggctcatggttctggaggctaggaagtcccaggtcgagcccacctctggtgaggaccttcttgctgcatcataacatggcagaaggcactacatggtaagagagagcaagagatcgaacttgcagttcaagccctttaataattggcattaatccattcatgagggtggagccttcttgccctaaacacctcccctcaggtgccacctcccaacactcttgcattggggattaagtttccarcacataaacttcagaggacacattcaaaccatagcagcatagtatcatgattagacattatttatgcattcctactgtgtacttgatgtgtttgcataccttacctttaattctactgtaggattggtgctattaccccatttcagacaggggaattctgagactcggaggg

SEQ ID NO: 177927 - DNA, 382 bp, Homo sapiens
tgccatgtaagaggatgagaactggagcgtaatccctctgaggaactcaaaagcagggagccggggtactgatactcagaaatactcagaagctgaggtattgatactcagaaatgctcagggagctggggtattgatacatcaactcttgttagtgcatagatgagagttattccaagggatcttgagkccctggcattcccagtgcaggcagaaggggcttttgcagcctgagaaagtcctcaagagatagcatgcttgattctgggaattgggagtcaggctgttcaatcaaaagttagggccaagggggcatggggtagagcttggaccttttctaagcagtgtgcatccagggggcatagttttgaccacatgttct

SEQ ID NO: 177928 - DNA, 386 bp, Homo sapiens
gccccctgtgccaacctggaataaagctttcactcatccccactcaggacaaaaggtctggctgggctggctggatcatcttgggtcatggggccaggtatgcgacagcccctctccctggcagtcaatgtcaggcagtgttccaggcatgggctctggagtctgacagaacagcattcagcaacccactctgcacctttctggctgtgtgaccttggtcagggtgctgtatgcctttgggccctaattccatcatcggcacaagggggctcactgccccarttcactgtgggggacaatgtgagatacatggaacacagaacgaagaccctggcacaaaacaggctcccgatacctggcagcagctgctgttttactatgatgag

SEQ ID NO: 177929 - DNA, 386 bp, Homo sapiens
gccccctgtgccaacctggaataaagctttcactcatccccactcaggacaaaaggtctggctgggctggctggatcatcttgggtcatggggccaggtatgcgacagcccctctccctggcagtcaatgtcaggcagtgttccaggcatgggctctggagtctgacagaacagcattcagcaacccactctgcacctttctggctgtgtgaccttggtcagggtgctgtatgcctttgggccctaattccatcatcggcacaagggggctcactgccccagttcactgtgggggacaatgtgagatacatggaacacagaacgaagaccctggcacaaaacwggctcccgatacctggcagcagctgctgttttactatgatgag

SEQ ID NO: 177930 - DNA, 439 bp, Homo sapiens
gtgtgctagtcacactagttgatgtgcacatctgtgcatgcttgcttatttgaacacatgagtatgtgggcacacaccagtgcaggcaaggagactcacatgtgtgtagccatacccctagtgcaaatatgcacacataaacctgcatttaaaactgaagacattttaacaaaattgagcaagtcacttgttcsgaatcctgtgctaagtgctgggtagggctcaggggtggagaattgaaggtggactgaattgggctccatccccaagatgcttataatctatggaggatgacagatattaatttaaacagtacaaaggggtgaaggaaaccatgtgtacgggtgtatttgtgtgtgcacatgagtgcaagaaatcctagaaccttcagaatggagtgttgggttcccaggtgtgtctccaggtggctcgtctaaat

SEQ ID NO: 177931 - DNA, 543 bp, Homo sapiens
ctgtatgcacaggccttgtatgccgcaggtgcttgcaggcagctgcagggaacttggctcttttttactctgtggcatgaatttggaaagcatggtgtgtgtctgagtgtgggtacgtagttgataaatacccaacgtggaatgcaactttgcctgaatcaggcgaatgaacctgccagtgcatcaaactgakaaatgagtttcgatttccagctgcctgtgatgtatgggcctgcttaggagctgtgggctggaagctcttaagcctggtgctctgggccacatggctgcctggctcagcggggcccagcccctcacgtcagggctctgggaaacactattggagcctaatccggggatttcctcgtgatggccgcagcatcaggaggacctgcaggagatgggacatggggtggcaaggctgagggggaccagggaagagcaggctggggacacctcagctcctttgtcttttgggacttggaggtttggggagagaggtttatcctgagagcctgagaaagttggcctggaccaaactgg

SEQ ID NO: 177932 - DNA, 445 bp, Homo sapiens
atgtggggagatggggacagtggcctgatccatgtcacggggacaagcagtacaggtactcagtggtcctttccgacaggtagaggcatctaccctggccaacatgtttttcttcccgctgaactctctctatccycttcatctccttcttctgcattttttttttgagacagggttttactttgtttcccagcctgtagcacagtggtgtgatcttggctcactgcaacctccacctcctaggctcaagcaaacctctcacctcagcctcctgagtagctgaggctacaggtgtgcactaccacgcctggctaactttttgttttgtaggaacaggtttttgccatattgccaaggctggtctcaaacttcttcttctttttcttatttattttttttttttgagacagagtcttgctctgtcactcaggctgaaatgcagtgg

SEQ ID NO: 177933 - DNA, 445 bp, Homo sapiens
atgtggggagatggggacagtggcctgatccatgtcacggggacaagcagtacaggtactcagtggtcctttccgacaggtagaggcatctaccctggccaacatgtttttcttcccgctgaactctctctatcctcttcatctccttcttctgcattttttttttgagacagggttttactttgtttcccagcctgtagcacagtggtgtgatcttggctcactgcaacctccacctcctaggctcaagcaaacctctcacctcagcctcctgagtagctgaggctacaggtgtgcactaccacgcctggctaactttttgttttgtaggaacaggtttttgccatattgccaaggytggtctcaaacttcttcttctttttcttatttattttttttttttgagacagagtcttgctctgtcactcaggctgaaatgcagtgg

SEQ ID NO: 177934 - DNA, 325 bp, Homo sapiens
caaaggggaccctgagttctgaagtaaaaggagattaataaggatcgagagtgctcagcctcaaaagcccttgagaaattccagaagtctcctttagtaccgctgccccaggcccagggctcctcgamctcctcaagcaccttctactttcctctaggcatggccatccagcctgaatgacatcccccactcacttcatggtggacatgattgtttttctgtagagtttaaagattaggtttgaggcaatatcactctactagtctgcagggcagagtgagagagagagagaatgggtatcagagctctgtgatggactaaacag

SEQ ID NO: 177935 - DNA, 363 bp, Homo sapiens
tgagcatctgccacagctctctgtcgatctctagggccattgagacgtctggcctgtttgtccctgcactgagtgaccccgtagggacagttcttctcctcgtgtcctcaacagtagccactagatatcagccctccacaggtcagtttctcatcatcagaaatgaaggataggagattcaggctaaatccaacacacttcctgagtcgttttggctcttactgaaatctttgctgatggcagcaccagggaagactctgttttratagactgctaccatagttctaatcagggtggagtttctggagccttaagcataatgaacagttgaagaatttcaaaaggtggttcatctactcacta

SEQ ID NO: 177936 - DNA, 633 bp, Homo sapiens
attagactgattttattgcataaaaattaatctttaaaaaactgttaaaattgaggtaccctttccagagtcattatatatgttcatttcttgtagtatcttttataccttttattaaatttttaaaggtttcttccttagttcttgtacttacctttacttgctattaagaattaaatccattttttattgatttttaaattgggtttttctggcataaaggaaagtgatttaaagatcaatcttttttcctgcctctaatacctctgatgtattatgcactgagaaactggtgttaccctaatgaccatatggagattaataaagtatttcaggaaatattaaatgaaaaaggtgaaattcaaaatggtatatatacacatatagaagtggttggtcaggtaactggatgggaggagacatcataaataccaatatgggrtcaatgacaaagaagagacttggatggaacatgaaaagtttaatgctgtgcgtgttgaaactgaactgcccatagagtctcaagaagaggtatctattaggcagataagaagaacagttggaagttctggagaaaggctgggcttcagatagagctgtggaggtcggcagaacatacagaaggatgaaagt

SEQ ID NO: 177937 - DNA, 534 bp, Homo sapiens
cccaagaggtgggagaatcatgtgagcccaggaggcggaggttgcagttacccgagatgatgccattgcactccagcctgggcaacagagcgagacttatttaaaaaaaaaaaaaataaataataataataataataatatttttttttaagaatacaaattgaccaatgttggaaacttaygccacaagtggagttaagagttttaaaaagatctatattcctttgggcatatacccaataatgggattgctgggtcaaatggtatttctggttctagatccttgaggaatcgccacactgtcttccacaatggttgaactaattcacactcctatgaatggctgctccctttctttctaaagtgagagaaaatgagaataaactgcagaatcagatagtctggaattttataaaagctcaacaattgacacactgtgtgatgtagaaagttgctgagctacgtacttttcagcatgtaacacagtgttagcatcttctctacttcctgggatctgtcatgagggtaaaatac

SEQ ID NO: 177938 - DNA, 534 bp, Homo sapiens
cccaagaggtgggagaatcatgtgagcccaggaggcggaggttgcagttacccgagatgatgccattgcactccagcctgggcaacagagcgagacttatttaaaaaaaaaaaaaataaataataataataataataatatttttttttaagaatacaaattgaccaatgttggaaacttatgccacaagtggagttaagagttttaaaaagatctatattcctttgggyatatacccaataatgggattgctgggtcaaatggtatttctggttctagatccttgaggaatcgccacactgtcttccacaatggttgaactaattcacactcctatgaatggctgctccctttctttctaaagtgagagaaaatgagaataaactgcagaatcagatagtctggaattttataaaagctcaacaattgacacactgtgtgatgtagaaagttgctgagctacgtacttttcagcatgtaacacagtgttagcatcttctctacttcctgggatctgtcatgagggtaaaatac

SEQ ID NO: 177939 - DNA, 552 bp, Homo sapiens
tttctgtgacacttggtctgctsagtgttctgcgaaaattatttaactgacattataataatcatctctataccacaaatatctataattagaatctctataatcagaaatgacttaactttatcttttttctcttcatttatctttaacatgtaacaatattccatcctttctaaaatactcatctatttacttctgaaacataaagtgtgttggtttctctcttacctgcctcaccagtaactgcagttggctcctcctctgtcagtatcttacatgttgatattcctcagggatttttctaaacttcattttttttttataattctgcataatggccaataaaaacacatctactccaatggctttaattgccatttaaaactcaggtgtaggctgggcgcagtagctcacacctgtaattccaacattttgggaggctgaggtgggtggatcacctgaggctaggagtttgagaccagcctggccaacatggtgaaaccttgtctctactaaaaatacaaaaattagcctggtgtggtggcgggtgcc

SEQ ID NO: 177940 - DNA, 552 bp, Homo sapiens
tttctgtgacacttggtctgctgagtgttctgcgaaaattatttaactgacattataataatcatctctataccacaaatatctataattagaatctctataatcagaaatgacttaactttatcttttttctcttcatttatctttaacatgtaacaatattccatcctttctaaaataytcatctatttacttctgaaacataaagtgtgttggtttctctcttacctgcctcaccagtaactgcagttggctcctcctctgtcagtatcttacatgttgatattcctcagggatttttctaaacttcattttttttttataattctgcataatggccaataaaaacacatctactccaatggctttaattgccatttaaaactcaggtgtaggctgggcgcagtagctcacacctgtaattccaacattttgggaggctgaggtgggtggatcacctgaggctaggagtttgagaccagcctggccaacatggtgaaaccttgtctctactaaaaatacaaaaattagcctggtgtggtggcgggtgcc

SEQ ID NO: 177941 - DNA, 535 bp, Homo sapiens
catctttactatttttaagtgtacaattcagtggtaacatttatattcttttgttttctcttcatcccctgccttccacctaccattcctggcctctggtaaccactattctactatcgtcatgaaaaacactattattagcttccacatatgagtgagaacatgcaacatttgtctttctttgcttggctaatttcacctaacataatgacccccagttccatcatgttgctgcaaatgacagaatttcgttcttctatatggctgaataatattccatcactgtagatttacaatacatattcatgcctcattctggaaatttccgtcattactmtctttcctcccaaatgtttttgactgctctcacatgttttctcttccaggttgactatagaattatttttgctgattgagtttttctaccattgggattttaagcagaactgggttaaatttatagattgatttcagaagaattgacagccttacaatattagatctttccatatagaggcatacaatcatctatcca

SEQ ID NO: 177942 - DNA, 571 bp, Homo sapiens
ccttgtccttcaagctcgccctgctcaaatgccacctcttctgtggagtcttccctgactttgccaggaaagttaggacaaaaccttgtgccgagcctgaggtcagatgaggaaagacaaacatttgtcttcagaaggctcatcatctagcagggaagatcagcattacagaaaaaacaaaaacaaaacaaaaaacagaaaagaaatcctcactttataccagcaaatgagggccaagttcccaatgagagatacaagaagcaggagtgaggtgttcgtgtgggctgggaagtcaagaaaggaggtggggtttcctggaggagtggagctgggcggggtactgggatagggtaggaagagtatttcaggtagggaggagcatacagggaaggcatgtgagaaggwgggggccatgctggaaagctctggatgtgtggctgagcaccggcactctatctaacaggcaacgggatatttgtatgagtgcaaacggctcagccctgcatccagtaggcaagagggaaactggcaggaaagtaaagttgagtgggaaaactatggctcaggaatt

SEQ ID NO: 177943 - DNA, 573 bp, Homo sapiens
acaaagacactgctagaaaactacaggccaatatcactaaagaacatacatgcaaaaatcctcaataaatactagcaaggcaaattcaacagcacatcaaaaaaattacctgtcgagtactctgttcacttcatgggtgaggtgacaggatccatacttcaaaccttagcatcacacaatattcccatgtaracaaatctgcacatgtaccgcttatatttaaagtgaaagttgaaatattttttaacaaaattatacaccatgattaactgggatttatttctgggatgcaaggttggtttaacatacgcaaatcaatcaatgttatacaccacagtagcagaattaaagacaaaaatagatgcagaaaaagcatctgacaaagttcaacatccattcagtttactctaaaaaaaataagtatagaaggaacatactccaacacaataaaggtcatttgcaaaattcccacagctaacatcataatgggggaaaactgaaagttttttttcaaagatccagtacgacgcaaggatgcccactctcaccacttctattcaaacatagttacag

SEQ ID NO: 177944 - DNA, 595 bp, Homo sapiens
cttgtttacagtaacatactttcattagttgctggaatggcaacaattttgtttcctatcatctaatttttacttgtgacctgcttttatgtggtggtgtgtcttttctatttctgacctatctaattgcttgcttattatgaaaagctgctgaggataagtcccaagttagccattacatatgtgtagaaaagatatggacatttaaatttatgcatttgttttgacattaaaggagcaatgggcgtgccagtgcctggctgtaggggtggagtggggatcaggaggctccattaccatgggaaaggggccaggtttaataacttcacccgtcaaaaagctcataaccctatgagcttctctgcctcattccaaaagaggatttgggatgagcctccagcaasaggcataccaacagtgtaagcagaaatacagaatgaggaccaagggaaaaagaagggtgcagcttgcgagccatttgggtttatgtggttggtatgattgtgtttgaaatttggctccaggctttttggcaggcacagacaaatgggatgtgtggttaatcacacatgtggctccaagtcacttttacttt

SEQ ID NO: 177945 - DNA, 669 bp, Homo sapiens
aatgacatgtaagtagttacatactaagtatgcctagtctataactgtacagttagtctaatgtttaaattattaacacacacagtacatatgtataataaactttcccttttttttacttaaaatgacatataaagtatacaaacagacatgttatattgccctcaaattcccatgcttccacttcctattcccctagatttcaatgaaagatagcacaatcacttacagccacttaacaatggagatatgtcctgagaaatgcatcattaggtgatttagtcattgtgtgagcatcatagagtgcacttacacaaacctacatggtagagcctactacacacctaggctatatggtacagcctactgctcctaggctacaaacctgcacagcatgttactgcactgaatactgtaggcagtagtaacatgatggtcrgtatttgtgcatctaaacatagaaaaggtacagtaaaaatatggtattacaatctgataagaccactgtcgtatatgtggtccctcactgactgaaccatattatatgctcaagactgtacttcagtgtggagactatcccatctatataaactattaaattccacatggtaaaacaaccaatgtttatatttcatctaaaatgtatgatcaattagtaattctataact

SEQ ID NO: 177946 - DNA, 370 bp, Homo sapiens
ccttggaacagactgggagcctgatcccaagaggctgctgaactggccccagtcacccacctatgtgccagagtcaggcctggccgacacaaggatctatgctttttctgtggtgtgtcactgcctttttaacaaaagggctgtcaaagtcaccattctttttgatgagggcagcgtaattacattgccttttgtcaggactgtgggtatgtgatttgtcttccacagtctctctggggctgtgtcctacatagcttctgactctcaatttttggtgccatgagctgagctcagtgagtggagctggcttttctgtcgctgagtgstactgcctagtccagatgtcgtggctcagggtgtaaatattcct

SEQ ID NO: 177947 - DNA, 358 bp, Homo sapiens
tgtttcctagtcagtaaagtcattatcttccaaatttctggaaaatttttcaataaggctttaccaagactgatcaaatggccatgcttatacaacttattctgtcctttaggagcaccacgtttaatccaatggatcagaaagaactggaaacataaaacattgttagtactcaatacacctatgccaattctttatccttaaaaaataatgtgattctgcctcatgtttttgtacacgaatacacacactggcacatttttgaaactctggagctgcagatttacctcattcaatttatatagaaaatatctgccctctagcttcattggaaaarccaattttcatattcaaatca

SEQ ID NO: 177948 - DNA, 616 bp, Homo sapiens
aacattttgtattgtttgtcaggataactttatatgggatctagaaatgataaatgggcttgtgatgaactctcctgaaggaaagccaaagggactttggtttctgtcatatataaaatacggcattctggtttacaaggaggttatctttgtccacagmtcactcttgagatagaatctagggcactctggccatctctggctatttgcaagtacagattatatttcagttctctaaatgtttttgctggaagaaaatctgtgcactttaatcatagtttattttcatcattaagtagttgaaatgacagtgaattgagaaagattcaaaaacaaagagtaagacttccaaatcattatctgattatattcctaaggagctaagcacagccccatttaattaaagaaagagcaaatgagcaccttctaaaccaaacatgctgggctttcttcctcccccctcccctcatatcttgtatagaagtggtgaggcctatatcagatggattcctggggtgctaggaaagcaatagaagagagtgagtcccctggaggaaagggaggaaagggatattccaggtagatagaaagcacatgcaaaagaagtgatactaaa

SEQ ID NO: 177949 - DNA, 418 bp, Homo sapiens
agatgtcaatactccgagtgagctaataattcgatacatttgatcttctggaaatatccagttagggtttcatttggaggaaaggatgagggctggaggatcaggaagagagggggtgaggtgactccagtaagacagggtactcacccctgctgcagagctgagaaggcctgttctgtcatcccaagtcagctctggctccaaacttgaatgtccctgccgggaagccagaagccctgcagtcaactggattcacccctcctagaaggtagtttagcacaactagttgttgtggaaacatgtcccttgtggggtgtcatctcctgtttcctgcacaactactcaaagtatcccttcacctcacatgkcatgttatgttgaactgtctctggagaaatattagccagattttaatcag

SEQ ID NO: 177950 - DNA, 533 bp, Homo sapiens
gaacaccagggtaaagtggccaaggtcatagggttgagctgtctgtggcccaggtagtttatcctctttctgggtcacagaccattttgggcactatgcccagacattctttaaagaaggacctagtcccaacacaacagtggatgaaagagggaaacaggtcagggccaatacacagcygtcagaactacaatgtctcaaggtcagtatattcctagagtgattttatatatatatatatatatatatatatatatgtatgtatataaaatattgtgtatatacatatatacaatgtatattgtatggtatgttttgtgtatgtgtgtatatataatattatacatatcactctagcaatatactcactttacatatggatacacataacactagatatatacatatatatatatagtgtgacaattttgtataaaaaagggagaataactgtgtttgaataacaattatttgtttttgttttaatttataaaggcagtaaaaatcaaccaggttcacttcacttacttttt

SEQ ID NO: 177951 - DNA, 551 bp, Homo sapiens
cagtcatggtccatgaagagaagtcctgtgacctttctagtgtattggactataccaccaaactttactcttgaaatacatattttctcgtaacttgtgagtagaaaaataaatatttatttcataataagaaattacatacaaatgttccactattcccctaagatagttcaacatgaaactagccccatgcataaagttgaagaaatatggaagaaatttgttggagtagacttaaatttcaaatacttaataataaagtcatttaaaataattaatacaatttacttaataaccaaatattatgctactatttaagatgcttactgtctaagttttttatgtagataatgtaaggaaagttactttatgtaaattaatattcaatttattaaagttatacattcaagtcttttcttaggttaggttcaattmattgcaaattaatgatcacatatttatctggaagagtaggaataataagcattgtactctgtaacaaaattaatacaaaagattattttatctgagcataaaaaaagtctgcaaga

SEQ ID NO: 177952 - DNA, 570 bp, Homo sapiens
agatgtcccaaatgagtacgacaaaaatactgtttatctgtattcatttcagatgtcttctgtacccagacttccctgagggtatgcttttttacatcattccagcatctgcaccacattttatatctcggactatgctgcgttccatcacaataaactcctctagctgtttggggtgacataaactattgaaagggtgactccagaaagtactcccatcaatatctgcaacttgtaggatgtttggatcagtgaggtgaatggcactggttactcagatacacacacaaatctggttcatatttcccaggctttgtaccagttttggagacagacaactttatccttgcatattggaacaagtgtgtgtgtgtgtatgtgtgtgtgtgtgtgtgtctgtagacatacacaaacgtgtaaagtagactcagaattgctagtccatacccttttgggaagcaaattgttcaactagaatacagtgtttttgtatagttcttgagttttacagtatccarttaaagtactgttttccaaaattgcttaggtcaggaccttccattctcacac

SEQ ID NO: 177953 - DNA, 579 bp, Homo sapiens
gcttgccaggttgctcagagaaaaattcaggcaattctgactgaggtaaaacagcacaacagcagaaggctctgcaaagtggaccacctcagtcaagatggaagtaaagactcaggaaacagcccaccacagaggcagatggcaaacaaaagacagattgcttaaccaacagacaggcgctgaccccctatccagaatcacatgcacaagtttttacctagccagttgtttctgaggaccaggcaacttttgaactcctgtctctgtgagaatgtatactttatgctctccgaaatgtatgacamccagctttaaaacaaaacaaaaagagggtgggggagggagggaaagagaagagctctgcacttccctttgttgtagtctcacagtataacaaatattctaattcttaatattcccccataattccagaaattggcttactgatgctttcactaaattcaagtagattgctcctaaattcaattgttaaaattggatcagaataattatcacaagaacttaaatgttaagtcattagcatagaaaaactgttctcagttttatttttacctaaca

SEQ ID NO: 177954 - DNA, 238 bp, Homo sapiens
ctgtgatgccccgagctgtaaaaccaacaattttttattagtgattttcaaaaggggagggagtgtatgaatagggtgtgggtcacagagatcacatgcttcacaaggtaataagatatcacaaggtaaatggaggcagggcgagatcacaggaccacaggacyggggcgaaattaaaattgctaatgaagtttcaggcaggcattgtcattgataacatcttatcaggaaacagggt

SEQ ID NO: 177955 - DNA, 599 bp, Homo sapiens
aagctatggcaaacatctgattccatgtacttcctatgtacctacaattgcatataatgagaaattagataatttatcaaaamtggcctttacttttaaaaatgtttcttattaattttggttgaagaagagagaagacacaatgttaatgccagaagtgaaagaggagttatcattactgatcctaggaacgattaaataaaaataaggaaatactatgaaccactagtaaagtataccaaacatttaaggaagaaattgtcccaattatctacagtctcttcagaaaacagatgcagagtgaatactttcaaactcattctctgaggctgtcagtaccataataccaaatctagacaaaggtattacaagaagaagaagaaaacagaacaatatttcacatgaacaaagatgtgaaaaccctcaataaaataggaaaccaaacctaaaaatgtataaaaagaattatataacacaacccagtgagattcattacaggcaaacaaggtgggtacaacatttgaaaataaattaggctgggtgtggtggctcatacttgcaaccccagtctattagaaggccaaggcaggaaaatcact

SEQ ID NO: 177956 - DNA, 599 bp, Homo sapiens
aagctatggcaaacatctgattccatgtacttcctatgtacctacaattgcatataatgagaaattagataatttatcaaaactggcctttacttttaaaaatgtttcttattaattttggttgaagaagagagaagacacaatgttaatgccagaagtgaaagaggagttatcattactgatcctaggaacgattaaataaaaataaggaaatactatgaaccactagtaaagtataccaaacatttaaggaagaaattgtcccaattatctacagtctcttcagaaaacagatgcagagtgaatactttcaaactcattctctgaggctgtcagtaccataataccaaatctagacaaaggtattacaagaagaagaagaaaacagaacaatatttcacatgaacaaagatgtgaaaaccctcaataaaataggaaaccaaasctaaaaatgtataaaaagaattatataacacaacccagtgagattcattacaggcaaacaaggtgggtacaacatttgaaaataaattaggctgggtgtggtggctcatacttgcaaccccagtctattagaaggccaaggcaggaaaatcact

SEQ ID NO: 177957 - DNA, 505 bp, Homo sapiens
atgtgcagaggacatctgttcccaggctgcagaacggcctctctgaatttaaataaaaattctgcttttttaattttctgattatcttttgttttgtgtctgtttatgtctatycaaatgatgtgtccatcacagcccttccccttttttctgtgctgtggctacagctttctcactgctctctctgtacaatgtcatttcacacagtactttgtagattctgatgagaagtttggaattttttaatatggtgaaaaactgtgttaaacttgggagtttgagcttatttatagcttctcgatgtaacttccagatcagttaattgagataagaggcatacactgtccacaggtgagaagattaaatcaagtagcactgtttgtcttagtaaaatttttttattagattctaagacaaagtgtagcatatacaaaattagttagaaaatatagcttagaaattaaacttattggagagttaatattaagggataattattaaatgt

SEQ ID NO: 177958 - DNA, 505 bp, Homo sapiens
atgtgcagaggacatctgttcccaggctgcagaacggcctctctgaatttaaataaaaattctgcttttttaattttctgattatcttttgttttgtgtctgtttatgtctattcaaatgatgtgtccatcacagcccttccccttttttctgtgctrtggctacagctttctcactgctctctctgtacaatgtcatttcacacagtactttgtagattctgatgagaagtttggaattttttaatatggtgaaaaactgtgttaaacttgggagtttgagcttatttatagcttctcgatgtaacttccagatcagttaattgagataagaggcatacactgtccacaggtgagaagattaaatcaagtagcactgtttgtcttagtaaaatttttttattagattctaagacaaagtgtagcatatacaaaattagttagaaaatatagcttagaaattaaacttattggagagttaatattaagggataattattaaatgt

SEQ ID NO: 177959 - DNA, 581 bp, Homo sapiens
aactcactaactatcatgagaacagaatgagagtaactgaccacatgattcaattacctcccaccagatgtctcccatgacacatagggattatgggaactacaattcaaaatgagatttgggtgcagacacagccagactacaacaatgtgacaacaaaatttattaacacrtgtacagtgttatggttagtgctcagtacaaattagctattattaactagatatttatatgctgaattatgttaatatatgctttcacacaaatatttttacattacacatgatttttccaaccattagatgaatatatatttaaattacaattttattgtaaatgtggtgtatatatttagaataatagtaaacagaatggaatattatgtagccttaaaaaggggggaatattgtcaattgaaaaaatatggatacatttacaggatactttgctaggtacaataagccagacacacaaagaaaagtactgcatgatttcacttacatgtagaatctaataaagttttaataacaaagtaaaatgtggaataattggttaccagaggcagatgttgacaaaagaat

SEQ ID NO: 177960 - DNA, 581 bp, Homo sapiens
aactcactaactatcatgagaacagaatgagagtaactgaccacatgattcaattacctcccaccagatgtctcccatgacacatagggattatgggaactacaattcaaaatgagatttgggtgcagacacagccagactacaacaatgtgacaacaaaatttattaacacatgtacagtgttatggttagtgctcagtacaaattagctattattaactagatatttatatgctgaattatgttaatatatgctttcacacaaatatttttacattacacatgatttttccaaccattagatgaatatatatttaaattacaattttattgtaaatgtggtgtatatatttagaataatagtaaacagaatggaatattatgtagccttaaaaaggggggaatattgtcaattgaaaaaatatggatacatttacaggatactttgctaggtacaataagccagacacacaaagaaaagtactgcatgatttcacttacatgtagaatctaatraagttttaataacaaagtaaaatgtggaataattggttaccagaggcagatgttgacaaaagaat

SEQ ID NO: 177961 - DNA, 542 bp, Homo sapiens
ccgcagggaaggaaggaaggaaggaaaaggaatcaaagcatataacagcaatgaaaacaaaaaaaattcaaccaaacacaagtgaagacagcatgaaaagaaaaagatattattaagttggtgcaaaagtaattgcagtttttgccattaaaagtaatggcaaaaatactaaagygtaatactaacttgtcagacaaaaattaacaaaatggcagtagaaagtacttacctatcaataattgtttaagtatcaaataaattatctaataaaaacacattgctatggtttgaatctccccttcaaatttcatgtgggaatttaactgctattgttataaaattataaagttagacgtttaagaagataataggtcctgagggacctactctcgtgaatgaattaatgtcattatttccagagtgggttagtcggcaggaaagtgggtctattataaaagtacgctctctggtgtgcaccttcagtcatcctcatgcctttggccattttgtgatgtggaaatacgattctcatcagatgtcaa

SEQ ID NO: 177962 - DNA, 477 bp, Homo sapiens
tcacaattccaactccattgcctcttggtgtgtgattcggaacctcaacagtgggttctgttaatgtggaaggctgataatcctcactttsatctgagtttgcatacaacagccacgattttccctgtgtgctgggctctattttggcactctgtagcacttgagagcttcatacaatgtgcatgcaagtcataatagtctccggccatcctacaagttgaagacccagaaccttagtttttgctctaagactaactacaagagtcatatcttcaggtatgagtcatcattccacctgtaagctgtgcccatgtgtttttcccaattccaactgtggagacagaccaggcacaagggttgcatcacctgggtgctggccagagatatgtcacaattgccactttggtcagggtcaaaatctccccttagtgcaggggcaattcaggagggtcatatcacctaggtcgtgggcccagc

SEQ ID NO: 177963 - DNA, 477 bp, Homo sapiens
tcacaattccaactccattgcctcttggtgtgtgattcggaacctcaacagtgggttctgttaatgtggaaggctgataatcctcactttcatctgagtttgcatacaacagccacgattttccctgtgtgctgggctctattttggcactctgtagcacttgagagcttcatacaatgtgcatgcaastcataatagtctccggccatcctacaagttgaagacccagaaccttagtttttgctctaagactaactacaagagtcatatcttcaggtatgagtcatcattccacctgtaagctgtgcccatgtgtttttcccaattccaactgtggagacagaccaggcacaagggttgcatcacctgggtgctggccagagatatgtcacaattgccactttggtcagggtcaaaatctccccttagtgcaggggcaattcaggagggtcatatcacctaggtcgtgggcccagc

SEQ ID NO: 177964 - DNA, 477 bp, Homo sapiens
tcacaattccaactccattgcctcttggtgtgtgattcggaacctcaacagtgggttctgttaatgtggaaggctgataatcctcactttcatctgagtttgcatacaacagccacgattttccctgtgtgctgggctctattttggcactctgtagcacttgagagcttcatacaatgtgcatgcaagtcataatagtctcyggccatcctacaagttgaagacccagaaccttagtttttgctctaagactaactacaagagtcatatcttcaggtatgagtcatcattccacctgtaagctgtgcccatgtgtttttcccaattccaactgtggagacagaccaggcacaagggttgcatcacctgggtgctggccagagatatgtcacaattgccactttggtcagggtcaaaatctccccttagtgcaggggcaattcaggagggtcatatcacctaggtcgtgggcccagc

SEQ ID NO: 177965 - DNA, 507 bp, Homo sapiens
ttttaacacttgtggagcttctctctagtatgaatcctcttatgtctaatgaagtgtgagaacgagctcgatgctttkccacattcttctcatttgtagggtttctctccagtgtgaattctcttataattagtgaggtctgagaagcacttaaatgttttgctgcattcttcacatttgtaaggcctctcttccatatgaattctcttgtggttagtaagggttgaggagcgggtaaaggctttgccacattcttcacagatgtagggtttctctccaacatgaattattttatgttgactaagggccaagatacacgtaaaagcctttccacattcattacatttgtagggtttctctccagtatgaattctcttatgttgactaagggaaaaaatccacgtaaaagcttttccacattcattacatttgtagggtttctgtccagtatgcattatcttatgtcaagcaaggtttgagaaccacttgtaggctttgttacattct

SEQ ID NO: 177966 - DNA, 507 bp, Homo sapiens
ttttaacacttgtggagcttctctctagtatgaatcctcttatgtctaatgaagtgtgagaacgagctcgatgcttttccacattcttctcatttgtagggtttctctccagtgtgaattctcttataattagtgaggtctgagaagcacttaaakgttttgctgcattcttcacatttgtaaggcctctcttccatatgaattctcttgtggttagtaagggttgaggagcgggtaaaggctttgccacattcttcacagatgtagggtttctctccaacatgaattattttatgttgactaagggccaagatacacgtaaaagcctttccacattcattacatttgtagggtttctctccagtatgaattctcttatgttgactaagggaaaaaatccacgtaaaagcttttccacattcattacatttgtagggtttctgtccagtatgcattatcttatgtcaagcaaggtttgagaaccacttgtaggctttgttacattct

SEQ ID NO: 177967 - DNA, 507 bp, Homo sapiens
ttttaacacttgtggagcttctctctagtatgaatcctcttatgtctaatgaagtgtgagaacgagctcgatgcttttccacattcttctcatttgtagggtttctctccagtgtgaattctcttataattagtgaggtctgagaagcacttaaatgttttgctgcattcttcacatttgtaaggyctctcttccatatgaattctcttgtggttagtaagggttgaggagcgggtaaaggctttgccacattcttcacagatgtagggtttctctccaacatgaattattttatgttgactaagggccaagatacacgtaaaagcctttccacattcattacatttgtagggtttctctccagtatgaattctcttatgttgactaagggaaaaaatccacgtaaaagcttttccacattcattacatttgtagggtttctgtccagtatgcattatcttatgtcaagcaaggtttgagaaccacttgtaggctttgttacattct

SEQ ID NO: 177968 - DNA, 639 bp, Homo sapiens
catgcttgtgtggacacacaatcttacctattactttaagcccagagtcaacatctctcctattttctgtgtccaggaatgagatttatcactgtgcctgtgagtkgggtccagaaatgagtcaccatcccatctgtggccagatccacatacgacagtcacaatatcaaccgtgagctgcatcatgagagatttagaccctcagcagtgggcactgtctgtgtgtgaggctgacaatcttaacttttgactagatgtctatatgagagtcacaatctcaactgtgtgctgggccctgttttgacatactctgtaccacctgagggaattttaccatatgtaggagttttcataggcccctgtgacctctgtagaggtaggaaacagacgaccttacccatggacctatgtctatctatgagtcagtatctgtcctattgacttggtctgagcatgagattcaccaccatgcttgtaagctggatctagaaattagtcaccatccagcctgaggccagatccacatatgacagtcagaattccaactctggactgcatccatgtgtgagattcagaatctcatcaatgggttctgtccatttgtgaaggtgacggttccacttgttggctactgagagc

SEQ ID NO: 177969 - DNA, 548 bp, Homo sapiens
caaaatgattttaatcaatttgttaagtttattggatcagattctgaatttctttttttttgttgttattttgaattttgctgagctttttcaaaacagctgttttgaatttcctgtctgaaaggttacatatctctgtctctcaggatttgyacactagtgccttatttggttttaatgaggttatgttttcctgaatagtcttaatttttgtggatgttcattaatgtctgggcattaataagtcaggcatttattttagtctttgcattctgggctttttaatacttgtctttcttagaaaggcttcccaggtattcaaagggaatcgagtgttgtaatctaagtctttgatcattgcagtcatatctgcattaggggacaccccaacctgaataacactgtgatgcttgcagacttgtagaggtaccaccttggtggtcttaggtaagaaccaagagagtctctgggttaccaggcagactctttttctgtttttttacattctgtcaaataagtggaattttctctccatactgagctgccgg

SEQ ID NO: 177970 - DNA, 392 bp, Homo sapiens
taatgattaaaggcatgctgtggtttgaatccctgcttcacctggtaggggccatgtgacctgaaccaaggtacttcactactctgtaccttagttatttaatctgaaaagtgtagtaattatagtactcatttgatagcgttgctatgargatttattgagttaatatttagaaaacatttagaatgatatctggcacatagtattcactatgtaagtatgttaaagaaaataattttaaaatatttttaagagttctataaagaaaatataaaaaggttagaccaattaaataacatttaataagtaccttctgtggattgcgtagtatatttaatacttatattttttctttaatcttctcacaatacagtgaggttattactgtgatt

SEQ ID NO: 177971 - DNA, 595 bp, Homo sapiens
tgttatcctatagtcctggaggtctgtggttctcactgggctaaaatcaaggtgtgggcagggctgcattctttcctgaaggctctaggaaaatctgttttcttgccttttccagctactagaggctgcttacgtttctaggttcatgaccctcttccatctttagagccarcaatggccagttgagtctttttgactgtgccgtctttttgattctgactcttccatttccctcttctccacttgtaattacatggggcccacctgggtaatccgggataaagccagctgattagcaatgtaagtctatctgcaaccttaattctcccttgctgtgtaatacaaaatatgcacacgttccagagattaagacgtatacatcttgggggtaccattattttttcctaccatagtaccctggaattattgttacctatgaagagaatgtgaggataggaaaaacaattgccaccaaaatcagtgttcgtgtgacaatgagagattaatctgccttgtctgctggtttattttccaggaattatatctatgcagagaagagaaaatatgggctgggaggaatgttttacacttttag

SEQ ID NO: 177972 - DNA, 555 bp, Homo sapiens
gtatgaatttccatatctgatgcctcggcgtgatctcatgtgtcaggggtcagataggaatcaataaaaactgaaacagttttatgttatttctgatagattttccccatagactgatggaaggtataataatgatcaatttgtggagtagttgtgcttcaaatcttatttgctgtacatatggatattggcytaagaaactcaggcttatggtttaagaataatcttatttaatatgtgaaagcttagataatagaatattctgactaatgaatgtcctggttatttgaaagtttggtagaaaactattttgtttatatttattctaaaatctactaatctgatttgttacattagtgcaaataatataacaaaggaaattaaatttttggtaattggcaaccccatattgtctgagaacattcattttgggcagtaattctcacatacagaatttaagatattgacaagtaggcataagaaatgggatttgggtgtgtattagactaagaccaaggatctataaattgctttttttggaataaatatgtaata

SEQ ID NO: 177973 - DNA, 549 bp, Homo sapiens
tttgccatatcttctaattttttctcttcctttatagaatggaaagtatgtccagatatctaaatattttaaaggagaatrttgttattctttttttacctgagtcaccaggaacaaagacaaatcagcccaagtaatataatcctgatggcttcttggctatctgaattatggattcaggctactatcatattttttagttctaattgggaagataaactctattacatctaatgggcaggatatcttgggcctgacctttcatttgaggcatactacttttcttgttctttctcagattggcattggtaggtaagcacttcttaaagtaatattgtcccaaaatggattagcattcatatccctccttcattttcagtgaagtatttagtaaatgctgatttatacatgacagtctatgaagttctaactgttgagatatgtttttctatggcccatggcataattttttttttttttggtgatttagaaaataaagataatttaagcaaattgaatagcaatcattaagattctcacaaacagata

SEQ ID NO: 177974 - DNA, 594 bp, Homo sapiens
gagtactttgtggattctaaaactaaatgagatcatctctacctaccccatgtacttgcagaataatgggatagatctatcagcaaaaaggtaaaatacagggtgatatatggagcaatggaaataccaaayaatgctgtaggaatactaggagcaagaaggaggcacccagaatttgacttggaggagtattcaggggaaactgcagagaggaggtagtgcttgaatcttgtgggatgaataggaattttccagacaagttggagaaagggcatttcaggcagaaggaacagtatattcaataatagtgtgtgaaaatatagaatatagcttggggtattataagtagtttgatatggagcatggacaagagctaagtctggagatagaaggaccttgtgtgttgccctaaggagtttgagcctaatcctgaaggccatgaggatccaatgtgttttttttttttcaattttaatgtgttagtgattcatttataataatagcatgactatttaaaactttgagtaaaagatcaaaaattacctttaatcttattgctaaaaacaacttttttcttaagcatgtttaatgtag

SEQ ID NO: 177975 - DNA, 594 bp, Homo sapiens
gagtactttgtggattctaaaactaaatgagatcatctctacctaccccatgtacttgcagaataatgggatagatctatcagcaaaaaggtaaaatacagggtgatatatggagcaatggaaataccaaataatgctgtaggaatactaggagcaagaaggaggcacccagaatttgacttggaggagtattcaggggaaactgcagagaggaggtagtgcttgaatcttgtgggatgaataggaattttccagacaagttggagaaagggcatttcaggcagaaggaacagtatattcaataatagtgtgtgaaaatatagaatatagcttggggtattataagtagtttgatatggagcatggacaagagctaagtctggagatagaaggaccttgtgtgttgccctaaggagtttgagcctaatcctgaaggccatgaggatccaatgtgttttttttttttcaattttaatgtgttagtgattcatttataataatagcatgactatttaaaactttgagtaaaagatcaaaaattacctttaatcttaytgctaaaaacaacttttttcttaagcatgtttaatgtag

SEQ ID NO: 177976 - DNA, 584 bp, Homo sapiens
agactagtgccaattcataaatttatttttgtaagtcgacaaaataattattaaaagtgagagtacatatttggaaacattagagcaatttgacattgctgtaataactgtagttttatattttacaaaaagatcactcatgttgaactgaaaacaaacccatatatagttccttcacatgatcagtttgagtagcactgttctaaaggacagtggtgaaaggaaatccatcaggcagagcttcataactttacatgaagaragaagtggtttgaggtgagaacaatatcaattgttgggcaggggctagtggttctgctaattgatcagatgcctggaagaagcaatacttcatgatcagatacaaggaggtctgagaaggaggcatgtggatgaccctataggtgtgaatacctaacaaagcatctatagtagaggcagcattgaacaaccagatggaaaagatgacccatccaatgaatgtcagccaatctttgtcctcagccatcacaatggttgcacagtggacatggaaactgactagccataatgtcagggatggaggctatgcatgggcataaaag

SEQ ID NO: 177977 - DNA, 610 bp, Homo sapiens
ccctctggattacagttgtttggctggatatcctccaagctgagccaatcagaagccataaatgtaaattagatttttgaaatttgtatttagaaactgaaagagagttgattgaagtccctctctgccaacaaccatgtgtgggagttaggcctaagaaaatgaaggagacacactgaaacagaggtaaaagctgaaagaaaaaaaaatagcatcctactgatacctaattccctcatttatacctgaagcttagcctcaccctgtctttccctgacccctttacagtagtcaataaattcccttttggcctaaactggtttgaattmggtttcagtcagtcacaactagagaagacacagtaaattcctactgcatgtaaatcattacagaaatctgtgaattatattaaaaataaccaaacttagttattcaaatgttttctaaaatctgtttgccataaattgatattattcaaaaatatatatatgttccatatttgtcctagaaacattaacattgaagctacttaaaatgcaaagattgcctaggaagaatgtctctttgcttgtttttacaagggacttatcaaattagaaagcaaaattag

SEQ ID NO: 177978 - DNA, 407 bp, Homo sapiens
cacccccatgattcaattaccccccaccaggtccctgccacaacatgcggggattatggaagctacagttcaagatttgggtggggacacagctgaaacatatcactgttcatggttctaagctttgaaactacaactcattctcttttttttaaattatactttaagttctgggatacatgtgcagaacatgcaggttacataggtatacatatgccatggtggtttgctgcacccatcaacccatcatctacattaggtatttctcctaatgctatccctcccctagcccccaccccgygacaggccccagtgtgtgatgttcccctccctgtgcccatatgttctcattgttcaactcctgctccttctcctataaatcctttccccactcctccacccaaggt

SEQ ID NO: 177979 - DNA, 570 bp, Homo sapiens
taaaagcagggcttctataaatgaagcaggggcagatggcccagagtcctgcctgctcttgtttcttttctattcatcaatctcaggagtattttccagaaccgaaggactccatagaaaagaggctgaaattgtaggccaattactctgagtaagggttttggccttcttagagggaggtgtgctggtgtgttaagyaggtagttcatgtggatctatttctgttttttttgtggttggtactctgtgggccctttcaatccagaaagtcatgttcttcagttctggggtagttttttgaattatttatttgatttagtcaagtttgttttttctgttctgtctttctggatatcctgttaagatgttgacctcctggctttgactttccttttttaaatgctttatttcttactatcctatattactaaggttctccagagaaatagaatcgaaaggacacacacacacacacgggttgggggttgatggattgattttaaggaattggttcatgtgtttgtggagatttcgccacatgggacttctcagcctctaggtaacttatag

SEQ ID NO: 177980 - DNA, 570 bp, Homo sapiens
taaaagcagggcttctataaatgaagcaggggcagatggcccagagtcctgcctgctcttgtttcttttctattcatcaatctcaggagtattttccagaaccgaaggactccatagaaaagaggctgaaattgtaggccaattactctgagtaagggttttggccttcttagagggaggtgtgctggtgtgttaagcaggtagttcatgtggatctatttctgttttttttgtggttggtactctgtgggccctttcaatccagaaagtcatgttcttcagttctggggtagttttttgaattatttatttgatttagtcaagtttgttttttctgttctgtctttctggatatcctgttaagatgttgacctcctggctttgactttccttttttaaatgctttatttcytactatcctatattactaaggttctccagagaaatagaatcgaaaggacacacacacacacacgggttgggggttgatggattgattttaaggaattggttcatgtgtttgtggagatttcgccacatgggacttctcagcctctaggtaacttatag

SEQ ID NO: 177981 - DNA, 529 bp, Homo sapiens
tcagcctttaaaatagtctctttaggtagcaacttcatrcagcaactttattcttccatctgcctctctccccctctgtctacctctttaccccaaggccaggagaggttaagttatttaggttatagttgatccaagggaaagtgatgaagcaggaatgtatctcacctttgctgagttcttactataatacgtgcttcaaagtagacacatgtcaagtatttgcaatgtattaggcattctgtcaagtgctttatgtgtattttgaacatcacaccagtcttgtgatgtaagttttatctttaccattttattgaaaaggaaattgaaactctttgaggaataagcaaattgtccagttataaaacttgtaagtttagagacagcagttgacaccaggcctgtctggagcagcatatgtcccaccttccttgcatatctaatactccctgagaattttaatagcagcatatgtatgtcagtattatttgaattcaggctttgtttatagttgatgatgtcagagact

SEQ ID NO: 177982 - DNA, 545 bp, Homo sapiens
ctgtgtccccactcaagtctcatcttgaattgtagctcccataattcccaagtattgtgtgaggtacccggtgggagagaatttaatcatgggggtggtttcccacatactgttcccgtggtagtgagtaagtcttgtgagatctgatggttttataaggggaaactctttttgcttggctctcattctctctcttgcctgctgccatgtaagacaacatgcctttcgccctctaccatgattgtgaggccttcctagccacgtggagctgtgagtccgttaaacctctttttctttataaattwcccagtctcgggtatgtcttcatcaacagtgtgaaaatagactgatataattggtgttatttatttcttaaaagtttgaaagaattgaaagtctagtacaaaaagttgtcttataggatgggttgcaatggggaggggatgggggctttattggtttgtgttataattttgatgtaaggccataatggctctatgtttgtgccgtgggaagggaaaggatgaagaatagcaatattaaca

SEQ ID NO: 177983 - DNA, 545 bp, Homo sapiens
ctgtgtccccactcaagtctcatcttgaattgtagctcccataattcccaagtattgtgtgaggtacccggtgggagagaatttaatcatgggggtggtttcccacatactgttcccgtggtagtgagtaagtcttgtgagatctgatggttttataaggggaaactctttttgcttggctctcattctctctcttgcctgctgccatgtaagacaacatgcctttcgccctctaccatgattgtgaggccttcctagccacgtggagctgtgagtccgttaaacctctttttctttataaatttcccagtctcgggtatgtcttcatcaacagtgtgaaaatagactgatataattggtgttatttatttcttaaaagtttgaaagaattgaaagtctagtacaaaaagttgtcttataggatgggttgcaatggggaggggatgggggctttattggtttgtgttataattttgatgtaaggccataatggctctatgtttgtgccrtgggaagggaaaggatgaagaatagcaatattaaca

SEQ ID NO: 177984 - DNA, 367 bp, Homo sapiens
aggaatagtgtcttttcaaatacaaaacaccccctccaaaaacacaaagttttgctacaaatcggcagaagataactagtcctttgactaygaacccaaagtattgcattctttctgtttgcatcttatatattcttaacgaattttcatagacataaaatgagtgccagttactactattaccacccccatctatttctcacttttggtgccattgtactggatgctaatatgaaagaaacctgccaggtagggttcctgctgggtagaaactcataactcaaaatggacattgtcaatccagacaaaagtcatctaacaagaaaagtgcaattctccaacaccccaagggcagtgtctagtaaaa

SEQ ID NO: 177985 - DNA, 544 bp, Homo sapiens
ttcttgctggtgtggctggtgtttttctttctttcttttcttagttttttaagttgtgaattcatastcaatgaatcatatgtatgggaaatgtttgaggcctttttttttaaagtatgttgctccattgtatcagtttcctttaggcactaacaacctatcaccacattagcctgaattattctgcttaggattttgaggccacgtgggatgatatgaattcttagcctaaaactcatcaggtctttcctttgtttgtgaaatttcaggaaagactccccatcctcccagagctgtccctaaactaggataagcaagttttcctagcatgtatttattaatggtgggctttggttggttcaccctttcacagcgggccttgcctttctgggttactaattttgagctccaattctagaccccactttgaaccttgcatagaccctggagtttgactctagtgcccactttggaggcattttaaaagcagtcatcccaaaagggtagatacactgcaaaatattcttcccatcaactcccctgg

SEQ ID NO: 177986 - DNA, 529 bp, Homo sapiens
agaccgtgtagtgtgtagctttccaggctgacttgcacttcacaatcgcgttaattcattatatttttgcctggcttgataactcattccactgcakgcatagagcgtagtttgcttatacattctcctattgaaggacatcttggttgctgcagtttttggtgattataaataaagctgctataaatattgcatgcagatttttgtatatacgtaaattttcaagtaggttggatgaatacctaggagtacagttgttggtaagtcgatttcagctttgtaagaaaatatcaaaccatcttccgaattgcctttaccattttacattcctgctagcaatgattgagaattcctgctggtctgcatgcctgccaacaattgatagtgtcagttttttggattttagccataacttttttctgttgaggtgtctgttcagatcttttgaccatttaaaaatttggattgtttgcttttttattattaatttttgagttctttctatatttgggatacaagtgatttttaa

SEQ ID NO: 177987 - DNA, 529 bp, Homo sapiens
agaccgtgtagtgtgtagctttccaggctgacttgcacttcacaatcgcgttaattcattatatttttgcctggcttgataactcattccactgcaggcatagagcgtagtttgcttatacattctcctattgaaggacatcttggttgctgcagtttttggtgattataaataaagctgctataaatattgcatgcagatttttgtatatacrtaaattttcaagtaggttggatgaatacctaggagtacagttgttggtaagtcgatttcagctttgtaagaaaatatcaaaccatcttccgaattgcctttaccattttacattcctgctagcaatgattgagaattcctgctggtctgcatgcctgccaacaattgatagtgtcagttttttggattttagccataacttttttctgttgaggtgtctgttcagatcttttgaccatttaaaaatttggattgtttgcttttttattattaatttttgagttctttctatatttgggatacaagtgatttttaa

SEQ ID NO: 177988 - DNA, 296 bp, Homo sapiens
ttacttgcttagatattgatttttttaaagctcattatgtcaaaacacttgatttcgttccactttagaattatcttccacacatttaaagattcaccaaggtagtggttctaaaaccatactgtgaataattttctcaggaggagctcataaaaatattcagatccccaggcaatgcctctgcatgtatagactgagtaggaccagagatttttgtttgcaatgagtacacgcaaatgatactaaagcagtggtccagtcakactttgaaaaatgttgatgagtttcaggagagt

SEQ ID NO: 177989 - DNA, 609 bp, Homo sapiens
gatggactacttttctgagcttgataaatctaagagttgtttacacaaaataattctctttaaaaatagttaatatttgcccccttccctaacagaggtaggtatgtcatttttagcattgtcaaaaacagaacaaaatctcaggttcatgcagtgaataatatagaacagtcataggtatttttaatatagtcgtgacaactattcattgaagtacaactttaaaaaatcaattggtaaaagattttatgtcattttcatgtaagcagtcgaaattttcttgacagascaatatactgtgggaatgacttttactgttatttggtatctattttgcatcaacgtggtattaatggtaagaagccaggaggttcagtttcgtgagagtactgctatttatataatcacagatgaacctcggaaacctaattttatatctgttaaatatctattccaaaaaaattatatatagtagctttatatttactcaaacaggcaaatatttctatccatgactttaaattcccatataacacatatacataccttgatgcggttggcttaggacagtagttcatcatttgctttgtatcctaatagataaaaagt

SEQ ID NO: 177990 - DNA, 543 bp, Homo sapiens
gatttgaaaaaaaaaaaagaaaaatttaggtcgcccagaacaaaacaagaaaaaaaaattgtccccaaatttctcaggtgttctgactattaaatgtctgagactttttctgagccactgagtctgaaattctacagcatttttttttttaccttaaagatggcctatcttgtgtcgtacgtcctgaatatgcaagcatagccaattatgttcttttaatrtatattttctatgaaagaccactggaatttaagggaactacggaagaaacccccaaagtcattatggggtctaaataccctagagggagcactcagacattctgtgtccttgccacagtcttgtagtgctgcccagcatgtcaatctgctgagttatctagattcaggaatttcttcctagacattccatttcatagattatggttgtgtcagcaatcagaaaataatagaaatcccttcccgcagggacttaaaaataaagacatttatggcttcccattactgggagtccagaagtagggtgtgtatcggggtgacaaaa

SEQ ID NO: 177991 - DNA, 588 bp, Homo sapiens
ggaatgtgttagacatgctcacacacattatcagtaagtttgactgttttatcgcttaattgatgctaacagcttttcttctcaaagttttcacttcatattggctcagtgggagtccaagcatcattaccacagggctgggaatgaaagattttgtcaactcttttccctgatgaatacgtcatttaggaggacttctggagggcaagacaatctaggtttccagtgcggctggagtcccatgctgcagtctcaccagacctattttgagttgcttggcaagatataaaagattgctccattaacttacttctatcctccttgacttctagaaatttctaaacgtcgtttcttgtccaacagacattctacttaatgattcttctttctttttgaccatcagtacaacacaaatgactagtcagccttytatgaaatgtacacctatgtgcatattacacatctacctgcgataccacaacatctatctcctttttaatactaatcttgcagtcctctaatttctttcagacaatagggtctggccatgtctgctttattttacgattttcttacggaatgtgctcc

SEQ ID NO: 177992 - DNA, 544 bp, Homo sapiens
ttcttgctggtgtggctggtgtttttctttctttcttttcttagttttttaagttgtgaattcatagtcaatgaatcatatgtatgggaaatgtttgaggcctttttttttaaagtatgttgctccattgtatcagtttcctttaggcactaacaacctatcaccacattagcctgaattattctgcttaggattttgaggccacgtgggatgatatgaattcttagcctaaaactcatcaggtctttcctttgtttgtgaaatttcaggaaagactccccatcctcccagagctgtccctaaactaggataagcaagttttcctagcatgtatttattaatggtgggctttggttggttcaccctttcacagcgggccttgcctttctgggttactaattttgagctccaattctagaccccactttgaaccttgcatagaccctggastttgactctagtgcccactttggaggcattttaaaagcagtcatcccaaaagggtagatacactgcaaaatattcttcccatcaactcccctgg

SEQ ID NO: 177993 - DNA, 564 bp, Homo sapiens
ccttcatgacaatactgaaggtagtatgggagacactactagttgtctatctaatatcccattggcccctgtttccacattaagaacaactagttttgttttgggtggtgttccagtggttgttcaccttctgagtttcccatgcagtggttttggacaatgagtgccagtgggcatcagtagggggattcggggaaagctttcacattagttacccatgcaactgcatcctctgcttccccttccctggccttaaatatggacatggtgactgaagctgaagcagccccctgtgaaaatgagtgaatggcccagaaaattacagagcagaggccctggcattattgagtccccaaaccaaggccagctaccatctaccatcagacttgttacatgagaaattgatacccagacttgtttaagcaatagattatctttttagcagctgagttcattgctaaataccattggtagccattctcactccacagatgagaaaattgygtcacagtgggtttaaataacttgcacaagatcacacaggtagggaataaagataaaact

SEQ ID NO: 177994 - DNA, 598 bp, Homo sapiens
ggctcaatagccacatctggggaggggtcatggcattgaacagtgaacatctagagtgttttcatcattgaattttgtttggtttgcatttttctagactaaataaaaagtctatgaatataggacaaaaaatattttatcgtagttacatataacttaactaatgcttcatcccatttttcccctgagattactgattttagtttttgttgttgctgtttatttttaactgaactcaataattaggtttatgtaaataaaatttaagaaatacagagtccagaaacagataaacaaacacactaccctgtcattccttcagaaatgacactaacactctgctatcctatgctgtcatctaattttgctcaggtcattcttttttcttagtgagaaaaatgacttcaagggaaccaggaacttgtatcacttggttactggaaaaagatataagaagtatatttataacacagtgtaaacaagcttagagcaagacgtgtgtataaccaaaagttaaaaaaaaaaaaaagaaaaggtaacctacaaccagactgtgrcaaatttgcaaagtgaaaaagcaatatgagatggcactgaa

SEQ ID NO: 177995 - DNA, 306 bp, Homo sapiens
acagtaggacttttttcttcattatctcaatcgaatgtcacaaaatattacaagttcagtcattagaatatagtgaataagtgctagaaaggaggtatggggaaattatatgactatatgtgaatgtttgatatagctagattgtaaactaaatgatttcatactgtactttgcctaagtaaataactgaagctctatagcgagagttaaatgcaaattatcaygctttattttatattaaagagtcagaactgcgtgagttcaagttttaaattagcataatttttctcaaacatttccatataa

SEQ ID NO: 177996 - DNA, 561 bp, Homo sapiens
ctactggacactggctctgagttgacattcattccaggggacccaaaatgtcactgagatcctccaattaaagtaggtgtttattaaggtcatgtaattaatggagttttagttcaggtctgacttacagtgggtccagtaagtacccgaactcaccctgtggwcatttccccagtgccagaatgcataattggcatagagatacttagcagctggcagaaccctcacattggctccctgactggtagtgtgagggctattatggcgggaaaggccaaatggaagccattagagctgcctctacctagaaaaagagtaaatcaaaaacaatatctcatccctggagggattgcagagattagtgccaccatgaaggacttaaaagatacaggggtggtgattcccaccacatccccgttcaactctcccatttagcctgcgcagaagatagatggatcttggcgaatgacagtgaattattgtaatcttaaccaagtggtgactccaatttcagctgctgtaccagatgcagtttcattgcttgagcaaatgaacacatct

SEQ ID NO: 177997 - DNA, 570 bp, Homo sapiens
ttgctggaggtccactccagaccctgattgtctgggtatcaccagcagaggccaaagaacagcgaagattgctgcctcatccttcctctggaaccttcatcccagaggggcacccgccaaatgccagccagagctttcctgtatgaggtatctattgttccctgctgggaggtgtctccctgtcaagaggcatgggggtcagggacccacgtgaggtggcattctgtccgttagcagagctcaagtgctatgttgggagatctcttttcagagctggcaggcaggaacgtttaagtgtgctgaagctgtgcccacagccaccccttccctcaggtgctccttcccaaggasatgagagttttatctataagcccctgactggggctgctgccgttttttcagagatgccctgcccagagaggaggaatctagagaggcagactggctacagtggctttgcggtactacgatgggctccacccagtctgaactctttcattttcttttaagaagattgagacagagaagttatgtgacctatgcaatgtcacagagctaatccatggagca

SEQ ID NO: 177998 - DNA, 462 bp, Homo sapiens
ttcagtcaatatatagcatatatcatggtagtctcctaagattataatgggactgaaaaattcctattgcctagtgacattatagctgtcctatgatgtcacaacacaacacaacacattactgacatgtgtgtggtgatgctgtttacaaacctattgtgctgccagtcatataaaaacagcacatacaattaggtgcggtacataattcttgatatgattataaatgactaagttattgtttaggtatttactatactatacattttaaccttattttagagtatactctttctacttacaraaaataaataaggtaagtgtaaaacagcctcaagcaggtcctcaggaggtattctagaagaaggcattgttctaataggagatgacagctccatgtgtgttactgtccctgaagaccttccagtgggataggatgtggaagtggaagacactgatatt

SEQ ID NO: 177999 - DNA, 424 bp, Homo sapiens
tttttttcccttcttggagatctttcccacgtcacaaattatagactcttcattgcatagtaaatgccttggatttgactaaattctctaaagagtctaggccaatttcttatcatccgtgcaagcacatctttgcatttcatgaaaatactttccatggtacttgtggccattgtgcagcctacactactaactataattgtgaggatttctcaaatgatctacagtagcacccttccaaaaggactttctgtaaagatgggaatgtccatctgccctgtccagcatggcagccactagccacgtgtggatagtgaayactggaaatgtggctagtacactgaggaatttacttgctaattttataaaatttaattcatttaaagttaaatttaaatgagcacacatggctagtagcttccat

SEQ ID NO: 178000 - DNA, 503 bp, Homo sapiens
cttgaatagctattgttcttttctactagactctaagcttctccaaacctgtttctttggtgtcaacgtattattcttcctattatagtgctttgcacaaagcaggtttgcaatccgacatcggagattttaacctcagatgaaatgcttctgtgacacaggataagctttctgtgcaatgatgccattaaatgtacctgatatttatgcactgkttttgaagtgtcctatagtatatatgtatacataatcacttttctttttgtacaaagaatgaaagttaggttttcctaactgattttagtgagtatacataattaccatctttaaattcttcaggagacttttatctgtacactgagaattgagcaactttaacttttttgttattaccaaaaacacctgccttcccaagatatgagttttgccatgttgcatttcttcttcactgtgaggataaaaaagaggtaagagatatgatgacagctttagacatgcacaat

SEQ ID NO: 178001 - DNA, 578 bp, Homo sapiens
aatattttaggtctcaggggttatcatagtttgatatacttaatagagacgttaaatgtcccaccctcccaacatttttttcttgtttgtatgactacacataatatttgttcttaatctgtggatgaacttcctcagtaaccattcacatttggaggctgccattgatttctctctttagaagggactagtgggagccaataaatacctagcagcagtaacatctctgtatgcatttgtgttcaattggataagtggtttgatgtgttatctcttaaccttcctgttttgacattaccaacctgccacygtataatttatgtttaatcaaaagttaacttggaagtattaataggtccaagttttgattgagatttgttttgtcatagtgccaaatactaagttaaatgttgtcactggctcattacatttaagttcaattttggagtgctactgcattcattacctgttaaatgttctggcgggttccttaaaaaggacgatttaaaacactctagcgttagtttccatcatatttagataactgtggatttagttagaagaatgtggatttagtc

SEQ ID NO: 178002 - DNA, 368 bp, Homo sapiens
gttcctggtaattgtgggcacctccagttctgactctgtgtcccttctaggtgacagggaaagacgtgtcctgcacttcgaccagcacccacttctgtgcttcccggtattccgatgtttggattgctctcatttggggatgcaaggttggtaaccacatctgatayggtctctgtcaccaagaaaatggatatgaagagggaattacaggaattaacgaggtgatgtctgcaaagaatcttgaactcagaggagacctctgttgatgcataaacttcaaagccatgactgtttttacttttctatttgtatttgtttgggggagaccctccaactctttagactccctcattcagtcctcccccaaa

SEQ ID NO: 178003 - DNA, 545 bp, Homo sapiens
aataatgggattctagggtggttgaatgcaggaggagacatttaaccattagagaaaaggtgtgtgtcattacacaataagccatagagagaaaatggttgccatagtgtcctggctcatggaaatctgtgactattgctaattactcacagtcctagaaaagaaaaaaaatcatccctagacatccagtaaagtgattcttgaaatacataggattataaagtgttgggaacaagcctcccaaaatctgaccataaactggccccaaaactggccataaacaaaatctctgcagcactgtaacatgttcatgayggccataatgcccacgctggaaggttctgggtttaccggaatgagggcaaggaacacctggcctgcccagggcggaaaaccgcttaaaggcattcttaagccacaaacaatagcatgagtgatctcttccttaaggacatgctcctgctgcagttaactagcccaacctattcctttaattcggcccatctcttcatttctcataagggatatttttagttaatttaata

SEQ ID NO: 178004 - DNA, 545 bp, Homo sapiens
aataatgggattctagggtggttgaatgcaggaggagacatttaaccattagagaaaaggtgtgtgtcattacacaataagccatagagagaaaatggttgccatagtgtcctggctcatggaaatctgtgactattgctaattactcacagtcctagaaaagaaaaaaaatcatccctagacatccagtaaagtgattcttgaaatacataggattataaagtgttgggaacaagcctcccaaaatctgaccataaactggccccaaaactggccataaacaaaatctctgcagcactgtaacatgttcatgatggccataatgcccacgctggaaggttctgggtttaccggaatgagggcaargaacacctggcctgcccagggcggaaaaccgcttaaaggcattcttaagccacaaacaatagcatgagtgatctcttccttaaggacatgctcctgctgcagttaactagcccaacctattcctttaattcggcccatctcttcatttctcataagggatatttttagttaatttaata

SEQ ID NO: 178005 - DNA, 479 bp, Homo sapiens
caagatctcagattacttcattttcagagctagaataaaatgtttaaaagcatctaaattctaaaatattttctcrttcagacccagagaataagctattaaaatataatataattattaagttattaacctaaacttctcatttatttctatgccaacaaaatttgtcctctcaaataataaaatattatttaaaatatattgctacgttgcataaacagtttgcctgtggacacagtgcattatgtggctaaattattcaaagtggaacacactgatgaatattggaaaaaagttttcaaatttcccaattactgtgaatccatgtttataacttctaaaatttgtcagaacaaatctagaccacctttgaaactgtcacctatttcttagatgcctggtaaatataaccagctgttattttcatggccatgatagtagatataatgccttttttcctatctctgacattcttctat

SEQ ID NO: 178006 - DNA, 479 bp, Homo sapiens
caagatctcagattacttcattttcagagctagaataaaatgtttaaaagcatctaaattctaaaatattttctcgttcagacccagagaataagctattaaaatataatataattattaagttattaacctaaacttctcatttatttctatgccaacaaaatttgtcctctcaaataataaaatattatttaaaatatattgctacgttgcataaacagtttgcctgtggacacagtgcattatgtggctaaattattcaaagtggaacacactgatgaatattggaaaaaagttttcaaatttcccaattactgtgaatccatgtttataacttctaaaatttgtcagaacaaatctagaccacctttgaaactgtcacctatttcttagatgcctggtaaatataaccagctgttattttcatrgccatgatagtagatataatgccttttttcctatctctgacattcttctat

SEQ ID NO: 178007 - DNA, 395 bp, Homo sapiens
cccaggattacatagatacttgttggaagtgtgagtcccctggggactttcactcattcactatttccccattttggggagcttcctctggctccacatcaattccagataggctgctgcccagctttgctcttctctgttctctgtgtcttctcagtcttttgatggaacctgatgtggtttcttagatgattggcttgcaggktcagtgattacttactactttgcttcctctctgtgagagtggtgcacactggcttctagtccaccatcttgaccccccctccagttttttaatactactaaagttactacaaacatgcaggtatgtcttggtatagacatatgctttcatttcttttgatgggtggagtaaaatgtctagattacataat

SEQ ID NO: 178008 - DNA, 568 bp, Homo sapiens
ggagaccctctatttgtagaccaatgatatagaaagggtcatataaaaacactgtattctagccaatattgtcattgcagttaatgaacatttcaagagtcaatattaacttacatgagatcacttcttaatggaaacattacatgttctctgtgtccttaggaaccatagaatttatcaaatctctcatgaactagaaaagtacaaatcaatttaacattttctttctttttctccatagctatatagtggaattgcagcattgttagtgaattaaacattagaatagactacttctatatagtagtgaaaactagcttatttcatgttatcctrgaaacactgacattaaaattatcttgttcaagtaacatctcatgcttgtatcctttctatatcacctacgacaagttaaaatcctcttgtttgaaatcaccctgatcatgagagctttctgccctgaggcaatgtcctccatttgtgaacatctatgactgttgtaaaaatcctctttatatagtgttgcaatttgttttcttgtatttgaattcttttgtcttagtgattc

SEQ ID NO: 178009 - DNA, 568 bp, Homo sapiens
ggagaccctctatttgtagaccaatgatatagaaagggtcatataaaaacactgtattctagccaatattgtcattgcagttaatgaacatttcaagagtcaatattaacttacatgagatcacttcttaatggaaacattacatgttctctgtgtccttaggaaccatagaatttatcaaatctctcatgaactagaaaagtacaaatcaatttaacattttctttctttttctccatagctatatagtggaattgcagcattgttagtgaattaaacattagaatagactacttctatatagtagtgaaaactagcttatttcatgttatcctggaaacaytgacattaaaattatcttgttcaagtaacatctcatgcttgtatcctttctatatcacctacgacaagttaaaatcctcttgtttgaaatcaccctgatcatgagagctttctgccctgaggcaatgtcctccatttgtgaacatctatgactgttgtaaaaatcctctttatatagtgttgcaatttgttttcttgtatttgaattcttttgtcttagtgattc

SEQ ID NO: 178010 - DNA, 546 bp, Homo sapiens
agaacctgtcttttctacgtgtgcaagtaggttgtacttgacagccacattttctctgttacaagtatttaatggtgcagtgctatgaggacgtcgatatttttcaccagacagaatgagaagttcctgaagcatcacacctttattgcagtaagcatgggaaatactgaatagttatatgggtttgaatagacattcatactccaattcatactcaaagacatctgcaaaagatggaaattgaagtgtacagaagtttgaattggtttgagctccagcagaaatggatcttgagacaggattcaatgcaagtagttttttcagatgatccygggaaacacctgtaaagaagtaggaaagtgacaaagagaagaggagagaaccaatataggatgtgtttccctgaaactcactgctgtggacaactggaagctaatcttgctggaaaacaatgggagctattttagaacataggcctcagattgatccaattagagagctaagggagctggtgaatttatgcaccaactactgtcagtaattgtt

SEQ ID NO: 178011 - DNA, 570 bp, Homo sapiens
cacctgtaacactcaatttcaattaggcaaaaactaatgtgatattaaattctaaaataatcgtgaatgaaaatcattgatagaatctgagcagtttatagagtagcttcaataaatgtaaataattttaaaacctgtagggcactttcaaaattttgtctaaattatctcctcacaagttatttgagtgtactgtgtactaccttcaaaagtgttcaaattataagatcatattagatttaatacataatttttttgaaaaaagaaaattctaaagttactttcaaagtgatacctgtgacaaacattcaaagataaaacccacgaaagtgtagctttgaattttaggtttggcagaaatgacatggcagtcccttcaaaattytgaaggcagatggacagtgagtagcagcaacagtagcattaagagggactagtgggcaaccccctttgggtcccctcccattttatgggagctctgttttcactctattaaatcttgcaactgcaaaaaaaaaaaaaaaaaaaaaacagggtttggtgacagaagcacagcttagccagtgttcc

SEQ ID NO: 178012 - DNA, 584 bp, Homo sapiens
gctcttgctcaaatattttctctctttaacaggtggcttgccaaccaatttgctatagacttatttattttttcttcttttatttcctttttcttccgtctgccttacagctacagaaacttgaaagggtcacagtttatgcccaatttttcccttccatttcctttttacaaaatttcatttctttaaactcattctacaggacttttctgtcttgaaaaatgagacagactgtgttaagcactgtccattactactgtattcttctgtttcaccgttgtaagatatactgaatgccatgtcctattgtggatatgtcaaaacaaagagagatagcagtttaaggcctctgttcacttcctttctattatattttgaagtattccatattttgaaatagttttcaattcaygaaagaaaattaaaaacctgtatccttttttccctttcagcaaaataaggcagtcacttttcatttaaccatctttgctacatataaaacctaaaaataagaacactttgtgtgtgtgtgtgtgttgtgtgtgtgtgttaaagaccaaacaaacatgacacaatgcctgcta

SEQ ID NO: 178013 - DNA, 543 bp, Homo sapiens
ctcatttcctgtttaggtgagtcaacagatctaacatatgtgccaaacttttgagaaattagcttcctttagaaacgactagaaggacataattagtgaatgctctaccggagaaaaatcactgacactaaaataatatcttgattaaaacttattattgatacttgtttctttcatctctttggttgtcctgtttgttttgttttgtttaaacaccttaaatcctagtggtatgaagcaacaacaacttyattatactcacaatttggggatttatggatttgggctgagaactagcaagagcagcatgtgtctattccacagtggttggggaatgaagtgctggcatctctctctccatccagtctgtcctcatgactgacatgggaacctgtcagggaggtaggatttcttatagggccctggctttctcctgtgaaatccttccaagagaccaaaggagaagcttcaaagcttcttatgactttgcaagtcatattgtgtcatttccactttcatattatggatacacaggggtatccc

SEQ ID NO: 178014 - DNA, 574 bp, Homo sapiens
catttgaaaagcatttagtggccatctctgtagcccttatgttggcatcaggagattctgagctcatgttttttatatttccaattcttgaagaaggtgcttatcaactgaaagaaaaatcctagttgtcttcttaccctttaaaaaagaattatggtgaaaatagcaaagataatattcctagaactccctctttctaccaaaataataaatcagattgtatgtccacatcactaggaaagtgagagatgagtagcaccatagagacttgaaagatgaatttatcttaaccgttttagccaattagctyaatgagtatttgaagagtaaatttttataagcttaatcaggacatgactccaaattataattactcttccaggtatagtctcattactagagcaatttaattcagctcaggaattctttgtattccttaggaagacatatgaatgagaaagagttaaaatcaatcttacaaaaaatatgtgattcatgatgcatacagcagggcatctactctaaagtgaagggtaagttacagcaccctcaccttgtacaattgagaaagaga

SEQ ID NO: 178015 - DNA, 546 bp, Homo sapiens
catttactttaacaagtgtgactgagcacatcacttatcccccttgaacctctgtttctttatcygtaaaatatctgtgataagtaatcatcaatgctattgttttccacttcttttcacactctttcatcctccagtacatttaactattttttggtttctttttttattgtctaaaagaaagaatatagcagaaagaaaaaaatagataacaataacaacaaccaaaaaacaacaaaaaaaactgtcaatctttcgtttatattttccacattataagccactacaggaatctataaaggagaatttggggtggaccacactgctgaaccaacaacattaagaaaaaaatcaatttcctcagttgagagagtgcactggactcagtgatacaggtgaagtgaaaagtaagaacaaagagagagaaagcgcagtggggaggaggaaacagagagatttaagatagccaaaaagacagacaggtattcccctctccctaccttctccctagcagctaaagcatggcacaaaagtcagacccatcta

SEQ ID NO: 178016 - DNA, 468 bp, Homo sapiens
aactcattttggtagatatccaagagtgggattgctggacaatgtcttaagagtatgtttagcttggtaaaaaactgccaaattatcttccaaagtggctgcagcattttgctgccccaccagcaatgaatgagagttcctgctgctccataccctcgccagcatttrgtattgtcagtgtttgggagtttgaccattctaatagatatttagtgatatttcattgttgtttcaatttgaaattgccttatgacgtataatgttgaccatcttttcacatgcttacttgctagctgtgtatcatcaggtgaggtgtctgttcagatcttttgctcagtttttaattgggttgtttgttttctctttgtagagttttaagagttttgtgtttactttcaacaccagtgccttggcagacatgtgttttgcaaaaattttctaccattcagtgatcttttcagtctctta

SEQ ID NO: 178017 - DNA, 468 bp, Homo sapiens
aactcattttggtagatatccaagagtgggattgctggacaatgtcttaagagtatgtttagcttggtaaaaaactgccaaattatcttccaaagtggctgcagcattttgctgccccaccagcaatgaatgagagttcctgctgctccataccctcgccagcatttggtattgtcagtgtttgggagtttgaccattctaatagatatttagtgatatttcattgttgtttcaatttgaaattgccttatgacgtataatgttgaccatcttttcacatgcttacttgctagctgtgtatcatcaggtgagstgtctgttcagatcttttgctcagtttttaattgggttgtttgttttctctttgtagagttttaagagttttgtgtttactttcaacaccagtgccttggcagacatgtgttttgcaaaaattttctaccattcagtgatcttttcagtctctta

SEQ ID NO: 178018 - DNA, 448 bp, Homo sapiens
ggttcttgttagtgtgtattgctatgctctggtccagggcctctcaagtaacctgcttgtcatcttaagttatgaaatttctgcatatttagaaagccttagggatttcctaagtctgttctaaattgcatatttctagcatctagctgcaacatttctcttgtctgtttaaagatgtttgtgcctctgattagggctgctcagtctatctcttctctgaaaactcacctttcacttgattccaacgcagtagagtatttcacctagagcagtcacctgmgtgcaccctgcatataaacatccatactgttttactgtctcacatgctcttgctattttttctatcaatacgtatactttaaatagaatacattttttagagcagttttaggattataaaaactttgttcccctattactaacatcttacatttgtgttggaaatctg

SEQ ID NO: 178019 - DNA, 549 bp, Homo sapiens
tttcagctctgtacagctgtctcagtgagattttgttgttgttaatcctttctcaatgttagtgactgtgtatcttttggctgtgagtgttcatatctttccatcagttacatcactattgcattgggacaacaacccacaaaagatgtaacctttagtttttgatttgttatctgcattagcaccaagaatcaaaaaagttcaagcctttcaaattatcaaactttatatatatataaaatatatattttacatataaatrtatattttatatatatgtatgtatagtggatgattattgattgcctcctcagactcattccccacattctttttaaataaccctgatttccattttgggaagataaatttccaccaaatcctgcagtggcagattagacttatgctaagccaattagacattcccttcctctggccatcttaattaggtcaaggataagcatgagattgaatcctattcactcaaaagaaaatttatgatgttgcctggaaatactggagaaaaaaaagtcttctcattcctaaaat

SEQ ID NO: 178020 - DNA, 551 bp, Homo sapiens
gaacttacttagtatcataagaatatcatgggggaaactgcccccatgacttgattaccttttactgggtcctttccaccacacattgggattatggaaactacaattcaagataaggtttgagtggagacacagccaaataatatcatacggttttctcatagaatttatgattatgtttgggtgaggaagttattgatattctattcctgtaattttttgtctaattttactatcaggttaattctgtcttcatataataaagttggtgtgtataccatcttcttcaagtctctgttttaatttcttccttgaaattaatcagaaaagcaaaatagaattttgctagaattaatcagtaaagcaaaatagaactgaagatttatttgtttaaagcttttaagtatcaattcaatttctttagtaggwacagtaagtcctcacttaatgtcattaggaggttcttggaaatgcaatttaagcaaaagacataataaaaacaatttttttcttcatcaatgttataacaaaataacattgaataagaaggc

SEQ ID NO: 178021 - DNA, 386 bp, Homo sapiens
ctcctttattgcttatagtccataacttaaaacttttaactttatcctattacagttcacccttttcactgccatcgctccaacacaggtctccatcattttatatccagattgctgaaatagctttctagctactttctctgaagaaattgtgataaataacagtctttggaattggtactctcctgtatgagttgtctgttgaccactactaggagktggctcccagtcaggaggcatggcggtcagggacccacttgaggaggcagtctgtcccttagcagagctcgagcactgtgctgggagatctgctgctttcttcagagccagcaggcagggatgtttaagtctgctgaagctgaggtcacagcaaccccttcccccag

SEQ ID NO: 178022 - DNA, 586 bp, Homo sapiens
tagttttgtgactgtggacaagttacttaaaagcttatgtctccattactcatacattcagaagactaaataaaaaaaaataaagcatgtagaacaggacctgaacttgccagcactcaataaatgatgaatattgtcattaaaagtatttattcctgttattttactggttggaaactttcaatgtttcctttttgctttggagtctgctttaacttatttttttactttagccccttgaaatggttctttcctagttttctatctgacaaatatttattgtgcacctattatgtgccaggaatgaatttgttttcctgatctccrtatgcacaaccagctccaaactctggacaggcctgcattcccacaggacctagtaactgtgccatcaaaagttttgctttatgtctgctataaaaacccattctcctccagtgtaccctttgctttatctatcccctgataattttacctgaatatctaatgtgccctgtataccatgcaaaatgctgacattaagtacatctcagttttgctttcaagttgcttacagtctaatgagaaaagtatacaacaaaatagg

SEQ ID NO: 178023 - DNA, 541 bp, Homo sapiens
ttggctcatgacacccttccatcatcaaagccagcaatarctggtcaagtgtttctcactttgaatcactctgacaccaacccctccacctttctttctcatatttaaggaacccatgtgattacattgggtccactggataaaccacaataatttccttaaagtcagtcaagtgataaccttaattctacctgcaaacttaactcacctttgtcacataatatagcatatttagaggttccagggattaggatatagacatcattgggtggagcgttaacctgcctttcacaagtgacaaaaattattaagactggaaagagagaattgctgaggaaatgtgtttacattaaataatgtataggattttgagattgtgttgaaagagataatattggaaaggtaaacgtggatttggaaacttatttataggcaattgaaatgacattaaaattgtttgaggaacacagtgttacaatcgtagatcacctctaggtagattaactagaaatgcagcatgacttgaatgagggagtctaga

SEQ ID NO: 178024 - DNA, 472 bp, Homo sapiens
tctcactttgaatcactctgacaccaacccctccacctttctttctcatatttaaggaacccatgtgattacattgggtccactggataaaccacaataatttccttaaagtcagtcaagtgataaccttaattctayctgcaaacttaactcacctttgtcacataatatagcatatttagaggttccagggattaggatatagacatcattgggtggagcgttaacctgcctttcacaagtgacaaaaattattaagactggaaagagagaattgctgaggaaatgtgtttacattaaataatgtataggattttgagattgtgttgaaagagataatattggaaaggtaaacgtggatttggaaacttatttataggcaattgaaatgacattaaaattgtttgaggaacacagtgttacaatcgtagatcacctctaggtagattaactagaaatgcagcatgacttg

SEQ ID NO: 178025 - DNA, 472 bp, Homo sapiens
tctcactttgaatcactctgacaccaacccctccacctttctttctcatatttaaggaacccatgtgattacattgggtccactggataaaccacaataatttccttaaagtcagtcaagtgataaccttaattctacctgcaaacttaactcacctttgtcacataatatagcatatttagaggttccagggattaggatatagacatcattgggtggagcgttaacctgcctttcacaagtgacaaaaattattaagactggaaagagagaattgytgaggaaatgtgtttacattaaataatgtataggattttgagattgtgttgaaagagataatattggaaaggtaaacgtggatttggaaacttatttataggcaattgaaatgacattaaaattgtttgaggaacacagtgttacaatcgtagatcacctctaggtagattaactagaaatgcagcatgacttg

SEQ ID NO: 178026 - DNA, 226 bp, Homo sapiens
ttctcccaaatcctcagaactgacaggttgctgaccctttcataataagagctagcattttctctactctggaaagacatttcagaggcatgtcctcaacaaggcaacacgtttcctactcagtaatctcccccagatcattcttaaggccatkataaataccatggtgagagaagaacaagcatcattaataagttcagtgtggaaaaaagaaaaagttcattgt

SEQ ID NO: 178027 - DNA, 499 bp, Homo sapiens
gaattcattcttttttattctggttaggagagaagagttgaagtagtttatattcacatggaacagacaatagtattgatttrcagtgttgtcatagatctatattaactctactactgtgttgtaatacagcccagagaaatctggaatagcaggacacaccacagaacactccacttatccattaaatcaatgatattgtcttgatccaaccagatgaacaagaggtggctagtaaactgagctttgataaaatacatgtggtccagtggaagggagataaagcttataaacattcaaaaactgtggcttctagtaaagacttataggtctagtcatcagagaatggcagcatattagctccaaagtaaaaatcaagttgctgtgactcattacctatcacaaggaatgaagtgcactgcaactagcctttcttgagttctggagacaaaatagtccacacctgggaatactgctttagactttatacccagtgaca

SEQ ID NO: 178028 - DNA, 499 bp, Homo sapiens
gaattcattcttttttattctggttaggagagaagagttgaagtagtttatattcacatggaacagacaatagtattgatttacagtgttgtcatagatctatattaactctactactgtgttgtaatacagcccagagaaatctggaatagcaggacacrccacagaacactccacttatccattaaatcaatgatattgtcttgatccaaccagatgaacaagaggtggctagtaaactgagctttgataaaatacatgtggtccagtggaagggagataaagcttataaacattcaaaaactgtggcttctagtaaagacttataggtctagtcatcagagaatggcagcatattagctccaaagtaaaaatcaagttgctgtgactcattacctatcacaaggaatgaagtgcactgcaactagcctttcttgagttctggagacaaaatagtccacacctgggaatactgctttagactttatacccagtgaca

SEQ ID NO: 178029 - DNA, 551 bp, Homo sapiens
atcaagacatagtaataaagcatgaggtttatggcttgcaattgttgatttggtgaattcattcttttttattctggttaggagagaagagttgaagtagtttatattcacatggaacagacaatagtattgatttacagtgttgtcatagatctatattaactctactactgtgttgtaatacagcccagagaaatctggaatagcaggacacaccacagaacactccacttatccattaaatcaatgatattrtcttgatccaaccagatgaacaagaggtggctagtaaactgagctttgataaaatacatgtggtccagtggaagggagataaagcttataaacattcaaaaactgtggcttctagtaaagacttataggtctagtcatcagagaatggcagcatattagctccaaagtaaaaatcaagttgctgtgactcattacctatcacaaggaatgaagtgcactgcaactagcctttcttgagttctggagacaaaatagtccacacctgggaatactgctttagactttatacccagtga

SEQ ID NO: 178030 - DNA, 499 bp, Homo sapiens
gaattcattcttttttattctggttaggagagaagagttgaagtagtttatattcacatggaacagacaatagtattgatttacagtgttgtcatagatctatattaactctactactgtgttgtaatacagcccagagaaatctggaatagcaggacacaccacagaacactccacttatccattaaatcaatgatattgtcttgatccaaccagatgaacaagaggtggctagtaaactgagctttgataaaatacatgtggtccagtggaagggagataaagcttataaacattcaaaaactgtggcttctagtaaagacttataggtctagtcatcagagaatggcagcatattagctccaaagtaaaaatcaagttgctgtgactcattacctatcacaaggaatgaagtgcactgcaactagcctttcttgagttytggagacaaaatagtccacacctgggaatactgctttagactttatacccagtgaca

SEQ ID NO: 178031 - DNA, 482 bp, Homo sapiens
tgcccatgacaccatagtacgatcagcatcattccccagcttgcttaaatgaccctataatatgagactacataaaaccatcttaaggaagaataaaaatctgagcttggattttagatgtgtcgacttggcaattgcatrcaagccaaaaccagagactctctggattacaattcaagtctaaaaaagaaagccaatggagagaagaaatattctttacaagcagagcagtgagtcgtgcacctggacacccaccttgtgtggaaagagaagtggctcagatgagaatatatagagattcttgggcaatggctaattgtgtcaccatccaatcagatatctgaaagggaaaaggctagagacaaggaagtcaggggtaaagtgtgtggacagacaagtggaaaggcataaaagggatgaagatttttgtatcacagatcaatatccactaaaaattattcaccaaagaagaggcaccaaac

SEQ ID NO: 178032 - DNA, 465 bp, Homo sapiens
cttaagttgtttagactcctgtgattctgtaagcctaaccacagaaagactaatatttatctctctggttaaaccttagtgccgaaaatggccgtccaacttagatgaaacaatcatttcaagygtgggtcttctttggcctctacttagataatgcatttaaagatatgatgaactcatatatcagagtcggatgtttcaaaaataggcatgctgtagttaaacaataaaactctatgtggtaatggctagaggagaaattcaatattttatcacaggaaatataattaagtcaatgacatctgtgcagtgcaagagattttctcagtttagatttaacttggaagccgttctgcttttgccaaaattgaggagctataaaaacctttctaccatatagcttaactcagtgggaggccaagcccgtgtctcagaggagagaaatgaggaaggagtccagaagca

SEQ ID NO: 178033 - DNA, 465 bp, Homo sapiens
cttaagttgtttagactcctgtgattctgtaagcctaaccacagaaagactaatatttatctctctggttaaaccttagtgccgaaaatggccgtccaacttagatgaaacaatcatttcaagcgtgggtcttctttggcctctacttagataatgcatttaaagatatgatgaactcatatatcasagtcggatgtttcaaaaataggcatgctgtagttaaacaataaaactctatgtggtaatggctagaggagaaattcaatattttatcacaggaaatataattaagtcaatgacatctgtgcagtgcaagagattttctcagtttagatttaacttggaagccgttctgcttttgccaaaattgaggagctataaaaacctttctaccatatagcttaactcagtgggaggccaagcccgtgtctcagaggagagaaatgaggaaggagtccagaagca

SEQ ID NO: 178034 - DNA, 465 bp, Homo sapiens
cttaagttgtttagactcctgtgattctgtaagcctaaccacagaaagactaatatttatctctctggttaaaccttagtgccgaaaatggccgtccaacttagatgaaacaatcatttcaagcgtgggtcttctttggcctctacttagataatgcatttaaagatatgatgaactcatatatcagmgtcggatgtttcaaaaataggcatgctgtagttaaacaataaaactctatgtggtaatggctagaggagaaattcaatattttatcacaggaaatataattaagtcaatgacatctgtgcagtgcaagagattttctcagtttagatttaacttggaagccgttctgcttttgccaaaattgaggagctataaaaacctttctaccatatagcttaactcagtgggaggccaagcccgtgtctcagaggagagaaatgaggaaggagtccagaagca

SEQ ID NO: 178035 - DNA, 495 bp, Homo sapiens
caagttctgaaactccatacatgctcacactgggaattaaggtttcaacatataaatttgggggggacacatgaatgtgtccattgcatactgtccctagccccccaaaattcacattcttctcacatgcaaaatacattcattccatctcaacatatgaatgccaactcaaacrtggtgtctttaataagaattattagtaacagctagttctaacccactatttaccatgtgtttgacctttctgaatttcacagtgatgcttagagttagatatcatgattatactatttttaagctagaaaatctgtagcagcgagatattaagtcatgtgactaaaaccacacaatttgaaagtggcactaggggtttggatccaggtgacccttgccccagggcatgtgcctatagacactacacacaatgccccttgtcatttctataagaaagaccatacatcaatattaccaagtgtgattttgctaacaaaaata

SEQ ID NO: 178036 - DNA, 239 bp, Homo sapiens
acccacagtcctaagagaacatggttttgtgggccgcacccaggttccccataacatgtgcagcctagtgacttgttgccctgcatgccagccattccagccctrtctgaaaggggccaaagagcctgggccatggcttctgagggtgcaatccccaagaattggcaccttccatgtggcattgagcctgcgagtgcagagaactcaagaattgaggtttgggaacctccagctagatt

SEQ ID NO: 178037 - DNA, 385 bp, Homo sapiens
ctcttgttctcttcccttactctttctcaaacagggtctctcttggtgtgctgagctgcctggagctgggcaggggktgatacaagcccctccactgggacagtactgggtcagacctgaagctggcatggcactgagtctcatccaaggcccacagtaaccattatctggctaccacctatgtttgctcaaggttctagggctctacataagcaggtggaaaagccagccaggcttgtgtccttccctttagggtggtgagatccccccaaccccaggcaggtccagagaggccaactgggagccatggcctggagttataaaccttaggaatctatttaatgctctattctactgcagctgagctggcacacaaaccacaaga

SEQ ID NO: 178038 - DNA, 385 bp, Homo sapiens
ctcttgttctcttcccttactctttctcaaacagggtctctcttggtgtgctgagctgcctggagctgggcagggggtgatacaagcccctccactgggacagtactgggtcagacctgaagctggcatggcactgagtctcatccaaggcccacagtaaccattatctggctaccacctatgtttgctcaaggttctagggctctacataagcaggtggaaaagccagccaggcttgtgtccttccctttagggtggtgagatccccccaaccccaggcaggtccagagaggccaactgggagccayggcctggagttataaaccttaggaatctatttaatgctctattctactgcagctgagctggcacacaaaccacaaga

SEQ ID NO: 178039 - DNA, 385 bp, Homo sapiens
ctcttgttctcttcccttactctttctcaaacagggtctctcttggtgtgctgagctgcctggagctgggcagggggtgatacaagcccctccactgggacagtactgggtcagacctgaagctggcatggcactgagtctcatccaaggcccacagtaaccattatctggctaccacctatgtttgctcaaggttctagggctctacataagcaggtggaaaagccagccaggcttgtgtccttccctttagggtggtgagatccccccaaccccaggcaggtccagagaggccaactgggagccatrgcctggagttataaaccttaggaatctatttaatgctctattctactgcagctgagctggcacacaaaccacaaga

SEQ ID NO: 178040 - DNA, 449 bp, Homo sapiens
tcaacctgtgctatgtgtcagtatctgctgtaagcacttcgcttacawtaaagcttttactcttcaaaaccacaatttgagttaggcacccttttccttattttgcaaatgagaaaattgaggaacacagattcagcacccaagatcacacagctcatgaatggcatagctggaatctgaacccaggcattttgactccagaatcccctctctgacacagcatgctaggctgatgctctctgatgttcaaagagcacccaagggcaggacatcacagggagacataaagaccaagaaagtgagtggagtcagcatttggggttcaccctgaactcaagaacaagcaaagttattcttcactttttttctgtcctatgtatttattcaagaagtatttattgagcattcgttaagtaccagactccaggtcagatgttaaagatccctga

SEQ ID NO: 178041 - DNA, 617 bp, Homo sapiens
gcatggtggctcatgcctataatcctagcattttgggaggccatggcagtgtatcacttgaggtcaggagttcgagaccagcctggcctacatggtgaaaccctgtctctactaaaaatacaraaattagctgggctggtggcacactcccgtagtctcaactacttgggaggttgaggcaggagaattgcttgaacccaggaggcagaggttgcagttagccaagactgtgccactgcactccagcctggatgacagagtgaggctctgtctcaaacaaacaaacgaacaaacaatcagaaaaacttcaattgaaaaaaaagctcacaaaaattaggccaagatctgtgtgcaaaatctgaactgagtgaccctgtgctaaaataaaatatatagaagccacagtctcttaacatgaaagtcaaaatgtctaacatatattgaaaattatctatcatagcaacaatcaataaaattgcaaactgaatgagaaaagacaactgacaccaataacaaagagttacacattggaattattgacaagaatgctaaagcagaaatcataaaatacttcaacaatctactacaaactatctggaaataaatttaaaaatgga

SEQ ID NO: 178042 - DNA, 617 bp, Homo sapiens
gcatggtggctcatgcctataatcctagcattttgggaggccatggcagtgtatcacttgaggtcaggagttcgagaccagcctggcctacatggtgaaaccctgtctctactaaaaatacagaaattagctgggctggtggcacactcccgtagtctcaactacttgggaggttgaggcaggagaattgcttgaacccaggaggcagaggttgcagttagccaagactgtgccactgcactccagcctggatgacagagtgaggctctgtctcaaacaaacaaacgaacaaacaatcagaaaaacttcaattgaaaaaaaagctcacaaaaattasgccaagatctgtgtgcaaaatctgaactgagtgaccctgtgctaaaataaaatatatagaagccacagtctcttaacatgaaagtcaaaatgtctaacatatattgaaaattatctatcatagcaacaatcaataaaattgcaaactgaatgagaaaagacaactgacaccaataacaaagagttacacattggaattattgacaagaatgctaaagcagaaatcataaaatacttcaacaatctactacaaactatctggaaataaatttaaaaatgga

SEQ ID NO: 178043 - DNA, 617 bp, Homo sapiens
gcatggtggctcatgcctataatcctagcattttgggaggccatggcagtgtatcacttgaggtcaggagttcgagaccagcctggcctacatggtgaaaccctgtctctactaaaaatacagaaattagctgggctggtggcacactcccgtagtctcaactacttgggaggttgaggcaggagaattgcttgaacccaggaggcagaggttgcagttagccaagactgtgccactgcactccagcctggatgacagagtgaggctctgtctcaaacaaacaaacgaacaaacaatcagaaaaacttcaattgaaaaaaaagctcacaaaaattaggccaagatctgtgtgcaaaatctgaactgagtgaccstgtgctaaaataaaatatatagaagccacagtctcttaacatgaaagtcaaaatgtctaacatatattgaaaattatctatcatagcaacaatcaataaaattgcaaactgaatgagaaaagacaactgacaccaataacaaagagttacacattggaattattgacaagaatgctaaagcagaaatcataaaatacttcaacaatctactacaaactatctggaaataaatttaaaaatgga

SEQ ID NO: 178044 - DNA, 617 bp, Homo sapiens
gcatggtggctcatgcctataatcctagcattttgggaggccatggcagtgtatcacttgaggtcaggagttcgagaccagcctggcctacatggtgaaaccctgtctctactaaaaatacagaaattagctgggctggtggcacactcccgtagtctcaactacttgggaggttgaggcaggagaattgcttgaacccaggaggcagaggttgcagttagccaagactgtgccactgcactccagcctggatgacagagtgaggctctgtctcaaacaaacaaacgaacaaacaatcagaaaaacttcaattgaaaaaaaagctcacaaaaattaggccaagatctgtgtgcaaaatctgaactgagtgaccctgtgctaaaataaaatatatagaagccacagtctcttaacatgaaagtcaaaatgtctaacatatattgaaaattatctatcatagcaacaatcaataaaattgcaaactgaatgagaaaagacaacygacaccaataacaaagagttacacattggaattattgacaagaatgctaaagcagaaatcataaaatacttcaacaatctactacaaactatctggaaataaatttaaaaatgga

SEQ ID NO: 178045 - DNA, 462 bp, Homo sapiens
ctgaactgagtgaccctgtgctaaaataaaatatatagaagccacagtctcttaacatgaaagtcaaaatgtctaacatatattgaaaattatctatcatagcaacaatcaataaaattgcaaactgaatgagaaaagacaactgacaccaataacaaagagttacacattggaattattgacaagaatgctaaagcagaaatcataaaatacttcaacaatctactacaaactatctkgaaataaatttaaaaatggaaattctcagaaaaaaatagaagttataggaaataatttaaaaaattacagaactgaaaactgcaattaaaaaaatcgaaaccttctgaatgggctaagcagtagagtggaggatagaatcagttaagttgagcacagatccactcaatctgaacaaaaagagaaaacagactgaaaaaaagtatgaatagagctttaggaatc

SEQ ID NO: 178046 - DNA, 535 bp, Homo sapiens
ataaacccaaagaaatccacacaccaaaatacagcttaattacacgtttgaaagctaaatacaaagaaaaaacactgaatgcagccagggagagatagaatgcataacctacatggaaacacatattcactgtagatttcttgtccgaaactgtggataccagaggaagtggcagaacatgttttgaagtgttgaaagaaaggaattgtcagttgtgaattctatatcsaatgaagctatacttcaggaataaaaggaaaacgaaaacattctcagataaaggaaaatagaaagaataaaaatttgtcactgacaattctaccctgaaatgttataattaaggaggttctttaaactaaaattacaaaataaaaaagaagaatttgggggcaacaggaaggaaaagggaatgatggaaagaccatatatgtggacactcacaatagaccattcttttcaactatttctttgaacaatcattcagcatcactgtctttctcccctctttctgagatttcagtgataaaatatcaga

SEQ ID NO: 178047 - DNA, 594 bp, Homo sapiens
aagccaaataatttgcatttcaattttaccataaaaatctatgcttcctgcaacaggcaggaaacatgggaagctgaatttctctatgacatatgccctccataaggcagaaattgttgttgtcagaataactaagctaaaatatcaggatatttgcctaaactcagaaagcttgwcacataaattgccactgaacagtggctgcgtatgagattagaacctgccttttggaggggtgatttgtcagccccattggcagaactagcatagtaaataacactaaaatgaaatgagctacagtctcagaaatgctgtattttatgttgcaatggacagtcagggaaaaagagataagtaatgggctgctgcctgaattctctcgttcctgcccaaccatcgctgcctgggccataggcagtacatgtcagcgtgaggaccaaacatggcctgacactcttcatgggactgcatatgtgcttatggctcataataacatggtagcatataagcaaaccataagtaatacacatgagtctttaaaaaacacaaaaagccataatgccatgaggggttaaaagaggtaggttaattcta

SEQ ID NO: 178048 - DNA, 594 bp, Homo sapiens
aagccaaataatttgcatttcaattttaccataaaaatctatgcttcctgcaacaggcaggaaacatgggaagctgaatttctctatgacatatgccctccataaggcagaaattgttgttgtcagaataactaagctaaaatatcaggatatttgcctaaactcagaaagcttgtcacataaattgccactgaacagtggctgcgtatgagattagaacctgccttttggaggggtgatttgtcagccccattggcagaactagcatagtaaataacactaaaatgaaatgagctacagtctcagaaatgctgtattttatgttgcaatggacagtcagggaaaaagagataagtaatgggctgctgcctgaattctctcgttcctrcccaaccatcgctgcctgggccataggcagtacatgtcagcgtgaggaccaaacatggcctgacactcttcatgggactgcatatgtgcttatggctcataataacatggtagcatataagcaaaccataagtaatacacatgagtctttaaaaaacacaaaaagccataatgccatgaggggttaaaagaggtaggttaattcta

SEQ ID NO: 178049 - DNA, 439 bp, Homo sapiens
caaacattagcatgcataagaattatatggggagtctgttgtatatttagattgttgagtcacaatcctagtgtttctagttcattaagttttcagtagactccaaggatctgtatttttaactggactcatatttgattttaggcaggaagtgcttggacctcaatttgagaaacaccggccttaggaaaccattcttccttcgtgaaaatatgcacccttggaaaatatgcaccatatcaggtggagtccacttcctccagacttggagtagagrcagccaaaaaaaaaaaaaaaaaaaaacagtaaacatttgctttcattaataaaagataatatatgtaacaagggttaaattttaagtcctgatatttgaatcacttcaaactgatcttggaaaaaatggacatctcatacaattagttatagtgattgtctg

SEQ ID NO: 178050 - DNA, 476 bp, Homo sapiens
cctacctttgtcaaactttcattctatatggtcccttgaggtacagagtaacatataggagggaaatatgctcagcatgacaaaggtcaggttgagtatagatgggtaaaagggaactattttgtttttgttttgtactccaccctgagtcatgcaaatgtctaacagagccttctgaacataggcttctgaacacacttccttcaggcagaaaactctcccagataatagaggcagagcatgggaatctgaaaggaataagccatrtgaagaaatgtacacttgacaatcttgggtctatctcaagaaggagaacatatatcaatgcttactaagtgttaggtgctacactaagcccctcacgggcattacatcatgcatctctcacagcaatgttctcaaaggaagtgttatttttatcctcattatacagatgaggaaacataattagaaaggttaagctatgcagccatgtt

SEQ ID NO: 178051 - DNA, 405 bp, Homo sapiens
tgggtgaccttgctgtcgcagaggtttagaaatgccagcttgtcctacaacttcctatacgaggattttaaaggctatgatctgggtactgctgcatggtagacactggagtatacatggaaatgccttattcagagaattatctttaagaamattttaacagaagagtgaggaatgtgtgataaggtattctgtctatattagaattttttaaacctttctaagtatcaaaattggacccctccctagctattttaaatcaaagtttgtcaggttgaggcaaaacgtctacagattttcagctaatgagtcagatttggtatccaatgttctaaaaagcaaacaagtgaaaagtatataaaacagggcaagtatatttaataagaaaaataacatgtaaagtaa

SEQ ID NO: 178052 - DNA, 529 bp, Homo sapiens
cttgtgacattcctccatgctgcaagtagttttgtttgtttgttctcattatgtatagtatgatattatctaggtataatgtatttaataatgaatgtaaaaatgttatttattcatttagtgaaaggggcatttgggttgtgtattagtcttctctcatgctgctagtgaagacaatacctgacactgggtaatttatagaggaaagaggtttagtcgactcacagttcacatggccagggaggcctcacaatcatgggagaaggtaaatgaagagcaaagtcatgtytcacatggaggtaggcaagagggcttgtgcaggggacctcccatttataaaaccatcaatatcatgcgacttattcactatcatgagagcagtatgggggaacagtccccatgattcaattatctccatctggccccacccttgacacgtggggattattacaattcaaggtgagatttgggtgggaaaacagcaaaaccatatcaagtcatttctaaatttttggctgttttgaatagt

SEQ ID NO: 178053 - DNA, 665 bp, Homo sapiens
ttaaataatatccccataggtatacattcatgtaaaaaaagcatagttagaacagtctggaaggaaatacattgaactggtattagtggttacttctggtatggaatggctgtattgggattatgagttgtagtctaaggtatattttgccttatccaaactacttctattaaagcattcaccttaattaaaatgatgcattgyatactttgttatttgcttaggtgtatataaaaagtggtgtaacagtattacaaagttatgataaataagcaagattcatgggatataagcataaagcatctttttgttttttggtctcaccacccatttaaatgtacttcatgatgttaattgtttctctgcttctgaataaaatttctggcaagtccagtgatatgtctggtcacttttaagtgttctagaccataaataacttctagcctaaattactcccaacaaaacaatacaaagctcctcccctctctcagctcaggtcttttgcagtctggcaatctcattgggagaggtgggcttaactatttctcctgttccttcatctggaattactctcactaatcatagcttctcagcagaaaaggggtgaggacaaaggaatgcacttagtatatcagtacctgctgggcatttgtttcctcaatttg

SEQ ID NO: 178054 - DNA, 546 bp, Homo sapiens
tctctattctctcacccctaaacgttttatgctaatgttggggctcagaaactgataccctaaaatatgatgctttgacatgctgaactgaagaagcagcataaaggtctctaacaattcccaccccaaccgccccacataccctacctcctgcctttcaatcctcggtgtctcccgaagcacaggatgaagwtgtactctgaggttccctttatctgcctaaagcctggatccaccacagaagaaaacaattacctttggtcccttctctgagttttccttatctgaactcatatcacaggaaggaagactgaaatctgtcaatgcatctggacagacttttgtcacaaaccattgtctactccgcaggcccaagagactttgtctcaagccattgtatgttccttaagtcccttaagctcccttaaaatttacttattttccccctaaaattaactcttccagtctctgtttcccctcagaaatagggtatataaccatctgtaccccagtgcatggcagggcaatccctctgtgattttcatg

SEQ ID NO: 178055 - DNA, 585 bp, Homo sapiens
ctgtggttgttggatggaatgttccgtatatatctgttaaggccatttgttccaaagtatagtttaaaaccattgtttctttgttaactttatgtcttgatgactgtctagtgctgtcatggagtattgaagtcccccactattattgtgtggctgtctcatttcttaggtctattaataattgttttataaatttgggagctccagtgttaggtgcatatatgtttaggattgtgatattttcctgttggacaaggccttttaccattatataatgtccctctttatcttttttaactgcagtttcattaaagtttgttttgtttgatataagagtagctactctttcttgctttttgtktccatttgcatgaaatgcctttttccagccctttactttaagttttcatgtgagtccctatgtgttaggtgagtctcctgaaggcagcagatatttgtttggtgaattcttacccattctgcagttctgtatcttttaagtggagcatttagcccatttaaattcaatgttagtattgaggtgtgaggtaccattccactcattgtgctatttgttgcctgtgt

SEQ ID NO: 178056 - DNA, 576 bp, Homo sapiens
ccaaactatgttgttaaaagtcagaagactggttatccttggtcaataatgtggctggaagatagcttgggggtacttttagggagactgataatgtaacttttattaaacctatgggtgatggttatatggatgtatttactttgagaaaacatgttcttcaattatgacatgtatactgtgcgtgtgtgtgtgtatatatatatatatawaaaatacttcaataaaattttcaaaagtcaaatgacataatgtgttcaccacagaacaaagcagctattcaacaaacatatattgaatggaggaaataaagctaaatattgttttatctaataaaaaactttttttgaacattgaattttacatatttagtcctccaatcatgagtttatttaactagaatttttagaatcttcaagtattatgatccaagaatctctcctctttagtttccatctgggcagtagataggacatgtgaaccagtcttgctggtaaaacggagcaaatgctctaggatgggagcaggaggagctgggcagtgaggagagttctaggaaacagaagcagcaaaaca

SEQ ID NO: 178057 - DNA, 603 bp, Homo sapiens
cctacatttgtattgatgaatttaacggggaataaataagaaaccagaaataaagtatgccaacttaccctgtttttgttttgtgtttgcttggcagcccaaagtaaaacttatgagctaattcattttagatcattaaaaaaaaaatccckgtaggataatccacaaagacatttccctttaatgtatacttggtcttgtggtttataccagttataaacgttgccttctttttatgtgattgtataccattttaaacaaaaatctagaaatttatcctgcctttatagcaagttaacatttttggtctaaagttaattttcatctttattaaattaatatacccgtacaacttaatttttcaaattaagtttattttaaaagatatcatcaaattattttttaaataaagcagcttaagaaatccaggtgagttcttatgtggataatacttccaagtgtggtagaattgttagcatatcagtgctttttttggcaatgtataaaagatatgtaatcctagaaaatgttgtagatttttcaaatacctcttaagtttatttgtaggatgttttgttgtagggaaaaacaaaggttccagtg

SEQ ID NO: 178058 - DNA, 631 bp, Homo sapiens
aaagcttggtcttatgctagattcagaagcactgaagaatggaggttgacactttagaggactaggaagggatcatttgtgctcttgcagctattgctgatagctagagccaaagaccattatattgctgaggcttgggtaagaaagttagggatgtgaggaggttgaaaatcctgaagaagagaaaaaatatgagggaggctaaggaaacttagmcactttctgatcactgatgactccttaggctgcacctgagtgatggtggtgtttttggaggctgtacctgagtgatggtggtttttggggggctgcactgagcgatagtgatttttttttggaggctgcacagctggtcagaccatctctagatgttctttccacagtggttcatagggcgtcattcccccttcctggattattttgactatgggtagcttattttcaagagctctttgcctttttaatcctgttccagatcacttatccaaaatctttccaaatcaattatattttgctgcttttctttaattccctaaaagccatagcttctagattttttatcagcacacattctcaccagaagttgaaccaatacaggtagaaaaagatagcccccttaatgtttttaact

SEQ ID NO: 178059 - DNA, 365 bp, Homo sapiens
aggctgctctgcctatggagtagccattckttgtttctttacttccctgataaacttgttttctctttactctgtggactcaccctaaattcttttcttgcacaagaattaagaaccctctcttggggtctggattgggattcctttccagtaacaacagcaggttacacatttttatcaagctcatatggaatgttcaccaagaaagaccacatactgggctagaaaacataccttaaaaatgtaaatgtataaaaaattcgtacaatgtctcctctcagaccgtaatagaattaaactaaaaatcaataacagtagctagaaaatcctcaaatacttggagattaaattacactcttctaaat

SEQ ID NO: 178060 - DNA, 641 bp, Homo sapiens
gaattctttaaataaatagtatacaaaaatttaaattttcattatacatttaaaaaaaattttgaacatgttgtgtgttgattttcaatagtttcattattttcaatgaaaaccaaacagcttaattcagtgacataaaaaaatgcgaaatgattaggatgttacatgttcttttttcctaattaaaatcccccctgctgtctcatattctcatartgccggctttttttatttaaaattaatcttaattgggttcattttttctgaagtattttaccctttttataaatgaaaattgcactgatattcattataatttggatacacttcagtaaatattggaggtaaaatcaacccacagcagcaattacaaaattagcaattagtaaattgtaccattcttttgaaagaaaatatgtaaacagattgggatatggttcatttaaattgttaggtttttctactgtttttatttgaatccagtgccctaatttaacatgtcttgctttacttgtaggtgataattacctcttgaacttgcatggagaattaatgcatgcatattgaattaaacttgtaagtaaataacgcatctattatttgtcagtctttgttcttattctttattcttactctgcctg

SEQ ID NO: 178061 - DNA, 585 bp, Homo sapiens
aagcttaataaaatgtccattttcactggtaaacagaaatgaggtcattagcagaagatgaagttgccctgccaaattacaagggtcttcttaccagggacaatgaacgactccttagaaagctggagaaattgtttttttttttctctctctctctctctctctcwcacacacacacacacgcacacataaacacacacgcacgcacagtacttttgtccattagtagcacatcaaactattcatcagagttaaacaccattaaaaaaaacccttatcttaaaaggaatcttttattttttctgaatgataacttttctgaatcggttaaaataataagtgatggcttcattataaattgcacaattaaaatatatcagagcaacctgacatttaagaaatagtggctatataagtacatgattatgaaaggatatgcaattatgtctggatatgcaaaataaacatgacaaaaaaatgcccctagaaatcaataatcaaaagtaatcccagtctgcccttcaaaccagtaggtctctataaatgctaatttctttaggcattaaaggatatgctggagacttc

SEQ ID NO: 178062 - DNA, 596 bp, Homo sapiens
tgaccttgtcaaagatttaaagtttacattaagaataatagaaaagatttgaagggttacaagttaggtgtggtatgagcagatgtgatttttaagaagatctatttggctatgatgtggagaatggattggagaggactaacatgggaggcaccaaactatttccatatttcaggccagacatgatggtggtttgcattaaaatgatgatagtgaacatgaaaaaatgggggcagatgtgatatccattcagaatgtaaaatcatcaagataatttggtgrtgaagtgaagatgagggatgagatagaggggaatatcaaggatatgaatggtggtttacatactccaagcacagggacgaggaagattatgagttcattttcagtttaagattcctctggtcatctaaaagaaggtatcagagaaattcaggtctttctctctataagtctgaagttcagaaaaattgacacaacttttaatcatgttgagcattaatatctgtaaaggccacatagtactatggttatattaggctttgaaatcaaagaccagggtcggggaggaccaaaaagacaataaatcccccaagaaa

SEQ ID NO: 178063 - DNA, 596 bp, Homo sapiens
tgaccttgtcaaagatttaaagtttacattaagaataatagaaaagatttgaagggttacaagttaggtgtggtatgagcagatgtgatttttaagaagatctatttggctatgatgtggagaatggattggagaggactaacatgggaggcaccaaactatttccatatttcaggccagacatgatggtggtttgcattaaaatgatgatagtgaacatgaaaaaatgggggcagatgtgatatccattcagaatgtaaaatcatcaagataatttggtgatgaagtgaagatgagggatgagatagaggggaatatcaaggatatgaatggtggtttacatactccaagcacagggacgaggaagattatgagttcattttcagtttaagattcctctggtcatctaaaagaaggtatcagagaaattcaggtctttctctctataagtctgaagttcagaaaaattgacacaacttttaatcatgttgagcattaatatctgtaaaggccacayagtactatggttatattaggctttgaaatcaaagaccagggtcggggaggaccaaaaagacaataaatcccccaagaaa

SEQ ID NO: 178064 - DNA, 594 bp, Homo sapiens
gaattcttgagattttggggtggccctggatggggtacataaaaagaagtggccagagggaaggacaggaagggccatcctcagaagttttgtccycatcctggaggcagggcagaccactgatgaggggggttgtttttaaaaggctgcctttcccagatggattgatagacttatctcagcctggctaaaaccctggccactccctgatagagaacaaggttcccagcaggcaagggcaggggtggggcccagcagggaccagttttgcaagctcacctggccctacacccgcaaacactcagcttttcctccaagacaagcctcaaggcttggagcaagtctctttgaagttttcttatgaattgctatgcttaacactaaatcatgggaaagattaacacccatgaaactgaagcaggagcacataacagaagcttaatatgaatcttccatcttaaaaatatcttattctacatctgaaaagagaaccatttggaaattccacgtcatactcacttatagacttaacagcaatttcaactttaaaaattcattcccacctgcattatatgacttgattcttacagtagc

SEQ ID NO: 178065 - DNA, 607 bp, Homo sapiens
attacttactttaatgtaatttaaatattcacattatcacttaaattttaatattgcattctgtttcactggattattayataaggtaatatcaaaacataaacggctccaaaattatcaagataagtcagtccctgtgaatgaacttggtacaaatcgacatagaatcatgagcttaaccttgtagaaataactcttcccaagagctagtttgtaaacgagttgctgttacaaacttaggaatcagctaaatcaaatcaagattattaaaatgtgactttagagagttattagaaagaaaaaaatgttagtagaaagagatggccagcaagcagcaaacagccttcttcggtacactgtaattatcttaatatctgtgcaacccccagtcgcatccccattaaactacaagctctaagagagcagggacatttcttttttctctttggcacccccagatcctagcataccacctgacataccatgcttgttggggtttctggaagagcctagatgttctcctcttatcccttccagattctaaaccagttgagaatcaaaacatcagctttcttaataatagagtggaagcaaaaacagtttttac

SEQ ID NO: 178066 - DNA, 592 bp, Homo sapiens
aactcccaactcccttccagtccaacagctctgtaacttgctaaggcagaaataaactcttttaacttacatcagccccacttcacaaatgacaatggacactaggagagtggaggtgctggagcccaagtttgagttctgccagatccagcaaccagttttggatgattgctaaatccagttgaaaggcttccatccctaaattgacttgtgtcttgcatcttgtcgcaacactaagctaatattaaatctttcattcagcacacattgaattgctactgattgtcacattgtgtctcagattagctttattgcattatatattcagccacgtacagctcgctgaaaccagcatccagagtcacctctcagctctctgcaggctttagaatgtttttgggattgtgaatttcttatagaatgggacaaaattttcattgaacaactggcaactttcattggacaactgacacttmacaactaaggaaaagaacctcaaaagcactgtctgccaggaatataaatcaccactgatcaatttcaatgacttccagtgcatgaatcattttagtaataaaactgtttgggaaaa

SEQ ID NO: 178067 - DNA, 427 bp, Homo sapiens
tcaacggtaactttccattgatatgacatgattttgacatgaaaaactgagtggctgggggtaccatttactgatcgagggaactctaaagaaggagcttttgggaggaagagaggataaaattccatttggtacatactgaatttgaggcacctgagagatccaaaggtaaaagctgcgttggcagctgaaaatatagatcccagcaggggtgtctaatcttttggcttccctggggrccacacaggaagaaggggaattgtcttgggccacacataaaatacactaacactaaccatagctgatgagctaaaaaaaaaaaaaaaatcacaaaaaaaatctcataatgttttaaataagtttacagatttgtgttgggccatattcaaagccgtcctgggccacatgtggcctgtgggccgcaggt

SEQ ID NO: 178068 - DNA, 578 bp, Homo sapiens
tttaatagggttgttttttgcttgttcacttgtttaagttccttatagattctagatatgagacctttgtcagatgcatagtttgtgaatactttctcccattctgtaggttgtctgtttactctgttgatagtttcttttgctgtgcagaagctcttcagtttaattacgttccatttgtcaatttttggttttgttgcaattgcttttgaggacatagtcatatatcctttcccaagacccatgtctaaaatgtttcttaggttttcttctaggattctcacagcttaagatcttacacttaaatctttaatccatcttgaattaaattttatatattgtgaaaagtagggatccagtttcattctctgtatrtggctagccagctatcccacaccatttgttgaacagggagtcatccctattgcttagttttttgtcaactttgttgaagtttagacggctacaggtgtatggctttatttctgggttctctattctgttccattagtctgtgtctttttttgtactggtatcatgctgttttggttactgtagccttagactatagtttgaac

SEQ ID NO: 178069 - DNA, 578 bp, Homo sapiens
tttaatagggttgttttttgcttgttcacttgtttaagttccttatagattctagatatgagacctttgtcagatgcatagtttgtgaatactttctcccattctgtaggttgtctgtttactctgttgatagtttcttttgctgtgcagaagctcttcagtttaattacgttccatttgtcaatttttggttttgttgcaattgcttttgaggacatagtcatatatcctttcccaagacccatgtctaaaatgtttcttaggttttcttctaggattctcacagcttaagatcttacacttaaatctttaatccatcttgaattaaattttatatattgtgaaaagtagggatccagtttcattctctgtatgtggctagccagctatcccacaccatttgttgaacagggagtcatccctattgcttakttttttgtcaactttgttgaagtttagacggctacaggtgtatggctttatttctgggttctctattctgttccattagtctgtgtctttttttgtactggtatcatgctgttttggttactgtagccttagactatagtttgaac

SEQ ID NO: 178070 - DNA, 578 bp, Homo sapiens
tttaatagggttgttttttgcttgttcacttgtttaagttccttatagattctagatatgagacctttgtcagatgcatagtttgtgaatactttctcccattctgtaggttgtctgtttactctgttgatagtttcttttgctgtgcagaagctcttcagtttaattacgttccatttgtcaatttttggttttgttgcaattgcttttgaggacatagtcatatatcctttcccaagacccatgtctaaaatgtttcttaggttttcttctaggattctcacagcttaagatcttacacttaaatctttaatccatcttgaattaaattttatatattgtgaaaagtagggatccagtttcattctctgtatgtggctagccagctatcccacaccatttgttgaacagggagtcatccctattgcttagttttttgtcaactttgttgaagtttagacggctayaggtgtatggctttatttctgggttctctattctgttccattagtctgtgtctttttttgtactggtatcatgctgttttggttactgtagccttagactatagtttgaac

SEQ ID NO: 178071 - DNA, 540 bp, Homo sapiens
cacacaattgtcaacacatgtttgaccagaaacaaacaagtggagtgacctaagcctttggtacagcgaagaaggctctggagtcaggatgcttgggttggtatctaggttctgtcacttactagatatgtgaacttggctggatctcagcttcctcatctgcaaaatgagaaaatcattttgaatggatagaattgttgagttaaactaatkacgttaaatcatgtgatgtagcacctctcaaactctaacaagcacacaagtcacctgggatcacattaaaacgcaggttcttagtcagtaggtctagggagtaacctgacattctgtatttctaacaagctctgggtgatgcctgctggtctccaggccacacttggagttatgaggatgcaaagtgcctgctatgtgagaaacattcgatagtgttagttattgctatccttcaggtggatttctccctctttttctttcctaccacacccccaatgctctcgcacacctgatcgtcttccttctttccttctgctttcaagaagg

SEQ ID NO: 178072 - DNA, 540 bp, Homo sapiens
cacacaattgtcaacacatgtttgaccagaaacaaacaagtggagtgacctaagcctttggtacagcgaagaaggctctggagtcaggatgcttgggttggtatctaggttctgtcacttactagatatgtgaacttggctggatctcagcttcctcatctgcaaaatgagaaaatcattttgaatggatagaattgttgagttaaactaattacrttaaatcatgtgatgtagcacctctcaaactctaacaagcacacaagtcacctgggatcacattaaaacgcaggttcttagtcagtaggtctagggagtaacctgacattctgtatttctaacaagctctgggtgatgcctgctggtctccaggccacacttggagttatgaggatgcaaagtgcctgctatgtgagaaacattcgatagtgttagttattgctatccttcaggtggatttctccctctttttctttcctaccacacccccaatgctctcgcacacctgatcgtcttccttctttccttctgctttcaagaagg

SEQ ID NO: 178073 - DNA, 540 bp, Homo sapiens
cacacaattgtcaacacatgtttgaccagaaacaaacaagtggagtgacctaagcctttggtacagcgaagaaggctctggagtcaggatgcttgggttggtatctaggttctgtcacttactagatatgtgaacttggctggatctcagcttcctcatctgcaaaatgagaaaatcattttgaatggatagaattgttgagttaaactaattacgttaaatcatgtratgtagcacctctcaaactctaacaagcacacaagtcacctgggatcacattaaaacgcaggttcttagtcagtaggtctagggagtaacctgacattctgtatttctaacaagctctgggtgatgcctgctggtctccaggccacacttggagttatgaggatgcaaagtgcctgctatgtgagaaacattcgatagtgttagttattgctatccttcaggtggatttctccctctttttctttcctaccacacccccaatgctctcgcacacctgatcgtcttccttctttccttctgctttcaagaagg

SEQ ID NO: 178074 - DNA, 584 bp, Homo sapiens
aaattaagaaaatgaagagaagggacatatctaaaatattagatcctgcacatgtatcctggaacttaaaataaaattttaaaaaataaaatgaaatactagaaaaaatgtctcctaaataaaagttatatgtaaacagagaattatttttgcccagtaaaataaaaattttgaaagatccacaactaagtacatgataccaagaataaggaaatataaaaagcatccataatgttgaggtggggggcagagtaactacctacaagacaagaaatgtgctgacatcagacttctcatgagcaacacaggatgtcagyagaaacaggtgggaaaatgatttcttgaagatggaattgtatacccaaacaagctgtcaatcaaatgtgattggcctaaataaagacatttttggataaacaagccttcaaaaaaccgcttctgactttcttaaccaattactttgggatctactccgtcaaaaatggatgagaacaacccagaaagaaaaagactgggatccaagaaacagtgggttcaacctaggaaatatgtacagaaaaatcccagaaggatagctatatagg

SEQ ID NO: 178075 - DNA, 656 bp, Homo sapiens
ctccatgcctggaaggctccctgactcttaacttatcgggctgatttgtgaatttcacaattcaaaaacagcctttgttactgtgggggctaagggaaaattttcccttcgccttctgaaggtccactgaaaatcactgacaagaggcagattaatagtagaaaacgaacagaaatttatttgatcagagttttacatgacatgggggccttcagaatgaagacccaaagatggaggggaaattgttattatgcttaggttcaataaaktatgaacagtgtagaaatatgattggacaaaaaggctataatctcatgctaatagactaagtgggggaacccagcaaggcctgtctgtctggattcttcttagcccctctgagcatgcatttcttccttctgggtatgggcagaaccctctctggagtgagggtcttatgacctacagccaaacaagctaggtcagataacttctttgtgcccggtttttacacagaaaggtggggagagatagagtaatatttttagttttcctgtctgcctttggggaaaaggggttctggtttctatgacccaccttgggaaagagactaatttccatgggtagcctttgggggaaatgggactgagaggcaagaagacaggaggtcatagaaa

SEQ ID NO: 178076 - DNA, 495 bp, Homo sapiens
cctggacgacagaggaaggctccatctcaaagaaaataataattaaaaaataaaaataaaacatacatacacaagggcagaaatcattgcttctttggaatagtcctaccacacagtaggtgctccataaaaattcagtgaattaataacttaacttgaatatagtattaagactaatcctttatccacataacagattccctccaccaaaaaaattagcaattttgtggttatctctttatattttcctcatataattttagaatcaaacagagcctgctccacccataatgaaartcaaggaggaaagtacattggaaatgaggaataattaaaacaactgtattaggcagggctctccagtgaaatagaaccaataggagattagatagatagatagatgataggtagatagatagatagacagatagatagatagatagatagacagacagatagatagacagatagagtcatgcatcgcttaactacagc

SEQ ID NO: 178077 - DNA, 469 bp, Homo sapiens
gcgaacatgtcatctcagcatgcaattaatataaaaaaaattggatattcttttttttttcccatattaagtctttgagatctgcatgtgctttctccccacagcacatctcagctgaggctaggcacatttcaagtggtcaatggtgaagcaatgaatagctgagctctagagcctgtgtgccctacctgcccatccatcacacagtgcctgttccccacccgtaggaasagctccgatgattcagtcccctcctcacacatctcgccaagtctccttcctacttcccaacagaagcccgtgccctcagcccctctctcttcaccttaacatctccttccagattccaggccgtagctcacatggctgactccacctataatatcccaccctgagctacaagacatgggagcattaacaacgaaagcaaaggaaacaattccaactagatggatgaatggtaaatgca

SEQ ID NO: 178078 - DNA, 469 bp, Homo sapiens
gcgaacatgtcatctcagcatgcaattaatataaaaaaaattggatattcttttttttttcccatattaagtctttgagatctgcatgtgctttctccccacagcacatctcagctgaggctaggcacatttcaagtggtcaatggtgaagcaatgaatagctgagctctagagcctgtgtgccctacctgcccatccatcacacagtgcctgttccccacccgtaggaagagctccgatgattcagtcccctcctcacacatctcgccaagtctccttcctacttcccaacagaagcccgtgccctcagcccctctctcttcaccttaacatctccttccagattccaggcygtagctcacatggctgactccacctataatatcccaccctgagctacaagacatgggagcattaacaacgaaagcaaaggaaacaattccaactagatggatgaatggtaaatgca

SEQ ID NO: 178079 - DNA, 581 bp, Homo sapiens
tggcattgggagactgatagtctgaaccaatttacaatgttgatggcactgtaaattgattcaatcttttctgagattaacttggcaatgtytaacagcaataaaatggtccatgcccttttatacaattattttggcatttattctgagagtaatacatgcacgtcctcctgtatactttaagccatttctagattacttttaatacactcacatatcaacttgtgcaaagatgtttctgacagagaattaaacaccccaaactttttcacttatttaacaaatatttattgaatacctgctatgtgctaagcaaggattcagcaggagaaaaaaaaattaaagaacaaagatgatctctgctttcatgaagaagtttcatgcacaattatcttgagtgcaacagaagaatgaataatgaaagccaagtacataatgttgaattgtctagtagtctaatagctacattaaaaaggtaagaagaaacaagaaaaattactttaaataatatattttatttaacccaatatattcaaaatattatttcaacatacaatcaaacataataaatcaattaataa

SEQ ID NO: 178080 - DNA, 581 bp, Homo sapiens
tggcattgggagactgatagtctgaaccaatttacaatgttgatggcactgtaaattgattcaatcttttctgagattaacttggcaatgtctaacagcaataaaatggtccatgcccttttatacaattattttggcatttattctgagagtaatacatgcacrtcctcctgtatactttaagccatttctagattacttttaatacactcacatatcaacttgtgcaaagatgtttctgacagagaattaaacaccccaaactttttcacttatttaacaaatatttattgaatacctgctatgtgctaagcaaggattcagcaggagaaaaaaaaattaaagaacaaagatgatctctgctttcatgaagaagtttcatgcacaattatcttgagtgcaacagaagaatgaataatgaaagccaagtacataatgttgaattgtctagtagtctaatagctacattaaaaaggtaagaagaaacaagaaaaattactttaaataatatattttatttaacccaatatattcaaaatattatttcaacatacaatcaaacataataaatcaattaataa

SEQ ID NO: 178081 - DNA, 581 bp, Homo sapiens
tggcattgggagactgatagtctgaaccaatttacaatgttgatggcactgtaaattgattcaatcttttctgagattaacttggcaatgtctaacagcaataaaatggtccatgcccttttatacaattattttggcatttattctgagagtaatacatgcacgtcctcctgtatactttaagccatttctagattacttttaatacactcacatatcaactwgtgcaaagatgtttctgacagagaattaaacaccccaaactttttcacttatttaacaaatatttattgaatacctgctatgtgctaagcaaggattcagcaggagaaaaaaaaattaaagaacaaagatgatctctgctttcatgaagaagtttcatgcacaattatcttgagtgcaacagaagaatgaataatgaaagccaagtacataatgttgaattgtctagtagtctaatagctacattaaaaaggtaagaagaaacaagaaaaattactttaaataatatattttatttaacccaatatattcaaaatattatttcaacatacaatcaaacataataaatcaattaataa

SEQ ID NO: 178082 - DNA, 589 bp, Homo sapiens
gtcattttcctataacatgatccaaggaaattcatttcatcttggaagtggactaggctgatgtgcagagaaacctgattcagtcccagggaaagccagatacatagggattaaggatttgtggttgttaagagaacagaacttggcctcagatcccctgacttctcctctctctgtcttttactggtgagatacagtttggtaccagttcccaacctcttaaayctcaactgcaaaattaggaaataacagtgtcaaattttattgtttaaagtattattttattataacaccaacaaaagcttgcctttctcaggtaagatatcccagttcctgaagatgaaaagaagaaaacctgattctgggtataaaattctgtttctgtcatcagtgaacttcaacttggtcccctggcctcttcctcttgggatttgcttgctttatccttgtaaaatatctgtttcttctctcctaattaactttcttatcaccatgacactaaagaaaaaggtcattctcaggtcatcaaatgccactctcttgaaatctttatttattcaagaagctctgtaaattaagacagagcaag

SEQ ID NO: 178083 - DNA, 569 bp, Homo sapiens
aggcagaagtccttgctcagaaattgtatatctgatgggcacggtgactcacgcctgtaatcccagcactttgggaggccgaggtgggtggatcacaaggtcaggagttagagaccagcctgaccaacatggtaaaaccccgtctctactaaaaatacaaaaattagccaggcatggtggtgggcacctgtagtcccacctactctgaaggctgaagcactagaatcgcttgaacctgggaggtggaagttgcagtgaaccgagatcgcgccactgcactccagcctgggcgacagagcaagattccatctcaaaaaaaaaaaagaaaaagaaaaagaaattgtatatctgacgggatggtccgcaagcttcggggcttgggaggaaggtacagtcataggacagaacacagctttagactgggtcaagatcgtccaagtctggtggtggcttcagaaggccctttgaatgaggctcgtccaggcaataattaccatgttatctaattttgcccrcttaacgtttccacttggatgtctaagagccatctcaaagccccacgtggccaa

SEQ ID NO: 178084 - DNA, 562 bp, Homo sapiens
ttcttctacaatgtctgaagaagtgacctacgcgacactcacatttcaggattctgctggagcaaggaataaccgagatggaaataacctaagaaaaagaggtaggagttcagagaagaccagctgtgtccttgggggagtggacaggtgttaaatgctttgaggtgccagctttaatactggcgttaaagacatgtgctgtgaaatctccaaaatggggacaaatagttgtggratgtattagaaaagtgagtgttcccaaggttgaagtgaaaatatgtggctttcagaacctctttaaagttgtgtgatatcacacagtcagagaaattctgactgcacatgccagaaattgagcttggggaattagagatttcttcttatgaatataatccttgatatttataccttgttagagatgccaggaggatattctttcagaaaccagattggaggcttctaaaatagagaaggtagaggacgtttttcttttagatgatgtaagttacttaagagaaaactggaagatgagtgagtggattagaaatagatcagagctaat

SEQ ID NO: 178085 - DNA, 426 bp, Homo sapiens
ctaattcacagtatttagaaatttaattatatttttcatcttcagtaaaagttaggtgactcaattttatatccccatcaacagatattatttactgaaatataattcaaaaacaacattaccattaatgataattgctcaaatttcttgagttactgagaaaaatgtcttatatgaatgttctcatctagcctcacaaacaccccctataaggtagatattattatctcattttacaggtagggaactgaggcctagcaggtttagacagcttattcaggaacacacagctactattagcaatagttactaatgaactattagtaactccccaggattgtgtttctccatgtctttatatagaatgattggatggagagtattgaaaaagagagagagagaaatarttattaatagtaaccataa

SEQ ID NO: 178086 - DNA, 505 bp, Homo sapiens
tattattcggtcttaaaattatacctggggacaaaggggaatagccatactatggccctatgattgtctcagaatcatttcactgaatttctttgctttctcaaataaagactcctttctttcattattattatactgtcacgtgtgcactagggtgatatttaaatatttaaaaactagggtgatatttaaatatttaaaaacacaggccacagcactagaacaaggtccaagagatgcctgttgtgatagttgctgggtcatgtggaggtctgggggatcccaggctaagggtcctggtagctggggctgcagcactgtatcaactgatttggaaatattttattttagcaaatgtttgtaccactgtgaaccagctaagtgtcrccctgcacttgcaaaatagcttttcttctccaacaaccctatgaaaataagcgttcttattaatctttaaaatttagataatttataatctaggcataataatttaatatttactttt

SEQ ID NO: 178087 - DNA, 590 bp, Homo sapiens
ctttccccgtcactcatttcagggcagccacgctcatctccttctgaacctcaaagactcgggggaagctcgctcggactttgagcacttgctcttcttgttttcccaagttatcttcctggcttgtcccctcmcctccctcaattcaggtcttttccttcccttatcactttactaaaaaataaaatattcttcccactctcagtactctcttcacagcttatatttttcttaacactcaccacaatctaacagacttactattttacttctcttgtctattttctatccacaactagaaagcaagtcctacaatggcagaagattttgatgttttgctgtgtctctagtacctagaacagtgtcaggcacatggtagaaactcagtgactatttgcccagtgaataaattgctatttcagtgtgaccatcagtcatgcaaacatggtgttccaagacctcaccgattgacaaacaaaatcattaccatggaaagaaccctgcagccagttattgttttttccaccaggaagcctctagcaaagtcagatatagtctgaactgtttccatcaacacagacttttgtata

SEQ ID NO: 178088 - DNA, 590 bp, Homo sapiens
ctttccccgtcactcatttcagggcagccacgctcatctccttctgaacctcaaagactcgggggaagctcgctcggactttgagcacttgctcttcttgttttcccaagttatcttcctggcttgtcccctcccctccctcaattcaggtcttttccttcccttatcactttactaaaaaataaaatattcttcccactctcagtactctcttcacagcttatatttttcttaacactcaccacaatctaacagacttactattttacttctcttgtctattttctatccacaactagaaagcaagtcctacaatggcagaagattttgatgttttgctgtgtctctagtacctagaacagtgtcaggcacatggtagaaactcagtgactatttgcccagtgaataaattgctatttcagtgtgaccatcagtcatgcaaacatggtgttccaagacctcaccgattgacaaacaaaatcattaccatggaaagaaccctgcagccagttattgttttttccaccaggaagcctctrgcaaagtcagatatagtctgaactgtttccatcaacacagacttttgtata

SEQ ID NO: 178089 - DNA, 487 bp, Homo sapiens
aaaggcaatatcttgctggctaattcctctgagtatttcaaagcattgtcatcatagcaggagctgtgaatggtaatcatggttcatctttaaaggagaggagtaaragtgcttaaaaagcaaaagatctttttttatcccttagagtaataaagcattcatcacatccaaccccacccgaactccagtctgatagaactcagcttgttttctgccagattttatcattatttctaaaatgcagttcctgaaaaaaaaaaaaatcattcacagacttttaacctagatattgatttgagagtttttaatagtctgtaattaagataaaaatttggcatgcttgattggttttctccatcaccatttattaatagctgaatattggatttggaaccagtagattgaatggttcttcctatatgccacctgctgatgctgagaaagagaatgttctaattctgccctttatttatgacagcgtataagc

SEQ ID NO: 178090 - DNA, 370 bp, Homo sapiens
ttataactaccaatcttgtggggatcactgtagggaaaattaaatgttaagaaattagtaaggagcctaccacatagtatgtactccacatgtgttcattagtatcattggcagttattattattcattttgttatcagtatcacagccccagggatgctcaattcattgtaattacaattcatattattactcattatcgtgtgcctggcaaatggcaagtgccacttgacctcccattgctcagtgtgtgatttttgggtttcagtrtggtggactgtaggatggcacccacacaaagaggcattctgcttggatgtcaaaggaaaggaacctgtgagaggcatttttgaggttgatcgggtcatttt

SEQ ID NO: 178091 - DNA, 422 bp, Homo sapiens
ttttttattaaagttttgaaaactttgtctctctcrgaggtcatcaaaccatcaagaattgatattttgcatatagtataaggtaggaaaatacaatttcattttcccttatatggttggtcattatttaaatataattttatttagtccaataactacattttatcatttccatctaaatcttgactagaggcttttttgggaagtggaaagggcaggttgtacaagtcatgttaattttatcctcccaacttgtgtaaatgggagcctgtgcttagggatttggtgagaggagagatccttcctcccatactccctcctttccagctccaactgtctcaagtctgagacaggccatgactttcttctcattgcaagttcattaatcatctaaggaggatgtcaacctttgggttgtggga

SEQ ID NO: 178092 - DNA, 620 bp, Homo sapiens
ccaactcatcacctgttaagtcacatctttgtttaattttcaaaaatgaaatgattcatagtcatttcattcatgggaattggtgccagtttatttctgggagttcaattgccagcttctggaattgagacacaaatatcttaatataaacaggctatatgcaggagctttcaatcttctttccccttggaaaagcaccagtaatttcatatttggtctaataaatcagtttccggaagaatgtttgctgacgtcattttttatatccctcatggattttatatggaaaaacagcctggtcatgttcaaagcaatagattagttctggtagtgtctttcggcctgtgggagccctcattcctctgcaatcacggtttgggagtggttctatatcctgatacaagagaaatgcttttgtgaaaggcagmtttggaggtatgttgagcagagaagctggaaactgatctccttaaaacattgatttcatcatgtctgtgtttaagttgtggctgcagtttgctattttcggagacaaggccaatgtcagcctgtattcaaagctctctgtagtaaagcaatttatacttactaggtgaaccacactgcaaaggcccttctac

SEQ ID NO: 178093 - DNA, 525 bp, Homo sapiens
tctctacaaaaaaaagcaaatgggcatggaggtgcattcctgtagtctcagctacttgggaggctgaggtgggaggattgcttgagcctgggaggttgaagctgcagtgagctatgattgcaccactgcactccagcctggatgacagagtgaaagaaaagataaaataaaagttgatgatgttctactttttaattcaatttctttaatattagtttgttcctttataaccaagcatcagtttggcgtcttgaccccaatgacctcagttgatggcaaaggctctgctatttttgttttcagacaggatttcactctgtcacttatgctggagtgcagtggtatgatcacagctcactgcagscttgacctcctgggttcaagtgatcctcctacctcaccttccagggtaactgggactacaggcatgtgccaccaccccaggctaatttttaattttttgcagaaacagggtctcactatgttgcccaggctgggatgggctacttttgacatacctaatga

SEQ ID NO: 178094 - DNA, 427 bp, Homo sapiens
cagaattctaagatggtccccaagattcctgcaacctggtttaacactttctatataatttcttccctttaagcgtaggtgggacctatgaatatgatgatgtcactttagcgattaggttacattatatggcaaaggcaaagggatttcacagatggaattaaggtccctagtcacttgattttgacttaatcaaagkggattatcctaggtgggcctgacctaatcagatgagccctttaaaacagggatttagccttcctgagtccagacatttggagtagcagatgtactcttgctggttctgaagaaataaactgtaatgtgatcagaagaaagagcatgcggtgagaatatgagagtgacctctaggagctaagaggtggtttccagccagtaagtaccaagaaaaatggggaagtcagtc

SEQ ID NO: 178095 - DNA, 429 bp, Homo sapiens
tgggagatagtgtctcgataggccactgtgtggctaaaaaacattaatttggcctaactgatcagacaccgacttaaaacaactgatcaagataaagtcctccagcaataagacatatcaagatcattactcctggataatgatmccttgagaaagatataggtgtatttttgtagtgctcttgccaaaaacacacagcctcaatccaatcatgagaaaacattccaaattgaatgacattctacaaattaactgactggtacttattaaaagtgtgaatgtcacaaaaaaaaaaaaaaggaaagactgaggaactgttatagacttatagactgaaagaaactaaggagaaataaataaatgcaatctgggatcactgttagcatcctagcacagaaaacaggcattaatggaaacattgatgaaatt

SEQ ID NO: 178096 - DNA, 429 bp, Homo sapiens
tgggagatagtgtctcgataggccactgtgtggctaaaaaacattaatttggcctaactgatcagacaccgacttaaaacaactgatcaagataaagtcctccagcaataagacatatcaagatcattactcctggataatgataccttgagaaagatataggtgtatttttgtagtgctcttgccaaaaacacacagcctcaatccaatcatgagaaaacattccaaattgaatgacattctacaaattaactgactggtacttattaaaagtgtgaatgtcmcaaaaaaaaaaaaaaggaaagactgaggaactgttatagacttatagactgaaagaaactaaggagaaataaataaatgcaatctgggatcactgttagcatcctagcacagaaaacaggcattaatggaaacattgatgaaatt

SEQ ID NO: 178097 - DNA, 321 bp, Homo sapiens
aatttgtttgaatgctttttggaaaacttcaaaagataatcaattcttttcacattgcaatgatttgagaagtaggttgtttattgatatatcatagatacccatattttgggagaacatgtgatattttgatatatgtatacaatgtgtgatgatcaaatcagggtaattaggatattcatcacctcaaacatttattatttcttttgaaacattaaaattcttctcaagaaktagttttccttttttttttttaattagtaggataatttctggcttaggatctagttctttagctaattaaaaagcaattgcctgtcc

SEQ ID NO: 178098 - DNA, 619 bp, Homo sapiens
aggaaagggcaaaacagccctatggcccttgacaaaccagcagggagaggcgctggagaggaaatgagtgccgaggaccaggaaacaaaacaggctgttgctaaaacagaggggagagtgtgtgtcgcccaatccgacactgggttgagctaaagctgacttcccacgcttctctgtgggaggcaggggatccaggagagagtcggtytgggggaatcatttccttccccatggcactgcctggataggatgggcaggaacctgcctctcccccccaggaatggctgtacttgggaaaagcatttagaaagttccacagcggttttaacaaggcacagaaaaagaacgccccatggcccgcagtcaaacctctatagagagtcctctgaacttccaaaaaagcaaagagctgttttctacgtgtttcatttgatgaaatgatggtggaacatttttgttttacttacttggtattaatcatgccatcgtgtacatgggcatcctcacagcaagctttcacttctttcttcattgctactcaacatatttgaaatgaaacttcttctgatccatgaaaggggtctccatttctttatcttcttagtaattttcagctcat

SEQ ID NO: 178099 - DNA, 619 bp, Homo sapiens
aggaaagggcaaaacagccctatggcccttgacaaaccagcagggagaggcgctggagaggaaatgagtgccgaggaccaggaaacaaaacaggctgttgctaaaacagaggggagagtgtgtgtcgcccaatccgacactgggttgagctaaagctgacttcccacgcttctctgtgggaggcaggggatccaggagagagtcggtctgggggaatcatttccttccccatggcactgcctggataggatgggcaggaacctgcctctccccmccaggaatggctgtacttgggaaaagcatttagaaagttccacagcggttttaacaaggcacagaaaaagaacgccccatggcccgcagtcaaacctctatagagagtcctctgaacttccaaaaaagcaaagagctgttttctacgtgtttcatttgatgaaatgatggtggaacatttttgttttacttacttggtattaatcatgccatcgtgtacatgggcatcctcacagcaagctttcacttctttcttcattgctactcaacatatttgaaatgaaacttcttctgatccatgaaaggggtctccatttctttatcttcttagtaattttcagctcat

SEQ ID NO: 178100 - DNA, 619 bp, Homo sapiens
aggaaagggcaaaacagccctatggcccttgacaaaccagcagggagaggcgctggagaggaaatgagtgccgaggaccaggaaacaaaacaggctgttgctaaaacagaggggagagtgtgtgtcgcccaatccgacactgggttgagctaaagctgacttcccacgcttctctgtgggaggcaggggatccaggagagagtcggtctgggggaatcatttccttccccatggcactgcctggataggatgggcaggaacctgcctctcccccccaggaatggctgtacttgggaaaagcatttagaaagttccacagcggttttaacaaggcacagaaaaagaacgccccatggcccrcagtcaaacctctatagagagtcctctgaacttccaaaaaagcaaagagctgttttctacgtgtttcatttgatgaaatgatggtggaacatttttgttttacttacttggtattaatcatgccatcgtgtacatgggcatcctcacagcaagctttcacttctttcttcattgctactcaacatatttgaaatgaaacttcttctgatccatgaaaggggtctccatttctttatcttcttagtaattttcagctcat

SEQ ID NO: 178101 - DNA, 568 bp, Homo sapiens
ttaagcaaacaaaatggctagcctaaaattcttctctcattctctgtggaaggcaaataaaatcccactacaatgaaacagcttaaattaatggctcctttttcctctgtttgaaatatgcctgtggataatatgaaataaaacaggaagttgccatgaagaggcccatggaattagcaattactttttcagttggcaattaattttaaatagactccctaattacttctgttttaagtgccttttaaaagttcttcattgggtgatgactaaaactggcacattcccatgggcagaataccagctcctggggtcagtcagtagcccctcggttttttgaagtcaaaaaacacagaaggtaacatcagtcacagagtccaggagaccctgatkactgcaccaaaaatctgttgaggacttcccaattgggctggctgtagctctgctgggtaggagcaacaacatgattgtgggctcccatgcaaaataaaaatacagggactcttgtttaaacagtattaagacactcaacacaagccagaagagagcactaagtgaaacacagggc

SEQ ID NO: 178102 - DNA, 634 bp, Homo sapiens
tgttgaggccctaatctccactgagactgctttggagataaggcttttaggaggcaattaatgttaaatgaggtcttaagggtggggtcctaatgtgataggattagtgacccataagaagagaagaaagacagatctctctacatccaggtgcacctaggaaaggccatgtgaacacaatgggagaaggagctgtctacaaaccaaggagagagccctggacaaaacctgaccaatgctgacaccctgaacttaaattcccagactccagaactgtgagaaagtaaatgtttgttgtttaagtcatccagtctcaggtacttcgttatggcagtctgagmagactaatacagaaagcattgtcaagatggatgccacagtcttcttataacctaatctctgaagtgatatcatcacttctgctatatcctgttcattagatgtgagtcagtaagtccagcccactctcaagggaaggggtgtgaatatcaggaagtggggaatcactggggttatcttagaggctgctaccataacggaggaatattggcatctttattttcattaacctctaactggctttagtgtcacattctacaataaatgtaggcaacaagtcactgtggtatgaaca

SEQ ID NO: 178103 - DNA, 181 bp, Homo sapiens
tgggagttattagacctactgcactagattttgttatttaatatataaaaagaaattcacattactatacaacaacttaaaaaatgcttggacaaaactattttatttgtaactttttgtattttrttttatgagatgtaaaatattattctgagaggtgatccacaggtattaccaaact

SEQ ID NO: 178104 - DNA, 593 bp, Homo sapiens
gtttggaaatggaagcagttctttttaagcactgtatcagagagattgtcttgtacgtttgcctgttgcaaacaggctggtttgtaaaagatgtatgttttggtgtttgaaatgtttataaaattgtatataaatggtttcaattttccaggcttttgtagatactatatttgatgcctatcaggatgctttaatttggggggtcgaatataattgtaagtcatccacgctgttggtctgcaaacttttgaggtaactacacacacacacacacacacaaggattttagatttgaaaatgatgttttttactcatttcaaaatgtactgtaacctttctttggttcttactgttttcatttaactttctctgttttcaagaaaarttgtctttattgacatttgtaaaaaagaatgtgttttgcccagttattaagtattttatttttatgcaatttcagaatcacaatgaggtatgccatttcttcatatacatgcacattcacctcaacttgcacacacatcacacaccaaaccttatgcaaaggggaaagctaacacttagagtggattttgtcccttaaggaaatggat

SEQ ID NO: 178105 - DNA, 593 bp, Homo sapiens
gtttggaaatggaagcagttctttttaagcactgtatcagagagattgtcttgtacgtttgcctgttgcaaacaggctggtttgtaaaagatgtatgttttggtgtttgaaatgtttataaaattgtatataaatggtttcaattttccaggcttttgtagatactatatttgatgcctatcaggatgctttaatttggggggtcgaatataattgtaagtcatccacgctgttggtctgcaaacttttgaggtaactacacacacacacacacacacaaggattttagatttgaaaatgatgttttttactcatttcaaaatgtactgtaacctttctttggttcttactgttttcatttaactttctctgttttcaagaaaaattgtctttattgacatttgtaaaaaagaatgtgttttgcccagttattaagtattttatttttatgcaatttcagaatcacaatgaggtatgycatttcttcatatacatgcacattcacctcaacttgcacacacatcacacaccaaaccttatgcaaaggggaaagctaacacttagagtggattttgtcccttaaggaaatggat

SEQ ID NO: 178106 - DNA, 593 bp, Homo sapiens
gtttggaaatggaagcagttctttttaagcactgtatcagagagattgtcttgtacgtttgcctgttgcaaacaggctggtttgtaaaagatgtatgttttggtgtttgaaatgtttataaaattgtatataaatggtttcaattttccaggcttttgtagatactatatttgatgcctatcaggatgctttaatttggggggtcgaatataattgtaagtcatccacgctgttggtctgcaaacttttgaggtaactacacacacacacacacacacaaggattttagatttgaaaatgatgttttttactcatttcaaaatgtactgtaacctttctttggttcttactgttttcatttaactttctctgttttcaagaaaaattgtctttattgacatttgtaaaaaagaatgtgttttgcccagttattaagtattttatttttatgcaatttcagaatcacaatgaggtatgccattkcttcatatacatgcacattcacctcaacttgcacacacatcacacaccaaaccttatgcaaaggggaaagctaacacttagagtggattttgtcccttaaggaaatggat

SEQ ID NO: 178107 - DNA, 454 bp, Homo sapiens
caactttgtgttgcttttacagataagaaaattgagttycagggcagtaagttaatttgctagcattccacagacagagttgggtttggaaccaggtctgtgcttctcaaaatggaggctcttaggcccaggggtaatggataaggtgttctgcataaaggtggtgtatccttctacagaatttattttattcagatatttgggtaaaaatatcatttttatgttaagcatagtgatatattagtgcctcagaatgcaacactcatattggtttttatagtaaaatatgagacttcaattctgcttttcctcctgcagcataggactatctcctcaggtccctgagatatggattagcccctttggtcaggaggggtacttgggcggatgttggagaagcttctgctacactgggcagcctctcgctgtgccatgtgcctctgctcccctcacc

SEQ ID NO: 178108 - DNA, 595 bp, Homo sapiens
agacaaaggacttaataatttggtgattttatagtaatgattttctgctcaaataactcttgcttggggaatggaggcagagagagccttttcgtttatgttccacagcttgacaaccttcaggagccatggcagtgtggggagttctggtaaagcccttttagaatggaaagcttttcttctgagccatccaagtatcattcatcagcaaatatttcctgagcactttctctgtgttactgaatctccaccccratgctatagacgggcgttttcccctgagctccattttgcagatgggttggagaagtaaaatgtaggcaatggaggtggaattttaattttaaattttaaagcaagaaatttaacaagatgtgtttttttctaaaccccttctaaagacaacattcttactccagcctagacatgctgcctctttagaagtcccctaggcatcattctagtaaagcatcttcatcttagatgtggaaactgagacccaggcaagtcagattatgtctgatttgagtccaaaaatatttatatgccaagaacaatgccaaaagaatccctgccaagccagctgggttgcaca

SEQ ID NO: 178109 - DNA, 595 bp, Homo sapiens
agacaaaggacttaataatttggtgattttatagtaatgattttctgctcaaataactcttgcttggggaatggaggcagagagagccttttcgtttatgttccacagcttgacaaccttcaggagccatggcagtgtggggagttctggtaaagcccttttagaatggaaagcttttcttctgagccatccaagtatcattcatcagcaaatatttcctgagcactttctctgtgttactgaatctccaccccaatgctatagacgggcrttttcccctgagctccattttgcagatgggttggagaagtaaaatgtaggcaatggaggtggaattttaattttaaattttaaagcaagaaatttaacaagatgtgtttttttctaaaccccttctaaagacaacattcttactccagcctagacatgctgcctctttagaagtcccctaggcatcattctagtaaagcatcttcatcttagatgtggaaactgagacccaggcaagtcagattatgtctgatttgagtccaaaaatatttatatgccaagaacaatgccaaaagaatccctgccaagccagctgggttgcaca

SEQ ID NO: 178110 - DNA, 498 bp, Homo sapiens
aagtatcattcatcagcaaatatttcctgagcactttctctgtgttactgaatctccaccccaatgctatagacgggcgttttcccctgagctccattttgcagatgggttggagaagtaaaatgtaggcaatggaggtggaattttaattttaaattttaaagcaagaaatttaacaagatgtgtttttttctaaaccccttctaaagacaacattcttactccagcctagacatgctgcctctttagaagtcccctaggcatcattctagtaaagcatcttcatcttagatgtggaaactgagacccaggcaagtcagattatgtctgatttgagtccaaaaatatttatatgccaagaacaatgccaaaagaatccctgccaagccagctgggttgcacactcacacccacatacwgtaggctattataacccagaggtctgcacacacgtggtgagagcacaggcccacaacagatcctaaagattgatttgac

SEQ ID NO: 178111 - DNA, 608 bp, Homo sapiens
gagacagaaaggtcagtgaggcccacgtagagccctaagagctggtagctctgaatgctccaaacactttcccagcaattatacaaaacctcaactctcagggctatttagaaaatgatctactgacccaaggcatgctgcttccggggccagaagaaaataaaggcaggacttaggtttttgagtttttcttctttcaccatgaatatctgatttgaatgcatcgttctctaaaactgtgcaatcaaagtacttttcttattttcttttaaaaatattgctttcctttctggatcttaaattagaattctgagttgaatgaataaggagagtgggagactgcttacaaaagtaaccaacttttaaacttcgactccctgctcactcaactatggccatcaaataatacctggcaataccagacgtgggtaagtaaagccctatgtgatcattaagagaagcccactggcatttaatgttctctatttctctccttcctcacctgcctttagaactaaagcctgggccacctaatcaacttggatctgacatatcaaacaatcaaaggscagaagctggaaaggtccaccatgtactcttcaagctga

SEQ ID NO: 178112 - DNA, 538 bp, Homo sapiens
tttctttaatccataacctgtgtcttaagcatggacattttgttaggaagtctggtttattagagaagataggtttgagatgatcccctgttatgagtcatattgtttctggacttctatagatcttcctctctccaacacagaatgaagacagagcagtccaacccaatttaaacaactccttttatttcacagagactcatggactagaccattctaaagtaatgtggattattaaatgtagcattaattttatgatatcattattacttcctgtattctttatgtatttacatgcctggtttattctgatttctttacccactttccccaacagtctacctgttttgccctaacctttagatatctctaaatctggctagtcaaaatgtattttaatactcttaaacttaaaaaaaattacaaatgtacscttcttatgtttgcataccatttgaaattgttaacatctgtgttgaccaactctccgaatgtttgattcagttaacttgatcattattccataattttgtaaagc

SEQ ID NO: 178113 - DNA, 547 bp, Homo sapiens
atgcattttttataataatttgcatgattatataagccagagataaaacatgtggccatctttaaaaattaaggtcyagacacagcttatttcaccagtaaacatttttctattttacttagcagcatctaataaggaaatgtccaaattgagagatattatgtctttcagttttcctatattatatattactttatatacttttactgctatatttttgtatttgaaacaaaacatttagtataaaagttgccaaacttaaaattatacagattaacttaagaaacctcatgcagaaactttactaaaatgggaattgtgatagattcttccccttcttgattctgaagcactgtctcaaggtggaactggctcaaaagactccctccatgctcatttctcccactagaaactatatgtggtatgtttcattttaggtatctttttttccctccttgatatgttgcttaattcagcctgtcaagatcttacttatccttgaaagtgaagtttcttggaaaatccattctggaaaaaaataaaaaaa

SEQ ID NO: 178114 - DNA, 598 bp, Homo sapiens
aagatttctagtgaatcttcttgttggctgttggaagaggtttgatggtgacctcccactgtgttactcttacctctaagtactttaaaagaagtagatgagggttatgaggacagaataatctcttttcatttctctgagctacagagtagtggatttcactcctggacttgtttctgatctccctggcttccaatcattttctcttttcctatagagacctctacttggcccacagacttttctgtcttccccatagctgccagttgaatgacatctggaaggggacttggcatgcctacagagaccagcaatgtgtgcatggatgtaggaagtatagggcattcgtttatgtcrgtgttgaggattcagaaagaattctggaagaagcattttttaaactctaacctgaaggatggttacataagcatcacccagctagaaataaagggcagggacaaagatccacaaactggggagactaatgtgagcagggagctccaagtgggagtatggcttcagtgtaaggtgaagagggaaaggaggaagaagtgaagttgaggtagccagagccagattatgaagggccttaaccagt

SEQ ID NO: 178115 - DNA, 521 bp, Homo sapiens
aaacaatttctataattcctctcrtgccctgcctaggactttctagtaagataacaaagctgagtatattagaaagttctgtgtcttataaaaatgtcttggcatttttttttccaaaactctggtggtcttttaccagttctcagtatttttagaacattgtaaacagtttactaaaggcataaactatctaaatgctctgagacataattaattcagatcttatttatttcagcttaaactttgtaagagcttgtttcaaaatcatgttttccaaagttttcattattttccagttgggtaatttggttttctttgccatttaaaacatttatgtgtattagagttgtcttgttctcaaaatattttctcttagaggatggagatatttcaactttttctcttttccttaattttatgcaaagcttccttccatttcctttacttaaatcatacaaccatcttaagaaaaacagtacagattattggtctatttattttgacactgaaatgggaattgt

SEQ ID NO: 178116 - DNA, 474 bp, Homo sapiens
tcattgtatttcacagcatgagcccccaatcaagatcccgaatattgcttcatgataaatgtcacagatgaaaaaatggactggcgccaaagtcattaacacagctctggcccatcttcctgaacaatgcctctcattgctcacatttttccttgaacaaaggtaccatagaaactccgttttcaaaccaagaaactttctgtccgatatttgtataaatatgtcagctgtgaattggctgatatgccttgcctgaacaccaccctatttggattcattctgttattctgcttgtcatccctctgtgctcaccatcccatagcatttcactcttcagggtaggaaagcacctaatagagggcatgtcacatggaactgcatggccttgcccagagctctttgatgaagcagggtctaaggtgyccacagtatcagccagaagagattttttaggcaacctgcaacttcagctaa

SEQ ID NO: 178117 - DNA, 392 bp, Homo sapiens
ttgcctgcatataaatttagtttattcattcattaaatttttcaacacatacctattgagcgcctccttttttaaaaaaacatagttatgcactgggtgttagaatattaaagaaagcattgtggggctcttatgtcccagtggaaaagctgactcaaaagtaaacacaygcatacttacaatgaaacaatagatcctacttcacagtctacatccagtatcttgaggcaacaactctagaagagttgaagtcttccctgcctccctgtttagcattctatactgcctagcaggagaagataaaagagatttattgcagctgtggttcagtgaggaggggcatctgaaagctggtcgtgggattttttttttttttttttttgtagtgaatt

SEQ ID NO: 178118 - DNA, 291 bp, Homo sapiens
gctgtggttcagtgaggaggggcatctgaaagctggtcgtgggattttttttttttttttttttgtagtgaattctgaggagcagtttcatctggtcagaatgtattgagtataaaaggtaaggcaatttattcattcaataattatttatttagtgactatggtgagctaggtatcattaacactcctaagatacmcggtgaacagaacaaaagcccctgactttacagaatttacatgcttatgggagaagacagactataagcaatacatataaataaggatataaca

SEQ ID NO: 178119 - DNA, 291 bp, Homo sapiens
gctgtggttcagtgaggaggggcatctgaaagctggtcgtgggattttttttttttttttttttgtagtgaattctgaggagcagtttcatctggtcagaatgtattgagtataaaaggtaaggcaatttattcattcaataattatttatttagtgactatggtgagctaggtatcattaacactcctaagatacacrgtgaacagaacaaaagcccctgactttacagaatttacatgcttatgggagaagacagactataagcaatacatataaataaggatataaca

SEQ ID NO: 178120 - DNA, 550 bp, Homo sapiens
tctcaaacatcagctttatacacaaaagctatcatttaggattcattctggggaaggtagagtctgacttactatggagtacccaaacaccagtcagaaacagcacaaagtgctccaagaagccttgttacctgggtggagtgaacagggttccaaaggtgaggattctgctcctgccygaaacacagcaccaaaactgtgaaagacaaattgcaccagtcaaccaaggagatgactttactcaggttgttgggataaggagaatacttattaatgaggaagatctcagacaatgaaaggaatgtagggcttcatggaggcagataagcaagttcagcatttgccagtcttacaggagccatgaggaaggctggggtgggttttacccaagaatagacaagggcaggatgattctttgctgtgacaaggactccgtcgtcaaccaaactttagtcagtctcctctgaaccctcttctcaactaggcctgaaatttggcctgctgagcccaatctagcaaaaatcctgccaaaccagttcaacaagaattc

SEQ ID NO: 178121 - DNA, 592 bp, Homo sapiens
tgtgaggaatacagtgggcagaataaagatataatagcaaacatttactagtaaggttctcactatatatcagactatgccaagagtgccacgtagattatcttatttaatactcataaaaattgaataaacccatgtcctagtatcagctagggttttttcagttaggaaaactgaggctaggacaaccacagaggcaggcatttgcagagacgggatgtgggcctagtatggtctgaatgtttatgtttcccaaaaattcatatgttcaaatcttcacccttaaaatgatggggttaggacatggagcccttggaaagyaattaggctgtgagggcagagcccttaggaatgggattggcacctttataagggaggccagagagaaagccctacccccttctaccatgtgaaaccacagtgagaaagcacagcttattaagcatgaagtgagccctcaccagaaatgagataaatggcaacacaataatagcaggtgactttaatactccactgacagcactagacaggtcatcaagagagaaagtcaataaagaagcaatggacttaaactataccccacaacaaatga

SEQ ID NO: 178122 - DNA, 247 bp, Homo sapiens
tggatggtctacttctcaaattccctcatttcctattgtctttcactaggagtacatttagattcctgtcttggcaccggcaggatttgaatttataatgctatgctagaactgtccagggaaaccatcatctgcattctaagccctaggctttttaatacacgcttctttttcctcttttgggaagctttctmtgcccttcttcctttgtgttgttttactgcccttttgcatttgctttattaaa

SEQ ID NO: 178123 - DNA, 472 bp, Homo sapiens
catcaatattcatcagacatactggtctatagttttctttttataatgtgtctttgtctgtttttggtaacagggtagtgttggcctcatagaataagtttagaagtattccatcctcctctattttttggtataggcctaatagttatttacagaacattttatccaagagctgcagaaagaaaactataggccaatatccatgatgagcattgatgcaaaaatcctcaacaaaatactaccaaatcgaattcaacagcatattgaaaagatcattcatcatraccaactaggatgtatcccagggatgcatgaagagcacttgcaccctgatggttcaatagatgcaaattgggaggcagagcaaaatggcagactaggtggcatctttaggtggcagaatagaaagctcccctgttatacacacacacacacacacacacacacacacacacacacacaagttgacagc

SEQ ID NO: 178124 - DNA, 590 bp, Homo sapiens
tccccagttttatttcctattccatttccctgctccctcttggtcacactgaatgcaccattctgcatatacaatgtttccctttgcaaatggatgccttcacccttgccacttctgccttgagtgcctttccctatttcccctccccgcaaaaaaaatctcataattctttgagacccatgtcagtgttatttcctgactctttcaagtagttatgacttccataaacatgaaaggagttggtggacctcctttttagcatttccacagtgaattgtaaggcacttctcttcctatcttcacaagactrtgaattctccaagagtaacaatcctgccacagcttgcccttgtctttccaacacctggctcatcacctgtctcatagaagatgttcaatcaatgtttataaatgaaaaagaggtagatgagcaaatgcacttgggaaatttgtgagaagttcttttggctttcttctacttctcttctctttacctgatactccatttccaccagcactgtcattagccaatctccaagaccctactttctacccataccccacatatcaaggtagtctctcatccctgc

SEQ ID NO: 178125 - DNA, 494 bp, Homo sapiens
tataaaatgagataaaaaggccattatataatgacaaaggggtccattcagtaagagaacacaacaattgtaaatatatatggacccaacattggmgtacccaacataaagcaaatattagagctaaagagagagatagaacccaatacaagaccaggcgtggtggctcacatctgtaatcccagcactttaggaggctgaggtgggtggatcacaaagtcaggagttcgagaccagcctggccaacatggtgaaacccatctctactagaaatacaaaatattagctccgcgtgatggtgggtgcttgtaatcccagctactcaggaggctgaggcaggagaattgcttgaacccaggaggcagaggttgcagtgagccaagattgcaccattgcactccagcctgggtgacaatacaagactccattaaaaaaaaaagaacccaatacaattatagctggagacttcaacaccccactttcagcattggaca

SEQ ID NO: 178126 - DNA, 424 bp, Homo sapiens
atttctcctcactgggcaggaccacctgacctgggactccagcacaaccactctgcccctgtctgaccactttaatcagaggcagcccagcatttctctgagaagaaaatcacagagtcaacccacaacccctccatctctgcagttgcagtgcccttctttyctgggaacccttacctctcactctttaccacacaaggcccctggcttatgactgcagaacagtcaccccatccacagctgagcatacccactggtagtggcccagaggttccctggaaaaagtttcccagagacatctgtcagccccgctgccactgccacagcagcagttctagccctcctgcccttggtctgggaaagaacctaagggctacacatgagcttacagcacaattcagttaccatacagagaggagaacag

SEQ ID NO: 178127 - DNA, 376 bp, Homo sapiens
aatttaccttgtaagagaaaagctcaactcaaaggcagattgctagtccggactttattacaagcaggactgcaatgatgtttacagcattgaagtgagttccaggctaagtacagaaagtggcttctctgctttccctccccagcagaagtctatacaccttgcagacttgaatcactgaagatgtaaggcagctgttactcttaatattgggagacccctgtggacrgcatgaagactgtcccttatcagagtctttagtgagcactaaggagtcaagattaaagaatgtgtttgattaccctggtctgcattactatggaaaatgaaccaaggcctgggtttggatatggaagtctgtcctgcctgcttctgt

SEQ ID NO: 178128 - DNA, 601 bp, Homo sapiens
tttttctttcagcatatatttgttggaatgccaactatgttcagttcaattaatatgggcttcttaaataagggctccagcactggataatcctgccatttattttgatacattccatcctgctgctcagatctattggcatctacaggatgtcttttgagaagatgggcattcacatccctatgtcctagcaaatttccaactcagaaaaccacattaggcttctctatatatcttccaactatttcaatggaaaatacaattctctgatttcttcctatgatatttatcaaagagaatggtgcctgccagttctagggtgggggaactcaatacaaatcaccaacctttagatgacaccctgtcttcaaagtgctttcaaagtctggcagaaaaaaagtacccagtggctataagaccacccaggagttcagtcatgcattctaagtagcagatcactggaatgtaattggctagtgagttcattttactcttctcttcttggtcacatgttaccgcccttgtaccctgcaygttctctttcccagacttacaaagcatgttctcttgaattcgttctctttttaaattcacacagtct

SEQ ID NO: 178129 - DNA, 462 bp, Homo sapiens
cccagccgattaaatctattttcaacagctttcacatctagtctgcaaactgcaaattttgaagagacagcaaataagacctttgcaacaagaattttcaaagtaattcaacatttttaacatttcctttggcgtacgttacaaccattactacatgcccacattctrgtgaacattttaggtattttatgggttctatcattgcatgaaactatggaaatatatcttttcacacttaagaaaaatctaacaatacagaaaacagtcacatcaaaggaatcaaatagcaagggaacacaaaccataccttacaaattgaagatactttatattgattttctgtaaaatcactaagacagttacttgtttgcttagaaaagacccaagcatgctgccaggtaaatttaaagtattttgaagagaaaaagtgagcatgatgggtttactgcaaattttatactc

SEQ ID NO: 178130 - DNA, 603 bp, Homo sapiens
ttggtggttgatgaggccttagatagaactccaggatagatcatgataaatccagcagataaaagawgtctgtgcctgaatctggcatgaaagtcagataattctggcaaggaatctgcacttttcagaaggcagattcagattttctctttaagtatgaattttctagtttaagtggcagattataatatttctggaaagcgataacttttttatttgggtctaagaatggctccccacctcatctcctgtccccagcctcctgctctgccctgacagagaagaggcaatggaggttaattttattgctatggacttggctgcagtgcaagaggttccagtttttcagttgttatgaaaggtcgctaactagacatagacatgaccttcctcccctttatgctttttgagtttatagaaattgcgatcattgaagttgagccatttacttgtgcagatatcctaacaccctttgattccaacatttttccaggcagaagttactttgtaatcttgacctgtgttttctagtgagaatctctttcttatctgaacataagaatttataaactgcttttcactggaacgttctcttttttctac

SEQ ID NO: 178131 - DNA, 603 bp, Homo sapiens
ttggtggttgatgaggccttagatagaactccaggatagatcatgataaatccagcagataaaagaagtctgtgcctgaatctggcatgaaagtcagataattctggcaaggaatctgcacttttcagaaggcagattcagattttctctttaagtatgaattttctagtttaagtggcagattataatatttctggaaagcgataacttttttatttgggtctaagaatggctccccacctcatctcctgtccccagcctcctgctctgccctgacagagaagaggcaatggaggttaattttattgctatggacttggctgcagtgcaagaggttccagtttttcagttgttatgaaaggtcgctaactagacatagacatgaccttcctcccctttatrctttttgagtttatagaaattgcgatcattgaagttgagccatttacttgtgcagatatcctaacaccctttgattccaacatttttccaggcagaagttactttgtaatcttgacctgtgttttctagtgagaatctctttcttatctgaacataagaatttataaactgcttttcactggaacgttctcttttttctac

SEQ ID NO: 178132 - DNA, 363 bp, Homo sapiens
cacttaattatcccatgcaggaacaaaatttgcacatcatggacagacaggattttgtacaatgcacttgtaagtgtgagtgctctctcctattaatacggtaaattctacacctcattgctttaggtggaaaaatttattttacacagaagttttcactgaatctttgggccagaataggaatttaacagtcgtgcatcctatggcaacaaaaacacattytgagaaatgcattactaggcgattttatcattgtgtgaacattagaacacacataaaaacctagatagaatatccatctacagatataagctaaatggtacagcctattgcttctctgagaagttgctagcaatgtctcag

SEQ ID NO: 178133 - DNA, 398 bp, Homo sapiens
ttttaattcctcttatttccagacttttacccatatttgcctttgaaaaatacttagtcaagaaaaatcaccggttgctttatttatttatttatttattgtcaaagtctggctttgtcacctcaaactgctgggctcaagccatcctcccacctcagcctgccaagtagcagaagctacaaacaccagccaccatgccttactcattttaaaaaaatttttggagagacagggtcttgccatgttgcccaggctgatygtgaactggccacaagcaatcctcttgtctcagcctcccaaagccctgggaataaatacatgagccactatgcccagcctccttggctacttcttaatctgtaaacatagcattcttggactctaaactgcatgctaaa

SEQ ID NO: 178134 - DNA, 605 bp, Homo sapiens
tatccattctctgctttatttttccctgaagcacttcacgaacattatttattataaagtttacattttaatttgtagattgaattccmccactagattatagactcctagggtaagcgatctatttcttcttttgttcacttctgtatcattttgttgggctacagcagtaagcaacacatgataggccctcacgagaatgcaggactcctcagaaaatccatctgaaatgatcaacatgatttttttgttcccctttggcattctcacagtatcacatatcaattattattattctctactggtccctgtttatatgtccccttcagaagtgcttgagatctttgagaataaaaatgttgtttaatttacttattcagttttaggtacttaattcatatttgtgaatggattatataatcctaaattcttacctaagcattcacattctagacctggccataagtacatttatagccatatctctcaccactgcctgactctttttcatgaattaatcaagaggagttactcacatgcccaaataattttaccgcttttctaactttcagctttcttattcctaaaatcttccaacattatca

SEQ ID NO: 178135 - DNA, 605 bp, Homo sapiens
tatccattctctgctttatttttccctgaagcacttcacgaacattatttattataaagtttacattttaatttgtagattgaattcccccactagattatagactcctagggtaagcgatctatttcttcttttgttcacttctgtatcattttgttgggctacagcagtaagcaacacatgataggccctcacgagaatgcaggactcctcagaaaatccatctgaaatgatcaacatgatttttttgttcccctttggcattctcacagtatcacatatcaattattattattctctactggtccctgtttatatgtccccttcagaagtgcttgagatctttgagaataaaaatgttgtttaatttacttattcagttttaggtacttaattcatatttgtgaatggattatrtaatcctaaattcttacctaagcattcacattctagacctggccataagtacatttatagccatatctctcaccactgcctgactctttttcatgaattaatcaagaggagttactcacatgcccaaataattttaccgcttttctaactttcagctttcttattcctaaaatcttccaacattatca

SEQ ID NO: 178136 - DNA, 605 bp, Homo sapiens
tatccattctctgctttatttttccctgaagcacttcacgaacattatttattataaagtttacattttaatttgtagattgaattcccccactagattatagactcctagggtaagcgatctatttcttcttttgttcacttctgtatcattttgttgggctacagcagtaagcaacacatgataggccctcacgagaatgcaggactcctcagaaaatccatctgaaatgatcaacatgatttttttgttcccctttggcattctcacagtatcacatatcaattattattattctctactggtccctgtttatatgtccccttcagaagtgcttgagatctttgagaataaaaatgttgtttaatttacttattcagttttaggtacttaattcatatttgtgaatggattatataatcctaaattcttacctaagcattcacattctagacctggccataagtacatttatagccatatctctcacyactgcctgactctttttcatgaattaatcaagaggagttactcacatgcccaaataattttaccgcttttctaactttcagctttcttattcctaaaatcttccaacattatca

SEQ ID NO: 178137 - DNA, 327 bp, Homo sapiens
tgtagccagctatatgggagactgaggttggaggattgcttgatctgggttggttgaggctgcagtgagccgtgatctcaccattgcactccaacctgggagacagagtgagagmctatctcaaaaaaacaaaacaaaacaataacaaaaaactggccgtattcatccactcttccttattgctctaatagttgtattctaatacacaatgagataatacacaagatgaggatggttaaaagagtataatacaattaaaatataaatgactacagaattgtatgtttgcattactcctatcattgaaataacccattatgcaaccca

SEQ ID NO: 178138 - DNA, 327 bp, Homo sapiens
tgtagccagctatatgggagactgaggttggaggattgcttgatctgggttggttgaggctgcagtgagccgtgatctcaccattgcactccaacctgggagacagagtgagagcctatctcaaaaaaacwaaacaaaacaataacaaaaaactggccgtattcatccactcttccttattgctctaatagttgtattctaatacacaatgagataatacacaagatgaggatggttaaaagagtataatacaattaaaatataaatgactacagaattgtatgtttgcattactcctatcattgaaataacccattatgcaaccca

SEQ ID NO: 178139 - DNA, 573 bp, Homo sapiens
aacaaaggacataatatgcaaacacattttctaaataagttcaacccattggctggactcggtggctcaygcctgtaatcccagcgccaagacgggtggatcacaaggtcaggagatcgagaccatcctggctaatggtgaaaccccgtctctaataaaaatacaaaaaaaattagtcaggcatggtggcgggagcctgtagtcccagctactcgggaggctgaggcaggagaatggcgtgaacccgggaggtggagcttgcagtgagccgagatctctccactgcactctagcctgggcaacagagccagactctgtctcaaaaaaaaaaaaaaaattcaacccatcagccatctagaattcatataaaaatacctaaatctccagaatctgtaagaaaatgaaagtatgatggtaaattgtatgtgtcagcttgaactggtctctgtaaagtaggcttccctccccaatatgggatgtgcattttccaacccatttaaggcctgcatagaacaaagggcagatgatagaggagtgtgaccctttctgtcctgtctcactgcttaactagta

SEQ ID NO: 178140 - DNA, 573 bp, Homo sapiens
aacaaaggacataatatgcaaacacattttctaaataagttcaacccattggctggactcggtggctcacgcctgtaatcccagcgccaagacgggtggatcacaaggtcaggagatcgagaccatcctggctaatggtgaaaccccgtctctaataaaaatacaaaaaaaattagtcaggcrtggtggcgggagcctgtagtcccagctactcgggaggctgaggcaggagaatggcgtgaacccgggaggtggagcttgcagtgagccgagatctctccactgcactctagcctgggcaacagagccagactctgtctcaaaaaaaaaaaaaaaattcaacccatcagccatctagaattcatataaaaatacctaaatctccagaatctgtaagaaaatgaaagtatgatggtaaattgtatgtgtcagcttgaactggtctctgtaaagtaggcttccctccccaatatgggatgtgcattttccaacccatttaaggcctgcatagaacaaagggcagatgatagaggagtgtgaccctttctgtcctgtctcactgcttaactagta

SEQ ID NO: 178141 - DNA, 573 bp, Homo sapiens
aacaaaggacataatatgcaaacacattttctaaataagttcaacccattggctggactcggtggctcacgcctgtaatcccagcgccaagacgggtggatcacaaggtcaggagatcgagaccatcctggctaatggtgaaaccccgtctctaataaaaatacaaaaaaaattagtcaggcatggtggcgggagcctgtagtcccagctactcgggaggctgaggcaggagaatggcrtgaacccgggaggtggagcttgcagtgagccgagatctctccactgcactctagcctgggcaacagagccagactctgtctcaaaaaaaaaaaaaaaattcaacccatcagccatctagaattcatataaaaatacctaaatctccagaatctgtaagaaaatgaaagtatgatggtaaattgtatgtgtcagcttgaactggtctctgtaaagtaggcttccctccccaatatgggatgtgcattttccaacccatttaaggcctgcatagaacaaagggcagatgatagaggagtgtgaccctttctgtcctgtctcactgcttaactagta

SEQ ID NO: 178142 - DNA, 573 bp, Homo sapiens
aacaaaggacataatatgcaaacacattttctaaataagttcaacccattggctggactcggtggctcacgcctgtaatcccagcgccaagacgggtggatcacaaggtcaggagatcgagaccatcctggctaatggtgaaaccccgtctctaataaaaatacaaaaaaaattagtcaggcatggtggcgggagcctgtagtcccagctactcgggaggctgaggcaggagaatggcgtgaacccgggaggtggagcttgcagtgagccgagatctctccactgcactctagcctgggcaacagagccagactctgtctcaaaaaaaaaaaaaaaattcaacccatcagccatctagaattcatataaaaatacctaaatctccagaatctgtaagaaaatgaaagtatgatggtaaattgtatgtgtcagcttgaactggtctctgtaaagtaggcttccctccccaatatgggatgtgcattwtccaacccatttaaggcctgcatagaacaaagggcagatgatagaggagtgtgaccctttctgtcctgtctcactgcttaactagta

SEQ ID NO: 178143 - DNA, 558 bp, Homo sapiens
gccttcagactcagattgaattacacctctggctttcctaagtgtccagcttgcagattgcagatcatgatattttttgcctccacaattttgtgagccaattcttcataataaaattagtctctttgtctctctcctctctactattctattactctctctgtcactttgtttctctatctatgttggtggttctgtttctctgcaggatgatgactaatacagtaagaaaaaattacataaatatatgataaaataaatttgttaaaaatcgatatgcattaaaaattaaaagcaaataataataaaagtaaatagcaattttcttatttttaataatktatttcaaatgtacacatcagcataattttcatgattttaaattctgtaagcattaggttaaaagtcagaagcaagccaagaacagattattgttgttacttaacattcttctggatattttaatccaacacatttagaaattagaggtataaaaatggtaaacattgccattattctctgaaacttattatttatttagaaaaaacttataagtaa

SEQ ID NO: 178144 - DNA, 584 bp, Homo sapiens
tccttttctctatctttcttcctgttctcttctggttccatggagacatgacagtttacccaaatagtctgtgatgaatctgttcctgcagcctggagcccttgcccctccccaaacccttcttgcagaccctttgctgatgaggactgtggatctgcttgtttcaacctggggtccgggcctcctgtcatggccatattcttacccttagcataggtcgattctttgtatgcagcataattttcaggtgacaaagtcttgagccagagatccaatttcaccttgtattgcttctgcagytcctcagcctggctcttaaaatgatccttctggctctgcgggatggctgccagcgtctgccaatctctaccatgcgctccctcactgacaaatgttgcagctctttacttgaccaggaatcttggtgaaacttgtggtatccattcatggggggtttctgaggctctccatgaaattttaccttcttgaaaaatcgatccgtttttggaagagacctcacttcttcaatatttttctgaaacttcttttgcactttgttttgagtcctcttggagacactagat

SEQ ID NO: 178145 - DNA, 537 bp, Homo sapiens
gagcaaattattgttttatctgtgatagtttattacagcagccccaggaacctaatatgcaaatgttttacatttattattaatatcttatttttctccttaaaactctgtgagctcattttatgcttgctgttccgttacatatatgatgaaactgtgaccaggcatggtgactcatgcctgtaatcccagcacttttggagcctaagatccaaaaggagggtcgtttgaactcaggagtttgagacaagcctgggcaacaaagtgagagacccctgtcaaaaaaaaaacaaaaaacaaaaacaagaaagaaagacagaaagaaagaaaaataaagaaagaaagaaaaagaatgaaagagaaagaaagaaagaaagaaagaaagaaagaaagaaagaaagatagaaaaagaaaggaaggaaggaaggaaggaaggaaggaaggaaggaaggaagraagaaagaaagaaagaaagaaagaaagaaagaaagaaagaaagaaagaaagaaagaaagaaagaaaagaaactgggaaaac

SEQ ID NO: 178146 - DNA, 492 bp, Homo sapiens
ttaagtgagtaaattcatttatgtggaaaacatctcaacaaacatctttcttttagctttgatatattagaacatttatcacagaatgatgctcactctacaagcttgaatctgagaacctcagatgtagctaatgagaaactaatgaaaaatataaaataagagaattatagaaacttaaaaaaaaaacctgttacattccatttggactactagccatgtgttccataaacattttctattttatataattgcctatctcattgtcttaacaatatgaagactaagatgtgaaagggggattaagcatgtggtaagagttatactgggggcagctaacccaagggagatcagatgtggcttcagatgccacatacacagctacatttcctcattgaggcagaccaagttaatccagaaagtcatatcaggctccaagaatgctgtaytttaaccattctgaaaatcacttgaaatgatataattttaggt

SEQ ID NO: 178147 - DNA, 520 bp, Homo sapiens
aattttatgtttatttatctttcctctgtcattatttataattttatcacacatggctgtatcctttacatgttttggcattatgtatttttgaatttttataaagacaatcataccatgtgtaattttcagggacttgatttttttcattgacttttaagggttcaaatatattatcactgtggmtgtagtttgccatattttgctgatatagagcattcattcacatgagggtaggattcagggtccatcaagacagagaaaacatacagtaatgtgaatagggaaagttaatataaagaattattaattgttacagcattggaacaatgaaatattgtctagtaatatgtaaagagaagtctcaagaatatgtgatgagcagatataaggaattgctcgtctccatggtgaatttggagcagccaatgaagagtcccctcacattgtggcctcgctcaatgttaagaagtcgctgtagtgttacccttggagaatctgcttcaaattgacacttcag

SEQ ID NO: 178148 - DNA, 520 bp, Homo sapiens
aattttatgtttatttatctttcctctgtcattatttataattttatcacacatggctgtatcctttacatgttttggcattatgtatttttgaatttttataaagacaatcataccatgtgtaattttcagggacttgatttttttcattgacttttaagggttcaaatatattatcactgtggatgtagtttgccatattttgctgatatagagcattcattcacatgagggtaggattcagggtccatcaagacagagaaaacatacagtaatgtgaatagggaaagttaatatraagaattattaattgttacagcattggaacaatgaaatattgtctagtaatatgtaaagagaagtctcaagaatatgtgatgagcagatataaggaattgctcgtctccatggtgaatttggagcagccaatgaagagtcccctcacattgtggcctcgctcaatgttaagaagtcgctgtagtgttacccttggagaatctgcttcaaattgacacttcag

SEQ ID NO: 178149 - DNA, 520 bp, Homo sapiens
aattttatgtttatttatctttcctctgtcattatttataattttatcacacatggctgtatcctttacatgttttggcattatgtatttttgaatttttataaagacaatcataccatgtgtaattttcagggacttgatttttttcattgacttttaagggttcaaatatattatcactgtggatgtagtttgccatattttgctgatatagagcattcattcacatgagggtaggattcagggtccatcaagacagagaaaacatacagtaatgtgaatagggaaagttaatataaagaattattaattgttacagcattggaacaatgaaatattgtctagtaatatgtaaagagaagtctcaagaatatgtgatgagcagatrtaaggaattgctcgtctccatggtgaatttggagcagccaatgaagagtcccctcacattgtggcctcgctcaatgttaagaagtcgctgtagtgttacccttggagaatctgcttcaaattgacacttcag

SEQ ID NO: 178150 - DNA, 520 bp, Homo sapiens
aattttatgtttatttatctttcctctgtcattatttataattttatcacacatggctgtatcctttacatgttttggcattatgtatttttgaatttttataaagacaatcataccatgtgtaattttcagggacttgatttttttcattgacttttaagggttcaaatatattatcactgtggatgtagtttgccatattttgctgatatagagcattcattcacatgagggtaggattcagggtccatcaagacagagaaaacatacagtaatgtgaatagggaaagttaatataaagaattattaattgttacagcattggaacaatgaaatattgtctagtaatatgtaaagagaagtctcaagaatatgtgatgagcagatataaggaattgctcgtctccatggtgaatttggagcagccaatgaagagtcccctcacattgtggcctcgctcaatgttaagaagtcgctgtagtgttrcccttggagaatctgcttcaaattgacacttcag

SEQ ID NO: 178151 - DNA, 585 bp, Homo sapiens
gtttattatagtctacatggtatagagtgaaggaataagagaacatttctgataagtgttttcaaaatttggagaatcattcctatctaaatcattcatttaagggactaaaatacaagtatgatgtttcttgccatctaaccctcagctagccaggctctaaaaaggacaacactggacacctcgacagtggtaaaaagcagggtttactcactcttgaatactaagaaatggtgctaaccttaggcagcagcttatctatttggttgaggttcagctttgtttcattgaacaaatctcttgggttattttcagttgtgccagtcatttaatttgttttctgaatcaaatgwtaagaataaatatggttttgagtgtaaacagcattcccagatatatcttacaacttggtgtgccatctgcctaattttgaacctataggatgggaataaatgcattgtgaaaaacaccaggtgatttccttaaagccaaatactcttgtccctcctacttttctcccggctttcctgctgcatgggacatggcaataaatgggagtttcctgcacacagaggtaaaattcac

SEQ ID NO: 178152 - DNA, 518 bp, Homo sapiens
ctgcccatcacaccccttgagggtatgcagaaatcctggaaatatttcagagagcagaaaactcagacaaaaacctttgggacctcagcctgcagttgtcactaatgctagtcagtgtctaacagagaatgttcactgaggcaaaagtctttaatcttttgtgcaaaacaaaggagtctaattccagcctgagaaccttgctgctgaggggcccgaggtaaccattttcctgaggtctttcctagaactgggtgtatggtgatggaggaggcccgggtcattgatgcttttaggagcaaaayatccctcctcagcccttccttagggaatctctctcctccctctgtctttttttttttttttaacctcccacccctctagagtagaagacacctctatgattcctcagagtaattttgtattaagatctgtggggtatggttggtcaggatggatggattgggaaaccaaacttccgaatggcaaattgtttctatgtatattttaattcatacaaa

SEQ ID NO: 178153 - DNA, 560 bp, Homo sapiens
caaagtatatcatcagttatcaggcaataacatgtaatttctaaaacctaacttaaatgcagatttaaaaacattttaaatgtgtcagtttagtcacatttattgaataaagttagcaaatggatatctcttgaaaatgagggctccagggaattaaaaaatgtaaaattcccatttcctttctgtgttaacacagctaattatgatctttacttcacatgmaaaagtcaacagaacaactcagtatttcaccaaattataaacaagaattacgctagagaaatgaaaccctaaagagaaacggtcatataactaacctcagtcaagtagttctggcagttatttgaagtctgacggtttgaagtaggaattcttatgggcatttggggaatatattttctgttgagtcctatactagtaagattttcaacacaaggtgactctcgaccttgccttgtaggaagagtgctgagaaaatatttcacctgctctttctccataaggagcttggtgctgatcattgctattttcttattcgatctgtaaagataacaaagaca

SEQ ID NO: 178154 - DNA, 560 bp, Homo sapiens
caaagtatatcatcagttatcaggcaataacatgtaatttctaaaacctaacttaaatgcagatttaaaaacattttaaatgtgtcagtttagtcacatttattgaataaagttagcaaatggatatctcttgaaaatgagggctccagggaattaaaaaatgtaaaattcccatttcctttctgtgttaacacagctaattatgatctttacttcacatgaaaaagtcaacagaacaactcagtatttcaccaaattataaacaagaattacgctagagaaatgaaaccctaaagagaaacggtcatataactaacctcagtcaagtagttctggcagttatttgaagtctgacggtttgaagtaggaattcttatgggcatttggggaatatattttctgttgagtcctatactagtaagattttcaacacaaggtgactctcgaycttgccttgtaggaagagtgctgagaaaatatttcacctgctctttctccataaggagcttggtgctgatcattgctattttcttattcgatctgtaaagataacaaagaca

SEQ ID NO: 178155 - DNA, 560 bp, Homo sapiens
caaagtatatcatcagttatcaggcaataacatgtaatttctaaaacctaacttaaatgcagatttaaaaacattttaaatgtgtcagtttagtcacatttattgaataaagttagcaaatggatatctcttgaaaatgagggctccagggaattaaaaaatgtaaaattcccatttcctttctgtgttaacacagctaattatgatctttacttcacatgaaaaagtcaacagaacaactcagtatttcaccaaattataaacaagaattacgctagagaaatgaaaccctaaagagaaacggtcatataactaacctcagtcaagtagttctggcagttatttgaagtctgacggtttgaagtaggaattcttatgggcatttggggaatatattttctgttgagtcctatactagtaagattttcaacacaaggtgactctcgacsttgccttgtaggaagagtgctgagaaaatatttcacctgctctttctccataaggagcttggtgctgatcattgctattttcttattcgatctgtaaagataacaaagaca

SEQ ID NO: 178156 - DNA, 488 bp, Homo sapiens
atatattttctgttgagtcctatactagtaagattttcaacacaaggtgactctcgaccttgccttgtaggaagagtgctgagaaaatatttcacctgctctttctccataaggagcttggtgctgatcattgctattttcttattcgatctgtaaagataacaaagacaaatgcttagtatttcatatttccttaaatgattcttaatgccttgcagtcattacatttaaagtgttgccctgagagtaaaccaaattacccactaaatagtgttttcacacmgaagatgtgtaagagcatacctgttgtaaggaattataattttaaaatcattctaaagaagcacctttgtttctaaggtgatttacactgaacaagcagttcaaacaaagtagacagggaagagaaatggctatcagtggtgtatggctcaacaggcaaaatttgctgccttctaaaatggctctacttgtaagattctgaagat

SEQ ID NO: 178157 - DNA, 579 bp, Homo sapiens
acatgagacttttcaggggaaaaagccatacaaaaacaaacaaaaaaaaatgagaggagagacaaaaactatctttgactaacattaaaaggtaagattatttactaacattgtttttcaaaattacattgtcaaattaacattcacttcctactaatatcctgaagccatctcactaaaaattatgcttttgaaacaaattaatgagcttaattcattctctgagtgtatgttttgacttacttcgttaatttttttgacatggaattgttagctttcaatgctgctgcaaaggcttccttatattcttctaactcagttgtaacctcttcataagcagtttacattttgtagaatttacrttccacatctttaagtgtgagttccttcttatttagtgaagccgtattatccttgtttaactgctctaattgttttttatattgtgcttgtaactaaaacaaaggaaaataatacacttttaaaacaataacataattattatatgtttgttgcctttcattttgagtcagtgattcaaagagcatttctgaatatgttaaaaaagaggctgaagct

SEQ ID NO: 178158 - DNA, 579 bp, Homo sapiens
acatgagacttttcaggggaaaaagccatacaaaaacaaacaaaaaaaaatgagaggagagacaaaaactatctttgactaacattaaaaggtaagattatttactaacattgtttttcaaaattacattgtcaaattaacattcacttcctactaatatcctgaagccatctcactaaaaattatgcttttgaaacaaattaatgagcttaattcattctctgagtgtatgttttgacttacttcgttaatttttttgacatggaattgttagctttcaatgctgctgcaaaggcttccttatattcttctaactcagttgtaacctcttcataagcagtttacattttgtagaatttacattccacatctttaagtgtgarttccttcttatttagtgaagccgtattatccttgtttaactgctctaattgttttttatattgtgcttgtaactaaaacaaaggaaaataatacacttttaaaacaataacataattattatatgtttgttgcctttcattttgagtcagtgattcaaagagcatttctgaatatgttaaaaaagaggctgaagct

SEQ ID NO: 178159 - DNA, 579 bp, Homo sapiens
acatgagacttttcaggggaaaaagccatacaaaaacaaacaaaaaaaaatgagaggagagacaaaaactatctttgactaacattaaaaggtaagattatttactaacattgtttttcaaaattacattgtcaaattaacattcacttcctactaatatcctgaagccatctcactaaaaattatgcttttgaaacaaattaatgagcttaattcattctctgagtgtatgttttgacttacttcgttaatttttttgacatggaattgttagctttcaatgctgctgcaaaggcttccttatattcttctaactcagttgtaacctcttcataagcagtttacattttgtagaatttacattccacatctttaagtgtgagttccttcttatttagtgaagccgtattatccttgtttaactgctctarttgttttttatattgtgcttgtaactaaaacaaaggaaaataatacacttttaaaacaataacataattattatatgtttgttgcctttcattttgagtcagtgattcaaagagcatttctgaatatgttaaaaaagaggctgaagct

SEQ ID NO: 178160 - DNA, 435 bp, Homo sapiens
cctctccttccctaaatattgtgaacaatatcacaggaggttgtacacaatctgcgatattgtttgtagtatccagtgggaaagaggatgctattactccccatatcacagggggtgtacacccccactgtgatatattcaataacatccagaagtaatattactgacaaaattgcagggggtgtaaaccccacctgtgatamcgttcctaatatccctgggaagagaggatgatattattcccaatattgcagggagtgtacacccaccctatgatattgttattaatacccaggaggggagacaatggtattactcacagtatcaaagaggttgtacagcccccctgtgatagtttctaatatccagggggtgtataccacccttgtgatattgtttctaatatgtaaggggaaggacaatgatattactgtc

SEQ ID NO: 178161 - DNA, 435 bp, Homo sapiens
cctctccttccctaaatattgtgaacaatatcacaggaggttgtacacaatctgcgatattgtttgtagtatccagtgggaaagaggatgctattactccccatatcacagggggtgtacacccccactgtgatatattcaataacatccagaagtaatattactgacaaaattgcagggggtgtaaaccccacctgtgataacgttcctaatatccckgggaagagaggatgatattattcccaatattgcagggagtgtacacccaccctatgatattgttattaatacccaggaggggagacaatggtattactcacagtatcaaagaggttgtacagcccccctgtgatagtttctaatatccagggggtgtataccacccttgtgatattgtttctaatatgtaaggggaaggacaatgatattactgtc

SEQ ID NO: 178162 - DNA, 435 bp, Homo sapiens
cctctccttccctaaatattgtgaacaatatcacaggaggttgtacacaatctgcgatattgtttgtagtatccagtgggaaagaggatgctattactccccatatcacagggggtgtacacccccactgtgatatattcaataacatccagaagtaatattactgacaaaattgcagggggtgtaaaccccacctgtgataacgttcctaatatccctgggaagagaggatgatattattcccaatattgcagggrgtgtacacccaccctatgatattgttattaatacccaggaggggagacaatggtattactcacagtatcaaagaggttgtacagcccccctgtgatagtttctaatatccagggggtgtataccacccttgtgatattgtttctaatatgtaaggggaaggacaatgatattactgtc

SEQ ID NO: 178163 - DNA, 595 bp, Homo sapiens
gcactgtaacacatgcccacttgggctgtgggagtcgcaggaacccacccctagacagtaccatggccacttgccctgcctattgcacctgcctgtctgcatgcttccctgcccagtaaggggtttgacagcacacacggtggccagacaagccacacccctgttgcacatcctgccaaggggagtcagggaagtctccagtttcatcaggaatgtaaatttgttcagccwttgtggaaagcagtttggagatttctgaaataacttaaaacagaactaccattcaacccagcaatcccattattgggtatatacccaaaggaatataaatcattctgtcatagacatatgcacgcatattttcattataacactattcacaatagcaaagacacggaatcaacttagatgcctgttaacagaagactggattaaaaaaatgcagcgtacatacaccatggaatactacacacctataaaataggatgaaataatgtcttttgcagcaacatgaatggagctggataccattattctaagtgaattaatgcaggaacagaaaaccaaacaaacactgcatgttctcacttataag

SEQ ID NO: 178164 - DNA, 595 bp, Homo sapiens
gcactgtaacacatgcccacttgggctgtgggagtcgcaggaacccacccctagacagtaccatggccacttgccctgcctattgcacctgcctgtctgcatgcttccctgcccagtaaggggtttgacagcacacacggtggccagacaagccacacccctgttgcacatcctgccaaggggagtcagggaagtctccagtttcatcaggaatgtaaatttgttcagcctttgtggaaagcagtttggagatttctgaaataacttaaaacagaactaccattcaacccagcaatcccattattgggtatatacccaaaggaatataaatcattctgtcatagacatatgcacgcatattttcattataacactattcacaatagcaaagacacggaatcaacttagatgcctgttaacagaagactggattaaaaaaatgcagcgtacatacaccatggaatactacacacctataaaataggatgaaataatgtcttttgcagcaacatgaatggagctggakaccattattctaagtgaattaatgcaggaacagaaaaccaaacaaacactgcatgttctcacttataag

SEQ ID NO: 178165 - DNA, 544 bp, Homo sapiens
actttaaatagcagtagcgatataatcagagtgcacagttgctctgggacaaaacttggaaatgagcatatttttagattcttaatgttttacacactttagcattccacagcaccattacatactcatttttctactagaataccttggtaaaaattcacagtagagatcaggcttgtccttcatacattaactaatcaagtaggaaagtgcaaatgagaacacagtgccaaacataggcaccacatggaaacaagcatggractgccaggaagccatttttgtagatttgtagcccaattatatttttcctaatgtattgcacacaaaacttgggggaaaaaaaagaggcagagagaaaacaggttatatcagccctatctcacaatccacaagttcatcctgttagaggagtaactatgtaaaacaaattttatctgttgaatgtcctatttagttaatcgcaaaactgtatgagaacacacttgtgacttatttagcagcttgtttgttcgctttccactggcttcacaaatgtcctttg

SEQ ID NO: 178166 - DNA, 544 bp, Homo sapiens
actttaaatagcagtagcgatataatcagagtgcacagttgctctgggacaaaacttggaaatgagcatatttttagattcttaatgttttacacactttagcattccacagcaccattacatactcatttttctactagaataccttggtaaaaattcacagtagagatcaggcttgtccttcatacattaactaatcaagtaggaaagtgcaaatgagaacacagtgccaaacataggcaccacatggaaacaagcatggaactgccaggaagccatttttgtagmtttgtagcccaattatatttttcctaatgtattgcacacaaaacttgggggaaaaaaaagaggcagagagaaaacaggttatatcagccctatctcacaatccacaagttcatcctgttagaggagtaactatgtaaaacaaattttatctgttgaatgtcctatttagttaatcgcaaaactgtatgagaacacacttgtgacttatttagcagcttgtttgttcgctttccactggcttcacaaatgtcctttg

SEQ ID NO: 178167 - DNA, 544 bp, Homo sapiens
actttaaatagcagtagcgatataatcagagtgcacagttgctctgggacaaaacttggaaatgagcatatttttagattcttaatgttttacacactttagcattccacagcaccattacatactcatttttctactagaataccttggtaaaaattcacagtagagatcaggcttgtccttcatacattaactaatcaagtaggaaagtgcaaatgagaacacagtgccaaacataggcaccacatggaaacaagcatggaactgccaggaagccatttttgtagatttgtagcccaattatatttttcctaatgtattgcacacaaaacttgggggaaaaaaaagaggcagagagaaaacaggttatatcagccctatctcacaatccacaagttcatcctrttagaggagtaactatgtaaaacaaattttatctgttgaatgtcctatttagttaatcgcaaaactgtatgagaacacacttgtgacttatttagcagcttgtttgttcgctttccactggcttcacaaatgtcctttg

SEQ ID NO: 178168 - DNA, 586 bp, Homo sapiens
agcgatataatcagagtgcacagttgctctgggacaaaacttggaaatgagcatatttttagattcttaatgttttacacactttagcattccacagcaccattacatactcatttttctactagaataccttggtaaaaattcacagtagagatcaggcttgtccttcatacattaactaatcaagtaggaaagtgcaaatgagaacacagtgccaaacataggcaccacatggaaacaagcatggaactgccaggaagccatttttgtagatttgtagcccaattatatttttcctaatgtattgcacacaaaacttgggggaaaaaaaagaggcagagagaaaacaggttatatcagccctatctcacaatccacaagttcatcctgttagaggagtaactatgtaaaacaaattytatctgttgaatgtcctatttagttaatcgcaaaactgtatgagaacacacttgtgacttatttagcagcttgtttgttcgctttccactggcttcacaaatgtcctttggaaatagaatgtacatttggaaccttgtacaccttttctttctccagtaccctcttg

SEQ ID NO: 178169 - DNA, 553 bp, Homo sapiens
tatgtagcttctctaatttttttcgagataaatcttgctagccattgtttattaaaaaawtttttttcaaagaaccaatttgtgggtatattaattagctccaccttttgttatttgctatgttgttggtttacatttttatctttatcatcttccttcttcttaatttggatatactttgcttattttttagcctcttaaaaaagaacctaaaggtcattgattgaagccttttattttcaatatattacatctataaatgtacctttaagaaacgatttatctgcatcccacattttattaagtttttaaaaaattttatttcagtttaaactattttttttgtgtgtgaaacttttcttggccaatgggtttttctgaagtattttgtttaatgttcaaatgttggggtgttattgtacatatcctactgttgtccatctctggttcatgatacgatgcatgttctccattgcacttagataacatgcctccatgtctctggagaattcctcagtctttctaaaatgcttttgatgaatactggccgtta

SEQ ID NO: 178170 - DNA, 615 bp, Homo sapiens
ttttattgccccaattttctcaaatttggctatggaagtttattcaaagtggatctgtttccctttcacattttccccattttgtgagcatttccttactkcctaacatgacaaaatatttcaaactaatcttgtattttccctgcccaatcctgatatcaaatatgtccccaaggagccttggttcctttaattggagaatggtgttctcattgttactgggatgatgttgtttctaggcccttttgttagaggagctagaaaatatatgtatgtatactcacacatttatacacatctgtacttatttatacaattatccatctgtacgtatactaaaaacaatgatttcatgaaacttttgatcccaatccaacactagataaagactatataggcccatttatttgcaaatcagcacataaacatagaagaattattaacaatataagctgtagcttatgctaaatgttggttggaacagacaataagttatggagaacttcagaggacactaaggttggatgggattttggaagttgtacaggtcaatgccactccatctattggctgagtttcactaggttaatacatgaacaacaacaaaaataacct

SEQ ID NO: 178171 - DNA, 615 bp, Homo sapiens
ttttattgccccaattttctcaaatttggctatggaagtttattcaaagtggatctgtttccctttcacattttccccattttgtgagcatttccttacttcctaacatgacaaaatatttcaaactaatcttgtattttccctgcccaatcctgatatcaaatatgtccccaaggagccttggttcctttaattggagaatggtgttctcattgttactgggatgatgttgtttctaggcccttttgttagaggagctagaaaatatatgtatgtatactcacacatttatacacatctgtacttatttatacaattatccatctgtacgtatactaaaaacaatgatttcatgaarcttttgatcccaatccaacactagataaagactatataggcccatttatttgcaaatcagcacataaacatagaagaattattaacaatataagctgtagcttatgctaaatgttggttggaacagacaataagttatggagaacttcagaggacactaaggttggatgggattttggaagttgtacaggtcaatgccactccatctattggctgagtttcactaggttaatacatgaacaacaacaaaaataacct

SEQ ID NO: 178172 - DNA, 615 bp, Homo sapiens
ttttattgccccaattttctcaaatttggctatggaagtttattcaaagtggatctgtttccctttcacattttccccattttgtgagcatttccttacttcctaacatgacaaaatatttcaaactaatcttgtattttccctgcccaatcctgatatcaaatatgtccccaaggagccttggttcctttaattggagaatggtgttctcattgttactgggatgatgttgtttctaggcccttttgttagaggagctagaaaatatatgtatgtatactcacacatttatacacatctgtacttatttatacaattatccatctgtacgtatactaaaaacaatgatttcatgaaacttttgatcccaatccaacactagataaagactatataggcccatttatttgcaaatcagcacataaacatagaagaattattaacaatataagctgtagcttatgctaaatgttggttggaacagacaataagttatggagaacttcagaggacactaaggttggatgggatyttggaagttgtacaggtcaatgccactccatctattggctgagtttcactaggttaatacatgaacaacaacaaaaataacct

SEQ ID NO: 178173 - DNA, 601 bp, Homo sapiens
tgtacgtatactaaaaacaatgatttcatgaaacttttgatcccaatccaacactagataaagactatataggcccatttatttgcaaatcagcacataaacatagaagaattattaacaatataagctgtagcttatgctaaatgttggttggaacagacaataagttatggagaacttcagaggacactaaggttggatgggattttggaagttgtacaggtcaatgccactccatctattggctgagtttcactaggttaatacatgaacaacaacaaaaataacctagatcagaagttaaaggtcattttattgactatctgccgtgtctgtgccattgcagtgtactaggtgcacttacgagtcctctacttacaaactgcttttcacaaaatatgaaactccaggcaaaggttcagacatatgacgtttgtttttaaaatctttctacagccttgtatcctttttcctttccttccttttaccctttttaaaatgtgttatgagttttatcttagactaacatcatctgtaatgttgctatacgycagtattcagttgctgtgtttgatgaatcataaaatggtgtaaaacttca

SEQ ID NO: 178174 - DNA, 500 bp, Homo sapiens
taagtgcctaaaatagcaagcggtctgaaatgatggcagcagtttattaaagactgaaaaaagaggccaggcacggtggctcacacctgtaatcccagcactttargagtccaagaccagtggatcacaaggtcaggagttcaagaccagcctgtccaacatgctgaaaccccgtatctacagaaaatacaaagcttagccgggcatggtgacatgtgcctgtagtcccagctacttcagaggctgaggcaaaagaaatgcttgaacccgggaggcagaagttgctgtgaattgagattgtgccactgcactcgagcctggtgacagaggaagatgctgtctcaaaaaaaaaaaaaaaaaaagaaacggcatcttcaagaaccacaagaaccacaagagagttccacgctgaagaagctctgattctgcatttgctgaactactgatttgagttagccaatataacactatcttagataaagtgtacaaacaactcaatt

SEQ ID NO: 178175 - DNA, 500 bp, Homo sapiens
taagtgcctaaaatagcaagcggtctgaaatgatggcagcagtttattaaagactgaaaaaagaggccaggcacggtggctcacacctgtaatcccagcactttaggagtccaagaccagtggatyacaaggtcaggagttcaagaccagcctgtccaacatgctgaaaccccgtatctacagaaaatacaaagcttagccgggcatggtgacatgtgcctgtagtcccagctacttcagaggctgaggcaaaagaaatgcttgaacccgggaggcagaagttgctgtgaattgagattgtgccactgcactcgagcctggtgacagaggaagatgctgtctcaaaaaaaaaaaaaaaaaaagaaacggcatcttcaagaaccacaagaaccacaagagagttccacgctgaagaagctctgattctgcatttgctgaactactgatttgagttagccaatataacactatcttagataaagtgtacaaacaactcaatt

SEQ ID NO: 178176 - DNA, 448 bp, Homo sapiens
tggtctttctttacatgaattccagtgaaaaatttctaagtgcctaaaatagcaagcggtctgaaatgatggcagcagtttattaaagactgaaaaaagaggccaggcacggtggctcacacctgtaatcccagcactttaggagtccaagaccagtggatcacaaggtcaggagttcaagaccagcctgtccaacatgctgaaaccccgtatctacagaaaatacaaagcttagccgggcatrgtgacatgtgcctgtagtcccagctacttcagaggctgaggcaaaagaaatgcttgaacccgggaggcagaagttgctgtgaattgagattgtgccactgcactcgagcctggtgacagaggaagatgctgtctcaaaaaaaaaaaaaaaaaaagaaacggcatcttcaagaaccacaagaaccacaagagagttccacgctga

SEQ ID NO: 178177 - DNA, 500 bp, Homo sapiens
taagtgcctaaaatagcaagcggtctgaaatgatggcagcagtttattaaagactgaaaaaagaggccaggcacggtggctcacacctgtaatcccagcactttaggagtccaagaccagtggatcacaaggtcaggagttcaagaccagcctgtccaacatgctgaaaccccgtatctacagaaaatacaaagcttagccgggcatggtgrcatgtgcctgtagtcccagctacttcagaggctgaggcaaaagaaatgcttgaacccgggaggcagaagttgctgtgaattgagattgtgccactgcactcgagcctggtgacagaggaagatgctgtctcaaaaaaaaaaaaaaaaaaagaaacggcatcttcaagaaccacaagaaccacaagagagttccacgctgaagaagctctgattctgcatttgctgaactactgatttgagttagccaatataacactatcttagataaagtgtacaaacaactcaatt

SEQ ID NO: 178178 - DNA, 448 bp, Homo sapiens
tggtctttctttacatgaattccagtgaaaaatttctaagtgcctaaaatagcaagcggtctgaaatgatggcagcagtttattaaagactgaaaaaagaggccaggcacggtggctcacacctgtaatcccagcactttaggagtccaagaccagtggatcacaaggtcaggagttcaagaccagcctgtccaacatgctgaaaccccgtatctacagaaaatacaaagcttagccgggcatggtgacaygtgcctgtagtcccagctacttcagaggctgaggcaaaagaaatgcttgaacccgggaggcagaagttgctgtgaattgagattgtgccactgcactcgagcctggtgacagaggaagatgctgtctcaaaaaaaaaaaaaaaaaaagaaacggcatcttcaagaaccacaagaaccacaagagagttccacgctga

SEQ ID NO: 178179 - DNA, 512 bp, Homo sapiens
aaaatttctaagtgcctaaaatagcaagcggtctgaaatgatggcagcagtttattaaagactgaaaaaagaggccaggcacggtggctcacacctgtaatcccagcactttaggagtccaagaccagtggatcacaaggtcaggagttcaagaccagcctgtccaacatgctgaaaccccgtatctacagaaaatacaaagcttagccgggcatggtgacatgtgcctgtagtcccagctacttcagaggctgaggcaaaagaaatgcttgaacccgggaggcagaagttgctgtgaattgagattgtgccactgcactcgagcctggtgacagaggamgatgctgtctcaaaaaaaaaaaaaaaaaaagaaacggcatcttcaagaaccacaagaaccacaagagagttccacgctgaagaagctctgattctgcatttgctgaactactgatttgagttagccaatataacactatcttagataaagtgtacaaacaactcaatttcat

SEQ ID NO: 178180 - DNA, 572 bp, Homo sapiens
agcggtctgaaatgatggcagcagtttattaaagactgaaaaaagaggccaggcacggtggctcacacctgtaatcccagcactttaggagtccaagaccagtggatcacaaggtcaggagttcaagaccagcctgtccaacatgctgaaaccccgtatctacagaaaatacaaagcttagccgggcatggtgacatgtgcctgtagtcccagctacttcagaggctgaggcaaaagaaatgcttgaacccgggaggcagaagttgctgtgaattgagattgtgccactgcactcgagcctggtgacagaggaagatgctgtctcaaaaaaaaaaaaaaaaaaagaaacggcatcttcaagaaccacaagaaccacaagagagttccacgctgaaraagctctgattctgcatttgctgaactactgatttgagttagccaatataacactatcttagataaagtgtacaaacaactcaatttcatctcctcattaataactgattggtctaatatcaattctgatttttaaaaagctaattagaaaaagaattaattatagaaccaataag

SEQ ID NO: 178181 - DNA, 490 bp, Homo sapiens
tgtatctgtattctgagaccgggtctcactctgtcactctggctgcaatgcaggggtgcactcatagctaactgcagccgtgacctcctgggctccggggatcctcttgcctcaccctcaccatagctatggctacagatgaacaccaaaacacccagctaattttttttttttttttttgtaraaagaggagccttgctatgttgcccaagctggcctcaaactcccaccctcaagagatctgcccacctcaacaacctaagtaacaggttctacaggaaaataccactatgccgggataattatattttattaatttttatttgcatagacaggaggtcttgctgtgttgcccagggtggtctaaaactcctggactcaaaccattctcccatctctgcctcccaaagtgctgaagctacgggcataagccactgcacctggcccgacttaagatttctgtaatctagcatcccatacttcatataat

SEQ ID NO: 178182 - DNA, 489 bp, Homo sapiens
cacctgtagtcccagatgcttggaaggctgaggtgggagaattgcttgagcacaggtggttgaggctgcagttagctacaacamcatcactgcactccagattgggtgaaacagagactctgtgttcaaaagaaaaagaaaagaaatacacatttggtttctgcccctcatcctggcacagagcttctcaagctcttataaaggccttggtgatgaaagtgatggggcatcttctgtttcaatatttggtcttagtcccaggtttctaacacaagagcctctaagacctttgggatcaccatagtaagaatgcatttggtgatgttactgagatgactgggtgactgaaagctcctagacagcttcagaaaaaggggtggttgttgtcagaagaacaaaccatgtgattagaggcttggaactgtcagcctcaccccctgggctccaggaagaaatagtggccgaagactgacttaattaccaatggtc

SEQ ID NO: 178183 - DNA, 489 bp, Homo sapiens
cacctgtagtcccagatgcttggaaggctgaggtgggagaattgcttgagcacaggtggttgaggctgcagttagctacaacaccatcactgcactccagattgggtgaaacagagactctgtgttcaaaagaaaaagaaaagaaatacacatttggtttctgcccstcatcctggcacagagcttctcaagctcttataaaggccttggtgatgaaagtgatggggcatcttctgtttcaatatttggtcttagtcccaggtttctaacacaagagcctctaagacctttgggatcaccatagtaagaatgcatttggtgatgttactgagatgactgggtgactgaaagctcctagacagcttcagaaaaaggggtggttgttgtcagaagaacaaaccatgtgattagaggcttggaactgtcagcctcaccccctgggctccaggaagaaatagtggccgaagactgacttaattaccaatggtc

SEQ ID NO: 178184 - DNA, 489 bp, Homo sapiens
cacctgtagtcccagatgcttggaaggctgaggtgggagaattgcttgagcacaggtggttgaggctgcagttagctacaacaccatcactgcactccagattgggtgaaacagagactctgtgttcaaaagaaaaagaaaagaaatacacatttggtttctgcccctcatcctggcacagagcttctcaagctcttataaaggccttggtgatgaaagtgatggggcatcttctgtttcaatatttggtcttagtcccaggtttctaacacaagagcctctaagacctttgggatcaccatagtaagaatgcatttggtgatgttactgagatgactgggtgactgaaarctcctagacagcttcagaaaaaggggtggttgttgtcagaagaacaaaccatgtgattagaggcttggaactgtcagcctcaccccctgggctccaggaagaaatagtggccgaagactgacttaattaccaatggtc

SEQ ID NO: 178185 - DNA, 328 bp, Homo sapiens
acaagtttcttgaatttttatttttctgaggaaggccttaattctccttcacttttgaagggwgttttcagtgggtacagaaacttaggttggtgggtttttttctgtcaacattttgaatttttcatttcactgtcttgttgctttcacagtttctgcaatgttgaatgcagttcttatctttgcgtctctgtaggtaaggtgttttctgccccacctctggtttctttcagagtttccctttatcttttatttcatatagtttgaaaattatatgtccaagtgtaggttgttggcatttattctgcctggtgttctcggagcttcc

SEQ ID NO: 178186 - DNA, 328 bp, Homo sapiens
acaagtttcttgaatttttatttttctgaggaaggccttaattctccttcacttttgaagggagktttcagtgggtacagaaacttaggttggtgggtttttttctgtcaacattttgaatttttcatttcactgtcttgttgctttcacagtttctgcaatgttgaatgcagttcttatctttgcgtctctgtaggtaaggtgttttctgccccacctctggtttctttcagagtttccctttatcttttatttcatatagtttgaaaattatatgtccaagtgtaggttgttggcatttattctgcctggtgttctcggagcttcc

SEQ ID NO: 178187 - DNA, 604 bp, Homo sapiens
gggtcactgtgcagccacgttctttgctgcagcaaaacaaaagtaaccttggctcctgtttgcmgtaagtacctccttttcatctgagagcttctcaatctgatccttactattttcctatgagccttctgatcacaagtatttaacaattctttacaaagatccaaactttccctcatctccctgtcttcaaagtcctccaaactctcccaaactccatctgctacccccttctgaacatgcttctacattatcagctatctttgtcacaggctggccatgtggtaaaggaagacaagcccatttcctggggaagaagtcaaggaggcttcagatacttgagtgaaaagaagctgagtgctgattgccaagactttagggagaagaccttgaagacatttaatagatccactttgtagtcataattttctccatgattataaagaaaagaggtttaattggttaatgattctgcaggctgtaaggaagcatagtggcttctgcatctgacaggactcaggaagcctcccaatcataccagaatgtcaaagggcaaggagatgtctcatatggcaagagtaggagcaagacagagaaaggaaaa

SEQ ID NO: 178188 - DNA, 417 bp, Homo sapiens
aaactctcccaaactccatctgctacccccttctgaacatgcttctacattatcagctatctttgtcacaggctggccatgtggtaaaggaagacaagcccatttcctggggaagaagtcaaggaggcttcagatacttgagtgaaaagaagctgagtgctgattgccaagackttagggagaagaccttgaagacatttaatagatccactttgtagtcataattttctccatgattataaagaaaagaggtttaattggttaatgattctgcaggctgtaaggaagcatagtggcttctgcatctgacaggactcaggaagcctcccaatcataccagaatgtcaaagggcaaggagatgtctcatatggcaagagtaggagcaagacagagaaaggaaaaatgttgtcatgccc

SEQ ID NO: 178189 - DNA, 417 bp, Homo sapiens
aaactctcccaaactccatctgctacccccttctgaacatgcttctacattatcagctatctttgtcacaggctggccatgtggtaaaggaagacaagcccatttcctggggaagaagtcaaggaggcttcagatacttgagtgaaaagaagctgagtgctgattgccaagactttagggaraagaccttgaagacatttaatagatccactttgtagtcataattttctccatgattataaagaaaagaggtttaattggttaatgattctgcaggctgtaaggaagcatagtggcttctgcatctgacaggactcaggaagcctcccaatcataccagaatgtcaaagggcaaggagatgtctcatatggcaagagtaggagcaagacagagaaaggaaaaatgttgtcatgccc

SEQ ID NO: 178190 - DNA, 417 bp, Homo sapiens
aaactctcccaaactccatctgctacccccttctgaacatgcttctacattatcagctatctttgtcacaggctggccatgtggtaaaggaagacaagcccatttcctggggaagaagtcaaggaggcttcagatacttgagtgaaaagaagctgagtgctgattgccaagactttagggagaagaccttgaagacatttaatagatmcactttgtagtcataattttctccatgattataaagaaaagaggtttaattggttaatgattctgcaggctgtaaggaagcatagtggcttctgcatctgacaggactcaggaagcctcccaatcataccagaatgtcaaagggcaaggagatgtctcatatggcaagagtaggagcaagacagagaaaggaaaaatgttgtcatgccc

SEQ ID NO: 178191 - DNA, 606 bp, Homo sapiens
ttctttgctgcagcaaaacaaaagtaaccttggctcctgtttgccgtaagtacctccttttcatctgagagcttctcaatctgatccttactattttcctatgagccttctgatcacaagtatttaacaattctttacaaagatccaaactttccctcatctccctgtcttcaaagtcctccaaactctcccaaactccatctgctacccccttctgaacatgcttctacattatcagctatctttgtcacaggctggccatgtggtaaaggaagacaagcccatttcctggggaagaagtcaaggaggcttcagatacttgagtgaaaagaagctgagtgctgattgccaagactttagggagaagaccttgaagacatttaatagatccactttgyagtcataattttctccatgattataaagaaaagaggtttaattggttaatgattctgcaggctgtaaggaagcatagtggcttctgcatctgacaggactcaggaagcctcccaatcataccagaatgtcaaagggcaaggagatgtctcatatggcaagagtaggagcaagacagagaaaggaaaaatgttgtcatgccctattata

SEQ ID NO: 178192 - DNA, 606 bp, Homo sapiens
ttctttgctgcagcaaaacaaaagtaaccttggctcctgtttgccgtaagtacctccttttcatctgagagcttctcaatctgatccttactattttcctatgagccttctgatcacaagtatttaacaattctttacaaagatccaaactttccctcatctccctgtcttcaaagtcctccaaactctcccaaactccatctgctacccccttctgaacatgcttctacattatcagctatctttgtcacaggctggccatgtggtaaaggaagacaagcccatttcctggggaagaagtcaaggaggcttcagatacttgagtgaaaagaagctgagtgctgattgccaagactttagggagaagaccttgaagacatttaatagatccactttgtagtcataattttctccatgattataaagaaaagaggtttaattggttaatgattctgcaggctgtaaggaagcatagtggcttctgcatctgacaggactcaggaagcctcccaatcmtaccagaatgtcaaagggcaaggagatgtctcatatggcaagagtaggagcaagacagagaaaggaaaaatgttgtcatgccctattata

SEQ ID NO: 178193 - DNA, 399 bp, Homo sapiens
tcacggcgtcttgcgacttggargcggattcagaggacaggacagaacacttgggcaagtgaatctctgtctgtctgtctgtctgtctgtgtgtctgtctcattggttggttgatttccattttcttaaggggcacatacctcacaccgcacacacacagacacacacacacgcacacacacgcacacactcacacacacgcacacacactccttccttctgcgagttagaaaattagtaggggcccctgggagctgcaggtttcctaatcatgtctgcacctaagaacagtagggtcttgtctggctcttcttatgaacggtcccccagcccggactccccaaggtccatgcgagcctcacccagcttctccttctcccctctcagaaactcaggctt

SEQ ID NO: 178194 - DNA, 388 bp, Homo sapiens
tagcattgcttttgtgtaaattacataatgcaaaattttttaaatctttgcattaatacttttaaattttgttttattttgaatgattagccttcatkgccccccttttttgtaccccaacttggagtgtatgaagggttttggtctccctgagagtggctggaggcagccagggcttacctgtactctgccttgagaaaagttggataaaagtgcacatcttaaaaaaaactgaatgatgaagaattaacaaaaacagaatttcaatacagtggacagcttagcattttgacaattggaaataaaatgcacagttctgaactgtacaatgtaagacacaaaaacgaaacactggaaatggaaattcaattatgtcactgtagactgg

SEQ ID NO: 178195 - DNA, 528 bp, Homo sapiens
caaaaacagaatttcaatacagtggacagcttagcrttttgacaattggaaataaaatgcacagttctgaactgtacaatgtaagacacaaaaacgaaacactggaaatggaaattcaattatgtcactgtagactggctactgctctacatgattgtgaccaaagtcagagagttgcaagagatttctttccagagaacaagacatgaacaggtttatttacagaaaacaatgaattctcatatatctaacctaaaagataacagattctttcagaacaagtctaatgtagacagtaaaattaacgggctaaaaattaagctccatcaaacaagatgaactctgagagaatagatggggcaggccgccatctttcctgttcaggcaacttggtcattccagcctgaaggctttggagagtacaaaccgaccaggggcagaagagatcccacagcacagcatggctgctttaccaaatcatggccagactgcttctgtaagcaggcccctgactctgttgcatgtcac

SEQ ID NO: 178196 - DNA, 388 bp, Homo sapiens
tagcattgcttttgtgtaaattacataatgcaaaattttttaaatctttgcattaatacttttaaattttgttttattttgaatgattagccttcattgccccccttttttgtaccccaacttggagtgtatgaagggttttggtctccctgagagtggctggaggcagccagggcttacctgtactctgccttgagaaaagttggataaaagtgcacatcttaaaaaaaactgaatgatgaagaattaacaaaaacagaatttcaatacagtggacagcttagcattttgacaattggraataaaatgcacagttctgaactgtacaatgtaagacacaaaaacgaaacactggaaatggaaattcaattatgtcactgtagactgg

SEQ ID NO: 178197 - DNA, 528 bp, Homo sapiens
caaaaacagaatttcaatacagtggacagcttagcattttgacaattggaaataaaatgcacagttctgaactgtacaatgtaagacacaaaaacgaaacactggaaatggaaattcaattatgtcactgtagactggctactgctctacatgattgtgaccaaagtcagagagttgcaagagatttctttccagagaacaagacatgaacaggtttatttacagaaaacaatgaattctcatatatctaacctaaaagataacagattctttcagaacaagtctaatgtagacagtaaaattaacgggctaaaaattaagctccatcaaacaagatgaactctgagagaatagatggggcaggccgccatctttcctgttcargcaacttggtcattccagcctgaaggctttggagagtacaaaccgaccaggggcagaagagatcccacagcacagcatggctgctttaccaaatcatggccagactgcttctgtaagcaggcccctgactctgttgcatgtcac

SEQ ID NO: 178198 - DNA, 479 bp, Homo sapiens
acaacaagagtgaaactctgtctcaaaagaaaaaaaattaaaaataaaagaacaaggaaacaaaagtaacaaggcttgacaccagatgagcctgaatctaagcaagaaaagcccagaagaaatcccattttgggtcactggytgcatggtagtaataccatacacataagggaagagaggaggatgtggctttcactttgaattttttgagcttaaggtaacttttgcgtcgtacaaagaagcattcaacagagagttaaacctatgatggaaagactgaaggggtccaagctgtagagtaacaggactgcaaaccacaaagggctgaatcagtcaaggagaactgcagggcgggatgaacagggactaatggaacatttggataagctgttgagaagaaaggagaattcagagaaaaagaactgtcagtgaggtcataataagaactgttacagtgaacgaaatatggcctgggaagg

SEQ ID NO: 178199 - DNA, 501 bp, Homo sapiens
atagatgggaattgaacaatgagaacacatggacaaaggaaggggaacatcacactctggggactgttgtggggtgggcgtagtgtttagggatagcattaggagatatacctaatgctaaatgacgagttaakgggtgcagcacaccagactggcacatgtatacatatgtaactaactggcacattatgcacataaaccctaaaacttaaagtataataataataataataataataaaataaaattaaaaaatgaaaaatttgtttgccttgtaaataaactaccaaaaaaaaggaaaaacaagaggcagattatttgtggagataagtcttccccctatcaatgagtaaagatttttgccctttaaaaattttttaagtcatgattttaggtaaatgaatgacttacgttgacgtggaattctatttcataacatcaagtgtttaaacctttaatatatttaataggcttcccaaaatcaaattgcaacttcaaaat

SEQ ID NO: 178200 - DNA, 501 bp, Homo sapiens
atagatgggaattgaacaatgagaacacatggacaaaggaaggggaacatcacactctggggactgttgtggggtgggcgtagtgtttagggatagcattaggagatatacctaatgctaaatgacgagttaaggggtgcagcacaccagactggcacatgtatacatatgtaactaactggcacattrtgcacataaaccctaaaacttaaagtataataataataataataataataaaataaaattaaaaaatgaaaaatttgtttgccttgtaaataaactaccaaaaaaaaggaaaaacaagaggcagattatttgtggagataagtcttccccctatcaatgagtaaagatttttgccctttaaaaattttttaagtcatgattttaggtaaatgaatgacttacgttgacgtggaattctatttcataacatcaagtgtttaaacctttaatatatttaataggcttcccaaaatcaaattgcaacttcaaaat

SEQ ID NO: 178201 - DNA, 273 bp, Homo sapiens
cgggatttgattgtggcaaggatgctgctggtgtcgaaaccacaacgtgggaactacagaaccactggttggttttcagtgtttcagtgcatacaattcctaatatatctggccaagaaaacttsgaagttcttagattgtcccaaaggtggcgcatgaaatcaaagcaggagaacagtttcctagaggtgtagcctgggaaagttgggggtgactgatggaaaggaggagtgaagctccgccctttccgctgctaggctgcgcccgaggcta

SEQ ID NO: 178202 - DNA, 273 bp, Homo sapiens
cgggatttgattgtggcaaggatgctgctggtgtcgaaaccacaacgtgggaactacagaaccactggttggttttcagtgtttcagtgcatacaattcctaatatatctggccaagaaaacttckaagttcttagattgtcccaaaggtggcgcatgaaatcaaagcaggagaacagtttcctagaggtgtagcctgggaaagttgggggtgactgatggaaaggaggagtgaagctccgccctttccgctgctaggctgcgcccgaggcta

SEQ ID NO: 178203 - DNA, 368 bp, Homo sapiens
gggtctgaatgtttgtccttcacataccattccagaacactgctgccgtggtctgaatgtatgtccctcacataggattccagaacactgctactaggttctgaatgtttttcccacacctaggattccagaacacttctgctggtgtctgaatggttgttcctcacgtatgattccaggacacggctatgagagtcttaatgtttgtccttcacrtaggattctagaacactgctcccgtggtctgaatgtttgtccttcacatagcattccagaacactgctgctggggtctgaatgtctgcccctcaaatcagattccagagcactgctgctggggtttgaatgtctttccctcacatagaattc

SEQ ID NO: 178204 - DNA, 348 bp, Homo sapiens
gctcatggaaacctctaccagggcagtgygcctgtggctttgcaggctttagcccccatggcttctctcatgggctgggctggtgttgagtgcctatcacttttccatactgagggtgtgaactgttggtaggtctatgaatctggggtctagaggatggtggcctcctgcatagtcactcaaagcccttattttccttccgcactgccatagtacaggattcccaagagcctctgcctctgcagcaggcttctgtctggaacactaggaggtggagctgtgttggggggcggatccttcaccaatggttaagcaccatcttcttgatgctgacctagtgatagtgag

SEQ ID NO: 178205 - DNA, 348 bp, Homo sapiens
gctcatggaaacctctaccagggcagtgtgcctgtggctttgcaggctttagcccccatggcttctctcatgggctgggctggtgttgagtgcctatcacttttccatactgagggtgtgaactgttggtaggtctatgaatctggggtctagaggatggtggcctcctgcatagtcastcaaagcccttattttccttccgcactgccatagtacaggattcccaagagcctctgcctctgcagcaggcttctgtctggaacactaggaggtggagctgtgttggggggcggatccttcaccaatggttaagcaccatcttcttgatgctgacctagtgatagtgag

SEQ ID NO: 178206 - DNA, 348 bp, Homo sapiens
gctcatggaaacctctaccagggcagtgtgcctgtggctttgcaggctttagcccccatggcttctctcatgggctgggctggtgttgagtgcctatcacttttccatactgagggtgtgaactgttggtaggtctatgaatctggggtctagaggatggtggcctcctgcatagtcactcaaagcccttattttccttcygcactgccatagtacaggattcccaagagcctctgcctctgcagcaggcttctgtctggaacactaggaggtggagctgtgttggggggcggatccttcaccaatggttaagcaccatcttcttgatgctgacctagtgatagtgag

SEQ ID NO: 178207 - DNA, 348 bp, Homo sapiens
gctcatggaaacctctaccagggcagtgtgcctgtggctttgcaggctttagcccccatggcttctctcatgggctgggctggtgttgagtgcctatcacttttccatactgagggtgtgaactgttggtaggtctatgaatctggggtctagaggatggtggcctcctgcatagtcactcaaagcccttattttccttccgcactgccatagtacaggattcccaagagcctctgcctctgcagcaggcttctgtctggaacastaggaggtggagctgtgttggggggcggatccttcaccaatggttaagcaccatcttcttgatgctgacctagtgatagtgag

SEQ ID NO: 178208 - DNA, 532 bp, Homo sapiens
cttactcctgccgtatgaaacatttcattgctgttttcctactggtatgattgggaggcttcctgagtcctcccagaagcagaagccactatgctttctttacagcctgcagaaccatgagccaattaaccccttttcattatgatcatacagaaaataaagtactgtgaagtggagctatgaaatatctgcaatgacatttccccatcgtcttggctattagcactggacttctttttaatgcaaatatctgaagccttttgaagtttccccctgaaaatggacttctttttcttctacattgccaggctgcaataaagatagctgaaaatgtaaagcaggttcagaagtgggtaamagccagaggttggagagtttggagagcttgaaagaagacaggaagatgaaagaaattttggaccatagtaggcacttgttgaatagttgtgattaaaaggctggcagaaggatggacagtgaaggccaggcttacaaggtctcagatgaaaatgaggaaattactgggaacagg

SEQ ID NO: 178209 - DNA, 541 bp, Homo sapiens
accactcttgcggcctgcagcacctctgggttggattaccggttataacctaggaggtgattaggctcccttttggtccttgtgggatgtgtcctgccttgggtcccaataccttactgtggtttctgaagtgagctgttcctggaatcgtcctataacccattaggtaccattgcactgcttggtaggggcacgaggtcacaaaatggctgatctcccctccaggctgaagttctcccagtggtgctccttgggtcacaggactcctgagacccagggcttaagccccaggggcaaaggagacaggaaacctgtcatctccactcctggctgactggccaataatgytgtgggaagcagaggaccacagagattcatatggggaaataggaggatgtatttaggtgccctggctcagcagacttatatccaaaaatgctgagcattgaacaaagactgagggggatatttgtaagccaaattacaaaagcagaactacagaagctaatttgacaatgacaggttacataatttatagcat

SEQ ID NO: 178210 - DNA, 541 bp, Homo sapiens
accactcttgcggcctgcagcacctctgggttggattaccggttataacctaggaggtgattaggctcccttttggtccttgtgggatgtgtcctgccttgggtcccaataccttactgtggtttctgaagtgagctgttcctggaatcgtcctataacccattaggtaccattgcactgcttggtaggggcacgaggtcacaaaatggctgatctcccctccaggctgaagttctcccagtggtgctccttgggtcacaggactcctgagacccagggcttaagccccaggggcaaaggagacaggaaacctgtcatctccactcctggctgactggccaataatgctgtgggaagcagaggaccacagagattmatatggggaaataggaggatgtatttaggtgccctggctcagcagacttatatccaaaaatgctgagcattgaacaaagactgagggggatatttgtaagccaaattacaaaagcagaactacagaagctaatttgacaatgacaggttacataatttatagcat

SEQ ID NO: 178211 - DNA, 557 bp, Homo sapiens
ttacattgttgtttcttttcttggtactcatgcaataaatataatattaattctatttaatgatctcagagtagtcctaacactcaaatttcagaacaaaagtatttagtgcattttattgcaaacgttattactcttggagtcctactccaagtaaaagaactctttcaaatcctcagattaacctaaatagctgtttctctcctataccatgaasagaaggagctctctgtctggtctacctgttgatgacatccccaacatccaaaataatctgtgcatctgtcagcagcagttgggatccaggcagaaagcagatggctcctacagacaaagtcatctaagagtcctttaataaagggtgacttatgcagcatgcccacaaatgttggggaagttcccttacatagtaacagggccactctatgagcactgactactctaaggaaagttaaaggctctaggtattacctccctctgctggcaatctggaaggccatagagaggtaaaaactacatttattttgtatgtatcctgagaaagaggaaatagcagt

SEQ ID NO: 178212 - DNA, 517 bp, Homo sapiens
gaatatggaaatccagcagactgaatcattaaggaggaaaaaggacccgttttatgcatcagacagatttcagtagcttatattgtctacctacaggagctggacacaatgattcttgcatattttggattcaaatgcatttttattattattttacccctgaagctaggtttggaaagacaacatttgttacttaagacaacttagaaaaaaaaaaaactatttctatgttatcacattgaaagggttgttatgagaccatcacattattttatttgccaaatatgaatatgtttcctcagtaatgtacttttgattgttattgtttttagagaaakaagatactgttctcaataaaataaagaacatgctcaaataacgaactaataaagggataaaaatagtcaattaacattgagacgcttgttcactgtcactagtaatcaaataaatacaatgcaaataaatcattgagttattatttcaaactatcgaatttgcaaacatttaaaagaaa

SEQ ID NO: 178213 - DNA, 501 bp, Homo sapiens
gatgtgaaatgcagttattttttggtttgatgtaactttcagatggttagtamcttggtgagtccattctataaatataaaatgtttttatgtatcttagttcttttgataaaaggtcgaaccagtaagtccagagattttgtggtcattatttttgagaatgctgcagatgctaagaatgctgccagagatatgaatggaaaggtaagagtcccttattaataatacactaattctggttttcagttaacagtatttctaggtctttttagtataactaaagtgttgaagatagtagaatgccatatggactgaaatgctttagccatcgtcttctttgtgccatacacatgcaagtgtatttggaagggtactgcaattaacattacataaattaatatatggtaactttttttctatttttgtatttcaatatgggtgtaaatagattttcaaaggtttccaagagcattaaaacctagaaggaaccctcctctaaat

SEQ ID NO: 178214 - DNA, 501 bp, Homo sapiens
gatgtgaaatgcagttattttttggtttgatgtaactttcagatggttagtaccttggtgagtccattctataaatataaaatgtttttatgtatcttagttcttttgataaaaggtcgaaccagtaagtccagagattttgtggtcattatttttgagaatgctgcagatgctaagaatgctgccagagatatgaatggaaaggtaagagtcccttattaataatacwctaattctggttttcagttaacagtatttctaggtctttttagtataactaaagtgttgaagatagtagaatgccatatggactgaaatgctttagccatcgtcttctttgtgccatacacatgcaagtgtatttggaagggtactgcaattaacattacataaattaatatatggtaactttttttctatttttgtatttcaatatgggtgtaaatagattttcaaaggtttccaagagcattaaaacctagaaggaaccctcctctaaat

SEQ ID NO: 178215 - DNA, 470 bp, Homo sapiens
aagtactaaaggtgtattataagaatgattgcactaatatctaaaatttgttttaaaattgtaataagtttgcattgaaataacacaaatttcaaactgaattgagtttatgaatgctgattgcctgtactcaacaggttttctgaagaactcatttatattaaytatacttcatagagttttctactttggggcccagaacttcatatcagttgtattatcaaaatacaatggaatatttaaaactttccaacaggaaaaaaagtaattcagtacttaggattgattttccaatatttgtttttttttgtgtatacatgtgcaaacatgtatgcaaatctattgctttgtaattttcatatggagagtttgtacattggcctgccataaagcattttcaatttaagaaacgtagaactttaatttctaaaaaaagtctatgactctggaaaggacaaaacaccactgct

SEQ ID NO: 178216 - DNA, 470 bp, Homo sapiens
aagtactaaaggtgtattataagaatgattgcactaatatctaaaatttgttttaaaattgtaataagtttgcattgaaataacacaaatttcaaactgaattgagtttatgaatgctgattgcctgtactcaacaggttttctgaagaactcatttatattaactatacttcatagagttttctactttggggcccagaacttcatatcrgttgtattatcaaaatacaatggaatatttaaaactttccaacaggaaaaaaagtaattcagtacttaggattgattttccaatatttgtttttttttgtgtatacatgtgcaaacatgtatgcaaatctattgctttgtaattttcatatggagagtttgtacattggcctgccataaagcattttcaatttaagaaacgtagaactttaatttctaaaaaaagtctatgactctggaaaggacaaaacaccactgct

SEQ ID NO: 178217 - DNA, 376 bp, Homo sapiens
tataggaatttatgttgaacttcccatcctttgatgacacacctccttaccagaacagcttttttctctgagattcctgtggcttttataatagttttatagcttcagatagtggccctatgggttgagtcagtaytgaatgtgtagccctggtgtttacataaagtccatcagctggccttcaacttttaatgtgaccatgggccaatggagttgtaataagaaaaagcctggtctgtcctagtacccatatcctttagtgccggccagcctgtttagattcgtatttggttttcccacagtgaggcagcccttagctggactcttttataccacagtcttgattatactttttattaccttctggacatttatt

SEQ ID NO: 178218 - DNA, 376 bp, Homo sapiens
tataggaatttatgttgaacttcccatcctttgatgacacacctccttaccagaacagcttttttctctgagattcctgtggcttttataatagttttatagcttcagatagtggccctatgggttgagtcagtactgaatgtgtagccctggtgtttacataaagtccatcagctggccttcaacttttaatgtgaccatgggccaatggagttgtaataagaaaaagcctggtctgtcctagtacccatatcctttagtgccggccagcctgtttagattcgtatttgrttttcccacagtgaggcagcccttagctggactcttttataccacagtcttgattatactttttattaccttctggacatttatt

SEQ ID NO: 178219 - DNA, 614 bp, Homo sapiens
gcacttctccccatctgtcagccttatattttacttgaaaaaaaaaaaaaaaccttttgatttcctcctttgccccccaatactagataccatcacatgagggtaaggactttgcgtttgtttactaatatatccccagggccaagaacacacagtggacaaggaataagcgccactgagtgcatgaacagaaagaggaggaacacatttttccatacacggtagaaaatatattttgaactcgtaatatggcraatccagaaaaagaaaaataacacggatacccacgttgatggcagatgcctgatgtgttcctaattcaggatcctctgggaacacacctttatcttcagtatcccaccgttccaatgatgtttttcacaaaaatgctaaggtctgaccctgtcagtattgaagctcataagccaccacatgacaaaggcttgtccacttccactgcatattctcttgacctctgttgtcaagatgccacacgtgtcagatcctcaacagtgcactgaggtatagcctgccttgcttaggactggggctttttctctctctttagagagaaacgtaggttatattacacttttgaggttcataaaacatag

SEQ ID NO: 178220 - DNA, 604 bp, Homo sapiens
ttacatcttctaaaacaaaaaaggtagcttgttatggcaacattttaatatagggcacgtggttaatcttttggtttacactttgcttttccttctgattgtactggaattccccgaagtcataccgggtatccctcagaagcacattcccagagttctccatgwcagcttgtgtgtcacactcacagctccaaaagggctaatgccagtcttaatgggacagggtcagttcttccaggaaatccttaaagtgtgatttgaggagcagctgaaggaactatgatctaaactaccttccccagtgatctcctaagacatttcatcacctacatttatttattccttttggacctgaagtagtctatttattcatttatttttgagatggagtctcactctgtcgcccaggctatagtgcaatggtgcgatcttggctcactgcaacctccacctcccaggttcacgcaattctcctgcctcagcaagtagatgggattacaggtgcccgccaccatgcccgcctaatattttgtatttttagtagagaaggtattttgccatgttcgccatgctggtctcgaactcttgacctgagatgacccac

SEQ ID NO: 178221 - DNA, 397 bp, Homo sapiens
tccaccactgcagcaggcttctgcctgtacatccagacttttcatatatcctgtgaaatctaggtggagactcccaggcctcagttcttgtcctctktgtagccacaggcttaaaaccacatggaagccactaaagtttgtggccaacatgctctgtagcagcagcccaagctgtacccaggcccctttgagccatggctgaacctggagaagctgggatgcaaggagcagtgtcccgaggcttcacagggcagcagtgccctggctctggcccatgaaaccattcttccctcctaggcctcgagaggggctgctgtgaaggtctctgaaataccttcaaggccgtgtccccattgtcttggctaatagcacttggcttctttttaatttatgcaaa

SEQ ID NO: 178222 - DNA, 374 bp, Homo sapiens
agttttgtaagaagagagaaatagcaccaacctggtaggagcattgtaartattaagatcgtatatggaaaacattttagaatgccgcctggtacaccataaggctcagaaaattttagttcttattgttattactttcggtagctaggtagaatattgaaacactgtcaccatgttgatcatttagattctctttctaaaatgctgatgtcaaataaaattttacatttttcccccctttctagctccaagaggaaaacgaggatggaaaaccttttatgctgtactgaagggaacagttctttacttgcaaaaggtaaaagtaaagcagataaaaaatccacaaaactcgatgaaataattacatgaggtcc

SEQ ID NO: 178223 - DNA, 592 bp, Homo sapiens
tgtgcccggccaggctcagtgattgtgtggaagaaggaacacacagcacagcacacacatgaaccaggcttggccacccagggagacacccaygggcctttctctttaacatctgtaaacaggaagagtgccaccctccaggatgtcaacagctctctcccaggagattaatggctggttcaacacgcgtgctgattcaccagcacaagaaagtgatcaacagccaaaattaaaacataaataaataaacagaacaccttccatcttagatgcagtgacctgtaacatctggcgtgtctgtctgaagcacagattccccgcaatgcaaacatgcgcggttaaggtgaagaccggagctcaccagagggagcccagggcacatgtgaggttggccaggctcaggaacaatcacaaccaacgtctggtgccccttgatgtggacagaccccggaagagccggctctgcttcatctccatgctgcagactttgatactataacccctttactgaatatcattaagtaaatccccaagaacatggttaatctgagatctacccttatttctccaagtttcttgagtggacaaggaa

SEQ ID NO: 178224 - DNA, 592 bp, Homo sapiens
tgtgcccggccaggctcagtgattgtgtggaagaaggaacacacagcacagcacacacatgaaccaggcttggccacccagggagacacccatgggcctttctctttaacatctgtaaacaggaagagtgccaccctccaggatgtcaacagctctctcccaggagattaatggctggttcaacacgcgtgctgatwcaccagcacaagaaagtgatcaacagccaaaattaaaacataaataaataaacagaacaccttccatcttagatgcagtgacctgtaacatctggcgtgtctgtctgaagcacagattccccgcaatgcaaacatgcgcggttaaggtgaagaccggagctcaccagagggagcccagggcacatgtgaggttggccaggctcaggaacaatcacaaccaacgtctggtgccccttgatgtggacagaccccggaagagccggctctgcttcatctccatgctgcagactttgatactataacccctttactgaatatcattaagtaaatccccaagaacatggttaatctgagatctacccttatttctccaagtttcttgagtggacaaggaa

SEQ ID NO: 178225 - DNA, 592 bp, Homo sapiens
tgtgcccggccaggctcagtgattgtgtggaagaaggaacacacagcacagcacacacatgaaccaggcttggccacccagggagacacccatgggcctttctctttaacatctgtaaacaggaagagtgccaccctccaggatgtcaacagctctctcccaggagattaatggctggttcaacacgcgtgctgattcaccagcacaagaaagtgatcaacagccaaaattaaaacataaataaataaacagaacaccttccatcttagatgcagtgacctgtaacatctggcgtgtctgtctgaagcacagattccccgcaatgcaaacatgcgcggttaaggtgaagaccggagctcaccagagggagcccagggcacatgtgaggttggccaggctcaggaacaatcacaaccaacgtcyggtgccccttgatgtggacagaccccggaagagccggctctgcttcatctccatgctgcagactttgatactataacccctttactgaatatcattaagtaaatccccaagaacatggttaatctgagatctacccttatttctccaagtttcttgagtggacaaggaa

SEQ ID NO: 178226 - DNA, 508 bp, Homo sapiens
gaattctcccctcttcaatgccatggtacagacacataaaatgccattttattgggaggccaaggcgggtggattgcctgagctcaggagttcgagactaccctgagcaagacartgaaacgtcgtatctactaaaatgcaaaagaaattagccaggcatggcggtgtgcacctgcagtcacacctactcaggaggctgcggtagaagaattgcttgaacctgggaggtggagggtgaagtgagccgagatcgcgccactgcacttcaacctggtgacagagccagactctgtatcttaaaaaaaaaaaaaaaaaaagccattttaagatttcttctgcatttttgcttcacactggtgcttccccagtttacacacacaatcctagttctgtaacttccggcagctgtgaaggtagcttgctctgcacagccaaagcctatctccgtgtgtgcagcagccaggccctggagactcacacacaggaagaaagggctggaaaggaatgc

SEQ ID NO: 178227 - DNA, 508 bp, Homo sapiens
gaattctcccctcttcaatgccatggtacagacacataaaatgccattttattgggaggccaaggcgggtggattgcctgagctcaggagttcgagactaccctgagcaagacagtgaaacgtcgtatctactaaaatgcaaaagaaattagccaggcatggcggtgtgcrcctgcagtcacacctactcaggaggctgcggtagaagaattgcttgaacctgggaggtggagggtgaagtgagccgagatcgcgccactgcacttcaacctggtgacagagccagactctgtatcttaaaaaaaaaaaaaaaaaaagccattttaagatttcttctgcatttttgcttcacactggtgcttccccagtttacacacacaatcctagttctgtaacttccggcagctgtgaaggtagcttgctctgcacagccaaagcctatctccgtgtgtgcagcagccaggccctggagactcacacacaggaagaaagggctggaaaggaatgc

SEQ ID NO: 178228 - DNA, 508 bp, Homo sapiens
gaattctcccctcttcaatgccatggtacagacacataaaatgccattttattgggaggccaaggcgggtggattgcctgagctcaggagttcgagactaccctgagcaagacagtgaaacgtcgtatctactaaaatgcaaaagaaattagccaggcatggcggtgtgcacctgcagtcacacctactcaggaggctgcggtagaagaattgcttgaacctgggaggtggagggtgaagtgagccgagrtcgcgccactgcacttcaacctggtgacagagccagactctgtatcttaaaaaaaaaaaaaaaaaaagccattttaagatttcttctgcatttttgcttcacactggtgcttccccagtttacacacacaatcctagttctgtaacttccggcagctgtgaaggtagcttgctctgcacagccaaagcctatctccgtgtgtgcagcagccaggccctggagactcacacacaggaagaaagggctggaaaggaatgc

SEQ ID NO: 178229 - DNA, 507 bp, Homo sapiens
acagacacataaaatgccattttattgggaggccaaggcgggtggattgcctgagctcaggagttcgagactaccctgagcaagacagtgaaacgtcgtatctactaaaatgcaaaagaaattagccaggcatggcggtgtgcacctgcagtcacacctactcaggaggctgcggtagaagaattgcttgaacctgggaggtggagggtgaagtgagccgagatcgcgccactgcactycaacctggtgacagagccagactctgtatcttaaaaaaaaaaaaaaaaaaagccattttaagatttcttctgcatttttgcttcacactggtgcttccccagtttacacacacaatcctagttctgtaacttccggcagctgtgaaggtagcttgctctgcacagccaaagcctatctccgtgtgtgcagcagccaggccctggagactcacacacaggaagaaagggctggaaaggaatgcactaaccaacatgggtgctgagaatt

SEQ ID NO: 178230 - DNA, 625 bp, Homo sapiens
gaacacaattttttcacagttttgtttggtgcctgaaaattacgagtaggtaagcaaagttagagcaacaatatccacagaacatggccagtcacgtaaaaaaatgcctttgaacacccagcagtttctattctattacagttctgagtttgccagacccctaattgccaacattacataataaagtgataggaccaatttttcttcaaattgatttcggttatagaaaaaagtccatatgtctttcagaacaatcctattggatatgagactacattttagaaatatattattactattattaaaagtgtgtattatgtatatgtgtgtgtatagatagatagaaagctaggtagatagataatagacataaatatagataattttgcctttgsgtttagaccctaaaaaatataaagacaaaactaattctagaaaaagaagtcatgccaggaaaatgtcatgcagtagccaagtctacaaaaatacttatatggaaacacctaacagatccttgactccaccatggaagattccttattttattaaaattctgatataaaaacttctagtgaaatgctttatgttaaaaataactagctttagttccgctaaaatatagatt

SEQ ID NO: 178231 - DNA, 625 bp, Homo sapiens
gaacacaattttttcacagttttgtttggtgcctgaaaattacgagtaggtaagcaaagttagagcaacaatatccacagaacatggccagtcacgtaaaaaaatgcctttgaacacccagcagtttctattctattacagttctgagtttgccagacccctaattgccaacattacataataaagtgataggaccaatttttcttcaaattgatttcggttatagaaaaaagtccatatgtctttcagaacaatcctattggatatgagactacattttagaaatatattattactattattaaaagtgtgtattatgtatatgtgtgtgtatagatagatagaaagctaggtagatagataatagacataaatatagataattttgcctttgcstttagaccctaaaaaatataaagacaaaactaattctagaaaaagaagtcatgccaggaaaatgtcatgcagtagccaagtctacaaaaatacttatatggaaacacctaacagatccttgactccaccatggaagattccttattttattaaaattctgatataaaaacttctagtgaaatgctttatgttaaaaataactagctttagttccgctaaaatatagatt

SEQ ID NO: 178232 - DNA, 580 bp, Homo sapiens
ggatctgttgcgggtgatgaaaaagttttgtgtatagatagtggtgatggttatacaacgttgtgaatgtgtttaatgccactgaatcgtatacttacttacggatggttaaaataataaacgttatgtgtatacatttttttccacaaaaactggagggaaaatggattataatattttaaaattcaatatgtgattaatagtcatttggaaagaaaatgtgaaagtattgtacggtgaataaaaaccctaggaagaaacccatttcctaatctgtagggctggcctatgaagcatgagttcatgggctccagagttatttcactatcaggaattgcacgttattggcttttcacagaatacatataattgctggaactayagagcaaagaggctcgttaggataatcttccaggcctcctcattttgcaggtcaggaagttatttggctctggttctggctccagaaatctacccatgataaagatgggcaagaaccacggccttttgatttccagcccaatatgcctccctgcaaaactctcctgtacaggaaaatcaaaacagccccagaaaacac

SEQ ID NO: 178233 - DNA, 615 bp, Homo sapiens
ttgactatggtggtgtcttagtcctttttgtgctgctaaaacaggatatcacagtctcagtaatttgtaatgaacagagatctattggctcgcaggtctggaggctggaaagcttaagatcaaggggcccacatctgtcaagggtctctggaggaaggcagaagggcaagacagcragctcacagactcaagctgtttttgtaatcagtatcaatccatggcctaaacacctttcattgggctgtacctcccagcactattgcagtggagattaaatttccaacacatgtttttgtaagaacacattcaaaccacagcaggtgctattacacaaacctacacatataataagattgcacagaactaaatacacccatacaccacacacacacacacacacacacatatatgaaagcaaaatggagaaatctaaataagattagttgatgtcaacatcttggttttgatattgtactatagttgtgcaagatgttaactttaggggaagctgggcaaagagtacatgggatctttgtgtattatttcttaaaattgcatgtgagtctccaattattccaaaatgcaaagctatatcttcaaaaaataaataacata

SEQ ID NO: 178234 - DNA, 615 bp, Homo sapiens
ttgactatggtggtgtcttagtcctttttgtgctgctaaaacaggatatcacagtctcagtaatttgtaatgaacagagatctattggctcgcaggtctggaggctggaaagcttaagatcaaggggcccacatctgtcaagggtctctggaggaaggcagaagggcaagacagcaagctcacagactcaagctgtttttgtaatcagtatcaatccatggcctaaacacctttcattgggctgtacctcccagcactattgcagtggagattaaatttccaacacatgtttttgtaagaacacattcaaaccacagcaggtgctattacacaaacctacacatataataagattgcacagaactaaatacacccatacaccacacacacacacacacacacacatatatgaaagcaaaatggagaaatmtaaataagattagttgatgtcaacatcttggttttgatattgtactatagttgtgcaagatgttaactttaggggaagctgggcaaagagtacatgggatctttgtgtattatttcttaaaattgcatgtgagtctccaattattccaaaatgcaaagctatatcttcaaaaaataaataacata

SEQ ID NO: 178235 - DNA, 615 bp, Homo sapiens
ttgactatggtggtgtcttagtcctttttgtgctgctaaaacaggatatcacagtctcagtaatttgtaatgaacagagatctattggctcgcaggtctggaggctggaaagcttaagatcaaggggcccacatctgtcaagggtctctggaggaaggcagaagggcaagacagcaagctcacagactcaagctgtttttgtaatcagtatcaatccatggcctaaacacctttcattgggctgtacctcccagcactattgcagtggagattaaatttccaacacatgtttttgtaagaacacattcaaaccacagcaggtgctattacacaaacctacacatataataagattgcacagaactaaatacacccatacaccacacacacacacacacacacacatatatgaaagcaaaatggagaaatctaaataagattagttgatgtcaacatcttggttttgatattgtactatagttgtgcaagatgttaactttaggggaagctgggcaaagagtacatgrgatctttgtgtattatttcttaaaattgcatgtgagtctccaattattccaaaatgcaaagctatatcttcaaaaaataaataacata

SEQ ID NO: 178236 - DNA, 368 bp, Homo sapiens
gaaatgcttgagagtataagatagtgtattataccacaggyacaaaagagtaaacaaatacagttgtagaaacaagggcattaaatttagatcaaaatcaacatgtctacagagtaaatcccctagtgaactcgcttgtaagcttgcatcttagatgtgatgacttctttagaaaatactctgaaaatgtgtaagaaagtctcagcagacaagatggttatattgcagggctcacttgcatgggcaatgcaaagaaagatagtactgggttcctgcaacatgctgttttaagttaacagagaataccctcctattacgtacacatggatacaacataacgaaactgttcgagaatacgtaaagtgcga

SEQ ID NO: 178237 - DNA, 368 bp, Homo sapiens
gaaatgcttgagagtataagatagtgtattataccacaggcacaaaagagtaaacaaatacagttgtagaaacaagggcattaaatttagatcaaaatcaacatgtctacagagtaaatcccctagtgaactcgcttgtaagcttgcatcttagatgtgatgacttctttagaaaatactctgaaaatgtgtaagaaagtctcagcagacaagatggttatatwgcagggctcacttgcatgggcaatgcaaagaaagatagtactgggttcctgcaacatgctgttttaagttaacagagaataccctcctattacgtacacatggatacaacataacgaaactgttcgagaatacgtaaagtgcga

SEQ ID NO: 178238 - DNA, 358 bp, Homo sapiens
aaagagagacaggagacagagatggcaggttcatcacctatggatgacaggcaaaaccatattttatacaacataaagtccctcaaaacaaagtacttcttgagcaaagcgtacagctgagggtgacagccaggggaacatcaattttcatcaggtgggtggatgaggttccatttggtgtcagcactcacactgaagttcctcacatttgacggctgcagggyaccatttgggctactgcagtcgaaaattgtctcataattcaagtacttaaaatagcctatcacaatcccacttcatctgcatcatattagcaagtgttccaatgataaggtcggaaaattgtacaagtgtgtga

SEQ ID NO: 178239 - DNA, 602 bp, Homo sapiens
accaaacttctgttgaaaaggagaactatttatttatttattatttgttcttaaattaagatgggggtcttgctctgttgcccaggctggtctcagactcctggcctcaagcaatcctcctgccttggcctcccatatgtgtgggccaccatgcccagactagggaaaactatttatcatggaaaggaaattaaacattcatagtgaacccaacatgttattattaagggggaaatagattctctctctatatcaattaaaaacttcaattatcacattgcctaggtttctttaattgacacattatagcggctttcctaatgtcaaggacatatccacatagtagtgactatttggcaattgcatttctctctctattccacggcttctcttgagttatcacatttcctgatcaagctaattacatcaggaaccatttactgacatttctgtagtaaataaaagtgaaagatcctgttgtatgtaatatagaacataatttatmgggcgaagcacagaacaggttggctggccatggaactggctatccccattggtttagcaatgatcatacgcaagttactgctcctgaagcccacagg

SEQ ID NO: 178240 - DNA, 538 bp, Homo sapiens
gataatgaattctgcccagtcctgcttggagttctgggcctgaggctcactctccatttgttaaaaagagacatgagcaagaattaggaggtgtcaaaatcatgctcctcatcggaaaacrgaagtttgagagaattgaaaacagagcaatgtcctcaactttatgtttcaatgttccttaatccatgcagcccatgaaatcacaccctgaccatttgaacattcaccactttgttccatgacatggaagccttccccgtacattgtatggagaaaaacagttccagcaaagcatttgagttgcaccaaaacactttgacgttgctcgtcacaggtgatcctaagagggaaaccttttccgcctgacaaccacagtgtattttgaaacaataacctgagaaatgttctatgttttaccagccctgcttaagcatttagtgctcataaggtaagacagtggcatcaccagtgaacacttaacagcgggtggtcctaaggcaggggctgcttggcacatgagaggtgcttgaagacttgt

SEQ ID NO: 178241 - DNA, 538 bp, Homo sapiens
gataatgaattctgcccagtcctgcttggagttctgggcctgaggctcactctccatttgttaaaaagagacatgagcaagaattaggaggtgtcaaaatcatgctcctcatcggaaaacagaagtttgagagaattgaaaacagagcaatgtcctcaactttatgtttcaatgttccttaatccatgmagcccatgaaatcacaccctgaccatttgaacattcaccactttgttccatgacatggaagccttccccgtacattgtatggagaaaaacagttccagcaaagcatttgagttgcaccaaaacactttgacgttgctcgtcacaggtgatcctaagagggaaaccttttccgcctgacaaccacagtgtattttgaaacaataacctgagaaatgttctatgttttaccagccctgcttaagcatttagtgctcataaggtaagacagtggcatcaccagtgaacacttaacagcgggtggtcctaaggcaggggctgcttggcacatgagaggtgcttgaagacttgt

SEQ ID NO: 178242 - DNA, 538 bp, Homo sapiens
gataatgaattctgcccagtcctgcttggagttctgggcctgaggctcactctccatttgttaaaaagagacatgagcaagaattaggaggtgtcaaaatcatgctcctcatcggaaaacagaagtttgagagaattgaaaacagagcaatgtcctcaactttatgtttcaatgttccttaatccatgcagcccatgaaatcacaccctgaccatttgaacattcaccactttgttccatgacatggaagccttccccgtacattgtatggagaaaaacagttccagcaaagcatttgagttgcaccaaaacactttgaygttgctcgtcacaggtgatcctaagagggaaaccttttccgcctgacaaccacagtgtattttgaaacaataacctgagaaatgttctatgttttaccagccctgcttaagcatttagtgctcataaggtaagacagtggcatcaccagtgaacacttaacagcgggtggtcctaaggcaggggctgcttggcacatgagaggtgcttgaagacttgt

SEQ ID NO: 178243 - DNA, 540 bp, Homo sapiens
tgctcttgcgttgcccagcccgactcccccctactccgggccttgcttccacccaggccgtgagcaagtsgtgcgctggaggtgcgaggagcccgcgtccccaccaggcccctcttctcgggagcggaggtgcgccagggagttagttttgtcccacagaaggagggcagccccccgcgccggcccccctcccccgccttgtcccgcgggaccgggctggagccgcagtggccggtcctattttcttggcagattgttagttctggcgagtgtgtgtgttgtacttctcagtgacggccccttctttcacctcctgtcccatctctggctctgggggccaaggatactttttcttcttcccggaccccccactcccaccgcgttgcctttagccgcgaatccacttgctttgggaacactattctttcagtgtgtatttagcgcatcatccttctgagagagcggtcagattaaaaaatactagcttaactcttcctgagtgacggaggaatcataaataattgaagaaaaaggcacata

SEQ ID NO: 178244 - DNA, 540 bp, Homo sapiens
tgctcttgcgttgcccagcccgactcccccctactccgggccttgcttccacccaggccgtgagcaagtcstgcgctggaggtgcgaggagcccgcgtccccaccaggcccctcttctcgggagcggaggtgcgccagggagttagttttgtcccacagaaggagggcagccccccgcgccggcccccctcccccgccttgtcccgcgggaccgggctggagccgcagtggccggtcctattttcttggcagattgttagttctggcgagtgtgtgtgttgtacttctcagtgacggccccttctttcacctcctgtcccatctctggctctgggggccaaggatactttttcttcttcccggaccccccactcccaccgcgttgcctttagccgcgaatccacttgctttgggaacactattctttcagtgtgtatttagcgcatcatccttctgagagagcggtcagattaaaaaatactagcttaactcttcctgagtgacggaggaatcataaataattgaagaaaaaggcacata

SEQ ID NO: 178245 - DNA, 592 bp, Homo sapiens
ctgtctccaccaaaactcccttccccaaagaaatccatggatggaattcaagaggcctatgaacttgaatgggaaggaaaaaatatcawgtctttattttcactaatctcaaatagaaacttagcaattccttcccttactaatgtaggccacaagtcatagcagtactagctgtatctgtgactttgtcactaacagatatcccagatatttttcttttttttaaatggagtctcgctctgtggcccaggctggagtgcagtggtatgatctcagctcactgcaacctccccgtcctgggttcaagcgattctcctgcctcagcctcccaagtagctgggattacaggcatgcaccaccacacctggctaattttttatatttttggtagagacagggtttcaccatgttggctaggctggtctcgaactcatgacctcaagtgatctgcctgcctcggtctcccaaagtgctgggattacaggtgtgagccactgtgcccgaccacatcccagatatttctatgtcacattattgcagttaaaactatcttgaaatatcatttgtgttcatactgctatgaaattatggt

SEQ ID NO: 178246 - DNA, 324 bp, Homo sapiens
ccacttgcagaccctctaaaagagtgtttcagaattgctcaatcaaaggaaaggttcaattctgtgtgaccaatgcactcatcacagagaagtttgtctgaatgcttctgtgtagaatggatttgaagataattccttttccaccacagtccgcaaagggctaaaaatatccacttgccgattccacaaaaagagatatttaaaactgmtcaatcacaagataggttcaacttggtaatttgaaagcacacatgacaaacaatttctgagaatgtttctgtgtagtttttaagggaagatatttgatattcaaatgtaggcctc

SEQ ID NO: 178247 - DNA, 251 bp, Homo sapiens
atgcttccgtgtagtttttatgtgaagatatttacttttccacaattgccccaaagctctaaaatrtccacttgcagaccctctaaaagagtgtttcagaattgctcaatcaaaggaaaggttcaattctgtgtgaccaatgcactcatcacagagaagtttgtctgaatgcttctgtgtagaatggatttgaagataattccttttccaccacagtccgcaaagggctaaaaatatccacttgccgattc

SEQ ID NO: 178248 - DNA, 251 bp, Homo sapiens
atgcttccgtgtagtttttatgtgaagatatttacttttccacaattgccccaaagctctaaaatgtccacttgcagaccctcyaaaagagtgtttcagaattgctcaatcaaaggaaaggttcaattctgtgtgaccaatgcactcatcacagagaagtttgtctgaatgcttctgtgtagaatggatttgaagataattccttttccaccacagtccgcaaagggctaaaaatatccacttgccgattc

SEQ ID NO: 178249 - DNA, 251 bp, Homo sapiens
atgcttccgtgtagtttttatgtgaagatatttacttttccacaattgccccaaagctctaaaatgtccacttgcagaccctctaaaagmgtgtttcagaattgctcaatcaaaggaaaggttcaattctgtgtgaccaatgcactcatcacagagaagtttgtctgaatgcttctgtgtagaatggatttgaagataattccttttccaccacagtccgcaaagggctaaaaatatccacttgccgattc

SEQ ID NO: 178250 - DNA, 251 bp, Homo sapiens
atgcttccgtgtagtttttatgtgaagatatttacttttccacaattgccccaaagctctaaaatgtccacttgcagaccctctaaaagagtgtttcagaattgctcaatcaaaggaaaggttcaattckgtgtgaccaatgcactcatcacagagaagtttgtctgaatgcttctgtgtagaatggatttgaagataattccttttccaccacagtccgcaaagggctaaaaatatccacttgccgattc

SEQ ID NO: 178251 - DNA, 543 bp, Homo sapiens
agcagtttggaaatactctttttgtagaatctrcaggtggataattgtggagattggaggcatattgtggaaaagcaaatatcgtcatataaacactatgcagaagccttctgagaaacatctttgtgaggtttgccttcaactcacagagctggacctctcttttgagtgaccagtcttgaatctctctttttgtacaatctgcaagtggatatttggagcgatttgaggcctacatttgaaaatcaaatatcttcccttaaaaactacacagaaacattctcagaaattgtttgtcatgtgtgctttcaaattaccaagttgaacctatcttgtgattgagcagtattgaatctctctttttgtggaatcggcaagtggatatttttagccctttgcggactgtggtggaaaaggaattatcttcaaatccattctacacagaagcattcagacaaacttctctgtgatgagtgcattggtcacacagaattgaacctttcctttgattgagcaattctgaaacactcttttagagggtct

SEQ ID NO: 178252 - DNA, 474 bp, Homo sapiens
tttaattttctgccattggctgcaaagtgctccaaatattcacttacatattatacaaaaagagtgtttccatactgctaaatcaaaagaaaggttcaactctgtgaaacgaatgcacacatcaccaagaagtttctcagaattcttctgtctagtttttatgtgaakatatttccttttccaccacaggcctcacggtgcttgaaatgtccacttgcagattctaaacaaagagtgtttcaaaactggtccatcaacggaaagtttcgtctctgggagatgaatgcgcatatcacaaaaactttctcagaatgcttctatctagtttttatgtgaagatatttccttttccactattggcgtcaaagcgtcccaaatgtcatcttgcagattcaacaaaagagagtttcagaactgctcaaacaaaagagagccttaactctgtgagatgaatgcacacatcacatagaagtt

SEQ ID NO: 178253 - DNA, 474 bp, Homo sapiens
tttaattttctgccattggctgcaaagtgctccaaatattcacttacatattatacaaaaagagtgtttccatactgctaaatcaaaagaaaggttcaactctgtgaaacgaatgcacacatcaccaagaagtttctcagaattcttctgtctagtttttatgtgaatatatttccttttccaccacaggcctcacggtgcttgaaatgtccacttgcagattctaaacaaagagtgtttcaaaactggyccatcaacggaaagtttcgtctctgggagatgaatgcgcatatcacaaaaactttctcagaatgcttctatctagtttttatgtgaagatatttccttttccactattggcgtcaaagcgtcccaaatgtcatcttgcagattcaacaaaagagagtttcagaactgctcaaacaaaagagagccttaactctgtgagatgaatgcacacatcacatagaagtt

SEQ ID NO: 178254 - DNA, 474 bp, Homo sapiens
tttaattttctgccattggctgcaaagtgctccaaatattcacttacatattatacaaaaagagtgtttccatactgctaaatcaaaagaaaggttcaactctgtgaaacgaatgcacacatcaccaagaagtttctcagaattcttctgtctagtttttatgtgaatatatttccttttccaccacaggcctcacggtgcttgaaatgtccacttgcagattctaaacaaagagtgtttcaaaactggtccatcaacggaaagtttcgtctctgggagatgaatgygcatatcacaaaaactttctcagaatgcttctatctagtttttatgtgaagatatttccttttccactattggcgtcaaagcgtcccaaatgtcatcttgcagattcaacaaaagagagtttcagaactgctcaaacaaaagagagccttaactctgtgagatgaatgcacacatcacatagaagtt

SEQ ID NO: 178255 - DNA, 466 bp, Homo sapiens
agatatttgcttttccacagtaggcctcaaatcgctctaaatatccacttgcagtttctacaaaaagagtgtttccaaactgctccatcataagayatgttcaactctgagagttgaatgcacacatcacaaagaagtttctcagaatgcttctgtgtggttttaatttgaagatatttccttttccaaaacaggcctcaaagctctccaaatatccacctggttattctgcaaaaagagggtttcaatactactcaataaaaaggaagattcaactctgtgtgaggaacgcattcatcacaaagaagtctctctgaatgcttctgtgtagtttttatatgaagatatttccttttacaccacagggtgcaaagagctccaaacttccacttgcagattctacaaaaagagacattcaaaactgtacaatcaaaagagagtttcaactctgcgtgttcaatgcaca

SEQ ID NO: 178256 - DNA, 466 bp, Homo sapiens
agatatttgcttttccacagtaggcctcaaatcgctctaaatatccacttgcagtttctacaaaaagagtgtttccaaactgctccatcataagatatgttcaactctgagagttgaatgcacacatcacaaagaagtttctcagaatgcttctgtgtggttttaatttgaagatatttccttttccaaaacaggcctcaaagctctccaaatatccacctggttattctgcaaaaagagggtttcaatactactcaataaaaaggaagattcaactctgtgtgaggaacgcattcatcacaaagaagtctctctgaatgcttctgtgtagyttttatatgaagatatttccttttacaccacagggtgcaaagagctccaaacttccacttgcagattctacaaaaagagacattcaaaactgtacaatcaaaagagagtttcaactctgcgtgttcaatgcaca

SEQ ID NO: 178257 - DNA, 466 bp, Homo sapiens
agatatttgcttttccacagtaggcctcaaatcgctctaaatatccacttgcagtttctacaaaaagagtgtttccaaactgctccatcataagatatgttcaactctgagagttgaatgcacacatcacaaagaagtttctcagaatgcttctgtgtggttttaatttgaagatatttccttttccaaaacaggcctcaaagctctccaaatatccacctggttattctgcaaaaagagggtttcaatactactcaataaaaaggaagattcaactctgtgtgaggaacgcattcatcacaaagaagtctctctgaatgcttctgtgtagtttttatatgaagatatttccttttacaccacagggtgcaaasagctccaaacttccacttgcagattctacaaaaagagacattcaaaactgtacaatcaaaagagagtttcaactctgcgtgttcaatgcaca

SEQ ID NO: 178258 - DNA, 592 bp, Homo sapiens
gcacgttaaacactcctctaaatcatcratctgtttctatgactgttagcttgcatctttagttacactgatttatttctaatctattatttttcagccacggaatggaagaaggtcagcagggttcatttaaaatggtatgtgagaaataaataaacaaataaataaataaaatagtatgcatttcacagttcaacacagtttgacatttgctgttgttttcaaatagtcacaaattaaactatgttaaatgtatttctattatttgattgcatatgtacatgaatgttccatataaatactacaatgataggagctgtaagggctttattgtaatgagaaaataccagtattttagggcctcatttgctttgcctatgtcatttattcctcagactatgtcacaatagtaatgatcataagtgattttgtagacattgatcttatcatcatttattgtgcaagtaggatatgtcagggaatgaattcttattgcagtaatcagtgtctatcataacgggccaagatttacggactgaaagtacttctgtcatctaaataactgatactcaaagattctttataaaagcta

SEQ ID NO: 178259 - DNA, 592 bp, Homo sapiens
acttcacctcgcaatatctgaaaggcaaccagtcttgtctattagcagaaagaaaataatcttattaatagaggatcatgaacacacattgggaacttttaacatcaaataaatgtttagtgggcacagagttaacttcagatggagattgaatttatctcctctsaggttccccttgatcttttttccttctgacctctgtcttagattcccacctcctccatcaggaaggttgctggccgattggaaaggagtggctcttttgagtaggtagaattgggtctatacagacattcttcagagcagagtatctaacaaatctttgtctttctaatgttgaccaattattatagcttaagttacaccttttactaacaaagttcctgaatttcacttcttgttaacctgagtgaagaactcaggttaataagaagaagcagaagagaaaaaaatacattatttttagaaaaataaattgccttgataagatggggacttgagagcaaggagagcatgctgccctaaaaccacaaatgcatggggcagcattagctagttctgtgcacagtacttccactagcctggactttgg

SEQ ID NO: 178260 - DNA, 545 bp, Homo sapiens
aaccaacagaaacagatttacagagatttttagataacagaatgatcagaaataggttataaaacatccgtactggctgggcgcggtggctcaygcctgtaataccagcactttgggaggccgaggtgggcggatcacgaggtcaggagatcgagaccatcctggctaacacggtgaaaccccgtctctactaaaaaaatacaaaaaattagccaggtttggtggcaggcgcctgtggtcccagctacttgggaggctgaggcaagagaatggcatgaacccaggaggcagagcttgcagtgagcccagatcacgccactgtactccagcctgggcaacagagcgagactctctaaaaaaaaaaaaagtacttataaatactgaaaactataaaacagacaaatagagtagaatagaaagccttgaaataaacccacacatattttcaaaaaatttttaacaagagtgccaagaccattaaatgggcaacagttaattttttttcaataaagggtgctgggtaaactgggtatccacatgcaaaa

SEQ ID NO: 178261 - DNA, 563 bp, Homo sapiens
gggcaaaagattttgctatagtttgagtgtgtctgctccaaaattcagttgtttccaatgtgatagtattaggaggtggggcctttaagaggtgattaggccatgaagtctccttccttataaatgggattagatacccttataaaagggcttgctacagagagtatgtcccttttttttttttttttttttttttttttttactattctgtcttttgccacgtgaggacacagtgttcctctcctctggaagacacagtgttcaaggtaccatcttgaaagaagagatcagaccctcactggacaatgaacttsacagtgccataatcttagatttcccagcctccagaacagtgaaaaataaatttctgttctttataatttacccagtctaagatattttgttatagagtacaaactggactaagacaaacttgaatagacgtttcttaaaagaagatctccaaatagccaataaacacatgaaaagatgcttaacatcactaataatgaaggggatgcagctcaaaaccacagtctacttcacacccactagaatgttt

SEQ ID NO: 178262 - DNA, 474 bp, Homo sapiens
  misc_feature (1)...(474): n = A,T,C or G
nnnnnnnnnnnnnnnnnnnnnnaatcaaattaaatcatatcgtgaatgtagaatagagatgaagcatgaatgacaattgatattttaattaaattcagaatttaggtctttgagaatgaaagattaaaggttcctggctgaattaaatagtttagtactataaactatacactttcctcttagtactactttcactgtatcccataagttttggtatgttgtgtttccattattatttgtttcaagaaacttcaatttccttgktaatttcttcattgaatcactggtaattcaggagcatgttgtttaatttccatgtgtttgtatagttttttgaatgttttaaggcttgttttgtcgttttctttcagactgaagaactctctttagcacttttttgtagaaaagacctggtgttgatgaagttcttcagcttttgtctggtaaaatatttatttctccttcatgttttaa

SEQ ID NO: 178263 - DNA, 450 bp, Homo sapiens
agaagggagaaaaggccatgttatcaagttgatsgtcattgtgaatgcccaaggcttgatgctgctgggatattctaaagagccataaagtatctctcacagctgtcttcctgaagaggaggtaggagcatttatccatccatccccactaccattgtatcaaggatttttttcagaaggataatgactcccttaaactttgaacatttaggttgtataggccattgtaatgccactagtaaaagatgggctgagaggatgtgaagtggagcataagagatgtccactgcagttcacccgtaccacaagatccactgtgtcctacatgaagtccaatccaaagccttcaagatggtggctggcaacaatctacaaaagactcaattcaggaaagttaatagaacgggttatactccacactgctgcagtggtcccaaagctatagttggt

SEQ ID NO: 178264 - DNA, 582 bp, Homo sapiens
ttgatcaattgaaaagtgaaaataacagcctcatccttatttaatagaattgtctttaaataacattcacatgtaaaagcattttgcaaaataaccaggtgcattccatatttgttaactactgttattcctgtttacttttattatcttaataattatcaaaattaatgttcaaagaacatacagatggttaagcctaatatatacatatgtgtgtacgtatgtatatatgtatgtataatttcctaggaatacctaataatgatgagaaatgacaaactckaaagacttaaaataacagaaaatatattctcacaattccaaggaatagaagtttctgccatttctaaggtgtgcagagttcttgaataggcagaataccaaataattctcaggctcagcaaacatctgacctggtacactgaaaagaaaataaaagagtcaataaaaggtgtggaattaaagacagatcaaatctttctttcacttggcaaaactcagcttattatatctgtaattacaatattaaaagatgtagattaagactgtgatagtattctgtttaatttaaaatggaaaaaa

SEQ ID NO: 178265 - DNA, 563 bp, Homo sapiens
ggttacagtactgtgggttagcaagtggggctggcctcaactgggtggtwcttttgctagtttctttgaaaggctcacttatgtctggctggaatcaactgccacgtcaggtgtcagctgattggtcaaggatgaactcatttgagatgatatctctgctccacgaggtctctcagacatcaaccaacagtctattcaacacaggtattttggaatctgggtgctcatgaactcttatcaagagcaaaagctataaggcttaaaagtgtcagactgtctttgtgcaagctcagagcttgtcaaagcaaggcataggctagtcaaacacagaaataggggggaaagtacacctcctaatggaagtagttacaaagcgttccagctggtttacaaactcccccaacagttactaaggtagtattatgtatgccagatgtcatcatgattcactgttggttatgtgggttgagaagatcttgttttttgtgtttcctgtattttgcagagaatttagagagagaatccatttccaactaatgtagcttagccataataaatgtgct

SEQ ID NO: 178266 - DNA, 576 bp, Homo sapiens
caaaaatcaacaaatgggattacatcaacatcaaattaaaaagcttttgcacagcaaactaaactattaacagaatgaagagacaacctaaaaatgggagaaaatatttgcaaccatacatctgacaaggggttactatctaaaatatatcagagaatcagacgacttaatagcaaaacaamaacaaacaaaaaatcagatttaaaaataaaaactttaatagacatttctgaaaagaagacgcacaaatggccaccaggtatataaaaaatggtcaacatcactaatcatcagggaaatgcaaatcaaaaccacagtgatatatcactattctagttaaaatggctattatcaaaaagacaaaagaaaacaagtgttggtgaggctgtgtagaaaatcaaaaagacaaaagaaaacaagtgttggtgagctgttggtaggattctaaactagtatagccattatggaaaattgtataaaatctcctcaaaaaattaaatatagaactaccatatgaaccagcaatcccattcctgggtatacatccaaagaaaataaaataagtttgtcaaaaac

SEQ ID NO: 178267 - DNA, 563 bp, Homo sapiens
tacttacacacttgccttccccactaggctgaaagcttcttgaggtcagggattatgtctgattgaatcacaacagattygataaatagttgttgagtgaagaaatgcattaaccaactcctttctatatagcaggctattgatatttttaaaaatacaaatgatcctctaataaaagataccagtcccgagacttggatgctagatggtcagctaggcctactcacttatgaaactggtgaacccaaagtgaggggatacaaaacaatcatttgggtagagaaagaaaatattagaattttaaaaaatcaaattcttaaaaaaaacaataatttatttttctgacacttaatattctcattgacactggatatttcctgtgtatttcagatgagcatatgtcccattagtttcatgaatttctgtaaatattttcactttaatacataaaatttgatacctcataaccacatatatactaattacataagttctaaattgtaataataaaattaatattcatgagcccgcaaattaaatatggttgtgttaggctgtgggct

SEQ ID NO: 178268 - DNA, 449 bp, Homo sapiens
gcctactcacttatgaaactggtgaacccaaagtgaggggatacaaaacaatcatttgggtagagaaagaaaatattagaattttaaaaaatcaaattcttaaaaaaamcaataatttatttttctgacacttaatattctcattgacactggatatttcctgtgtatttcagatgagcatatgtcccattagtttcatgaatttctgtaaatattttcactttaatacataaaatttgatacctcataaccacatatatactaattacataagttctaaattgtaataataaaattaatattcatgagcccgcaaattaaatatggttgtgttaggctgtgggctcataaactacaatactacctataacctttaaacctctgttttgctcctccacttgaatcaaatcccagagatgttcactatgctgtactgaaaattaccacac

SEQ ID NO: 178269 - DNA, 449 bp, Homo sapiens
gcctactcacttatgaaactggtgaacccaaagtgaggggatacaaaacaatcatttgggtagagaaagaaaatattagaattttaaaaaatcaaattcttaaaaaaaacaataatttatttttctgacacttaatattctcattgacactggatatttcctgtgtatttcagatgagcatatgtcccattagtttcatgaatttctgtaaatattttcactttaatacataaaatttgatacctcataaccacatatatactaattasataagttctaaattgtaataataaaattaatattcatgagcccgcaaattaaatatggttgtgttaggctgtgggctcataaactacaatactacctataacctttaaacctctgttttgctcctccacttgaatcaaatcccagagatgttcactatgctgtactgaaaattaccacac

SEQ ID NO: 178270 - DNA, 556 bp, Homo sapiens
ccttacaaatgttaagaatggcttcaagaaagacataaattacaatccagcatgtgccacaaatatcacttatttgttcttagaatgagccttgggtatgggggataggaatattctagaaaaactgtcttatctaatattattatttataaaataatgaatgakccatgggggcagaggttttgcctgtttttttcccccttttttctctgctaaatatgtaatgatgtatgtgtggtggtgcttgatggtaaagttcctacacatgtaggttctgaagtggacataataggtcctcccacctagctattgacatgctctccctgctcttattctcactccacaaccaaccatctagccctcaaccaacacaagtggaatttctttcaaagtaaattcattctactacctaggagccctttatgacccagccctgcctcccacatgatttccctctgaccatccctccaccctctatggcagctggctgcaccagccctcattgtgatactgaacagagccatgtgcatttttgtctttgggtctctgcaccagc

SEQ ID NO: 178271 - DNA, 351 bp, Homo sapiens
ctttcaaacagtaggtgcttttatttcttcattgagctatgtttctactcagaacctgttaaagaagttctatttttttcagcactctgaccaaaaaaatgggtttttttacattaagctctctgtgtcccaccttttcccaaagtgattcattaaatttacaagatacatggcattttgtggaaatttgtcatgggactggctggtctgttcctgagtagtaggaggtaaagtgacactactaatacaaagacaagtcygtccaggcagagaagccaccaaggagggagaggcggttggagaaagtctacatttccaagggatacagagattctgggtgacaccgggtta

SEQ ID NO: 178272 - DNA, 368 bp, Homo sapiens
atccaagttctttgatatgctaagttcttcagaactttctaatgagggctacattaattaatataccatgataacaaaaagagggagatcaacagaaaggattacagactggcaaatctaacaaaggccatggaaactaatcaagcctacttacaaactaagattgatcttgcgacatgatagtttcaattagatacagatttcaacaaaagtactgtataagaatttattattacactttatgaagctccaactttaaagacaacagaaaacgtatgtttkttccttttactctataaataaaagcataatgcttaatatcaaaaaggtgactatgacttattgtattactatcaaataaaattaat

SEQ ID NO: 178273 - DNA, 587 bp, Homo sapiens
tatcttaagctagattagaaaggttgacacagattccattttactcactaaaaccctttttctggagccctgagccatgatataaacattcaactgctctgaagctgtcattctatgaagttgcccaatctaccctgtacagatagactacgtgctgaatccctaaggccataaggagaaagggagtgagagagagagggagagagagaggtccagctggtcctgctccccacagttcagctcccactacctcctggcagcaawccgagtagatcccagctagaaccacccaagcaagcctttccaaattcccgattcgcataaactatgaaagataataaaatgatttttgttttgagtcactacattttgggataatatgttatgcaacaatagtaaccagaacacctggtgattgattgctgctgatgcccattagttagccttcatgtctccaggctctctcacttccagtatacatactacccaccacctacacttatcctgtccatttccagaaattttccatgactcaaattattgaaaagttaataagagaactccttatactaccaatttatgtcaat

SEQ ID NO: 178274 - DNA, 566 bp, Homo sapiens
tattgctgaatagtattccaatgtatggttataccgcaatttatttatccattcacctgtggatatatatttgggttgtttccagtatttggttatgacaaataaagctgttataaaaatatgtacacaagtctttgaatgggcatgtgcttttattttgaataaagatcttgaagtggactggctagaacacatggtacatgaaatcaatatgctagatatatatttaagatgataagaaaatgccaaatggttttctgaagtggttatacaacttaattttccaactagtatgtgcgaattactgatgttctacatccttgttgacacttggtgtgaggagtcttttccattttagcctcaggattatggttgtgtggtggtgtattagcttatggcttgaatttacatttcccmgatgatggtgagcatcttttcttttgcttatttgcagcctctctagactttttggtgaagtgcttattcacatcttctgcccattttgtgagggagggagtttagcccctgcatgagtcagctggtttttttttaaagaaccttacttt

SEQ ID NO: 178275 - DNA, 654 bp, Homo sapiens
aggagggtaattagggaatttctgagaaattgagaaaggaatggataatgaaaggtttctagaacttttactaatagtggttaattaaatctcctctgatattctacaggcgacttttactacagctttccrctactattcaattatttgtatttgcttgacttgtatttactgaagtataggtgcgagcagaaagtaaaccatgaggctgtttgattttaaaccagttattgtatgcatattattacatttttatcttcttacatgattttcttattgttttatggaaacaaaccattctgcagcaacaccaatgttgtaaacttcttgagcaaaggaattgtaatctctttagtgtctggtataaaatcaagaacaaataatatctccctaaaatatactatattaaattgaaccagccgctgattcaaaattctgggatatcaggtagcctcccaggccatgttttaggatcttaaattgttacagattcgtttaactttgtttcctgaaaatataaccaaaattatttgaaccaaacaagggtcttctatgttttatctttattatataattatggggttatttattttaaaaaaaacccatgcaaacatgtgtttattacacgtgactgcatttggttgttaccacatg

SEQ ID NO: 178276 - DNA, 572 bp, Homo sapiens
tttctttgttcatcatcttttctctattataaatctggtgttataatttgtaacgtttagttgtttatttgtgttagtgattataaccttagttttttgcaatcaacttactgtttagaaatacaagtggaaatatgtgtacttatatatgtgtatgtattatatgtagaaaaatgtgagagactttttctgtcaattccccactctcaaatgattccattaagactgctcattatgtccatgagaagtaggagaccaatgttacaactattttgaatattaccctgtgtttttcctttttgtccttaacatagtgaagcatagacaataatattttattaatayaatattctttttataataaaaatatttattatctagtttcatgtgggaagttttgtcatttcttgtcattctctcctccaccatctttaactctgtttataaacacacaaagccttgtgataacaggaatttggatatgtcataactgtgctctgtaactggctcaccatgtatttaattaaccttgtagtaatgcatctctgcatttttgggaactgaattttgag

SEQ ID NO: 178277 - DNA, 586 bp, Homo sapiens
aacagtcgctctcttctacttcattggcttacactcagctgcccctgttatgtattctcatattttccttcatagattgctttttctgttttcctagattatctccttgagtaattttcaaaaagggccaatggagataaatgatctaagttcatacatctgaaatattcttgttctaccttacactgagttgatattttgctggaattagagttctagttttaaattaatttttcaccagaattttacaggcattgttttaatgtcttagaggatagcaataattrctgttggtctgattcttgttattttgttgggaagtaaaaaataccatatacaatacaatgtaccagtaaactagtattttgaacaactagaacagtgaggtgtaatcataataacaactttatttatgtgacctactgactcttaaagctgctcagtggaggtaattcaacccttaccctagggtgataattcattcaggcttcatgaaattattagtcaagtgtgtgtttactctggttgcaaaacacaatctcaaatcagtaattaaatatgtccagctttatgtaacacaaatgct

SEQ ID NO: 178278 - DNA, 533 bp, Homo sapiens
ccatggcaacatttaccacattaaaatattaatggagaaaacagtctcagaagcagaaaatacaatacttattcatgataaaataaaatcttaaaacttaaacatgataaaattaccaatcacttatggtcaaaaaaattaatatactcatggtaaaacacaaactttaaatatcaaaggaaaacaaattttttcaacttgataaagaataaccaccaaagacaataaatatcattccttgtgttgaaacatcagatgcatcacctttaaaatcacaaatagtataaccaccactatttaaccacttctatttaactttctggaggacctagacaaagcacaaatataagaaatacaaataaaamtttttagaattgaaaaatgaaagtcacaactattatttttcacagatgatactacttacaaagaaaattcccaaaaagcctatagacaaattatagaaacagggggtttagcagaaacactctatttctgatcaacttgtagtaatcaatgcatatctatacaatagc

SEQ ID NO: 178279 - DNA, 532 bp, Homo sapiens
tagtcagattttatagacatatgatgttttacctctaaaagttaaaaagcaaaattttggtttgtaaatgtttctaaaatatattatacgtttatctgaatccttaaataaaaaattctgctgagaatgtaagtctgcatccagatggtgaaacatgattattatgaacatctatttcactatctgtatataaaaagtgcataagactgaccattttaaatgtctccagactttgtactttgtgatcataatagctacttttcataattatgtggtttcctccattgtggataatctgctctcttacttctacatttatcactgtacctgyatatagcatcactctacagtttattttgttgtttctagtctatataagacatgttaatattgtgtgcaaaataatattaaatatcctctgagagaagacctaatgaaacaagttgtcatcaacttatgtggaatttctttggcaggaggcttttttgcttacctcctgatggtaggtagaacttctattcaggatagacaa

SEQ ID NO: 178280 - DNA, 577 bp, Homo sapiens
ctagttggaatggatcaaatattccgtccacacattaaacaaaagcaattgttacacttgtgcgcacggcaagccagaggcccagattgtcccctttccactaaggtggtcctccagtcgaccaggcatgggctgcatggtagctcttttccaggattctacaccctggagtaataagtcgtaccaagctctctctctctgctatatcctgaagtccggcaccctgcgggtcagcccccgagggccatccagcttccgtctcccaacagtaagttaactttgtgtctctcatgacagggaggaaacctagtgttccttagagacctgaagggatgcagtgagcttaaaaattttcaagagcttatcartcagttagcccttgttcatccccaagcagatgtgtggtggtattgtggtggacctttactggacactctgccaaataactggagtggcacttgcgctttagtccaattggctatccctttcaccctggcatttcaacaaccagaggaaggaaaaataagacattgtaaagcaagagaagccccttataggtctttcgactctcaagtct

SEQ ID NO: 178281 - DNA, 575 bp, Homo sapiens
taagtttcctgaggtatcctcagccatgcagaactatgagtcaattaaacctcttttccttataaattacccagtcttgggtatttcttcatagcagcatgagaatgaactaatacgcatccagtgagccccacctcctaatattcatgctcttgtgtaatcctcacacactgagtagacgtgacccatgtaaccagtgggatattgaagaaatgatgtgtgacttctgatgtttggttagaaaagctattgtggcatccacattgttttcttggactgcttattctgggggtagttagcccaccatatcttgaggatgctcaagcagcctgtggagagacccacatggggargaactgaggtcttctgggaaactagtacattgtcagtgagctgccatggaaatggatcctgttgcctcatctcagccttcagatgactctaattctcctgttattttgactatgacatgagagacccccaagtcagattctaccagataaaccactactgagcccttgacccagagaaactacaatataataaatgcttattgttcctttttcagcgttatt

SEQ ID NO: 178282 - DNA, 636 bp, Homo sapiens
ggagattatgtgtaccacatgaagttcctgaatgagttaataaatgtaaaaggcctaaaccagtgatcagtacataagaagcgtgtgttaagtcttaactgtcattaatcataattgcaatccatcacgtcctttcaagattttaatgctcagtgagttttattttttaataaacgagagattttcagttgctagtagttctgaaaaagtgatggtggaaagcacttgagatggggcaagaatggtgatatttagatagccttattattttttcagcagaattgttagattacattttctattatagataaaagcagttgcccacaaactaatcytgaatttattagaagtgacgtttattgacatttacaaggaagtcagaagaaagcagttattcatttttcatggatcttcagaatgacatggtattttacataaagtatttctttgatcctttgatttgtgaagcaaaattatttctgaagtgaaataaagtattttatatttctgctcactcttcctatccttctctttctctgtgatctagataccagatgacaattttagcatcccagaaggtgaagaagatctggcaaaagcaattcagatggcccaagaacaggctacagatactga

SEQ ID NO: 178283 - DNA, 550 bp, Homo sapiens
aaatatgtattttggtaaagatacataccagaatccaatcagtgattatctctgagcaatgggattacaggtgatttttaaagttttgcttctctgtatgttatytttttctatagtgaacatgtattataagaaagataattacaagaaaaaataaaaataattaaactgttttaaaatttataaaccccagagtcacagctgcataaaaataaattttaattgcttttaagttagtatttactgcattttatttaggactaacaatttcttcagaatctgattttcttgttacatttttggaaataactgcaaatttacaaagagatgttatggctgaagcaagtatgaatgaaaagaaaggcatctacacaggagtagccaaggctgaatttcaggaaggcaaggtttgaccaggtctggccctccaggaagagagaaggtcaagcacaatgaccactaccattcattgaatcttactgtatccaagcatcatgctaatgcttcacataaaatatctctaatcctcactacattcttgaaaagttgg

SEQ ID NO: 178284 - DNA, 550 bp, Homo sapiens
aaatatgtattttggtaaagatacataccagaatccaatcagtgattatctctgagcaatgggattacaggtgatttttaaagttttgcttctctgtatgttatctttttctatagtgaacatgtattataagaaagataattacaagaaaaaataaaaataattaaactgttttaaaatttataaaccccagagtcacagctgcataaaaataaattttaattgcttttaagttagtatttactgcattttatttaggactaacaatttcttcagaatctgattttcttgttacatttttggaaataactgcaaatttacaaagagatgttatggctgaagcaagtatgaatgaaaagaaaggcatctacacaggagtagccaaggctgaatttcaggaaggcaaggtttgaccaggtctggccctccaggaagagagaaggtcaagcacaatgaccactaccattcattgaatcttactgtatccaagcatcatgctaatgcttyacataaaatatctctaatcctcactacattcttgaaaagttgg

SEQ ID NO: 178285 - DNA, 577 bp, Homo sapiens
gtgctttggctgggcagttgtgacttggggtgtctcattccctcgaagctacagtttttaaaggcttgactggggcaggagaaaccacttccatgactggcaagttggtgcttgcgattggaggcaggcctcggttccgctccacagatcttctggagtgtcctaggggcatggcaactggctttttctgagagagcagtccaagaaagccgaggcttttatgtcctagcctcggaaataccacattattactcactatattctattggacacatgggctakctctaatttagtataaaagggacaacccaaagggtatggaagctaagcggcggggatctctggtggttggctaccacagctgcgatattcagtttcggtaagaatgggaggaaatcggtgttctcaaccactactgctgggtgtgtaaattatctttagagggcaatttgacagtagctagtcagatttaaaatgcacatacctttgcatgtattttatgtaagagaaatgtgtagaaggatgctgattgtagcagggcttttaataaccaaaaaaagggaaaaatctaaatatc

SEQ ID NO: 178286 - DNA, 594 bp, Homo sapiens
gttgtgacttggggtgtctcattccctcgaagctacagtttttaaaggcttgactggggcaggagaaaccacttccatgactggcaagttggtgcttgcgattggaggcaggcctcggttccgctccacagatcttctggagtgtcctaggggcatggcaactggctttttctgagagagcagtccaagaaagccgaggcttttatgtcctagcctcggaaataccacattattactcactatattctattggacacatgggctagctctaatttagtataaaagggacaacccaaagggtatggaagctaagcggcggggatctctggtggttggctaccacagctgcgatattcagtttcggtaagaatgggaggaaatcggtgttctcaaccactactgctgggtgtgtaaattatctttagagggcaatttgacagtagctagtcagatttaaaatgcacatacctttgcatgtattttatgtaagagaaatgtgtagaaggatgctsattgtagcagggcttttaataaccaaaaaaagggaaaaatctaaatatctgtaaataatagaatggataaattacggaattc

SEQ ID NO: 178287 - DNA, 463 bp, Homo sapiens
gaattctttttctggcaattcagagatttcttcttggtttggatccattgctactatgctagtgtgatcttytggggatgttaaagaaccctgttttgtcatattaccagaattgtttttctggttcctcctcatttaggtatagactatgtcagaggaaggatcaggggctcaagggctgctgttcagattctttggccccatggggtgctcccttgatgtggtgctcttcccttcctctaggaatggggcttcctgagagctggactgcagtgattgttattgctcttctgggtctagcaaaccagtagagctactgggctctgaactggtattagagagtgtctgcaaagagtcctgtgatgtgatctgtcttcaagtctcagccatagataccagtacctactctgatggaggtggcaggggagtgaagtggactctgtgtgggaccttggttgcagtt

SEQ ID NO: 178288 - DNA, 457 bp, Homo sapiens
tggtttggatccattgctactatgctagtgtgatcttttggggatgttaaagaaccctgttttgtcatattaccagaattgtttttctggttcctcctcatttaggtatagactatgtcagaggaaggatcaggggctcaagggctgctgttcagattctttggccccatggggtgctcccttgatgtggtgctcttcccttcctctaggaatggggcttcctgagagctggactgcagtgattgttattgctcttctgggtctagcaaaccagtagagctactgggcyctgaactggtattagagagtgtctgcaaagagtcctgtgatgtgatctgtcttcaagtctcagccatagataccagtacctactctgatggaggtggcaggggagtgaagtggactctgtgtgggaccttggttgcagttttgtttagtgtgttggttttctcgaatt

SEQ ID NO: 178289 - DNA, 625 bp, Homo sapiens
atagaatagaataaataactcagaaattaaagccaaatacttacagccaactgatctacagcaaagcaaacaaaacataaagtgggaaaaggacacctattcagtggtgctaggataattggtaagccacatgtagaagattgaaactggatcctcatctcttaccttatacaaaaatcaactggagctgtatgaaagacttaaatctaagacctggaaccataaaaaattctagaagataacatcagaaaaactagtctagacattggcttagacgaagacttcatgaccaagaacccaaaaacaaatgcaataaaaacaaagataaatagatggagcttatactgaaaagcttctgcacagcaaaagaaataatcagcagagttaacagacaacccacagaatgggagaaaatcttcacaaactargtatccgacaaaggactgatatctagaatctagaaggaactcaaacaaatcagcaagaaaaaaaatcccatcaaaaagttggctaaggacatgaataggcagttctgaaaagaagatatacaaatggccaataaacatgaaaaaatgttcaacatctttatcagggaaatgcaaatcaaaaccacagtgtgacaaca

SEQ ID NO: 178290 - DNA, 658 bp, Homo sapiens
ggagaaagtgagacagaaagagacaaggctttgggttaaaaaagtttctttaatttctgactctgtcatttactacccaaattatttaagttctcttaataccatttttcttatctgtaagaaagagttaacaattcttaccttgtaagtatttattcattaattcattaagcatttattggcatctattatatacaaagaactgtacataataggtattgtaataatataagaatatgtatacatatgaatgtatatatggcctgacaatagttgttcaataagtagcaactattattattattaccagtgtgcataagtaatcaataataagtatgttggaayggtagtagtacaaatatcacatcagttagccttccagccatgattcaagagtattcctgtggaactttatctgccagggggaaagattattttcctctctaactgaaagcactacgtctttctgcaatgcttatgtgacttcaaacaaccttggtcagctgtatcccagaagaaaattaagctggttgccctgaatatcattccatttcatgacggttgatatggatttgctaataattttcacctgataaagaggcagtcagtagaaaattagaaattttaatgaagattcttattagctgttcctcacaaa

SEQ ID NO: 178291 - DNA, 507 bp, Homo sapiens
tatgcagccataaaaaaggatgagttcatgtcctttgcagagacatggatgaagctggacaccatcattctcagcaaactaacacaggaacaggaaaccaaacaccgcatgttctcacttgttaagtgggagttgaacaatgagagcacatggacacagggaggggaacatcacatgctggggcctgctgggggttgggggtgctaagggagggatagcattaagagaaatacctaatgtaggtgatgggttggtgagtgcagcaaaccaccacggcacatgtatacctatgtaagaaacctgcacgtcctgcacatgtatcccagaacttaaagtrtaataataataaaaaaggaaatataaaaaagaaaaagaattgtcatcaatcttgaaaaataaaacaaacaaaaaaaaattgtcccataaaaatcctaagaaaaagcaaaacaaaaaactaggtccagattacttccttggcgaatagtattcaattttaaacagtgaata

SEQ ID NO: 178292 - DNA, 585 bp, Homo sapiens
taaaataatatttccaaggacaatttcataataaaaagcaaaayagtattgcatatttttgtacatgccttcatattaagcaaaatataaggctgggaattggagaatgttcttaatttaacactttatcagattaaactttttgaaggttatgtagcttcgagttatttttttttatagcttcaagcaagggaagattttagtcttcttatctttcaaacattctgttccctagtgacattttcaagggtaggaaatggaactaattatttagcagtaagcaaacagaacaaacttaaaatgctcaaagcttaaaatatgtgaaaaataaaaaggccagaaagttttttgaaaataaatataaacgatttaatttttttctaaataatttcttaacgaaaagagaaacaagtataaactagttttagtaaaggggaatctattacgaagaaattggcacatttcttgaaactcaagtgccagggaaggctctaacaacaaaagaaactgaaaactaccagaaaaactatgtttcatttttcagtctctcatttgtttcttcagaatatttatttttctaatttt

SEQ ID NO: 178293 - DNA, 531 bp, Homo sapiens
gtttttaaaaataagaagctacacagagatatttttgttaatattgtggaacacaaacatttggcttcaaataaaaaagcataacactaataaatcaagcaatatgtttatcttaaatcccattctttttgtagtgactaacaaaaataagtataatttgaatctccgtaccctacatatatttgtttttaatgtttcttgattatcaataaattgttcctaaaattatagctctgagaaacatacttttgataatgttaggaagatttamagatgacaagaagagactatatctatatttaatataaaagacataaccacgatgtgctgctattgacacagtacagaataaaatcacactaaatattaaatgatacctatgattcaaaactcattggtaagctgaccagacctcagttaaccaggttgtcaatccctcttaccgttaataaagaccaatgtatttcacctgagatccaaataaatgaaatacttttaaattcaagtgatttgctttacttattttttaca

SEQ ID NO: 178294 - DNA, 596 bp, Homo sapiens
ttgggtctttttttcttctgtattagtctagctagcagtctatctatcctgtaattttttttcaaaaaaaccagctcctggatttgttgatcttttgaatggatttttatgtatctccttcagttcagttgtgattttggttatttcttactttctgctagctctgggattggtttgattttgcttccttagttcttttagttgtgatgttaggttgtacaacagatctttttactttctgatgtgggtgtgtagtgctaaaaattcccctgttaatactgccttagcctatgacccaaagattctggcaggttttatctttgttttcagtagtttcagtcctcttgatttatgccttaatttcattatttatccaaaagtcattcagaagcargttgtttaatttctatgtaattgcatggttttgagtgatattcttagtcttgaattctatttttattgtgctgtggtctgagagagtggttggtatgattttggttcttttgcatttgctgaggattgtctcatgtcccactgtgtggtcagttttagaatgtgtgctatatgcagatgagaaggatgtatatgctgctgtt

SEQ ID NO: 178295 - DNA, 586 bp, Homo sapiens
accaattttattgaagtctataaaacactttaaaaaagtattacctgagaatagggctctgagaatagggcttttttttcctttttttttttttttttttgtgcgcgaccagtgaagttactcagggctcttgcttagaaggtcccattaatatgcattatacacagtcatgtacacaactgctgcttctgttaaacatttttggtttcttagaggtaatctttctataatactttaaatatccaacttttatacatttaaaaaactgaaaagaataattcatatcaataaaacaatgttattctcaatttcaaacaatgggactagttggcatattacccttgctataataaaacatatrgttttaaactgcacacactaaacaaaatattaatagcaataaatatagcggaggccacaaatttagttgctattaaagttttcaggtagtgacatacataatgtttaactagagttaactctacatacaaatctcttgattgcattcctaagaccttacctcccaaacctagctacaaaatgctataaaatagcaaataaaacgattaaatgagttattaaaagg

SEQ ID NO: 178296 - DNA, 571 bp, Homo sapiens
gaattctattccccaaaatttataggctgaagcccctaaatctccactgcattagaatgttaccatattgggaggtagggcctttaaagagatattaggtgaaaaggaagccatttcattaaaggatgactttgtsaatatacagcaagaggatgatcattttcaagccacagcaagagatgccttagaggaaaccaaatgtggcagtgccttaaccttacacttcaagacctccaaaaatgtggaaaactaagttcttcttctttaagtccctcagtgcttggtattttcttattgcagccctagcaaactaatatacccatacactggaaaacaaaacattacagatagaaattgaacttgaaatcagtttgatgtattcaatcttcttgaatacaaaaattccatattaagatatcagttccctccaaattgacttataggttcaatgcagtcctaagccaaatctaagctagctgtttaaaaatagaaattaacaagttaacttttaaatttgtataaaaatgcaaaggatttaaatagctaaagcaattttgaagagagttactaa

SEQ ID NO: 178297 - DNA, 571 bp, Homo sapiens
gaattctattccccaaaatttataggctgaagcccctaaatctccactgcattagaatgttaccatattgggaggtagggcctttaaagagatattaggtgaaaaggaagccatttcattaaaggatgactttgtgaatatacagcaagaggatgatcattttcaagccacagcaagagatgccttagaggaaaccaaatgtggcagtgccttaaccttacacttcaagacctccaaaaatgtggaaaactaagttcttcttctttaagtccctcagtgcttggtattttcttattgcagccctagcaaactaatatacccatacactggaaaacaaaacattrcagatagaaattgaacttgaaatcagtttgatgtattcaatcttcttgaatacaaaaattccatattaagatatcagttccctccaaattgacttataggttcaatgcagtcctaagccaaatctaagctagctgtttaaaaatagaaattaacaagttaacttttaaatttgtataaaaatgcaaaggatttaaatagctaaagcaattttgaagagagttactaa

SEQ ID NO: 178298 - DNA, 497 bp, Homo sapiens
taaactaaggggaatttaacaaaagctgttcttttagattcttcttggcatttctccattttcagagataaggttgctcctttcctctgggcataaggagggcacctctcattagggagtcttaagacctgcttcaggggaaggtcacagagtcctgctagcacctaccatttcycaaatttcttctgcttaaaaaattaaataggccaagatgtcataatcaggggtactatgtcatgaaccccatcacaatattcttatttaaataatactagctagtaattcccaaaaaatttctgtgtgataggattcatgttaaatcttttgtctggattatcacatatattccttatattataataaaatcatatggcagattattgtactgcctccttttacacatgaagacagcaaggctaaaagatttaagttgcccccaaaataacttgctagacatgacagaaatagaatttggaactttgtgtcagactccatag

SEQ ID NO: 178299 - DNA, 524 bp, Homo sapiens
caaaccaataataaaatcattttaattattttcttaacatatgcttagaaaagtcccattacaaaattttaaataatgctactgaataatttctatgaagaagctgaacggtggttttaactgctttttgaaatccatgatttattctatggattatacttgaatttagactgtacttctttcgtgctgtatggctgttactcttccacatttctacatgataatataatatgtttaaatcagattttatttttgtttgttgatgttcaagactagaaaaagaaactgtaaaacaaacatcagttttgtccgtgaaaaaasaatattagttttgatttaaagagttatgcaaacatagagttgtagagagatagtcagaatgtcctatcatacaacaagagaaaaacctgaagcaactacaaattagcagttcttgactcatcgaggtcacaagacaaaaaactagcctgaattctggagaaagatagtaggctgcaaggagtttgggagggatagagactaac

SEQ ID NO: 178300 - DNA, 469 bp, Homo sapiens
gtgacctataaggaggtgcactacacttgaaatkaactgcttgagttttctaatttatataagcagaaatctggagaacagatgtggaatggatattaaggtgtgggataattatggaatgaacagagagttggatcaggctgaatgtattgactttggcccactaagtagggattctgcatttaatgttgcagtttggggagttaaaaaaggttctaatagtttatttgcttagttagctgaaatatggattaaaagatggcccactgtgtgtgagcttgaaaagcctgatctccctggatttaatgtaggataagggatccaaaggcttacagagattgggatggtgcagtggattagtcactttagacctactcatctcagctgggagggtccagaagatatacccttgaccaatgcttcgcaaaatagatttgtgagggcagcacctgcatctatgaacagccct

SEQ ID NO: 178301 - DNA, 612 bp, Homo sapiens
aggcccctagaggtgaagttcagagtgtgacctataaggaggtgcactacacttgaaatgaactgcttgagttttctaatttatataagcagaaatctggagaacagatgtggaatggatattaaggtgtgggataattatggaatgaacagagagttggatcaggctgaatgtattgactttggcccactaagtagggattctgcatttaatgttgcagtttggggagttaaaaaaggttctaatagtttatttgcttagttagctgaaatatggattaaaagatggcccactgtgtgtgagcttgaaaagcctgatctccctggatttaatgtaggataagggatccaaaggcttasagagattgggatggtgcagtggattagtcactttagacctactcatctcagctgggagggtccagaagatatacccttgaccaatgcttcgcaaaatagatttgtgagggcagcacctgcatctatgaacagccctgaaattgctcttctctgtatgtcagatctaacaatgggaaccatggtcactcaactacaaaatttaaatacaatgggaataattggattccaagatggcaggggccaagtggcagca

SEQ ID NO: 178302 - DNA, 612 bp, Homo sapiens
aggcccctagaggtgaagttcagagtgtgacctataaggaggtgcactacacttgaaatgaactgcttgagttttctaatttatataagcagaaatctggagaacagatgtggaatggatattaaggtgtgggataattatggaatgaacagagagttggatcaggctgaatgtattgactttggcccactaagtagggattctgcatttaatgttgcagtttggggagttaaaaaaggttctaatagtttatttgcttagttagctgaaatatggattaaaagatggcccactgtgtgtgagcttgaaaagcctgatctccctggatttaatgtaggataagggatccaaaggcttacagagattgggatggtgsagtggattagtcactttagacctactcatctcagctgggagggtccagaagatatacccttgaccaatgcttcgcaaaatagatttgtgagggcagcacctgcatctatgaacagccctgaaattgctcttctctgtatgtcagatctaacaatgggaaccatggtcactcaactacaaaatttaaatacaatgggaataattggattccaagatggcaggggccaagtggcagca

SEQ ID NO: 178303 - DNA, 603 bp, Homo sapiens
gtggtggtaaagtgtggaaaacaggaatattttatgtgtttttattaaatcttaatattttaataaggtctgggtcttgtccttgagattttaaaaagtgtttcttcagtaatatagctctgcttgcaagaccaggctctgcctccttttcctggctgaaaagttctcaacgtacatgcttggaatcttgacgctacaatgaggttttgtgtttgtttatttcacttttgatgtgacaggaagtctagaagggactgagtctttttccttgcaaaagactctgtgtatgwcatatattatatttcattatgattacacttgtattttctaccctgctagagccaacagagggtctttctcagatctccacagggagaacctggtgagatttccgaaggtaaactccagaaatgtgtgtatcctgcaaaaaaatatgattttcttattctcactctagtttttactctacacttctacactcagcttccagaagtatagagaccctaccagttattgtctttagtgatgtcttttccaggtgagaagatttttattgtgtctctctggacttgcctgtctctccagatttcatcatgacgattt

SEQ ID NO: 178304 - DNA, 651 bp, Homo sapiens
gaatcttctttttttcctgtttctattatgttagcatgatggaaaaccatcactctgtactcaccataactgaatgaaattatatcttacaagatatttgttttaaatcaatgtgtaaatataacagacaaaatataaattatcattaaaagaaatatgggaggtttcatgtagacagtaattattacattattttaaataaaatttcatactcctggatgtcctaaagtcattgtagaaagtctctcacttatgacgtgtcagttaaaattcaacagtaattcatagtaatgatttttaatttamaattgcatttacccacagaaactaggttgaaaattttgagaagatgctaggacatttcaaaacacattattttttgagcttttaatgaacatgacacattatactcttaagatcatttagctataaattttcataatttaacaataaagcttattatttatcatatcaatttttaatgaatgcagatgaaagtcaaatacactttgagtgaaatcttagaatggcacagtacattgtataaccttggtagattctcgactagggacttcataagcttattatgtgagtgacaagatggatctatatctacccaatggcactgttgggtgcttatttgtaaatatc

SEQ ID NO: 178305 - DNA, 366 bp, Homo sapiens
aaagcttgacaactgtctgacaagtttatttaaattagttttatgcaataattcatgtgtgggtgtccctgaaaaactcaacaaattaggggaagaatagagaaaaagaggtcagaaaatcaattgggaagaagatgatttcatgaaaattgaaagaggagcgatcatacgcagacaggaggggcagagcaaggtggccaaatacaaggccccaacaacagtcctttctgcagggacaccagtttaacaactatctactcmaaaaaagcacagtcatcagaaccaaaaatcaggtgagcactcacagtacctggttttaacttcattctgcagaaacaggcactgaagagggtaggagacagtttc

SEQ ID NO: 178306 - DNA, 498 bp, Homo sapiens
cagcaccatttagtccttccccactctggaggtgcagattttaaatatatgctcaattattacataactaataaaattcatggtatcatgtgtaccaatttttgcaaaaagacattttgaaagtaagtctatcattcaaaagtcattgaaaacacattttaatgtctaattatgataaaaaaattcacacttgcatttgttttgagaaatgaatctgttattgtcagcaatttaatatggcatactgcaagaaagttactgctttctgacaacayaaaaattcatagctctcataaagaaatgagtctgaaacatgggaaatttcccatgctaagcatttaacttacaacatagtcataaaattaataattatattccaatgaagacaatggcaagctttttaagcttgaatgttgttaaaaaggactatattggacaaattaccatataaacactagagaattctaatatagacctgacaaaaatggacctttatta

SEQ ID NO: 178307 - DNA, 590 bp, Homo sapiens
attatctggattccaacagagaaggtcctgaaaaatatatatttttttattttattacaccaatttatctggttttgaagcacaaatatgtattaacaacaaacttagtgaagaaggcttggagctcttacacaygaacacatacttttgatatattttagttctgttaaaaatgtacatagcacctctcccacccccacacactgcttataagtatagtagagaaaatgcagtatttcctcagaagacgatggagaattttccagcctcattcccttttaggatacttacagtctgaaaaaggcatttcatcccatcttgagccattgaggacaggtaaaagttggtgtccaacattagactaagtttctttggtaatgtaagaactacgacaagtccttccttctcaatattttagtttttgctttatttttggtgctatgctaattggctacaagatatttctcactatcttaactttaaaaagtgtgagattctttttaatttcctaggatatgtagccaaaatattgcagataatatttggataatattggtaatcaattttaacacacttgaaattaaggaata

SEQ ID NO: 178308 - DNA, 598 bp, Homo sapiens
aggaaaagatggtttcatgagctgggcacagggcctgcctgctctgtgctgcctagggactggttattctatgtgccagccactccagtcatggctaaaaggggccaaagtacagctcagactgttgcttcagagggtggaagtcccatgccttggcagctttcacatggtgtttagcctgcaggtgcacagaagtcaaatattgagatttggaacctccatgtagatttcagaggatgtatggaaatgcctgaatggccaggcagaagtttgctgcaggggtgggccctcatagagaacctctgctagggcagtacaaaagggaaatgtagggttcgatcccctacacagagtccctactgggacactgcctagtggakctgtaagaagagggccactgtcctccacacccaagaatggtagatccaccaacagcttgcactgtgtgcctggaaaaaccagttactcaatgccaccccatgaaagctgccaggagggcagctttaccctgcaaagccacagggaaagagctgtccaaggccacaggaaggcacctcttgcatcagtgtgacctgggtgtgagacattaagtccaagg

SEQ ID NO: 178309 - DNA, 507 bp, Homo sapiens
tatgcagccataaaaaaggatgagttcatgtcctttgcagagacatggatgaagctggacaccatcattctcagcaaactaacacaggaacaggaaaccaaacaccgcatgttctcacttgttaagtgggagttgaacaatgaragcacatggacacagggaggggaacatcacatgctggggcctgctgggggttgggggtgctaagggagggatagcattaagagaaatacctaatgtaggtgatgggttggtgagtgcagcaaaccaccacggcacatgtatacctatgtaagaaacctgcacgtcctgcacatgtatcccagaacttaaagtgtaataataataaaaaaggaaatataaaaaagaaaaagaattgtcatcaatcttgaaaaataaaacaaacaaaaaaaaattgtcccataaaaatcctaagaaaaagcaaaacaaaaaactaggtccagattacttccttggcgaatagtattcaattttaaacagtgaata

SEQ ID NO: 178310 - DNA, 583 bp, Homo sapiens
agactcaccaagccacacaggactgcagaagcaccaagtttgggtgagaggaaaaggaggggtgagggagaagctgaggccagagatgttatcagggtttctgtgagaaaggcaaggtaggatggagtaaacaatttaggattggttagtttgaataagtgtggcgggctttggagcagagagggtgcctctagttgcctccttcctggcccttggttgatttaaagcagggaaaatattggcttagtgtgtgagttagataaggaggcaggtaggggcccagccttggatcaaccagtttgcccatggaaggtgagctccaggcaagccatccaccacccccaggaatcatccaggcctcagggggcagcctttctctggatctgcaagtctcttgagagatgtcaacataagataagatatagatatagaaaatacctactccagtattcccagctagatagctggtggtgtttttgtttcctttctgtccagcctccatttgccgtaagttatctttttacaatataggaytgatcatacacttggccctcttttccaatccgaaactgtgttcaagctt

SEQ ID NO: 178311 - DNA, 577 bp, Homo sapiens
agtacatccacctggtgagtgattttatttttgacatagtagttatttggacacaaggcaagcccagctatgtacttcccgccactgggtagagaggactgcctggcatgatatacatgcttcataaatgtttgttaaattcawgaatggaaaagctttttgggatcagacgttttaaatatattgccttcttatacttactaaaaaataaactgaaagttgttttttcgccccaaatccagattttccttgctgctgcttaacttggaggagtactactttgaacagcatagagccaatcacattttgcacaagggcagtcaccatgaaaggtaaggaagcttcggtatctccttggacaaacaaacctttctgatatctgaacttttaaagttaaatgtgtgatcatataggtgttaactaaagaaaaaattaggctttaaaaaaaattaaagtaaattttatttagacttttattgaggattataacctaggagagtcttttggagagtttttgctatgtttattattttatctcccatgaagtttttttcatcttttctcttattagggaagt

SEQ ID NO: 178312 - DNA, 554 bp, Homo sapiens
agagtttgttccttcagatgtrtccagagtttcttccttctggcaggttcattgtcttgctcatttcaagaatgaagctgcagaccttagtggtgagttttacagcacttaaaggtgttatgtcctgactttgttccttcagatgtgtccagcgtttcttccttctggcaggttcatgatctttctcacttcaagaatgaagctacagaccttactgttgagtgttaaggcacttaaacgtgttatgtccatagtttgttccttcagatgtgtccagagtttcttccttctggcagattcatggtcttgctcacttcaagaatgaagctgcagaccttagtgttgagtgttacagcacttaaaggtgttatgtccagagttttttccttcagatatgtccagcgtttcttccttctggcaggttcatggtgttgctcacttcaagaatgaagctgcagaccttactgttgagtgttaaagcacttaaaggtgttatctccagagtttgttccttcagatgtgtccagagtttcttccttctggcaggttcatgg

SEQ ID NO: 178313 - DNA, 495 bp, Homo sapiens
gagtttcttccttctggcagtttcgtggtcttcctcacttcaagaatgaagctgcagaccttactggtgagtgttacagcacttaaaggtgttatgtccagacatttttccgtcagatgtgtccagggtttctgtcttctggcaggttcatggtcttgctcacttcaagaatgaagctgcagactttagtggtgastgttacagcacttaaaggtgttatgtccagagttttttccttcagatgtgtccagcgtttcttccttctggcagtttcatggtcttgctcacttcaagaatgaagctgcagaccttactgttgagtgttaaagcacttaaaggtgttatgtccagagtttgttccttcagatgtgtccagagtttcttccttctggcaggttcatggtgttgctcacttcaacaatgaagctgcagaccttagtgttgagtgttacagcacttaaaagtgttatgtccagagtttgttccttcagatgt

SEQ ID NO: 178314 - DNA, 532 bp, Homo sapiens
aacctgttcctctcacatccacctctgctgtcgtaggcaaaattcgtcaacattcacacatcaattattctaatagtctcttagttggtcttcttcgcaaccaattactttatgactcaawccaccttgcattgttctgtgggattaatcttctctaagtggtaattttcattatatcacctgcctgtttgcaaactcacaatggttcctatgtcatgtcagtattcatgtccttccatctttggatgcacatagctgcacttccattgcacatgcaccttgccatggcttgcatttgcctccttctttctttcaggcatttataaaatttctgacacaaaattacctctcctcttctttttacacaaacatgacaggttctttacttttggaggctgcttcagtgggaaagtaacttcagccacttcagtattcatcactttatcttttccctcagctacttctgtggaattttttcttctctaaaagtttgtcacattttttttcattctaacccttggtaactccatcc

SEQ ID NO: 178315 - DNA, 532 bp, Homo sapiens
aacctgttcctctcacatccacctctgctgtcgtaggcaaaattcgtcaacattcacacatcaattattctaatagtctcttagttggtcttcttcgcaaccaattactttatgactcaaaccaccttgcattgttctgtgggattaatcttctctaagtggyaattttcattatatcacctgcctgtttgcaaactcacaatggttcctatgtcatgtcagtattcatgtccttccatctttggatgcacatagctgcacttccattgcacatgcaccttgccatggcttgcatttgcctccttctttctttcaggcatttataaaatttctgacacaaaattacctctcctcttctttttacacaaacatgacaggttctttacttttggaggctgcttcagtgggaaagtaacttcagccacttcagtattcatcactttatcttttccctcagctacttctgtggaattttttcttctctaaaagtttgtcacattttttttcattctaacccttggtaactccatcc

SEQ ID NO: 178316 - DNA, 582 bp, Homo sapiens
agttcatcagaagccacatctgttctctttcgccaatatgtaagtgtgctgtgtcttgatcagctgtctcaagattttaagtcccttttgtcctttcccaatataaatagcaaggcaaggccttttgaattcactttggaacactctcaaaacccaacaggtgttggcctttgctgacctctgggggcctttcccctctttgaggggggactgtctgctcttccccaaagggatagccccaccagacaaccacagggtgacagctggcatcctcacacaacacataccagcaaggaggagagctcaggagcgacagccaagaatattcggcactagcccctcttccttgtaaaccacccattggggaaaaartggaaaacagaattgctgagaatcttatgtttcttagaaatgcaattaccacagatgtaaacgatatgggaagttacaggcttacaggctgccatcaggaaaaactagctacttagaggtgaaagcaatgtctttggaacatggtaaatgaaaacgcaaatgaaagttgttcaaaaaggattctcagggaggggatgagaatggtgatac

SEQ ID NO: 178317 - DNA, 472 bp, Homo sapiens
ttattttcattaatccctgagaaggagagtttgcaaatattttcttctgttctgtagtttttcccttactatatttattgttttctttgctatgcaaaagctaattagcttgatgtaatacactttgtctatttttgcttttgttgcctgtgcttttgagatctcacctaaaatatctttgctcagatgaatgtcttcaagtgttttcycaatgtttcattttagtagttttacagtttcaggtcttacatttacagctttaatccgttttgatttgacttttgtatctggtgaggtataggagtctagtttaatgtgctgcattgtactagatatgggatatccagttttcccagcaacatttattgaagagattgtgcattctgcaatgtaagttcttggtgcttttgtatttaaaaaaaaaaaaagaagtttcctataagtgcatggatttatttctgtgttttctatt

SEQ ID NO: 178318 - DNA, 581 bp, Homo sapiens
tatcttaatctaaatttataatatttaatctatacccagcttcttctcccatatagcatctatgtcagtgaattgcataaccacctaagctataaacctataaaattcttgttatctttcctttggtcctcacattaagttgatcaccagattttatgaattctacctcataaatatttctcaaatatgtctaatttctgcccctccacagctgcttgtttagttttgatccacatatttctcacttgggttattacaacagctttctaattgcctccaatcttgccttgctctcatttattcatcacattatacccatgcaaatatgatcaaattgagatgcctcaatgtttcttstctgctattgtacaatttactcatttaattattcagccaatatgtaatgagtgtgtacactaaaccaaacattgagggagtggtgggtaattgattttcattgattctgttcaaaattacaaaccagaatgttatgatgaaaaagctttaatgttatgaaagtatatagcagaagtgcctgacctacatggaggatgacagagtaaagtgagaacataagagaa

SEQ ID NO: 178319 - DNA, 664 bp, Homo sapiens
attattatccttagatccaataacctgggatagcttgggactagttactctgatatgctaaaacagagcaatcttatatgacattacataaaatattatttatatattttgtaatatttattaatattttaataatggaggaaaatctcagtgatgttgcttgtttagttccagaccatttaaataaagcaaatatgkcattaaagcaagttacacatttttttattttctagtgcatataaaagttatgtttacactatactataatctcaagtgtgcaacagcattatgtctaaaaattgtacatactctaattaaagaataccaataaaaactctaacaatcatctgagccttcagcaaaccataatctttttgctggtggggtatcttgcctaaatattgctggctgctggctgattaggttggtggttgctgaaggctgaggtagctgtggggaattttttaaaataagatgaaaatgaagtttgctgcattgattaactcttactttcactacaattttttatccacagtagaagctcttccaaaattgtagtcaatcctctcaaacctagccactgctttatcaagtaagcttatgtaatactctaaatccttcactgacatttcaacaatgttcacatcatctttaccaggaataa

SEQ ID NO: 178320 - DNA, 664 bp, Homo sapiens
attattatccttagatccaataacctgggatagcttgggactagttactctgatatgctaaaacagagcaatcttatatgacattacataaaatattatttatatattttgtaatatttattaatattttaataatggaggaaaatctcagtgatgttgcttgtttagttccagaccatttaaataaagcaaatatggcattaaagcaagttacacatttttttattttctagtgcatataaaagttatgtttacactatactataatctcaagtgtgcaacagcattatgtctaaaaattgtacatactctaattaaagaataccaataaaaactctaacaatcatctgagccttcagcaaaccataatctttttgctggtggggtatcttgcctmaatattgctggctgctggctgattaggttggtggttgctgaaggctgaggtagctgtggggaattttttaaaataagatgaaaatgaagtttgctgcattgattaactcttactttcactacaattttttatccacagtagaagctcttccaaaattgtagtcaatcctctcaaacctagccactgctttatcaagtaagcttatgtaatactctaaatccttcactgacatttcaacaatgttcacatcatctttaccaggaataa

SEQ ID NO: 178321 - DNA, 664 bp, Homo sapiens
attattatccttagatccaataacctgggatagcttgggactagttactctgatatgctaaaacagagcaatcttatatgacattacataaaatattatttatatattttgtaatatttattaatattttaataatggaggaaaatctcagtgatgttgcttgtttagttccagaccatttaaataaagcaaatatggcattaaagcaagttacacatttttttattttctagtgcatataaaagttatgtttacactatactataatctcaagtgtgcaacagcattatgtctaaaaattgtacatactctaattaaagaataccaataaaaactctaacaatcatctgagccttcagcaaaccataatctttttgctggtggggtatcttgcctaaatattgctggctgctggctgattaggttggtggttgctgaaggctgaggtagctgtggggaattttttaaaataagatgaaaatgaagtttgctgcattgattaactcttactttcactamaattttttatccacagtagaagctcttccaaaattgtagtcaatcctctcaaacctagccactgctttatcaagtaagcttatgtaatactctaaatccttcactgacatttcaacaatgttcacatcatctttaccaggaataa

SEQ ID NO: 178322 - DNA, 664 bp, Homo sapiens
attattatccttagatccaataacctgggatagcttgggactagttactctgatatgctaaaacagagcaatcttatatgacattacataaaatattatttatatattttgtaatatttattaatattttaataatggaggaaaatctcagtgatgttgcttgtttagttccagaccatttaaataaagcaaatatggcattaaagcaagttacacatttttttattttctagtgcatataaaagttatgtttacactatactataatctcaagtgtgcaacagcattatgtctaaaaattgtacatactctaattaaagaataccaataaaaactctaacaatcatctgagccttcagcaaaccataatctttttgctggtggggtatcttgcctaaatattgctggctgctggctgattaggttggtggttgctgaaggctgaggtagctgtggggaattttttaaaataagatgaaaatgaagtttgctgcattgattaactcttactttcactacaattttttatccacagtagaagctcttccaaaattgtagtcaatcctctcaaacctagccactgctttatcaagtaagcttatgtaatactctaaatccttcaytgacatttcaacaatgttcacatcatctttaccaggaataa

SEQ ID NO: 178323 - DNA, 371 bp, Homo sapiens
gtgactgaagccagtgggccagtggcaccatacatctgagtctccaattttcaccgatgatctagatacagcctgaggtatgtaggcaggaaggggtgtygcaccatggggcaggtttcataacaccccactgggaacagagcagacaaagtaaatattatcctgacttgctattagagaggaaatgaggcagaagaacttgccaatgatggcatggttgatgtggggctcactctctctcctggtgagtcagcagcagccctgctgagaatacatcttaggaaggcagctcccattccattttgcacagacgactgtaatacatttgaggcacatcattggaaaccagtgctcaaaaatagaaccagcct

SEQ ID NO: 178324 - DNA, 443 bp, Homo sapiens
atcaaacatggataattgggttcaaaaatgcccaacaccctcattctcttcaatccactgagacagagcaattcctgcctccccctcactcccagccactatcagcaatttaagaaaatgttattttccccatgacttgagtgaaagcttcttgtctggtttgtagctttgtggctgacacaaaattgggaaaaatagaattcacaatgctgttagtaagayagaatggacagaaggctgaaatcaaaccaataaggtaaaactcaagagacaaacacctatattcagtacaaaataagcttaatcttataacattatatataaacaaacaagacaacaacaaaaaaatgaacacattgagatgctgttactaaagtacaagttattccttgttagtggaaaccctagtcccattttaccctgtcacatctggggcactgcat

SEQ ID NO: 178325 - DNA, 534 bp, Homo sapiens
gaattcattgcaaaaagattatcacctaggtacatagtcattagtttatccaaagtcaagatgaaggaaagaatcttaagagctgtgaggccaaagcatcaggtaayctataaaggaaaacctatcatattcaaagtagatttctcaggaaccctgcaagctagaagggattgggttcctatctttagtctccttaaacaaaactattatcacccaagaagtttgtatccagtaaaactgagcttcataaatgaagaaaagatacagcctttttcagacaaacaaatgctgagagaatttgccactaccaagccagaactataagaactgctaaaatgaactctaaatcttgaaacaaatcctggaaatgcaccaaaatagaatctccttaaagcataaatatcacatgatatgtaaaacaacaacagaatgaaaaaaacaaggtattcaggcaacaaatagcacaatgaatagaatactacctcacatcacaatactaatgtttaatgtaaatggcctaaatgctccccttaa

SEQ ID NO: 178326 - DNA, 553 bp, Homo sapiens
tcaaatgaagtagctgagtataactcagctactgagttataactgagtataatcatgaaatkatttaaggctttgagaccctggaacaaacttagaaccactatattaatagtggctacaaactagtattagctggaagggttttgaaagattatgttgatttcttagatatatttgtgtcagagaggcaactgcaagttaatctctactctcagtgaaaggcttaatgtggacacctataaaatccccagtggtcataacttgcaggaatctctccagagggacagcatcatacccagtagggcgacattaatttcctcaggatagaccaccaattaaaaaaaaatacagaactaggcatgagtcaacttctcccttaaaattgtatttctcatctaaatgaaagcacatttttaagagagaaagatgtgtaagatatagaaatattaaagtaagggctacagtacatataatacaaagcaaatgaagagaggaggctaaatatcaagttgtaggtggtgagttatactcagatacttcatttgacagttta

SEQ ID NO: 178327 - DNA, 553 bp, Homo sapiens
tcaaatgaagtagctgagtataactcagctactgagttataactgagtataatcatgaaattatttaaggctttgagaccctggaacaaacttagaaccactatattaatagtggctacaaactagtattagctggaagggttttgaaagattatgttgatttcttagatatatttgtgtcagagaggcaactgcaagttaatctctwctctcagtgaaaggcttaatgtggacacctataaaatccccagtggtcataacttgcaggaatctctccagagggacagcatcatacccagtagggcgacattaatttcctcaggatagaccaccaattaaaaaaaaatacagaactaggcatgagtcaacttctcccttaaaattgtatttctcatctaaatgaaagcacatttttaagagagaaagatgtgtaagatatagaaatattaaagtaagggctacagtacatataatacaaagcaaatgaagagaggaggctaaatatcaagttgtaggtggtgagttatactcagatacttcatttgacagttta

SEQ ID NO: 178328 - DNA, 553 bp, Homo sapiens
tcaaatgaagtagctgagtataactcagctactgagttataactgagtataatcatgaaattatttaaggctttgagaccctggaacaaacttagaaccactatattaatagtggctacaaactagtattagctggaagggttttgaaagattatgttgatttcttagatatatttgtgtcagagaggcaactgcaagttaatctctactctcagtgaaaggcttaatgtggacacctataaaatccccagtggtcataacttgcaggaatctctccagagggacagcatcatacccagtagggcgacattaatttcctcaggayagaccaccaattaaaaaaaaatacagaactaggcatgagtcaacttctcccttaaaattgtatttctcatctaaatgaaagcacatttttaagagagaaagatgtgtaagatatagaaatattaaagtaagggctacagtacatataatacaaagcaaatgaagagaggaggctaaatatcaagttgtaggtggtgagttatactcagatacttcatttgacagttta

SEQ ID NO: 178329 - DNA, 553 bp, Homo sapiens
tcaaatgaagtagctgagtataactcagctactgagttataactgagtataatcatgaaattatttaaggctttgagaccctggaacaaacttagaaccactatattaatagtggctacaaactagtattagctggaagggttttgaaagattatgttgatttcttagatatatttgtgtcagagaggcaactgcaagttaatctctactctcagtgaaaggcttaatgtggacacctataaaatccccagtggtcataacttgcaggaatctctccagagggacagcatcatacccagtagggcgacattaatttcctcaggatagaccascaattaaaaaaaaatacagaactaggcatgagtcaacttctcccttaaaattgtatttctcatctaaatgaaagcacatttttaagagagaaagatgtgtaagatatagaaatattaaagtaagggctacagtacatataatacaaagcaaatgaagagaggaggctaaatatcaagttgtaggtggtgagttatactcagatacttcatttgacagttta

SEQ ID NO: 178330 - DNA, 553 bp, Homo sapiens
tcaaatgaagtagctgagtataactcagctactgagttataactgagtataatcatgaaattatttaaggctttgagaccctggaacaaacttagaaccactatattaatagtggctacaaactagtattagctggaagggttttgaaagattatgttgatttcttagatatatttgtgtcagagaggcaactgcaagttaatctctactctcagtgaaaggcttaatgtggacacctataaaatccccagtggtcataacttgcaggaatctctccagagggacagcatcatacccagtagggcgacattaatttcctcaggatagaccaccaattaaaaaaaaatacagaactaggcatgagtcaacttctcccttaaaattgtatttctcatctaaatgaaagcacatttttaagagagaaagatgtgtaagatatagaaatattaaagtaagggctacagtacatataatacaaagcaaatgaagagaggaggctaaatatcaagttgtaggtggtgagttatactcagmtacttcatttgacagttta

SEQ ID NO: 178331 - DNA, 493 bp, Homo sapiens
ttaatacaacgcctttataaaagttgtgaatctcagaaatgaacaagcttacctccctagttatttattaaaagttacaagtcactttttttttaacttcctaataatcttagaggggtatattttgtgttttttttgctatatcttttataaagaatatctctaatgatttgaaagttagaaccaattttctgaaggattgagcctcgctccttgaacttgtgtgtttgtgggtggcacactatgtcttttgcagacccagwacctaccccttggtctagaacatattttcctccacctgccttttaagtttttatttcagcaggggtgggtggtttgtggttgaacgaaaatagaacgggctacaaaagcccttcctgtttgatattgaatctgctatttgagtcacccttacattatgaactgactgttaattaacacatttgataagagaatatcctgatctgctttgcatgtgaggctctcccagtaa

SEQ ID NO: 178332 - DNA, 493 bp, Homo sapiens
ttaatacaacgcctttataaaagttgtgaatctcagaaatgaacaagcttacctccctagttatttattaaaagttacaagtcactttttttttaacttcctaataatcttagaggggtatattttgtgttttttttgctatatcttttataaagaatatctctaatgatttgaaagttagaaccaattttctgaaggattgagcctcgctccttgaacttgtgtgtttgtgggtggcacactatgtcttttgcagacccagtacctaccccttggtctagaacatattttcctccacctgccttttaagtttttatttcagcaggggtgggtggtttgtggttgamcgaaaatagaacgggctacaaaagcccttcctgtttgatattgaatctgctatttgagtcacccttacattatgaactgactgttaattaacacatttgataagagaatatcctgatctgctttgcatgtgaggctctcccagtaa

SEQ ID NO: 178333 - DNA, 549 bp, Homo sapiens
ataagacttttaagactttttttgaagaaatcatttgaaactagaataagcaagaggaatagatcaaaacaaaaaggaaaacagtgaaggtgatatacacatcctcttactgaaaattaattttaaagaactgctttgtaaacactaaaattcagagtcatcaatgtgtctggatatggattcatttttatttcttctgctcagcacttgttttatactttaaattagagtcctcaagtctttcctctgcaatggaaattttatggcatcatgtmaagtatacaaatagtgaaggcattgccagtgttttcttgtgtataagtattctctaccattagaatggaaacgtcatcaaagtgggcccttagtgagagtttgctgagtggatgaatactgtccttaaatatggcttctccattctctttggactccttttggaactcctatcatacatgtattggggactttcttgactggtctttctgacttttaaatccttttatctggataaattcatcattatctcccaattgactaattctttgtgtt

SEQ ID NO: 178334 - DNA, 549 bp, Homo sapiens
ataagacttttaagactttttttgaagaaatcatttgaaactagaataagcaagaggaatagatcaaaacaaaaaggaaaacagtgaaggtgatatacacatcctcttactgaaaattaattttaaagaactgctttgtaaacactaaaattcagagtcatcaatgtgtctggatatggattcatttttatttcttctgctcagcacttgttttatactttaaattagagtcctcaagtctttcctctgcaatggaaattttatggcatcatgtcaagtatacaaatagtgaaggcattgccagtgttttcttgtgtataagtattctctaccattagaatggaaacgtcatcaaagtgggcccttagtgagagtttgctgagtggatgaatactgtccttaaatatgrcttctccattctctttggactccttttggaactcctatcatacatgtattggggactttcttgactggtctttctgacttttaaatccttttatctggataaattcatcattatctcccaattgactaattctttgtgtt

SEQ ID NO: 178335 - DNA, 398 bp, Homo sapiens
ccatgcctggccctggatgttttcttcttaaaaagccagttgagaattctaagtgtactcacttaaaaggaaaatttagtttgctataatatttctcatatttgctgtggtgaattcatctctaggaggtttctttgtataattatttcattatctctctaatagttaattctccacatgttttgtaatatttttkcacactcaccttgaatgagaagttctctacatgtcatagtcatataacaaacagaattcaccctccttcaccactaatcacacttctgtatattcaataaaatgtgcatttcttcatggatactctttgaatcatctaaatggagactctttatagaaatattgaatcattaattcttccatctactgtactcctttccaac

SEQ ID NO: 178336 - DNA, 411 bp, Homo sapiens
cactaatcacacttctgtatattcaataaaatgtgcatttcttcatggatactctttgaatcatctaaatggagactctttatagaaatattgaatcattaattcttccawctactgtactcctttccaacatactgtcttactgatttttcactttttcctatttatatccattttgttctactaacccgtctgtcattggccttcttctatagccaacctcaaatttcagttcacattagctgtgaacagcactcaaattgctgctgtattcttaaaatataaatttacttcataaagcaaaagtgaattatatgcatgttacaaaaaatattcctagcagagataagatgggatggtatttgctgggatgtgcagcatcgttttttccaaattaatttctctcagaat

SEQ ID NO: 178337 - DNA, 411 bp, Homo sapiens
cactaatcacacttctgtatattcaataaaatgtgcatttcttcatggatactctttgaatcatctaaatggagactctttatagaaatattgaatcattaattcttccatctaytgtactcctttccaacatactgtcttactgatttttcactttttcctatttatatccattttgttctactaacccgtctgtcattggccttcttctatagccaacctcaaatttcagttcacattagctgtgaacagcactcaaattgctgctgtattcttaaaatataaatttacttcataaagcaaaagtgaattatatgcatgttacaaaaaatattcctagcagagataagatgggatggtatttgctgggatgtgcagcatcgttttttccaaattaatttctctcagaat

SEQ ID NO: 178338 - DNA, 411 bp, Homo sapiens
cactaatcacacttctgtatattcaataaaatgtgcatttcttcatggatactctttgaatcatctaaatggagactctttatagaaatattgaatcattaattcttccatctactgtactcctttccaacatactgtcttactgatttttcactttttcctatttatatccattttgttctactaayccgtctgtcattggccttcttctatagccaacctcaaatttcagttcacattagctgtgaacagcactcaaattgctgctgtattcttaaaatataaatttacttcataaagcaaaagtgaattatatgcatgttacaaaaaatattcctagcagagataagatgggatggtatttgctgggatgtgcagcatcgttttttccaaattaatttctctcagaat

SEQ ID NO: 178339 - DNA, 411 bp, Homo sapiens
cactaatcacacttctgtatattcaataaaatgtgcatttcttcatggatactctttgaatcatctaaatggagactctttatagaaatattgaatcattaattcttccatctactgtactcctttccaacatactgtcttactgatttttcactttttcctatttatatccattttgttctactaacccgtctgtcattggccttcttctatagccaacctcaaatttcagttcacaytagctgtgaacagcactcaaattgctgctgtattcttaaaatataaatttacttcataaagcaaaagtgaattatatgcatgttacaaaaaatattcctagcagagataagatgggatggtatttgctgggatgtgcagcatcgttttttccaaattaatttctctcagaat

SEQ ID NO: 178340 - DNA, 410 bp, Homo sapiens
agaattcaccctccttcaccactaatcacacttctgtatattcaataaaatgtgcatttcttcatggatactctttgaatcatctaaatggagactctttatagaaatattgaatcattaattcttccatctactgtactcctttccaacatactgtcttactgatttttcactttttcctatttatatccattttgttctactaacccgtctgtcattggccttcttctatagccaacctcaaatttcagttcacattagctgtgaacagcactcaaattgctgctgtattcttaaaatakaaatttacttcataaagcaaaagtgaattatatgcatgttacaaaaaatattcctagcagagataagatgggatggtatttgctgggatgtgcagcatcgttttttcc

SEQ ID NO: 178341 - DNA, 613 bp, Homo sapiens
cacacacatatttgtccaaacaggttcttcataccagctcttccaagattcccatgatcctctcttttccaaggggaatcttagaaaaggaaggttaatgagaccaactctagcccatgctatagcagttggtctcagaactgcctttgaatgcccagttgtgtgagggggagagaaagagagagagagtawgggagtggggagtgtgtgtgagtgtgagtgtgtgtgtgtgtgtgtgtgagagagagagagagagagagaaattatctctgcttcttttgtagaaaagtatccctacctcctcctgctaatcagggtgtattcatcctgccccagtggtgacgtatttcttgtcctttggttactggacctaaggaatctaaagcacccaacagataaccttctttagagagcaggacttgcctgccttccagatcccagagctgcagtgatgagaagcacaggaaaacctgagaagattattgggagcatttgtaattagggacattcctgtttctacctcttgttttctgaacctgtagattcttcctatggaagaagaactactatataaagatctgtgatagaatatgtataaaagatggtgccccct

SEQ ID NO: 178342 - DNA, 613 bp, Homo sapiens
cacacacatatttgtccaaacaggttcttcataccagctcttccaagattcccatgatcctctcttttccaaggggaatcttagaaaaggaaggttaatgagaccaactctagcccatgctatagcagttggtctcagaactgcctttgaatgcccagttgtgtgagggggagagaaagagagagagagtaagggagtggggagtgtgtgtgagtgtgagtgtgtgtgtgtgtgtgtgtgagagagagagagagagagagaaattatctctgcttcttttgtagaaaagtakccctacctcctcctgctaatcagggtgtattcatcctgccccagtggtgacgtatttcttgtcctttggttactggacctaaggaatctaaagcacccaacagataaccttctttagagagcaggacttgcctgccttccagatcccagagctgcagtgatgagaagcacaggaaaacctgagaagattattgggagcatttgtaattagggacattcctgtttctacctcttgttttctgaacctgtagattcttcctatggaagaagaactactatataaagatctgtgatagaatatgtataaaagatggtgccccct

SEQ ID NO: 178343 - DNA, 446 bp, Homo sapiens
catatgtatcgtccaactctgccaacatggtcatatgagtgaytgcatatgtgtgactgttgttcttgttgtgggaaagccaatctccaaggctggcagcttgttaagtcattttgtctgattggttattgagtgcctcttctgtggtgagtgctttcttgtgagtgttaacgtgcaatacaagattctttacactccgtgcctgctcctgcatgtccactcatatgcctctaacccagcttccttgtctcagatatttcagttcttttctgtctaagcctctgcccagatgattcacccactgactacggcaaagaaatctgtttatattcctgccttaggtcatgcttcttctatgtaaagtagatggccagggccactgctcccagtgctgctaatagggaatattttaatttccttctgtctttcagagtcattcttgcatt

SEQ ID NO: 178344 - DNA, 446 bp, Homo sapiens
catatgtatcgtccaactctgccaacatggtcatatgagtgattgcatatgtrtgactgttgttcttgttgtgggaaagccaatctccaaggctggcagcttgttaagtcattttgtctgattggttattgagtgcctcttctgtggtgagtgctttcttgtgagtgttaacgtgcaatacaagattctttacactccgtgcctgctcctgcatgtccactcatatgcctctaacccagcttccttgtctcagatatttcagttcttttctgtctaagcctctgcccagatgattcacccactgactacggcaaagaaatctgtttatattcctgccttaggtcatgcttcttctatgtaaagtagatggccagggccactgctcccagtgctgctaatagggaatattttaatttccttctgtctttcagagtcattcttgcatt

SEQ ID NO: 178345 - DNA, 446 bp, Homo sapiens
catatgtatcgtccaactctgccaacatggtcatatgagtgattgcatatgtgtgactgttgttcttgttgtgggaaagccaatctccaaggctggcagcttgttaagtcattttgtctgattggttattgagtgcctcttctgtggtgagtgctttcttgtgagtgttaacgtgcaatacaagattctttacactccgtgcctgctcctgcatgtccactcatatgcytctaacccagcttccttgtctcagatatttcagttcttttctgtctaagcctctgcccagatgattcacccactgactacggcaaagaaatctgtttatattcctgccttaggtcatgcttcttctatgtaaagtagatggccagggccactgctcccagtgctgctaatagggaatattttaatttccttctgtctttcagagtcattcttgcatt

SEQ ID NO: 178346 - DNA, 330 bp, Homo sapiens
gtctgcttatggttttcttacttatgcctacctacaccatcttttaatyaaatgtgccgataaaatttctaagtgcagaatttcctttgcttgacacaaacactttgttctactgtgaatcaacttctggggctttctattgtatggatgtctacaaagggatgtgctgtaactcaagtataagcagatggttctttcattgttgtaaatcaaattggtataacctgtgactgggttcgatgtggccccagtttcctgaggcctgtgaaaattgctaggttgctcattttcattttttcttatcaccttaactggagttggaggcccttg

SEQ ID NO: 178347 - DNA, 590 bp, Homo sapiens
tgtcacaattttggtttttctaattagttatttgggtctcaaaatgtccactttaagcagaaaacctgacagtgtcccctgggggctgtcttccataccttcattcttgaatcttttaaaagaatctgaacctaagtccaaggaagacattctttttgtacaagtcagaaggattggggggttgggaaatggccattctctttattttgttgtttccattgattctgttgctgcatcattgccattgaaactgcttctgcagtctggtaatgattgacytttgtgaccaggatgcccttagtaacgcagatctctcagccttcatggtgtagacttcgaagttattacatgtttttaaagttcacgtacatattctcagccattgtttccaaagtaccagcaccccactctggcagctagaacttttagctttagccacacacatagtgagcaaattgacccttcttctcacactcaaaacctgacgtgaaacccacatcttagcctggatatggcctagaccttcatggtaagttatcctttgattggcttttttctattttctctagccaatattagttgtggtagtt

SEQ ID NO: 178348 - DNA, 590 bp, Homo sapiens
tgtcacaattttggtttttctaattagttatttgggtctcaaaatgtccactttaagcagaaaacctgacagtgtcccctgggggctgtcttccataccttcattcttgaatcttttaaaagaatctgaacctaagtccaaggaagacattctttttgtacaagtcagaaggattggggggttgggaaatggccattctctttattttgttgtttccattgattctgttgctgcatcattgccattgaaactgcttctgcagtctggtaatgattgacttttgtgaccaggatgcccttagtaacgcagatctctcagycttcatggtgtagacttcgaagttattacatgtttttaaagttcacgtacatattctcagccattgtttccaaagtaccagcaccccactctggcagctagaacttttagctttagccacacacatagtgagcaaattgacccttcttctcacactcaaaacctgacgtgaaacccacatcttagcctggatatggcctagaccttcatggtaagttatcctttgattggcttttttctattttctctagccaatattagttgtggtagtt

SEQ ID NO: 178349 - DNA, 590 bp, Homo sapiens
tgtcacaattttggtttttctaattagttatttgggtctcaaaatgtccactttaagcagaaaacctgacagtgtcccctgggggctgtcttccataccttcattcttgaatcttttaaaagaatctgaacctaagtccaaggaagacattctttttgtacaagtcagaaggattggggggttgggaaatggccattctctttattttgttgtttccattgattctgttgctgcatcattgccattgaaactgcttctgcagtctggtaatgattgacttttgtgaccaggatgcccttagtaacgcagatctctcagccttcatggtgtagacttcgaagttattacatgtttttaaagttcacgtacatattctcagccattgtttccaaagtaccagcaccccactctggcagctagaacttttagctttagccacacacatagtgagcaaattgacccttcttctcacactcaaaacctgacrtgaaacccacatcttagcctggatatggcctagaccttcatggtaagttatcctttgattggcttttttctattttctctagccaatattagttgtggtagtt

SEQ ID NO: 178350 - DNA, 587 bp, Homo sapiens
cacctgacatggctgaaagcttggtggaaagaacacctgaggaataggatacagcgaattccttttcaaagattttagcctgtaaaaatcctttaaaattcaagagggggaagattaagtacaatgagttctgagttcctcatcaaagagtaaatatgtcagtatgttcagcttctctgttctttgttctccgttttaaagtttaacttcctcattatttatgcctccttgcccctagtttcattaaacaacccccttctarcctctaacacctgttttgtctttagtcattcttagtcacctgctctgtcctcagtcatccttagacacctgctctgtaactgtctttcccgctgaaagtactcaccctgccactccagctcatactcctgctctctttgaaatagcccatctgaattagctaagagtgtgcagtccaaccctatccaatagggaaaagacacaacagtagggactagctgcattaggaataagaacactttcccctcccttgttcagtatgatcttgccattgctccatctgcaagaccactctttcatagaagtaaatttgccttgctgtaaaa

SEQ ID NO: 178351 - DNA, 553 bp, Homo sapiens
taaatatgtcagtatgttcagcttctctgttctttgttctccgttttaaagtttaacttcctcattatttatgcctccttgcccctagtttcattaaacaacccccttctaacctctaacacctgttttgtctttagtcattcttagtcacctgctctgtcctcagtcatccttagacacctgctctgtaactgtctttcccgctgaaagtacwcaccctgccactccagctcatactcctgctctctttgaaatagcccatctgaattagctaagagtgtgcagtccaaccctatccaatagggaaaagacacaacagtagggactagctgcattaggaataagaacactttcccctcccttgttcagtatgatcttgccattgctccatctgcaagaccactctttcatagaagtaaatttgccttgctgtaaaaacttgttgctggagtgctgactgttctttgtttcactgaaaatttattttccacaaatgtgggggcccacccagcattcccattctcctctgggggagggtccagtcctctcctgt

SEQ ID NO: 178352 - DNA, 553 bp, Homo sapiens
taaatatgtcagtatgttcagcttctctgttctttgttctccgttttaaagtttaacttcctcattatttatgcctccttgcccctagtttcattaaacaacccccttctaacctctaacacctgttttgtctttagtcattcttagtcacctgctctgtcctcagtcatccttagacacctgctctgtaactgtctttcccgctgaaagtactcaccctgccactccagctcatactcctgctctctttgaaatagcccatctgaattagctaagagtgtgcagtccaaccctatccaatagggaaaagacacaacagtagggactagctgcattaggaataagaacastttcccctcccttgttcagtatgatcttgccattgctccatctgcaagaccactctttcatagaagtaaatttgccttgctgtaaaaacttgttgctggagtgctgactgttctttgtttcactgaaaatttattttccacaaatgtgggggcccacccagcattcccattctcctctgggggagggtccagtcctctcctgt

SEQ ID NO: 178353 - DNA, 334 bp, Homo sapiens
aaatcacatgggtcataccggctggtacaggacyttagggctattaaccaaatagtccaaactacccaccccattgtcctcgatccttacagcattctcagcaagattccatataataatcaatggtttactgtaatagatttgaaggatgctttttgggcatgtctcctggcagaagataggccagatatatttgcttttgagtgggaggatccccattcagggtagaaacaacaatatcgatggatagtcttaccccaagggttcacaaactcccctaaccttttcagtcaaattttagaacaagtattagaaaaagttatcatcccaaaca

SEQ ID NO: 178354 - DNA, 334 bp, Homo sapiens
aaatcacatgggtcataccggctggtacaggaccttagggctattaaccaaatagtccaaactacccaccccattgtcctcgatccttacagcattctcagcaagattccatataataatcaatggtttactgtaatagatttgaaggatgctttttgggcatgtctcctggcagaagataggcmagatatatttgcttttgagtgggaggatccccattcagggtagaaacaacaatatcgatggatagtcttaccccaagggttcacaaactcccctaaccttttcagtcaaattttagaacaagtattagaaaaagttatcatcccaaaca

SEQ ID NO: 178355 - DNA, 334 bp, Homo sapiens
aaatcacatgggtcataccggctggtacaggaccttagggctattaaccaaatagtccaaactacccaccccattgtcctcgatccttacagcattctcagcaagattccatataataatcaatggtttactgtaatagatttgaaggatgctttttgggcatgtctcctggcagaagataggccagatatatttrcttttgagtgggaggatccccattcagggtagaaacaacaatatcgatggatagtcttaccccaagggttcacaaactcccctaaccttttcagtcaaattttagaacaagtattagaaaaagttatcatcccaaaca

SEQ ID NO: 178356 - DNA, 391 bp, Homo sapiens
ttagtcactgattcccatcaattttcccctatcatgtttaatagtaccaacacattatttctcttagaaaaacatgtttctagtttaggttcttaatgtagcctatttttaaaatatctcaaagtttgccatacagtctttatttcttatttcttaaaatattttctacattttgatacaactaacctttctaaagcataaatatctcactttgtcacttgtctgccccmaaaaaaacataaaaatatcttcttggtctagaaagtaaaattataatgcttggcataatgtagacagaaatagaaattcccatttatcctttttctcctttgcccccacacttttcttccatgttcacatcagtacctaatgtcccagacatatggaattc

SEQ ID NO: 178357 - DNA, 478 bp, Homo sapiens
ttctaacaaaatgaattttaagataagtatatttaatggcagagtgactttaaaacaagaagagaagagaagaaatgccaatayattaaatgaaaaaattagggaagaattaggaaaattcgaagagcagcaaaagaaaaagttagaagtgaagcaacttgaactcactctctgaatgtacaaaatgtggaattgaagactgtaagaagtaatttgaatcagctcaatcaatcactggtaaaaattttatatatttctaattttatttcatcaatattacttttaatatcccttcgatttagtatgtattattcagaattatgataatgccgctataatatttaggtacaaacttttgtatatttcattcaaaagttttcatttctattgggtatgtacctaggaatggaattgctgggtcgtaaggtacctatgtataaccgtttcagcaatcacctcacagatttccaaagtgtgc

SEQ ID NO: 178358 - DNA, 478 bp, Homo sapiens
ttctaacaaaatgaattttaagataagtatatttaatggcagagtgactttaaaacaagaagagaagagaagaaatgccaatacattaaatgaaaaaattagggaagaattaggaaaattcgaagagcagcaaaagaaaaagttagaagtgaagcaacttgaactcactctcygaatgtacaaaatgtggaattgaagactgtaagaagtaatttgaatcagctcaatcaatcactggtaaaaattttatatatttctaattttatttcatcaatattacttttaatatcccttcgatttagtatgtattattcagaattatgataatgccgctataatatttaggtacaaacttttgtatatttcattcaaaagttttcatttctattgggtatgtacctaggaatggaattgctgggtcgtaaggtacctatgtataaccgtttcagcaatcacctcacagatttccaaagtgtgc

SEQ ID NO: 178359 - DNA, 594 bp, Homo sapiens
ttttttgaaaatttaaaaggacaagaagaaccaagaaagtcctgaagaagaacagagctcaagaatgtataccatcagatgtctccaactttattacaattaaaataagatggtattagcaggacatacaaatagagaaacaaaaaacaaactcatacttacaccatcacctgatttatgacaagggtgaaactgcagtgcagtgaggaaataataatcttctcaataaatggtggtagataatttggatatcaatatgggagaataaaagactttaacccttgtcttgtgtcacaaacaaaagtcaatcgtaggtgggttataaagctcaatctgaaatgttaaaaattttwaaaaaaagcttctgtaacatagaagaatatctttatgacaatggggtagacaaaaatttcttaagcaagactaaataagcgttaactacacagaaaaagtctgataaattgaactacattaaaattaagaaattggtattaacgaagtcaccattaagagaaagaaaagacaagttaaattgggagaagatatctgcaatgtttaggtccaatcaaaaacctatatccagaatatataaaa

SEQ ID NO: 178360 - DNA, 413 bp, Homo sapiens
tgtactgtttgaatgggttcatatggtccaaaattcaaaattacaaaaaggtaagcattgaagtctcccttctacctgtatctcacagtcactcaattccatagacaaccagtgttacggttcttgtatatttttccagagctacaagtatttatatatatgtctttcactatttttacacaaatgatagaatatatacatttctatgttttgctttttcccccattagcaatatatcttggagaactttccttgtcagcgtatgtgaaatggcctcattstttttaatggctgtataattttacagaatggcatatcatttatttaactggtgttctaattcatggtcatttaggttgtttccaacacttgttataaaaaattgccttaatgactagtcctgtacatatatc

SEQ ID NO: 178361 - DNA, 641 bp, Homo sapiens
gtgcttttcccaaggtcttagcaactggcagacaaggtgattctctcccgkgcctggctcggtgcctcccatgcccacagagccttgctcactgctagcacagcagtctgagattgatctgcgaggcggcagcatggctggaggagggacgtctgccattgctgaggcttgagtaggtaaacaaagtggccgggaagctcaaacagggcaaagcccaccgcagttcaacaaggcctactgcctctagacctctgtgggcagggcatagctgaacaaaaggcaacagacaacttctgcagacttaaacatccctgtctgacagctctgaagagagcagtggtcctcccagcatggcatttgagctctgagaatagacagactgcctcctcaactggggcactgaccccatgtagcctaactgggagacacagcccagtaggggccaacagacacctcatataggcagatgccctctgggacgaagcttccagaggaaggatcaggcagcaatatttgctgttctgcaatatttgctgttctgcagcctctgctggtgaaacccaggcaaacagggtctggaatggaacaccagcaaactccaacagacctgcagctgagggacctgactattagaaggaaaa

SEQ ID NO: 178362 - DNA, 608 bp, Homo sapiens
ggaaatagtgacttgagaaaaatttgtgatacagaagaaggtgaaggtgtgtccggaattggtgggttcttcgtctcactgacttcaagagtgaagccacggacgcttgcagtgagtgttacaattcttaaagatggtgtttccagagtttgttccttctgatgtttggacgtgtttggagtttcttctttctggtgggttcatggtctcactggcctcaggagtgaagctacagacctttgcggtgagtgttacatctcataaaggcagtgcagacccaaaaagtgagcagcagcaagatttattgcaaagagcaaaagaacaaagcttccacaatgtggaagggtacctgagcaggttgcctctgctgcctcmggcagcctgcttttattcccttatctgaccccacccacaccctgctgattggcccattttacagagagctggttggtccattttacagagagctgattggttcgttttgacaaggtgctgattggtgcatttacaaaccttgagatagacatggagtgctgattggtgtatttagaatcctctagctagacgtaaaagttctccaagtccccactagattagctagacacaga

SEQ ID NO: 178363 - DNA, 515 bp, Homo sapiens
tattaagggatcatggagttggcttgtctaaataagaacaaacaaaggaaaattaagcagcctttgttaatttgtatcttttagtattaactgaaataagaaaatgtgtgtattaaaaggcactaagaagtaaaatgcaaagtgagagtaaagcagcttatatttgtaaaggaaagagaaataattttctattaaataatggatataattaagtatacaggtagttgctctgattattaaataaactatgtatttaatgaagcatttttttttactgaaatttgccaaaattatttatatttaggaaaatcagccaaactaaaatgaagatagttatgcatcactcttgggagacccaatcttacatatttatatatatatatatatgtatgtttgttgtaaaatataggccatattgctagaggattgaatcactrattttcatcatttctcaaacataccctgtctacacacacctatgtacacactcacatcccaacactgtcctttatcgt

SEQ ID NO: 178364 - DNA, 600 bp, Homo sapiens
ccatgattcaggttgtttttcttaacttctaatgtacaagttaagtgatgactaatgatcaaatatcaaattctaagtatatgaaaatcattgtaaaatatagcaaagtaggtctaaaattattaatgtgtatggactttgttcaaaatgaacaactaaataagtaaataagacttataaaatgcagggatatagcagaccacagggaaaaaaaacttgattgtcctttatttgtgtctattttggttaacataaaaatttgcttaggtagtggcaatgaagagtgcttccaaatgtaatacaaatcatgaaaaatgacttctagtgggtttaatactatcacacctatcattgaactggtattgaaaatttcatttattctacattgctataatgtgtggtttaaaatcctggaaaagaatgtttaaagagaatgggtaatcaacacagtagcacagcgttatcaaggctcaaaattaaaaggtgggaagacacaacataggaaagccttggacattgtttgttgcctgtatcctgaaaaccatctccagagggaaaacttgaattgaagcctctgagtragaattgttgtttcttaca

SEQ ID NO: 178365 - DNA, 581 bp, Homo sapiens
agtgacgatgcaggtagtgaagagcagcatagcattgctatgaatatcagaggctatgaatccagactgcattatttgaatccagggtatcaccaattttatyattgaaaattttggtaacatttacttaaactctcatctagaaaataaagtaaataaagataatttcttcataaaattactgttaaaaattagttaacatattcagatatttagaatagtatcttacacatattaaatgctaaaaagtgttagatattattctttatctggaaacatttattgaataaatactttctttacctccttccttctttccccttctaatttctggcccgtagaattattattcctgcttgggctccttccatgggctctgatattctctactgtcagaatctcttcactgcctataagaatgtttataatcttaaacatgaggcagacatgtacgcaaatagcttttaacagtatggactgtaagtcaggaaaagagaaatgtccagcatgaactgagaaatgttctatggtaaaggtaacatttgtgccaaagaacagttacaatttatgaaatgcaaaaa

SEQ ID NO: 178366 - DNA, 581 bp, Homo sapiens
agtgacgatgcaggtagtgaagagcagcatagcattgctatgaatatcagaggctatgaatccagactgcattatttgaatccagggtatcaccaattttattattgaaaattttggtaacatttacttaaactctcatctagaaaataaagtaaataaagataatttcttcataaaattactgttaaaaattagttaacatattcagatatttagaatagtatcttacacatattaaatgctaaaaagtrttagatattattctttatctggaaacatttattgaataaatactttctttacctccttccttctttccccttctaatttctggcccgtagaattattattcctgcttgggctccttccatgggctctgatattctctactgtcagaatctcttcactgcctataagaatgtttataatcttaaacatgaggcagacatgtacgcaaatagcttttaacagtatggactgtaagtcaggaaaagagaaatgtccagcatgaactgagaaatgttctatggtaaaggtaacatttgtgccaaagaacagttacaatttatgaaatgcaaaaa

SEQ ID NO: 178367 - DNA, 581 bp, Homo sapiens
agtgacgatgcaggtagtgaagagcagcatagcattgctatgaatatcagaggctatgaatccagactgcattatttgaatccagggtatcaccaattttattattgaaaattttggtaacatttacttaaactctcatctagaaaataaagtaaataaagataatttcttcataaaattactgttaaaaattagttaacatattcagatatttagaatagtatcttacacatattaaatgctaaaaagtgttagatattattctttatcyggaaacatttattgaataaatactttctttacctccttccttctttccccttctaatttctggcccgtagaattattattcctgcttgggctccttccatgggctctgatattctctactgtcagaatctcttcactgcctataagaatgtttataatcttaaacatgaggcagacatgtacgcaaatagcttttaacagtatggactgtaagtcaggaaaagagaaatgtccagcatgaactgagaaatgttctatggtaaaggtaacatttgtgccaaagaacagttacaatttatgaaatgcaaaaa

SEQ ID NO: 178368 - DNA, 596 bp, Homo sapiens
tgggatggtgtcttcaagggactgatctcatgtgcagtgacaccaataggctcaaaattaaaaagatggaggaaaatctaccaagcatatggaaatmagaaaaaaataacaacaggggttgcaatcctaatttcagacaaaacagactttaaaccaacaaagataaaaaatgacaaagaagggcatttcataatggtaaggggttcaattcaacaaggtgacctaactatcctaaatatatatgaacccaacaaaggaacatccagattcataaagcaagttattagagacagacaaagaaactcagactcccacacagtaatagtgagaaacaacgctccactggcagtattagacaaatcactgaggcagaaaattaacaaagatattcaagacctgaacttaacattggaccaaatggatctgagaaagcgctacagaactctccatcccaaaacaacagaatatacattcttctcatcaacacatggcacatactctaaaattgatcacataattggacataaaacaatcctcagaaaatgtagaagaattgaaatcataccaaatgcactctcggaccacagcacaataaa

SEQ ID NO: 178369 - DNA, 410 bp, Homo sapiens
caatggcattctttgcagaactagataaaaactactttaaaattcatatggaaccaaaaaagagccaagacaattctaagcaaaaagaacaaagctagaggcatcacgttatccaatttcaaactatactacagggctacaggaaccaaaacagtgttgtactggtacaaaaacaggcacatagaccaatggaacagaatagggagtgcagaaataaggccatacgcctatgaccatttgatcttagacaaaactgaygaaaactagcagcagggaaaaaacttctctattcaataaatgatgctggaataactggctagccatatgcagaagattgaaataggaccccttcctttctctaaacacaaaattcaacttgagatggattaaagacttaaatgtaaaaccca

SEQ ID NO: 178370 - DNA, 371 bp, Homo sapiens
tatgataacaaacctggcacatattatagccaatgcagccttacctttatcttactttaacaggctakacttacttataatgaccatccatcatttttcttagtccagtatgaaagtcttagccaatttggtctataatggactactgtaacttcataagagcagcaaataaatgccagtagctggcctatcatctacagctaatatattatctaatactcctcccacccatacaggtctataaagaatgaagtgaggttaggaattgttaatcatgtagaaaatgtaatgtctatttatttatttatttgcatgttttttctaagtacattgtgtatgccaaacagatacagtaatgttatatagttaaa

SEQ ID NO: 178371 - DNA, 362 bp, Homo sapiens
gatatgctctgaattccctgactatatgtggtcccttaattatatactctgttggcatggctgaataatatagtttgctatctattgatatacagtatatacctgaagcatgctaattgtttaattaatgtcatgacttgcatcagagctctgtcctcaatctttttcttttcagtgttttcatcagtggctttaatgaagtggtagaatgcatgaytaccagatatactgaggacccaaaaccaaggcagataaaaattttgttggatgactgatatggtttggctgtgtccccgcccaaacctcaccttgaactgtaataaaccccacttgtcaagggcagggccaggtggagataattg

SEQ ID NO: 178372 - DNA, 538 bp, Homo sapiens
ttgtggtgctggagttgcccctgggatattcaggtggagctagctatacagattagaagtccaagggaaaattcaagacagtgataaaagttgaaaatataattgcatttgcttttacctaccaaagctatggatgtcataggacatagtcctaatgagatgtaattggaaattcgctgggtaagggattcaggaaagtgtaattgattgagaaagatggttgtcatttcctttgtccttctgccctttgctacttcccctttccttctcctacctggaatgagatcataagatctgcagattcagcagctattttgtatccattggcaagagaagaaggacaatagcctgcaagctgggcttagaagaaaagaaaaatggaaagagmcataatctctgttgatatcactaaaacaccctaaattgattaactcagtgtttcttctttacaggataaataaatccataagtaattaatccattattgatgagattattgatgagataaataaatctataagtacttaatccattattt

SEQ ID NO: 178373 - DNA, 422 bp, Homo sapiens
atattctaaaaggcaaatctgatcatatgctccacctccacctatatattccttagcaagtatgtatacatatataatatagcttttatatggctattttcagtcttacaaaatatttgcaatttttatgcataccaaatgctcccgtgtcactgtaagtagttgattaaaggcattgactcagtaaattataagcagaaartacatttgttctttgctactatttcctttttatacccattctattgagttgttcttaaatgcacttagataaaatcttgagctgactcaatttttccaggctattcttaaatcaacaaatattctcaagtttcagatatttaaaattgcaatccaatctgtataacagttttaatcttgaattcaaattttatagcttattctataacagtctcaccttg

SEQ ID NO: 178374 - DNA, 422 bp, Homo sapiens
atattctaaaaggcaaatctgatcatatgctccacctccacctatatattccttagcaagtatgtatacatatataatatagcttttatatggctattttcagtcttacaaaatatttgcaatttttatgcataccaaatgctcccgtgtcactgtaagtagttgattaaaggcattgactcagtaaattataagcagaaaatacatttgttctttgcyactatttcctttttatacccattctattgagttgttcttaaatgcacttagataaaatcttgagctgactcaatttttccaggctattcttaaatcaacaaatattctcaagtttcagatatttaaaattgcaatccaatctgtataacagttttaatcttgaattcaaattttatagcttattctataacagtctcaccttg

SEQ ID NO: 178375 - DNA, 428 bp, Homo sapiens
aaaaccaaattacttacttccaagatacaatgggggtacaggcattgggtaaatattacatttctcaaacagagaaatttgccaaaacaaaggggctacaggccccatgctagtttgaaacccaagaagacagttattaaatcttaaagctccaaaataatctcttttgactccatgtctcacatccrtgcaacactgatgcaagggatgggctcccaaagccaggtgctgctccacccctgtggctctgcaggttgcagccctcctggctgctttcacaggctggtgttgagtgcctgtggcttttccaggcacatggtacaagctgttagtggatctaccattctggggtctagaggaaagtggctgtcttctcacagcttcactacgcagtgccccagtggagattttatgtgggggctccaact

SEQ ID NO: 178376 - DNA, 269 bp, Homo sapiens
gtcgcctaagcctggaagatcgcttaagcccggatcgaggctgcagtgagctgtgatcrtgtcactgcactgcaggctgggaaacagagaacctctctcaaaaaaaaaaaaaataataataataataataataataataattaaggacattaaatagtaatagtaattaagacagcatgatattttctcaaggaatcaaagataaccaagggaaaaaaagtagagtctacatatgtggactatagagttaagacaaaggtggcactata

SEQ ID NO: 178377 - DNA, 523 bp, Homo sapiens
acaggccaatatctctgatgaacacagacataaaaaaatccttcaacaaaatactagcaaactatatccagcagcagatcaaaaagttaattcatcacaatcaagtaggttttattcctgggatgcaaatttggttcaayatatgcaaatcaatatgtgactcaccaaataaacagaatcaaaaacaaaaactacatcatcatctcaatagatacagaaaagctttagataaaagccaacataccttaataataaaaatcctcaccaaattcagcatacaaagaaaataccccaaaataattagagccatctgtgacaaaccacaaccaacattatactgaatgggcaaaagctgaaagcattccccttgagaactggacctggacaataatcccactctcaaaattcctattcaaggtagtactggaagttctagcaagagaaattaggcaagagaaataaataaaagtcattcaaatggaaaaggagaagtcaaaccatctctcttcactaatatgattct

SEQ ID NO: 178378 - DNA, 588 bp, Homo sapiens
taaatacgtctaactaaggagttaaaaggtctctacaagaagaactacaaaatactgckgaaggaaatcagaaatgacacaaccaaatggaaaaacattccattctcatggattggaagaatcgatgtattagtctgtttttatattgctataaagaactgcctgagactgggtaatttataaaggaaagaggtttaattgactaacagttcagcatggctggggaggcctcaggaaacttacaattatggcagaagccaaaggggaagcaaggcaccttcttcacaaggcagcaggaaggagaagtgctgagtgaagggagaagagcctcttataaaaccatcagatctcatgagaatttactcactatcatgagaatagcatgggggagccacctccatgattcaattacctccacccaatctctcccttgacacatggcgattatggagattatgaggattataattcaagatgagatttgggtgggcacacaaagcctaaccatatcaatcaatatcattaaaatggtcatactgttaaaagcaatctacagattcggccctattcctatcaaactacaaatgt

SEQ ID NO: 178379 - DNA, 588 bp, Homo sapiens
taaatacgtctaactaaggagttaaaaggtctctacaagaagaactacaaaatactgctgaaggaaatcagaaatgacacaaccaaatggaaaaacattccattctcatggattggaagaatcratgtattagtctgtttttatattgctataaagaactgcctgagactgggtaatttataaaggaaagaggtttaattgactaacagttcagcatggctggggaggcctcaggaaacttacaattatggcagaagccaaaggggaagcaaggcaccttcttcacaaggcagcaggaaggagaagtgctgagtgaagggagaagagcctcttataaaaccatcagatctcatgagaatttactcactatcatgagaatagcatgggggagccacctccatgattcaattacctccacccaatctctcccttgacacatggcgattatggagattatgaggattataattcaagatgagatttgggtgggcacacaaagcctaaccatatcaatcaatatcattaaaatggtcatactgttaaaagcaatctacagattcggccctattcctatcaaactacaaatgt

SEQ ID NO: 178380 - DNA, 425 bp, Homo sapiens
ctgtactttatgccaagtaaggatattctgtcctctttagagaacagtatgactgaaagaggggttcagccagtggtcatctgcatcagagcaataccaaaaacaacctggatttaaacacactktacagggcccagccagaccacagaaccatcttcgcctgttttcatatggatgcctacaccatgcacagagccatattaaagaaaaataaatgacaatctatctctgctgtaatttaacacaattcaagccacatttattaatgcttccgtatggcatgtatggtgccagttgtatgaatatgaataagtcttgggccatgctttattcggttcacagtctggttaggaagatcaaaaagtcttcatgaaatatgtcagacttgacaatatatcaagaacatgaatcaaatcttattggtc

SEQ ID NO: 178381 - DNA, 412 bp, Homo sapiens
gttttcagtgctggctatacattaggattacctacgacctttaaaaattacaactstctgggccctatcccagattgatcaagtcagaatcactgaggcttgggcatttgtatttttttgtaagtgtctcaggtgattttggtgaacaacaaggtttgaaaaacaccctaattagtagaatcatgttattcaaaattacacatgttaattacatattagtaagatgagattcattttattatgtaatcatggtaacagttttgcaaaatcagcatatttggtcacttttaaagctttaagcttagaaagattagttagcccaatcaaggtcacaaagccaggacaagtggtagattcatgaatccaagtctgtctgattctcaagtccgtgctagttccactaggccgtatt

SEQ ID NO: 178382 - DNA, 412 bp, Homo sapiens
gttttcagtgctggctatacattaggattacctacgacctttaaaaattacaactgtctgggccctatcccagattgatcaagtcagaatcastgaggcttgggcatttgtatttttttgtaagtgtctcaggtgattttggtgaacaacaaggtttgaaaaacaccctaattagtagaatcatgttattcaaaattacacatgttaattacatattagtaagatgagattcattttattatgtaatcatggtaacagttttgcaaaatcagcatatttggtcacttttaaagctttaagcttagaaagattagttagcccaatcaaggtcacaaagccaggacaagtggtagattcatgaatccaagtctgtctgattctcaagtccgtgctagttccactaggccgtatt

SEQ ID NO: 178383 - DNA, 619 bp, Homo sapiens
aagcagtatttatatggttctatttttgatttagcaggcaaaatcattaaatatcactgaaaattctaaaatgtaaatcaattctttttctaaatgatataatactttaaaaataaattttcaataggcagtgattgattgattgaggaaatttcctgttgaataaatatatgttcagcatgaawcggttgacacaattagcttttattaaccactagtggagtaatttctgcaaataaatacagtgacatatgtcttccaggttgctatatttatagacttaaagaatgagagataagaagatgagaaataaaaaattttgtttattcttgatacaaaaacaacgttaatcattaaagacttatgtaattattcttcattatatctaaaaaatggatgtgaggaaaaggttgtaggaaagattaacagaggcccaaagcagctgaattctaaacatgggcctcccaattatttctaaaataatggtggataagttcaattactataaaaatctgaatattaatttaaaattaagaaaaaatatcaagctgattatactgagattttcttgaagacagaggtctttatccttgtacctttaccactttcattaaaagga

SEQ ID NO: 178384 - DNA, 527 bp, Homo sapiens
ttgccagtatgacacacaatcttacaattgtttgtcctattaatattcctttataaaaatattctctaatgttaaagagactggcttgttaacagaaaaaaattcaaccaagtgaaatttatagctcctcttttaaaaagacagctctttaagggctttgtggcaagaaatcaggggcattagcaatcactttcaagttactttgagggaaaattcatgagaatcattgaaaattagtgttttatagttttttttwacaaaattttatgtatatatacatatatatatattctattccatgtacaaactacatttttaagcaggcattacttagatgcctactaaatggaaattaacaatctatggttctaaaacatagatttatgtagacttgatgtagatacttgaattttgtcccagctctacttcctaatagatacatgaatagtcatgtaactgaaactgtctgaactgattttctctgtaaatggtgaaaatcatgcctcaacaaaagaatagtgaaaaga

SEQ ID NO: 178385 - DNA, 607 bp, Homo sapiens
aaacgtgtttggtgatggcatatatgtaatgagggaggaaagattaaaagaggaggcgcttccttcacagtgtgggagataggatgaattatgatgacattcactgaaatgaaatgtaatatgaacacctttgggaaggagatcataaattcagtatcagaggtgttgaacatcagttctctatcagtcaaaagggaatggaattgcaggcctggggcccaagagaaagatctgagattaaggtagagatawataaatcattaaaaattgatagcagtagaagacacaagtataaaagtcatatgaatagtgggcataaggatataaatactgcaaagtttagagcatttggaaaagtattaagatcaggaaataaaatgataatatttttaaaatgagagttaaggttgacaaaaattctgttattccaaagttgcactgggagtctttgagattgaccactgttcatcatgagaactagataagtttttgtttttgttttgttttttagcaacagcatgggaaggaaaaaaaatacactttttgctagactagtttgtgatttttgcattttaaatttaagtgtagaaacttactaagcttttag

SEQ ID NO: 178386 - DNA, 643 bp, Homo sapiens
cagggctcagcaggtgaaagggaattcacagaagtcttctctaatgaatattgctgtgatgctttttgaaattactaacattcctatcattttcattaaacagtgaagatagaagattaaagacaactattcctgcagaagagctcttccttgttgcctgcccatattttaaatgtgcaaaccttggtgatatattgatatcctgtgatgagtttatcctacatcattggttgagttttcttctgttctttcatattttatcatgtgtataattatttttctccagatgaatcttacactgtttgttatatttacttgttcttatatatattgccatattgcctaggctgaaaaaaaattgacttatgcacttatttagtgccttatttgaaaaaaacgacagtttcagttatttgaaactctaaaatacrttttcttcgtgtctgttttctatattttaaaaatgaagtactttgatatgtcactatggtcataagttccagtccaaagttcctctaaagaaccaccttatcttacacatctcaaaggaatttagctgatgaaatactttgaactaatcaaggaagggataacatcctactttttgtagactttgttttcacatgtatattacacatggact

SEQ ID NO: 178387 - DNA, 612 bp, Homo sapiens
ttggttactgggtagactccacagttatggaagtgaataccaattagaaaaatgttcatatcttagtcactgaataaactaagtgaaaagataccacttgccgggcgcggtggctcacgcctgtaatcccagcactttgggaggccraggtgggcagatcacgaggtcaggagatcgagaccatcctgtctaacacggtgaaaccccgtctctactaaaaacacacaaaaaattagccaggcatggtggcgggcgcctgtagtcccagctactcgggaggctgggcaggagaatggcatgaacccgggaggcagagcttgcagtaagccgagatcgcactactgcaccccagcctgggtgacagagagagactccgtctcaaaaaaaaaaaaaaaaaaaaagaatggatgaacaaaacaaatgcctttaattccattcagacttaagacttcacagttctcagacacaccaaagaaattatttccaaaagttcttttgcagagatatatttaaagttataattacatttttaagagcttcccagattgtaacaaatataagtaacttcaactagcaaataagaaattcaaaaatgtagctagctgctcaata

SEQ ID NO: 178388 - DNA, 610 bp, Homo sapiens
caagctatctcatatcttcctgtcttctgagcactccaaactgtactaacttctgcctattactcagttccaaagctgcttccacattttcaggtatccttatagcagtacgtgactcctggtgccaatttactgtattagtccatttttacattgctataaggaaatacctgacactggataatttgtaaagaaaagatatttcattaactatacatggctgaggaagcctcaggaaacttacaatcatggtggaagccacttcttcaaagggtgaagagagaaaatgagtgccagcaggggaaatgccaaatgyttataaaaccgtcagaacttgtgagaactcactcattatcatgagaacagcatggtggaaaaccaccctcctgattcagttacctcccactgggtccctcccatgacatgggattctgggaattaaaatacaagttgacatttggatggcgccacagccaaaccgtatcaatttttttgtttaagtgttgaaaaagtctgcagggtgatgacaattttgaaattacaagaatgaaataaggcaccttcaaaggtggagtctgaataaatgaagcaaaaagcccatctcaggaaa

SEQ ID NO: 178389 - DNA, 504 bp, Homo sapiens
aatcttctacttacaaacaactttaagacagaatttaagaggaatgtcctttggaaaattatctttccttcccccacagatgattcaaataaacaatacatactgtttagaacatttcattttatctggaattaaccctctgttggcatgtcttcttcatcactgaaaatgtaagaaagcacagmctcatcatgaaaatgctgggtatccacatctcacacaacttaaaaatcataatgagttgcaggttttattgtcaagaattaccctgtgcttcaaaaatgtgcttgctccttatgaagcaatataaaccttgtttttaatcttgcgaactgtatattctattggatatgtctattaaagatagaattatgagtgaacaataaatgtctttccagagaaaggtgcattttctgttgcacttagacttgaaggaggtgtagaagatacttggccaaaattggggcaaagaggggttcctgtgaagaagcaacagtgagagtc

SEQ ID NO: 178390 - DNA, 549 bp, Homo sapiens
tgcagagtgggagagaatatttacaaaccgtatgtcagataggggttgatatgtgaaatgaaaatctcacacaactcaatgtcaaaaaacaatccgactgataaatggccaaagtatctgaatagatgttatttaaaaaagacatacgaagggcaacaagtatatgaaaaggtgttcaacatcactaatcagaaaaatgttaatcaaaacawctatatcacttcacaactgttaggatggttattatataaaaaagagataagtgtgatgagggtgtggaaaaaggaaactcatgttcactgttggtgggaaagtaaactgagacagccattttgggaaacggtatgaaggttcctcaaaaatttaaaatagagctactgaatgactccacaatccccctgctgggtacatacccaaaggaactgaaatcagtatatgaaagatatatctgtattcccgtgtttattgcagtatagagctagtgtatgactccacaatccccctgctgggtatatacccaaaggaactgaaatcagtatacgaaagata

SEQ ID NO: 178391 - DNA, 440 bp, Homo sapiens
gaaaccatgcacaaattaattcatgacacattcatgttctttttgcatatgtctctttaaaaaaaaaacgttatttaggcaaagtgctaaagagaagttatttcaccttgctgacattgtgtcttacagttttacccaaccaatttkagtcattacttctttatcttaacaggattacttaattgcctagtcatggaatgaatgatttggctacttctatagacgtattaataaagacttatttgtataatagtcaagttaagatgaacatgcttgtgacctctcgcagaaataatgaagattctgcaatttaaagagcaataaactgtaaagatgtaattaccaactcttcattatcttacagaatttcaagataaactcactttatttcaatgtcaaaagacagcattaaagtccttttcaaaataccatttaattgg

SEQ ID NO: 178392 - DNA, 440 bp, Homo sapiens
gaaaccatgcacaaattaattcatgacacattcatgttctttttgcatatgtctctttaaaaaaaaaacgttatttaggcaaagtgctaaagagaagttatttcaccttgctgacattgtgtcttacagttttacccaaccaatttgagtcattacttctttatcttaacaggattacttaattgcctagtcatggaatgaatgatttggctacttctatagacgtattaataaagmcttatttgtataatagtcaagttaagatgaacatgcttgtgacctctcgcagaaataatgaagattctgcaatttaaagagcaataaactgtaaagatgtaattaccaactcttcattatcttacagaatttcaagataaactcactttatttcaatgtcaaaagacagcattaaagtccttttcaaaataccatttaattgg

SEQ ID NO: 178393 - DNA, 440 bp, Homo sapiens
gaaaccatgcacaaattaattcatgacacattcatgttctttttgcatatgtctctttaaaaaaaaaacgttatttaggcaaagtgctaaagagaagttatttcaccttgctgacattgtgtcttacagttttacccaaccaatttgagtcattacttctttatcttaacaggattacttaattgcctagtcatggaatgaatgatttggctacttctatagacgtattaataaagacttatttgtataatagtcaagttaagatgaacatgcttgtgacctctcgcagaaataatgaagattctgcaatttaaagagcaataaamtgtaaagatgtaattaccaactcttcattatcttacagaatttcaagataaactcactttatttcaatgtcaaaagacagcattaaagtccttttcaaaataccatttaattgg

SEQ ID NO: 178394 - DNA, 514 bp, Homo sapiens
tttgcaagttttcttgtgcagtgactaatcttcaacactcttttcctaacaatgtcattaatgttcttattgcagtggtataatgagtttaaaattatctccattgatgtcaattttttaaatagtcttttaatatactaagaacattaaaatacttttttaatgtattaaaatattgctaatacttttaatgacattgtcattaatattctaattgaaatgctgtcaygagtttaatcttatctccatggatgtcaacatttcttgtcaaattagcaatatattttaattatttccagtttgctcatatgacttgttactgtgttatcaaataatgtaaaagcctaaccatttcttctatttgaaatttgtctccttctgttaatcaattcatgctattgtatgataagaatttttgttacagttagcatcttgatgtcaagataatttctactgatttcatctttcatctttctgtcttgtgtttcagtctgttaatttttttactgaattt

SEQ ID NO: 178395 - DNA, 450 bp, Homo sapiens
tgttttagtacctgggtggacaaatggtctctaactgatcttttaaaaacaaatgcctcggttatccttgcatgtatacttttcccaatcctttttgaaattggattaccaagttctagaaaaaatctggtgatattttaattgtgtttattgcatttattattctaatttgaaaaggacatggtatagtgctctatttatgcatgtcctttatgaccttcygtgaaatatataggttatttcctatgagtcttacatattttacattaaggttattcttattttataattaatgttcctcctttgtaatgggatcctttttattatattctaattggcttatttctattgcatattaaagttcttgatattgttatataaatcttttatctgactatcctactgaattctcctgtttttggcatttttaattgattttctaggttttag

SEQ ID NO: 178396 - DNA, 437 bp, Homo sapiens
cttctagggcttgctatgctgttaggtgtgcatttactttaccagcttactatcaaggatattacaaacagtatcagtgagcaacaaatgaagagatgaatatggtaaggtatataggaagggkcatgaagcttccatactctttcttggagcagtaccctcaaagaacctctgtgtgttcagttatctggaagctcctgaaatatatttcttaaataataagacttgaaagtctaaatgactccttgatccaggggcagcagcatgaatattatgttagcagcatgaaaacaacattcatctccttgtacatctcctcagagctcttggatgaccaggtgcatcatcaatgggtagtaatattttgaaaggaatctatttttctgagcagtaggtctcaacagtggacttaaagtattccataaaccaggctataa

SEQ ID NO: 178397 - DNA, 334 bp, Homo sapiens
ctgctcatagcttcccttttcacacagggatggttggatcctttccacccaattgtgtgtaaccgtaaattccagccccaggaggaaaaccatctcctattaggaaggcatgcatgagcccccacccagccctcagctccagcatgcacagcatgggtggctgcggtagcagcagcaactgctgggcgagtgagtctgggaagaggtgggtgactgggaagagcttgacatgactgtctccaaaaaggtgcaaatcactgttagctgagggacaattgtgaggattagaatgtttwtattttccctgaaacttcaacccattcatcattttaaa

SEQ ID NO: 178398 - DNA, 599 bp, Homo sapiens
gcaaccacaagcctgctacaaaacttaacagataaaagagctaactttacaaagcacctaaaytggttcagaagttatactctttaaaacagagaattctattaatacactgtgctagataaacattgatctagcactaattgccacaggatgacagcaagtcctagaaacaaatcccacatatttcaacccccacctccatcaccaccagaagcaatttgtccctcaaaaaccagacagctctgctataatagcagctttgatgggccaatacttcaaaggacaactccaacttaaaatcaacccaacatttttgctatatggaaatatttggtaagtttttcctctaacactggattcctgttcacttatcagcttccatatttctcagatttcagaaatattgagatgttctttctccaccactcacttctaatttcccttattggatgcttgggaaatactcgccttcatcatacttgtcccactgtcttatatgctgctttcttcaaccatcaaaagaataaataaaatttacagtttataattatgttttaaactatttaaaaaaaaaccaatggggaaaaagtctctagggc

SEQ ID NO: 178399 - DNA, 599 bp, Homo sapiens
gcaaccacaagcctgctacaaaacttaacagataaaagagctaactttacaaagcacctaaattggttcagaagttatactctttaaaacagagaattctattaatacactgtgctagataaacattgatctagcactaattgccacaggatgacagcaagtcctagaaacaaatcccacatatttcaacccccacctccatcaccaccagaagcaatttgtccctcaaaaaccagacagctctgctataatagcagctttgatgggccaatacttcaaaggacaactccaacttaaaatcaacccaacatttttgctatatggaaatatttggtaagtttttcctctaacactggattcctgttcacttatcagcttccatatttctcagatttcagaaatattgagatgttctttctccaccactcacttctaatttcccttattggatgcttgggaaatactcgccttcatcatacttgtcccactgtctkatatgctgctttcttcaaccatcaaaagaataaataaaatttacagtttataattatgttttaaactatttaaaaaaaaaccaatggggaaaaagtctctagggc

SEQ ID NO: 178400 - DNA, 555 bp, Homo sapiens
attttcaacaccctaacacgtctgacatcaggcactagaaggggaaattgaagggaagcaggagtttattatgcagtaatgtacctgctaaagatagaaaagtattcctagttatccttggactcaatttggttttgtttcctactggtggcctccatggatgtggtaatttccatatagatgctatatatatttttctggggtgatacttgggtttaaactggtatcctcctttgcctaagtcaccccaacccagagacatgcattgaagcctctgtttggcatctgccttcatgacccaactccctctctagacaggatgtttcctctctatgtggctgcctagacaaccctgtttcctgtccttttcttcatctcatctttatgtgagctaggagactggcagaacttgttttctggtcacaattctgctgaccaaaacaggatctagtccagataggataaagttaagaaactagccaaaaaccagcagatggtgactgaaagcaatccctagctgctgtcattgytcgttagcataagacactcccacca

SEQ ID NO: 178401 - DNA, 514 bp, Homo sapiens
taaagtgcacagcatatataagtacagtgaaaaaacaaattcaggttcctggcttgttcttaggaatgtctaaaagttcaagtgctggagacatatacacaacatttcattaaacctatcatcagtataaaatgcattattccaaaatgcctaaaaaaacttaaaaaaatctcaatttagctatatgarttactttattattttttaattaattaattaattttatttatttatttatttttgagacagggtcttgctctgtcacccaggctgaagtgcagtggtgcgatctcggctcacggcaatctccgtcttccgggtttaagcaattcttctgcctcagcctccggagtagctgggatcacaggcatgtgccaccatgtctgcctaatttttgtatttttagtagagacggggtttcatcatgttggcaaggttggcctcgagcttctgaccccaggtgatccatccacctcggcctgccaatgtactgggattacaggcgtgagccacc

SEQ ID NO: 178402 - DNA, 514 bp, Homo sapiens
taaagtgcacagcatatataagtacagtgaaaaaacaaattcaggttcctggcttgttcttaggaatgtctaaaagttcaagtgctggagacatatacacaacatttcattaaacctatcatcagtataaaatgcattattccaaaatgcctaaaaaaacttaaaaaaatctcaatttagctatatgaattactttattattttttaattaattaatyaattttatttatttatttatttttgagacagggtcttgctctgtcacccaggctgaagtgcagtggtgcgatctcggctcacggcaatctccgtcttccgggtttaagcaattcttctgcctcagcctccggagtagctgggatcacaggcatgtgccaccatgtctgcctaatttttgtatttttagtagagacggggtttcatcatgttggcaaggttggcctcgagcttctgaccccaggtgatccatccacctcggcctgccaatgtactgggattacaggcgtgagccacc

SEQ ID NO: 178403 - DNA, 514 bp, Homo sapiens
taaagtgcacagcatatataagtacagtgaaaaaacaaattcaggttcctggcttgttcttaggaatgtctaaaagttcaagtgctggagacatatacacaacatttcattaaacctatcatcagtataaaatgcattattccaaaatgcctaaaaaaacttaaaaaaatctcaatttagctatatgaattactttattattttttaattaattaattaattttatttatttatttatttttgagacagggtcttgctctgtcacccaggctgaagtgcagtggtgcgatstcggctcacggcaatctccgtcttccgggtttaagcaattcttctgcctcagcctccggagtagctgggatcacaggcatgtgccaccatgtctgcctaatttttgtatttttagtagagacggggtttcatcatgttggcaaggttggcctcgagcttctgaccccaggtgatccatccacctcggcctgccaatgtactgggattacaggcgtgagccacc

SEQ ID NO: 178404 - DNA, 514 bp, Homo sapiens
taaagtgcacagcatatataagtacagtgaaaaaacaaattcaggttcctggcttgttcttaggaatgtctaaaagttcaagtgctggagacatatacacaacatttcattaaacctatcatcagtataaaatgcattattccaaaatgcctaaaaaaacttaaaaaaatctcaatttagctatatgaattactttattattttttaattaattaattaattttatttatttatttatttttgagacagggtcttgctctgtcacccaggctgaagtgcagtggtgcgatctcggctcacggcaatctccgtcttccgggtttaagcaattcttctgcctcagcctccggagtagctgggatcacaggcatgtgccaccatgtctgcctaatttttgtatttttagtagagacggggtttcatcatgttggcaaggwtggcctcgagcttctgaccccaggtgatccatccacctcggcctgccaatgtactgggattacaggcgtgagccacc

SEQ ID NO: 178405 - DNA, 620 bp, Homo sapiens
taagttgcccaaagtgtcacaactagacagaagaagactatccctcaccatcaccaatcttgggatcaaaattcaaaagacaatttttctgccgcagacaatctagtcaccgtggtctaggctgtgccactcaccactgtatgttcagagatgtcctaggctcagttgttggctgagtaaatagatgaaagaaaaaaataaaytcaataatttaataaaattataataaatggcatattcaacttcaatcttgacaaaatgtgacatttgataccttcaataacatataagaattcataaaatcaactacttaaatttgaaatccctattctcccttgggtccaggcttgttatctgatgtgctattaactagagttaccaagcattaatgtcaaggcaaataaaaaccctaatagaaatatctgtaaatagagttgatgaatatatgattatggaacatttaaatacagaaaaggaaaaactatatttaagcatgagaattttcaagctattttgtcaacatgacaacttgcttgaaagtttttataagaaaatgatacatggatcctaccctaaaacacacatattatgcacttttgtaccatttatacaaaccacca

SEQ ID NO: 178406 - DNA, 581 bp, Homo sapiens
atatgattatggaacatttaaatacagaaaaggaaaaactatatttaagcatgagaattttcaagctattttgtcaacatgacaacttgcttgaaagtttttataagaaaatgatacatggatmctaccctaaaacacacatattatgcacttttgtaccatttatacaaaccaccaaggactgtgaaaagctcatattatttgtaatccatgaaaataaatgttttactcctttctagagtttcttcagtgcttaagtactatttttaatacacatattccaaattctcatttttcctttcataaagatgaaaagaaagatttatctacagtacatacatacacattcatgtacacacagacacacacacacatacatatggaggggtagattatgtaattagaaaacagtatatgaatgcctaagactatttccccaaacttctgaattttattttgtaaaattgcctagtaaaatcccatataatgcagcagatggaataccaacgaacttggttttattcccagactgccaccagtttgcagcaagtcttgaagaaatgaattattttgtctgtacc

SEQ ID NO: 178407 - DNA, 620 bp, Homo sapiens
taagttgcccaaagtgtcacaactagacagaagaagactatccctcaccatcaccaatcttgggatcaaaattcaaaagacaatttttctgccgcagacaatctagtcaccgtggtctaggctgtgccactcaccactgtatgttcagagatgtcctaggctcagttgttggctgagtaaatagatgaaagaaaaaaataaattcaataatttaataaaattataataaatggcatattcaacttcaatcttgacaaaatgtgacatttgataccttcaataacatataagaattcataaaatcaactacttaaatttgaaatccctattctcccttgggtccaggcttgttatctgatgtgctattaactagagttaccaagcattaatgtcaaggcaaataaaaaccctaatagaaatatctgtaaatagagttgatgaatatatgattatggaacatttaaatacagaaaaggaaaaactatatttaagcatgagaattttcaagctattttgtcaacatgacaacttgcttgaaagtttttataagaaaatgatacatggatcctaccctaaaacacacatattaygcacttttgtaccatttatacaaaccacca

SEQ ID NO: 178408 - DNA, 590 bp, Homo sapiens
tctagaattaaggtaagttttcaaagaaaatattgaattaatggattaaggcatgaatgaatggatgggtatatgaatgagcacattttatccattaaaattaagctacttggagtgacataccagaaatgtcattgcttggttktattcagcgttttccatttgttagtttttatgagttagttatagaggaagttcttttactaggacaatgaagtccaactctggccatgtgagcaacaaatatatcacatatattggcatatctctttcactctaattgtacatgcaatcctgctaagaacaataaataatagcaaacatttattgcatggcactgtgccaaatgagaagttctttatattgctcaaaaaaatctcctcagcatacatttaagatacaaacatctttaaaatttgggattattcacaatttgtgaaagtgaaatcatcactacctttcttacatgctttttaaattcaggtgaatattacagtttttgtgctggtatatgttttccatagctaggtgatttcttcctgccagacacaaagtcagtagtcactatcccccttcagtcttaaatactg

SEQ ID NO: 178409 - DNA, 402 bp, Homo sapiens
ctcacacattgctggtgaaaatataattggtacaaccacatcaaaaagctgcatgtatttaaagccaactttttaacctatatattatctattttatttctgattctatattaaacaaatgtatgtgcttatgtccacaaaaatacaaacacaagaatgtttatagcaatgttattaatactagccycaaattgaaaacaatccaaatgtgttgagaattgataagtacgttatatactaccttgcaataaagacattcataaattgctacataaaacaatatggatacatttcacaatgttaagttaaaaaagtcaaactcaaaaagtatatatactatatgtttccacttatatgagtttcaaaaataagcaaaactaatatttgataacagagatgagg

SEQ ID NO: 178410 - DNA, 406 bp, Homo sapiens
gaattcactaaagttgcaagagacaaaacaacatacagaaatcagaagcattactacatgccaacagcaaacaatatgaaaatcatataaaaattaataccatttataatagttaaacayaaaattaaatacttagaaattaatttaaccaaagaagtgaaagatctctataatgaaaactgaaaaacactgatgaaagaaatggaagagaacacaaaataatggaaaaatatttcatattcacgtgttagaatgaagtaatattgctaaaatttccaaactacccaaagcaatctacagattcaatgcaatccctatcaaaataccacaagagtctcagaatagctaaaacaatcttgagcagtaacaacaacaaacagaactggaggaatcacataacctgact

SEQ ID NO: 178411 - DNA, 406 bp, Homo sapiens
gaattcactaaagttgcaagagacaaaacaacatacagaaatcagaagcattactacatgccaacagcaaacaatatgaaaatcatataaaaattaataccatttataatagttaaacataaaattaaatacttagaaattaatttaaccaaagaagtgaaagatctctataatgaaaactgaaaaacactgatgaaagaaatggaagagaacacaaaataatggaaaaatatttcatattcacgtgttagaatgaagtaatattgctaaaatttccaaactacccaaagcaatctacagattcaatgcaatccctrtcaaaataccacaagagtctcagaatagctaaaacaatcttgagcagtaacaacaacaaacagaactggaggaatcacataacctgact

SEQ ID NO: 178412 - DNA, 549 bp, Homo sapiens
tatctctaaaatcggctgtacttatacactatgactccagttaacatcagatagcctcctccctatctggctataagttctagtaatatcactcctttctatagtctcttcagtctaacagagacagtagcatttcacaattgttaatctttaggccatctatctcctatgttagtcctctggcacagaagtattttaatattttttaatctagtattaaagtggccacaagttaaatttcttatataattttctgttatattatttacacaattcatttgcaattgacagattgtcctcctttccctgattactgcttaatgttagaaatcttttagagatgttatttcttttgttgaaatattttcttcctcatctatccaaattctatctaccatttcagatccagatcctatttatgtttcttggaaaatactygcatcactctttcccatgatttaattcatcatataatcacacaccacataacaatattttggtcaatgatatacctcatatacattggggatcctatgagattataatact

SEQ ID NO: 178413 - DNA, 549 bp, Homo sapiens
tatctctaaaatcggctgtacttatacactatgactccagttaacatcagatagcctcctccctatctggctataagttctagtaatatcactcctttctatagtctcttcagtctaacagagacagtagcatttcacaattgttaatctttaggccatctatctcctatgttagtcctctggcacagaagtattttaatattttttaatctagtattaaagtggccacaagttaaatttcttatataattttctgttatattatttacacaattcatttgcaattgacagattgtcctcctttccctgattactgcttaatgttagaaatcttttagagatgttatttcttttgttgaaatattttcttcctcatctatccaaattctatctaccatttcagatccagatcctatttatgtttcttggaaaatactcgcatcactctttcccatgatttaattcatcrtataatcacacaccacataacaatattttggtcaatgatatacctcatatacattggggatcctatgagattataatact

SEQ ID NO: 178414 - DNA, 625 bp, Homo sapiens
atttacatatttgttcttattaaaggatattgaaaacttattatgtcttaggtgttccataatttatctcttatagattatggcagagctccagagarctctaattaaacaaaatatcaatgtagaaaaagaaaattggggttagaaattgtatttgagtttatgcagatgattaaaaccaggatcaaatagtgttgataattaatcattttagcaaattactttagagtaattgaaataagtttggattagtaatgttgaagttgttgtacacaagcacaatagtctttagttcttccccatatatttcactctatcccttcacgttaatatttataactaaatgaaataatttcctggtgtggacaacttatttttggttatctgctccttcaggtagatatgtagataagagtgaagtagaattaaatacattagtgatttaaataatgtgaggctcaaaaatagtcaaaataaattatcactacctcagttctgaattttttttcttaattgaatagcaagacaatagaaaatagagatgtccaaagaacatattcatttgcagttacttttaaatgctggcatatattattaccttttaaaagttttcatgaaatatggt

SEQ ID NO: 178415 - DNA, 591 bp, Homo sapiens
attgtattatctttattgataattaatatttaagttacaataaatttattgattttctttttattggagagtattttcaattgaaaatcagaatattgggatttagtttttattgtttaaataattactagtwtgaacttaggaaagtctttagacttttcttgacatatattttctcacccaattatttccaatcccttttaactatatctaaaatatttgctttttttctttgtaaaatcgtgaacaaaatacatatatgatattgatactactagatagaaaggctgtgaagttggctgttggaaactctcatgctcagttctcattacatcaaccatttcaattgtttcagtacatgattttataagacctttctcccactttcccagtgattacggcatcctacaagttattatttttgtcttccatttctatttaatacactggtaaaattctaagccaaaatttaactgttagttcaaactactttttaagggtataattttatgctttatttgccctttaaataaagctacataattgctctagagagaataagaatgcatgtgggatataatataacatgta

SEQ ID NO: 178416 - DNA, 442 bp, Homo sapiens
agcctgttctaaacatcagcaggaggccagaaacacttgaactaatatagagaaaaaaatcaataattccaagggactggaatatgtattggatatatcatgctccttcctctctcccaactaaatcatgaagccaccctatgaaactctccattcattaaagtcttgaaagctagattggtgagtaaagcaccacattatttagaaacagtttgattcacattttattttggaatgggaatgttggtaggagtaggagcagaatcccagtagatttccaatcatactgagatggtggtagatacaattaaattcattatgctattagttgattttcattagggaggaaaaatatcttagtcttttcaacaaagacctaacttcagcctcttaaaaataaaacaaagsaaaacacaaaacaaaaatagtttatgtcctcttg

SEQ ID NO: 178417 - DNA, 552 bp, Homo sapiens
tatgtctttctcaaatgcctgtataataatttttcttcctttcttctgaaggaatatcgttctgtttatcagccaaatgtgaaataactatttagtcattatttattcatttcagggactctgaccttcaaacctttgaggaaagacaaattttcctcataaatatgtttgtacctttgtaatacagcggggacagcaggagcaggggagagaaagaaaagattatcttggggggaaaaaaaccactctatgctcatatatccctgctactaatagactcagacttgaacataagcgagctagtttatgctttctggaaatgaaaagggaagatacagccatgcatatgtgcaaattttccataaaggatmtactaatagccatatatttataacttgtaaaagatatgactattcaaatcttaattctctgcaacacaagaaactcatatatgttttaaatggaaaatatcaatcagttttaaataaattggctttaaactccctaattttaatgagactgtaagttcaggctgattgatttggtaacata

SEQ ID NO: 178418 - DNA, 594 bp, Homo sapiens
ttcaggggcggctgcgaaggcctcttgggtgrcagcctcattgtgactgatggctgcatgtggggagagaaggggagactggccttggcatccaggctgtggaaggggaagggaggagagagctgtttctggaattggagtgaggaggaaggtagaggaagaaagccatacggtttggagggcctagggctccttgaaaaggacttctaggccagccccagcagggacttgtggagtaggattacagaacatgtatgtgtcctggtgaggagggcagaagcctgaagcttcccggaggcttagagggagcacagcaagaggaatcctgaaatgagagtggaagaactggggactgtgaggccagagaaggcacgcagggagctgggtctttgaactttctagttctagtgtcaggattctgaaatacagtaaggttggactcacatctttattacttgggcctaattaagaaaaaagaaaaagcaacaaaagaaaatggcagaaaacatttatgaccttcaaggatctgtgatgcctgccctgacacacacccttgaaccctgggcaggaaccatcactcgtacatcacaatga

SEQ ID NO: 178419 - DNA, 594 bp, Homo sapiens
ttcaggggcggctgcgaaggcctcttgggtggcagcctcattgtgactgatggctgcatgtggggagagmaggggagactggccttggcatccaggctgtggaaggggaagggaggagagagctgtttctggaattggagtgaggaggaaggtagaggaagaaagccatacggtttggagggcctagggctccttgaaaaggacttctaggccagccccagcagggacttgtggagtaggattacagaacatgtatgtgtcctggtgaggagggcagaagcctgaagcttcccggaggcttagagggagcacagcaagaggaatcctgaaatgagagtggaagaactggggactgtgaggccagagaaggcacgcagggagctgggtctttgaactttctagttctagtgtcaggattctgaaatacagtaaggttggactcacatctttattacttgggcctaattaagaaaaaagaaaaagcaacaaaagaaaatggcagaaaacatttatgaccttcaaggatctgtgatgcctgccctgacacacacccttgaaccctgggcaggaaccatcactcgtacatcacaatga

SEQ ID NO: 178420 - DNA, 594 bp, Homo sapiens
ttcaggggcggctgcgaaggcctcttgggtggcagcctcattgtgactgatggctgcatgtggggagagaaggggagactggccttggcatccaggctgtggaaggggaagggaggagagagctgtttctggaattggagtgaggaggaaggtagaggaagaaagccatacggtttggagggcctagggctccttgaaaaggacttctaggccagccccagcagggacttgtggagtaggattacagaacatgtatgtgtcctggtgaggagggcagaagcctgaagcttcycggaggcttagagggagcacagcaagaggaatcctgaaatgagagtggaagaactggggactgtgaggccagagaaggcacgcagggagctgggtctttgaactttctagttctagtgtcaggattctgaaatacagtaaggttggactcacatctttattacttgggcctaattaagaaaaaagaaaaagcaacaaaagaaaatggcagaaaacatttatgaccttcaaggatctgtgatgcctgccctgacacacacccttgaaccctgggcaggaaccatcactcgtacatcacaatga

SEQ ID NO: 178421 - DNA, 392 bp, Homo sapiens
ttgtcatggcggaagttggagccgggctttcctgagacgctctggcaggtgacagggttggaggcattttgagggggggggtgtgtgagtagactggtaagtgggagccagcgggggggacccaggggtaggagcagcttgttcacaagctgacatgtctgtacttcttggattctcttttccaaaccattggtaatcccctctcctccctttcgaacccattttgatatggcttgaatagtgttctcacgttctgttctgtagtctggagtggctagagcatcagttctgtgatacayctgacaattctgccttctagatacatttcaccatcattttttcaagttctataatgtacatgtgcattaatcagtattgcatatccaaatact

SEQ ID NO: 178422 - DNA, 383 bp, Homo sapiens
tgttttgaaaacattcccaaggatgacagaggaggagrctttggtagtcaacagaggcaaccctcttccagggtcgttgacggagctgcagtgtagtcggcctcagctgaggagcttcactccctccctgccggaaccagccgccacaactggcttctccgtcagccttaggaaaagcagtcttgttgagttctctacagttcttactcacagcctctcatccattgggtgatagaaaaaacaacaacttgggctttgcattgtttacttttacaaatcccaattcagctccatttcgagctgtctagggcagggaagaggcctctgataagcacagctggaacagcaggaaaatattccccaaccctgctgttgacatggct

SEQ ID NO: 178423 - DNA, 592 bp, Homo sapiens
cttttggttgattcttaaagcatgtattttaataagggactggaaaccacaactgttaatcaatgttctcttggtttttacctctgagtcatggctttagatcagggagatagcatttcagatttgctactgggtgagaggttttgcatggcttatatgatattacctgatttttttacaaagtttagaggctacaaaactatccaggttttatgatctctactgaccttgtcagattgatgatgggatgggtgctgtgtttcccattttatggatattgagtgtgcaagagatgacagttatttcttttatcaacttccagaaagtgaactctggttgagacctgcaatggtgagagagataagatcactcatcaaggcaaattgattcscagataaatgaggcattcagtaggtggtgaatgctaagaaagacctatgtcttctgaaaactgcatcgttaattgtattatgttattgatccatcttgggtaatgatagtgttagggaaagcgagttgcaaagttggttgagaaccattgctttgtctcttcaaggcacttacatctgaaaaggcatgggcaggagtgggg

SEQ ID NO: 178424 - DNA, 592 bp, Homo sapiens
cttttggttgattcttaaagcatgtattttaataagggactggaaaccacaactgttaatcaatgttctcttggtttttacctctgagtcatggctttagatcagggagatagcatttcagatttgctactgggtgagaggttttgcatggcttatatgatattacctgatttttttacaaagtttagaggctacaaaactatccaggttttatgatctctactgaccttgtcagattgatgatgggatgggtgctgtgtttcccattttatggatattgagtgtgcaagagatgacagttatttcttttatcaacttccagaaagtgaactctggttgagacctgcaatggtgagagagataagatcactcatcaaggcaaattgattcgcagataaatgaggcattcagtaggtggtraatgctaagaaagacctatgtcttctgaaaactgcatcgttaattgtattatgttattgatccatcttgggtaatgatagtgttagggaaagcgagttgcaaagttggttgagaaccattgctttgtctcttcaaggcacttacatctgaaaaggcatgggcaggagtgggg

SEQ ID NO: 178425 - DNA, 592 bp, Homo sapiens
cttttggttgattcttaaagcatgtattttaataagggactggaaaccacaactgttaatcaatgttctcttggtttttacctctgagtcatggctttagatcagggagatagcatttcagatttgctactgggtgagaggttttgcatggcttatatgatattacctgatttttttacaaagtttagaggctacaaaactatccaggttttatgatctctactgaccttgtcagattgatgatgggatgggtgctgtgtttcccattttatggatattgagtgtgcaagagatgacagttatttcttttatcaacttccagaaagtgaactctggttgagacctgcaatggtgagagagataagatcactcatcaaggcaaattgattcgcagataaatgaggcattcagtaggtggtgaatgctaagaaagacctatgtcttctgaaaactgcatcrttaattgtattatgttattgatccatcttgggtaatgatagtgttagggaaagcgagttgcaaagttggttgagaaccattgctttgtctcttcaaggcacttacatctgaaaaggcatgggcaggagtgggg

SEQ ID NO: 178426 - DNA, 570 bp, Homo sapiens
acacaaacattcagaccatagcatattgttaataaaagttgcagaaaagaacattgagaaacatggactagatatgcaacaagattcaagatagaattatctctatggtaattgcttgtcacaaagaaggaacagttgagagcaggaaatcctgcaaggagaggaaaactttgttaaatttaaaatgccaattacargcacctgccaccaggtctggctaatttttttatttttattttatttattttatttttttattgagacggagtcttgctctgttgcccaggctggagtgcagtggcgtgaggcaataaacagcaaattggagactctaggaatttaatcagtaaaaataccagcttgagaaattttcccaggagtcaatctaaaatgagagaatggataagagttgtgagcacttgtctagaagatgtgatgcatacaaaacaaaaattcaagaaagaaagcagaaacagtagtcaaataaatggacatcaacttgtctgagttgaaggaacacatcagagtctttcctgtacattagataaaacccatgataagaaaataatc

SEQ ID NO: 178427 - DNA, 384 bp, Homo sapiens
tgagtgtggctttatttggaaatagggtctttatacgtataattaagttgagaatctccagatgaagtcctcctggatktagggtgggcttttctttacagggaaggagagggaggtctgacacaaagacacgcagagaaggcagccatgtgaagacaaggcaaagattggagttccttagcaagaaaccaaggaacacccacggttggcagaagccaccaaaacccaggagagaggcgtgggagagactctcctgtagagcctccagtgggaaccaaccctgccgcaccttgacttcagacttctggtctccagaattgtgacggaataaatttctgttgttttgagccacatagattgtggtaatatgttatagtagtccta

SEQ ID NO: 178428 - DNA, 574 bp, Homo sapiens
gttcctgtgagtgtggctttatttggaaatagggtctttatacgtataattaagttgagaatctccagatgaagtcctcctggatttagggtgggcttttctttacagggaaggagagggaggtctgacacaaagacacgcagagaaggcagccatgtgaagacaaggcaaagattggagttccttagcaagaaaccaaggaacacccacggttggcagaagccaccaaaacccaggagagaggcgtgggasagactctcctgtagagcctccagtgggaaccaaccctgccgcaccttgacttcagacttctggtctccagaattgtgacggaataaatttctgttgttttgagccacatagattgtggtaatatgttatagtagtcctaggaagctcatacactttctcaaggacatctagacagtaaaaagtaagccaggatttaaacccagatttgcaaacttcaggtccctatcaaatatgccataggaagtctttggctcatttccttaacagaaaaatgggagggttaaattctatgacctgaggtccctttgaatgctgtgtctgt

SEQ ID NO: 178429 - DNA, 574 bp, Homo sapiens
gttcctgtgagtgtggctttatttggaaatagggtctttatacgtataattaagttgagaatctccagatgaagtcctcctggatttagggtgggcttttctttacagggaaggagagggaggtctgacacaaagacacgcagagaaggcagccatgtgaagacaaggcaaagattggagttccttagcaagaaaccaaggaacacccacggttggcagaagccaccaaaacccaggagagaggcgtgggagagactctsctgtagagcctccagtgggaaccaaccctgccgcaccttgacttcagacttctggtctccagaattgtgacggaataaatttctgttgttttgagccacatagattgtggtaatatgttatagtagtcctaggaagctcatacactttctcaaggacatctagacagtaaaaagtaagccaggatttaaacccagatttgcaaacttcaggtccctatcaaatatgccataggaagtctttggctcatttccttaacagaaaaatgggagggttaaattctatgacctgaggtccctttgaatgctgtgtctgt

SEQ ID NO: 178430 - DNA, 384 bp, Homo sapiens
tgagtgtggctttatttggaaatagggtctttatacgtataattaagttgagaatctccagatgaagtcctcctggatttagggtgggcttttctttacagggaaggagagggaggtctgacacaaagacacgcagagaaggcagccatgtgaagacaaggcaaagattggagttccttagcaagaaaccaaggaacacccacggttggcagaagccaccaaaacccaggagagaggcgtgggagagactctcctgtagagcctccagtgggaaccaaccctgccgcacmttgacttcagacttctggtctccagaattgtgacggaataaatttctgttgttttgagccacatagattgtggtaatatgttatagtagtccta

SEQ ID NO: 178431 - DNA, 601 bp, Homo sapiens
gaaagatctgtccaagtcttaaaccctagttcctgtgagtgtggctttatttggaaatagggtctttatacgtataattaagttgagaatctccagatgaagtcctcctggatttagggtgggcttttctttacagggaaggagagggaggtctgacacaaagacacgcagagaaggcagccatgtgaagacaaggcaaagattggagttccttagcaagaaaccaaggaacacccacggttggcagaagccaccaaaacccaggagagaggcgtgggagagactctcctgtagagcctccagtgggaaccaaccctgccgcaccttgacttcagacttctggtctccagaattgtgacggaataaatttctgttgttttgagccacatagattgtggtaatatgttayagtagtcctaggaagctcatacactttctcaaggacatctagacagtaaaaagtaagccaggatttaaacccagatttgcaaacttcaggtccctatcaaatatgccataggaagtctttggctcatttccttaacagaaaaatgggagggttaaattctatgacctgaggtccctttgaatgctgtgtctg

SEQ ID NO: 178432 - DNA, 363 bp, Homo sapiens
accattcagtaacagcggatgactgagaaaaaaacaaactgagtccactaaaagctgatgtaggcactcaggccgcactgtgcatgggaaacagcaagctctgttttgcctcttgaagtcagagctgaatccaacagaggcctgccwtccctctgtgagcgccaaggtgccccagccctcaagggcagtttttggccccactggttcttattgattctttcctagttcaaattcatgtctctcatgttttcctatttcacgtcttactgcttttgtgaatgatttggttggtaaattattcagtaaagcaaccataaattattctattttatcagtcttacaaccactgaaggaaactgttca

SEQ ID NO: 178433 - DNA, 608 bp, Homo sapiens
aggtgtcacataaagtctctctcttaaaattataacctgtggtagaaccagaacaggaatctcagtttttcactcatgttagtatatcaccctgacttcccaagatattcgaacgggatcatcttgaaaactgttctatttttttaccttaagttgcagattaactccttcaaagcaagaaaaacgtaaggaaagatgagtgggaattcagaaaaaagaaaatgggtgaagtctttgaaattggccaagcagagaaaattggacatttgagctaaactcaccaaaatcttcaggatacagagtggctccaatagtatcagaattacatttggagcttttccagtaattctgaaccgagacatactaccakgctactacccaagagtaaatcctcagcccagaactgagccaagagtgtacccttgttacagctgcccaacagcacaggacaggctgatcatttgtggccggtgctggccctcgaaattccttttcatgcttagtggaaatcatggaaacaacactaagattagcattatggtctttagagatgcactatttgaaactggagaaatcagagggagatcaaacacgtgcatcattagtac

SEQ ID NO: 178434 - DNA, 613 bp, Homo sapiens
tgaatgcatatagtagaggaattttccataaagattgatttcctggctacataaactctctgcccattctgtctccccttttctgggtaaatgtgtagttaccctgtaaaggaagccttggatagatgcagcacaatatagaatctccagagatcacagagtggtagataaaatccgaccaaataccattgcagcacctaccaggaagttggcaccccttgtttcttagatatacctgtgatatgatttctagtaaaaaaaaaaaaaatcccaatgactgtttttctccataggttcttaccatggaaaatcaaaatgactggctccttcaaataaatcttayctgcagccttgccaagtcttcatcttggaaacaatgagcctgctttatatactcaacactagatagacttttatataactatgctgattgtgaagctgatgttgcagcatacggtaaagcttagtagataacgttggataaggaaaggagagtaatctgtaaatgtgaagaaaaaagactggaaggaagtacaccaaaacattaataagtattgcacaaatgctggagggaagagctgccttttaccttttatctgtactttataaatta

SEQ ID NO: 178435 - DNA, 505 bp, Homo sapiens
ccctggcattttttcattttkacccaaaactaaatcctaaagcccatttttgtagaataaatcaaactgtcaattccctgctggaatctacaggcttagtcagcaaacagcctgtgtattgatatccttgctctcatacaaatttcaagctgagctgtgtcatcctggtcagtatttagctaggggatttctagtccaggaacaagtaagaaaatagctaatgggaatcattcttctaaatcagcaatccccactttgattttcaaaaacacttttcctttcaaaaccaggttgccgttcatcactagtaaagatatgacttattatttcaggaacctgataggagaagtctgatacctaagctaggtatcagtcaaaataggctaggttatgctgcagtagggataacaaaaataaaaacactaaaatgtctgtggcttaaaataataaatgtgtattttctgctgatgctacctttctatcatgggttgctggaggtgaaggt

SEQ ID NO: 178436 - DNA, 608 bp, Homo sapiens
gcttccatggtttctgaatagaagtgtgatgtaattgttatctctgctatgctatatgtaatgtgttcctttcctctgccttcattttggattttttaaattatcactggttttcagcaatttgattatgttgtgccttggggttttctttatgtttcttctgcttgggattttttgagtttcttggtttattacacttataactgtcatcaaattkgaaaatatttttgccactactttctcaaatttttttttgccccttctctcattttcctgggactccagttacacttatgttagtctggttgacattgtcacacaagactctgatgatctgtgtatctttttagacttttttctttgttctttattttctatagtttctattgccatgtcttcaagttcactgatcatttcttctgctatatcttattttctgtacaatcaagtctattgtctttttagtttccatttggcattttaatactttctatttttctccttcttatattcacaatttccttgacctttttgaaaatatgaaaaatatttatattatcatttaaaaaatcttgtatgctaatttcacaatgtctgtcagttctgga

SEQ ID NO: 178437 - DNA, 589 bp, Homo sapiens
tctttcaatctctgcccattacccagttccaaagtcgattccacattttcaaattatctttatagcagtaccctactctgccagtaccaattttctgtattagtcttttctcacactgctataaagaactgactgagactaggtgattaataaagaaaagaggtttaactgactcacagttctgcatgggggggtgacctcaggaaactcactatcatggcagaaggtgaaagggaagcaggcacatcttacatggtggcaagagagagaaagggaaagtgccagacacttaccaaactaccagatctcacgagaaattactcatgggcatgagaacagcaaggggaaaatccatccacatgatccaatcatttcccatcaggtccctctcttaacatatgaggattagaatttgagatgagatttgggtgggggcacasagccaagccatataaatatcttcacaatatcttcagaaatttaaatccaaaacataataactctccattctaaaaaagagggagagagagagaaagaaaaaagacccaacagcaaaaagcaaaactttgtggattgggctcaatagtac

SEQ ID NO: 178438 - DNA, 625 bp, Homo sapiens
tgctagtgctggggagcagctgcagatacagattaacgttagcagagaggtttgactgcacagagaccataataaatcaattgcttacagactgatacaaaatcctatcagtgagtggcaagtgacaattaagccgcatctggtgacaggctttatagtggcaagactcacttggtgtacttcaattgtacagctgcatctagtggccttaaaagaatgtktgggacaacttcaaatctccatacgttctggattaaagtcaaggtggaatatcctgagactgccacaaaagcagtgaaaagcctgcttccatttccaatatcctatctttatgaagtggggttttctgcagtgacagcagccaaaatgagattatggagtaaactggacataagcaacacactttgggtgtcacagtctcccatcacccccagatgggactctctagttgcaggaaaacaagctcagggctcccactgtgatatggtttggctgtgtccccacccaaatctcatcttgaattgcagctcccatagtccccacatgtcatgggagggagccagtgggaggtaactgaatcatgggggtaagtttttcctgtgctgttcttgtgatagtgaataag

SEQ ID NO: 178439 - DNA, 569 bp, Homo sapiens
atgtacttgaagatgacaagcaagggactgaatgttcacaagatcactctggcaaccctggggagactggaatcgaagcagcatcattgtctagggtaaatacccaagacttgttgtctcatggccacggaaaactaggatgcggacacacaaacactgaggttcagagtggaagtttaataggtgaaagaaagagaaaagctctctctgctgcagagggaggggtcccaactgggttttctgcttctatggtgaaattcaggaggttttacaaatgagcttgaggaggcagtgtstgattcacatagggcatgaaagattggtcagaacaggtgtgccatttgcataaggcatgaaaagctggttaggactaggtgtggcatttgcatagggcatgagaggctggccaccaccaccctaatcttttattacgtagatgggttctctacctatcagtgccgtgttgcctgtttctttactgtacatggtaacaaagaaaagggaagatggaacctccatgttgaacatgcctggccccaggtagcccttttccattggcacagctgcca

SEQ ID NO: 178440 - DNA, 560 bp, Homo sapiens
tactaccagatccatgtaaagagctttacagacaatcgcccactcagtccctacaaacatctgctgggggagtcactgtctaacagagggtgtgttccccatttctaaaatttccccagaccagatgccatctttctttctggacacactaattgctgctctaatttccctgctctctaaccctatctttagatacatatatcagatcctgcatcctcagggacccctgtgttaatgctctcttctttagctccatcccagcacactctacctaatatagatccatgggccatagttccatgggccatgaccatggacattatggtggcaagaatttatccaccaaccaggtcacctctagtttacaataataataaaatttaaatgtrattttatacttacctccaaactcatccttatatacattaaatatatatatagcctactgtgtgccaaccataccttaataaagtagttttaaatataaatttaattcaacttatgttattttgattatgaacaaattaaattgaattaagtttaagtttaattataattaa

SEQ ID NO: 178441 - DNA, 560 bp, Homo sapiens
tactaccagatccatgtaaagagctttacagacaatcgcccactcagtccctacaaacatctgctgggggagtcactgtctaacagagggtgtgttccccatttctaaaatttccccagaccagatgccatctttctttctggacacactaattgctgctctaatttccctgctctctaaccctatctttagatacatatatcagatcctgcatcctcagggacccctgtgttaatgctctcttctttagctccatcccagcacactctacctaatatagatccatgggccatagttccatgggccatgaccatggacattatggtggcaagaatttatccaccaaccaggtcacctctagtttacaataataataaaatttaaatgtgattttatacttacctccaaactcatccttatatacattaaatatatatatagcctactgtrtgccaaccataccttaataaagtagttttaaatataaatttaattcaacttatgttattttgattatgaacaaattaaattgaattaagtttaagtttaattataattaa

SEQ ID NO: 178442 - DNA, 563 bp, Homo sapiens
tggaagggaccctaaacgcctaacacaatattccactgtccatacagaaaattctcataagttcctacattaaaaagaatgagaaatttatacagaatgtaaaggaaaacatctctggttttttttttttttggcagatggatatggatgagttaactgcatcacactatataaaattctttttacattttatgttttaaaaagcatctgtaaatacatttgctgtctataaacatccaagttaaaaactccttgatccaatattaaacctaawcacattcatggattagagaggtagctataaagtggtggctaaaaacaatttatagtcctggttgtacatcttactacttacatagtcatgaagaagtcacttaactctaattgtctcagttttctcatgtttaaatgaggtgatgacaatagtacccatatcacagagttgtggcaatatatataatctgccttaggacaatgcatgaagtatatcacatgctgaatgtcttaggggatgtaattatatcacctgtattttcacctgctgtaatttacctgtgtttgcc

SEQ ID NO: 178443 - DNA, 546 bp, Homo sapiens
aagacgttcatcttcatctcccacacatatctaattgcctctttgtcatcctctgataaaaactggcagcaattggaccatctatgcrctctgtatgtaacacggtgtatatactggcttggcagagcagtgtggtttttcaaaggctaataaggttgaacttggcatcatctatcactaatctgtggcttgattcttggctcttgtttcatgtgctgccacattaaatttactgctctcatgctccatatgacactgatgatgctaaaagtcagtgaggctgtgggggctgggggtgcagggagactgtggttaataaatgtggttctagcagtcttgtgtgtacctgacctttatctttcaaataacctgtgtaaatccagcaccagtcaatgaacccaaatagattgctgtgttagaggagacaatgaaattaggtgagcaaattccaatagaaggaaaaatgaatgtggtggctcattccatactatccttttctgtagtttgtcttaagtggcttccttgggtgacattgagtgactagtt

SEQ ID NO: 178444 - DNA, 470 bp, Homo sapiens
ggtaactactaatttgaatgatttataactgggaagggcatgtkttcctccaaactgctatctcctacatcatccaatgcatattcttcttgcaaaatttaattcataaaatgtggccactactccttcacttttcaatactcattaacaccaccaatctatataatgcacccatcacttgactataatagtgctcatttctactcctctgccataaattttcaggtccatgaaaatgattctccaaatatatattctgtccaaatcactctcatgaattgttacatatccaattacttgtgattattttcaagtggatatcccacaaacacttcacattcaatatgctaaccactggcattaatttgtttatacactaattgattctagaatcctcagcatagttttctgctttggcccctgaagcagtaaccaggatcagacttatgctttgccatgaaaaagctaga

SEQ ID NO: 178445 - DNA, 470 bp, Homo sapiens
ggtaactactaatttgaatgatttataactgggaagggcatgtgttcctccaaactgctatctcctacatcatccaatgcatattcttcttgcaaaatttaattcataaaatgtggccactactccttcacttttcaatactcattaacaccaccaatctatataatgcacccatcacttgactataatagtkctcatttctactcctctgccataaattttcaggtccatgaaaatgattctccaaatatatattctgtccaaatcactctcatgaattgttacatatccaattacttgtgattattttcaagtggatatcccacaaacacttcacattcaatatgctaaccactggcattaatttgtttatacactaattgattctagaatcctcagcatagttttctgctttggcccctgaagcagtaaccaggatcagacttatgctttgccatgaaaaagctaga

SEQ ID NO: 178446 - DNA, 475 bp, Homo sapiens
tagcatccagcaagtcagaagtctccccagataaacctaatcccttctgtctctcctttttttttttktgttgtgttttttgcttgaaactcactcctctgtcataagccacatgttgctcctgcaagaacaacctgggcttctcccatcatgcatgacaaatcacttccaggatccagcccagcctgtgagaccccagccagcatggcccaccaggatggctcttccacaaaacggagatccatttggaaatggaagaagactcaccaaccacttcaggcccaccaatgcagtgctttcccagaggaacttgcaacttaacagcataagggacttgacataaaggctatttccactgttgtttcctgagaccagggaagcattttggttttcagcttccacgtatttctcactttcaggtttttctactgtgaacaccagcactttattcccctgagtaaaggagcaattttat

SEQ ID NO: 178447 - DNA, 475 bp, Homo sapiens
tagcatccagcaagtcagaagtctccccagataaacctaatcccttctgtctctcctttttttttttgtgttktgttttttgcttgaaactcactcctctgtcataagccacatgttgctcctgcaagaacaacctgggcttctcccatcatgcatgacaaatcacttccaggatccagcccagcctgtgagaccccagccagcatggcccaccaggatggctcttccacaaaacggagatccatttggaaatggaagaagactcaccaaccacttcaggcccaccaatgcagtgctttcccagaggaacttgcaacttaacagcataagggacttgacataaaggctatttccactgttgtttcctgagaccagggaagcattttggttttcagcttccacgtatttctcactttcaggtttttctactgtgaacaccagcactttattcccctgagtaaaggagcaattttat

SEQ ID NO: 178448 - DNA, 596 bp, Homo sapiens
ttgtctgtccctattacctactcttcctttctaaaatatcagtatctcataaatttaaatttatagatttatagttttgacaccttataggtttatagactcttgatagctttataatattgactttttcaccccaaaatatagtgtatctttccattcattatgacttttttatcattctttagcaattaaaaattttttcatagagtgctaacacattcttgttaacgattatatttttattcgttgttgcaattataattacaatctttttctcattatgttttctaagtggttgatctttttatagtgggaagctattgaattttatatgttgattttataatcarccactttactgggttctcttttagttcttaattgtgttcagctgactcgggctttctagctatgttctattgtctttggcaaatgacaataattttaaatcctttcaaattttatgcctcatatttcttttccttgtcttcttgtactggctagggcctccagaataatgataaaagtagtgaggagaagagctaactttatttactcttgattttattaaggatcctttcagtgttttgctatca

SEQ ID NO: 178449 - DNA, 575 bp, Homo sapiens
tagaatggctattatcaaaaagatgaaagataacaagtgtcggagaaggtccagagaaagggaaacccttgtaacactgctgatggcaatagataagttaggggacacgagccttttggtattttgagcaatttcagttacttttttgtccaatccagtggcccttttcctattacaatgaccttaacatttttctgaattttcttataacaaggtgtttggtgacaagctatttgctakacatgatattaaatccacaagtcttcaacaagtgcgtgtccctcaatatgtgcactaacttttgcagatgaaacagttctttcttgcaatactataccatacatatctggaaccagctgacactacaacattctgtctatagatctgcttatccagatcacaaagctttaaggtgtgtgtggtattcctcaatttactccaggtaacagctttacaaactgctttatgacacaacatgtgttgctctttttctagttgccatagcagtttcctcatcagtttgatgaccaccatcagtggtggacatcaccagccaccactgagaatgtgcagtt

SEQ ID NO: 178450 - DNA, 575 bp, Homo sapiens
tagaatggctattatcaaaaagatgaaagataacaagtgtcggagaaggtccagagaaagggaaacccttgtaacactgctgatggcaatagataagttaggggacacgagccttttggtattttgagcaatttcagttacttttttgtccaatccagtggcccttttcctattacaatgaccttaacatttttctgaattttcttataacaaggtgtttggtgacaagctatttgctatacatgatattaaatccacaagtcttcaacaagtgcgtgtccctcaatatgtgcastaacttttgcagatgaaacagttctttcttgcaatactataccatacatatctggaaccagctgacactacaacattctgtctatagatctgcttatccagatcacaaagctttaaggtgtgtgtggtattcctcaatttactccaggtaacagctttacaaactgctttatgacacaacatgtgttgctctttttctagttgccatagcagtttcctcatcagtttgatgaccaccatcagtggtggacatcaccagccaccactgagaatgtgcagtt

SEQ ID NO: 178451 - DNA, 513 bp, Homo sapiens
tgctactgtgaaaaaaaaccccctcaaacacagggcgttaaccatgcaactgggagatgtatakagtctggaaacacattggagaaactgggagagagaactgcacattctcagaggggggtggggatggccaccactgatggtggtcatcaaactgatgaggaaactgctatggcaactataaaaagagcaacacatgttgtgtcatatagcagtttgtaaagctgttacctggagtaaattgaggaataccacacataccttaaagctttctgatctggctaagcagatctctagacagaatgttgtagtgtcagctggttccagatatgtatggtatagtattgcaagaaagaactgtttcatctgcaaaagttactgcacatattgagggacacgcacttgttgaagacttctggatttaatatcatgtctagcaaatagcttgtcaccaaataccttgttataagaaaattcagaaaaatgttaaggtcattgtaataggaaaagggc

SEQ ID NO: 178452 - DNA, 513 bp, Homo sapiens
tgctactgtgaaaaaaaaccccctcaaacacagggcgttaaccatgcaactgggagatgtatatagtctggaaacacattggagaaactgggagagagaactgcacattctcagaggggggtggggatggccaccactgatggtggtcatcaaactgatgaggaaactgctatggcaactataaaaagagcaacacatgttgtgtcatawagcagtttgtaaagctgttacctggagtaaattgaggaataccacacataccttaaagctttctgatctggctaagcagatctctagacagaatgttgtagtgtcagctggttccagatatgtatggtatagtattgcaagaaagaactgtttcatctgcaaaagttactgcacatattgagggacacgcacttgttgaagacttctggatttaatatcatgtctagcaaatagcttgtcaccaaataccttgttataagaaaattcagaaaaatgttaaggtcattgtaataggaaaagggc

SEQ ID NO: 178453 - DNA, 577 bp, Homo sapiens
cttattttggcttgatgactggggcaaacacaggtaaattacagcaggtgaaaatacaggtgatataattacatcccctaagacattcagcatctgctatacttcatgcattgtcctaaggcagattatatatattgccacaactctgtgatatgggtactattgtcatcacctcatttaaacatgagaaaactgagacaattagagttaagtgacttcttcatgactatgtaagtagtaagatgtacarccaggactataaattgtttttagccaccactttatagctacctctctaatccatgaatgtgtgtaggtttaatattggatcaaggagtttttaacttggatgtttatagacagcaaatgtgtttacagatgctttttaaaacataaaatgtaaaaagaattttatatagtgtgatgcagttaactcatccatatccatctgccaaaaaaaaaaaaaaccagagatgtgttcctttacattctgtataaatatctcattctttttaatgtgggaactcatgagaattttctgtatggacagaggaatattgtgttaggcgtttagggt

SEQ ID NO: 178454 - DNA, 577 bp, Homo sapiens
cttattttggcttgatgactggggcaaacacaggtaaattacagcaggtgaaaatacaggtgatataattacatcccctaagacattcagcatctgctatacttcatgcattgtcctaaggcagattatatatattgccacaactctgtgatatgggtactattgtcatcacctcatttaaacatgagaaaactgagacaattagagttaagtgacttcttcatgactatgtaagtagtaagatgtacaaccaggactataaattgtttttagccaccactttatagctacctctctaatccatgaatgtgtktaggtttaatattggatcaaggagtttttaacttggatgtttatagacagcaaatgtgtttacagatgctttttaaaacataaaatgtaaaaagaattttatatagtgtgatgcagttaactcatccatatccatctgccaaaaaaaaaaaaaaccagagatgtgttcctttacattctgtataaatatctcattctttttaatgtgggaactcatgagaattttctgtatggacagaggaatattgtgttaggcgtttagggt

SEQ ID NO: 178455 - DNA, 577 bp, Homo sapiens
cttattttggcttgatgactggggcaaacacaggtaaattacagcaggtgaaaatacaggtgatataattacatcccctaagacattcagcatctgctatacttcatgcattgtcctaaggcagattatatatattgccacaactctgtgatatgggtactattgtcatcacctcatttaaacatgagaaaactgagacaattagagttaagtgacttcttcatgactatgtaagtagtaagatgtacaaccaggactataaattgtttttagccaccactttatagctacctctctaatccatgaatgtgtgtaggtttaatattgsatcaaggagtttttaacttggatgtttatagacagcaaatgtgtttacagatgctttttaaaacataaaatgtaaaaagaattttatatagtgtgatgcagttaactcatccatatccatctgccaaaaaaaaaaaaaaccagagatgtgttcctttacattctgtataaatatctcattctttttaatgtgggaactcatgagaattttctgtatggacagaggaatattgtgttaggcgtttagggt

SEQ ID NO: 178456 - DNA, 565 bp, Homo sapiens
gtgcaataggacaccaggactgacttctcctagctaattgtaattatgtacccattgatcaatttcttttcagtcccccctccccagtctctggtaatgattgctctattctctgctttaatgagatcaactttttagaatccacatatgagtgagattatgtggtatttgtctttctatgtctggcttatttcacttaacataatgtcttccasatatattcatgctgcaaataataggattttattcttttttttgtatggctgactgggatcccattgtgtatatataccacattttctttatctatttatctactaatggatatgtaggctgattccacaggttggctattgtgaatagtctgcaataaacatgaaagtgcacgtgtctttttgacaaactgatttcattttctttggatatatatccagtagtaagatagctggatcatatggtagtttgatttttagttttctgagtaacctccatattgctttccagaggggctatagactaattcacattttcactgacactgtataaggggttccttttctccact

SEQ ID NO: 178457 - DNA, 565 bp, Homo sapiens
gtgcaataggacaccaggactgacttctcctagctaattgtaattatgtacccattgatcaatttcttttcagtcccccctccccagtctctggtaatgattgctctattctctgctttaatgagatcaactttttagaatccacatatgagtgagattatgtggtatttgtctttctatgtctggcttatttcacttaacataatgtcttccacatatattcatgctgcaaataataggattttattcttttttttgtatggctgactggkatcccattgtgtatatataccacattttctttatctatttatctactaatggatatgtaggctgattccacaggttggctattgtgaatagtctgcaataaacatgaaagtgcacgtgtctttttgacaaactgatttcattttctttggatatatatccagtagtaagatagctggatcatatggtagtttgatttttagttttctgagtaacctccatattgctttccagaggggctatagactaattcacattttcactgacactgtataaggggttccttttctccact

SEQ ID NO: 178458 - DNA, 565 bp, Homo sapiens
gtgcaataggacaccaggactgacttctcctagctaattgtaattatgtacccattgatcaatttcttttcagtcccccctccccagtctctggtaatgattgctctattctctgctttaatgagatcaactttttagaatccacatatgagtgagattatgtggtatttgtctttctatgtctggcttatttcacttaacataatgtcttccacatatattcatgctgcaaataataggattttattcttttttttgtatggctgactgggatcccattgtgtatatataccacattttctttatctatttatctactaatggatatgtaggctgattccacaggttggctattgtgaatagtctgcaataaacatgaaagtgcasgtgtctttttgacaaactgatttcattttctttggatatatatccagtagtaagatagctggatcatatggtagtttgatttttagttttctgagtaacctccatattgctttccagaggggctatagactaattcacattttcactgacactgtataaggggttccttttctccact

SEQ ID NO: 178459 - DNA, 544 bp, Homo sapiens
gtttgctgtctttatagtctcattaaaatgtcttataaaattatttttcattatctctttattcttctataaattatgaaatgacttagtttattaaaaggtcccattggacccagatagtgaatggtgaaaactatttttcctagtataaaggagcaggaatataatgaaaaggcactagagatgtgaagatgactaaacttggagagatgaagtactggtggctggtagggtagtaggtagactttttaggccaagtaaatgaaacaactaaactgctattaaattcagaaaaattaaaatgttgtgtaagaagaaaaataatgtacttcattcactacatagtcattatataaattgaatataaatttaacctgaggatggagggagaagaaattcagatagggtgttataagataattaaatcckcttttattatgaatttagaaattagatagataaatccattaaaaaaaaacagaatgaacatgatttagaaatattcaagtaaataccaaaagaaatagcaagaggtgtaagtggt

SEQ ID NO: 178460 - DNA, 503 bp, Homo sapiens
cctcagcctctccttagggcagagtcgaggcccagaaggttgaaagagctgaaagctgggraagagcctgcaccagtgcctttgcctcttatcagtcagtccgatttttgttctctgactccccctgctacataccagaatggtgctctctctccccccctctgtgggatctgcacctcagtttccttgtctgtaatatgggggtaactgccccccccatattaaaaggatccaaggataaatgagataacacaagtgcttggcatagggcctggaagaaaaaagtaaattcctttttttttttcgctctgtcgcccaggctggagtgcagtggcgtgatctcagcttactacaacctccgcctcccaggttcaagcgattctcctgcctcagcctcttgagtagctgggattacaggtgcgtgcccggctaatttttgtatttttagtagagacggggtttcaccatgttagaccaggctggtctcgaactcaggtgatcca

SEQ ID NO: 178461 - DNA, 574 bp, Homo sapiens
taaatgagtttattcagtgagggtaaaaaaattatcttttggtttaatcttaagtggcaagaaaaataaaagatttcttatccacaaactttttaaacatcaatattttattttctctggcctttacataataccttaccagaattcacccagtaaccattattaataggtataagtaaaatttgatttatcttccttctaacacacaactaattaaatatcagattaatgtagttagaatttgggcaactctcttttattaacctctatacaaattctctaacaatacttaatggcacataaaacatataaatataaatttaatatkctgagaaactagattaaattagtaacaatctaaagccaaaaatatatactgagttattttactatgagaaaaacaggacctgaacaaaaaacgaacaccaatcatgggaaaggtaagtaaagtttttgaagatttttctgtattctcttcacaaaatgagtcacttataaggaggagtattcagactcaaatgtatactgccccaaaccctcaaccacaacagacaaccttctaatgatgtataaa

SEQ ID NO: 178462 - DNA, 595 bp, Homo sapiens
ttcaaaccctttacagttggggaagttggttttctacatcatataamcctgatgtccattatgcatgtatatttgggacacagtctgccttttaactgcactgtgctttacctgtatgtttaattcacgatgagattggttcctaaagcttttaaacaaagactctttctttttgctgtgtttatcttttaatatcactattgaatgaaaacatatgggaaccattcagagatgttcactggacattaaaataaaaaggaaaatgtgtgacactttccctgggtaagctgcgaggcatttatgtagcaaaatgatgtgttaaaagccaatctattagaataatgatcaacataaaacctgtgctttatacatcattataaagttgtctgttgtggttgagggtgttggggcactatacatttgagtctgaatactcctccttataagtgactcattttgtgaagagaatacacaaaaatcttcaaaaactctacttacctttcccatgattggggtgcgttttttgttcaggtcctgtttttctcatattaaaataactcactatatatttttggctttagattgtgactaattt

SEQ ID NO: 178463 - DNA, 595 bp, Homo sapiens
ttcaaaccctttacagttggggaagttggttttctacatcatataaccctgatgtccattatgcatgtatatttgggacacagtctgccttttaactgcactgtgctttacctgtatgtttaattcacgatgagattggttcctaaagcttttaaacaaagactctttctttttgctgtgtttatcttttaatatcactattgaatgaaaacatatgggaaccattcagagatgttcactggacattaaaataaaaaggaaaatgtktgacactttccctgggtaagctgcgaggcatttatgtagcaaaatgatgtgttaaaagccaatctattagaataatgatcaacataaaacctgtgctttatacatcattataaagttgtctgttgtggttgagggtgttggggcactatacatttgagtctgaatactcctccttataagtgactcattttgtgaagagaatacacaaaaatcttcaaaaactctacttacctttcccatgattggggtgcgttttttgttcaggtcctgtttttctcatattaaaataactcactatatatttttggctttagattgtgactaattt

SEQ ID NO: 178464 - DNA, 595 bp, Homo sapiens
ttcaaaccctttacagttggggaagttggttttctacatcatataaccctgatgtccattatgcatgtatatttgggacacagtctgccttttaactgcactgtgctttacctgtatgtttaattcacgatgagattggttcctaaagcttttaaacaaagactctttctttttgctgtgtttatcttttaatatcactattgaatgaaaacatatgggaaccattcagagatgttcactggacattaaaataaaaaggaaaatgtgtgacastttccctgggtaagctgcgaggcatttatgtagcaaaatgatgtgttaaaagccaatctattagaataatgatcaacataaaacctgtgctttatacatcattataaagttgtctgttgtggttgagggtgttggggcactatacatttgagtctgaatactcctccttataagtgactcattttgtgaagagaatacacaaaaatcttcaaaaactctacttacctttcccatgattggggtgcgttttttgttcaggtcctgtttttctcatattaaaataactcactatatatttttggctttagattgtgactaattt

SEQ ID NO: 178465 - DNA, 595 bp, Homo sapiens
ttcaaaccctttacagttggggaagttggttttctacatcatataaccctgatgtccattatgcatgtatatttgggacacagtctgccttttaactgcactgtgctttacctgtatgtttaattcacgatgagattggttcctaaagcttttaaacaaagactctttctttttgctgtgtttatcttttaatatcactattgaatgaaaacatatgggaaccattcagagatgttcactggacattaaaataaaaaggaaaatgtgtgacactttccctgggtaagctgcgaggcatttatgtagcaaaatgatgtgttaaaagccaatctattagaataatgatcaacataaaacctgtgctttatacatcattataaagttgtctgttgtggttgagggtgttggggcactatacatttgagtctgaatactcctccttataagtgactcattttgtgaagagaatacasaaaaatcttcaaaaactctacttacctttcccatgattggggtgcgttttttgttcaggtcctgtttttctcatattaaaataactcactatatatttttggctttagattgtgactaattt

SEQ ID NO: 178466 - DNA, 579 bp, Homo sapiens
ggctcatggttttcaaagcttaggccaacgtttgcagaacaaagtcgctttctytctctctctctttttttttggtgggtacaagtgtggggaccacacgaacacttaaattcatggcatggctggtctaccacacagtcgggggaattctttaaatagagcctgtcactctcttggcccatcaatgggatttccttctcgaactgctgattcgttcaggtacacaacagaggaaatttcagttaacctttgtttcaccccagggaaaaatctgtctgaaagtataaaatgaatagattaaaaaaaaaaaataagcagctcagccacagggccattctctgagtgttcacagcagcttaagttaaacagtaaaaagggcagtggaatgttgcattcccaatggaaaattcaagcacaatatagaacttgggaatctagttagtcagagtttattttgatgactaaaccaaaccaactgtcctttctgttttaataaactggaaaatttcccttctgataattttataagagtcagaattgtgtttctcttatatcaccattattactatgatctaactg

SEQ ID NO: 178467 - DNA, 407 bp, Homo sapiens
cgaattcaaaggtgtcagaccaggagtctcagaccaactctgagtccagctgttgaaatcactttcagtatcactttccgtctctgggcttcagtttctccatctataaaactgcagggttggactagaacagtctttctcaaatgatgtcactctggtctaaaagccaaaaagatgccagtgaycaccttcttgaaagtatttttattgattgattgactgattgattgagacagagtcttgctctgtcgcccaggatggagtgcagtggtgagatctcagctcactgcaacctctgcctctcaggttcaagtgattctcatgcctcagcctcccaagtaactgggattacaggcatgtgccaccacacctggctaattttttgtatttttagtggagatgggatt

SEQ ID NO: 178468 - DNA, 407 bp, Homo sapiens
cgaattcaaaggtgtcagaccaggagtctcagaccaactctgagtccagctgttgaaatcactttcagtatcactttccgtctctgggcttcagtttctccatctataaaactgcagggttggactagaacagtctttctcaaatgatgtcactctggtctaaaagccaaaaagatgccagtgaccrccttcttgaaagtatttttattgattgattgactgattgattgagacagagtcttgctctgtcgcccaggatggagtgcagtggtgagatctcagctcactgcaacctctgcctctcaggttcaagtgattctcatgcctcagcctcccaagtaactgggattacaggcatgtgccaccacacctggctaattttttgtatttttagtggagatgggatt

SEQ ID NO: 178469 - DNA, 598 bp, Homo sapiens
ggtgtagccattagtaactgccctcaagcataaaatactaaaamtaaagtcatcaaatgctttttctttattctaaatgttgacttcctgtgagtttctgcccactttggtttggtctccagtgccttcagatagtttattttattattttattttatttattttatttcagagatgggggggtctcactatgttgcccaggctggtcttgaactcctggcctcaagcaatcttcctgtctgaacagccctaaatgctgggataatacgcatgagccatccaggtctggccagattatgttttgaagcattaaagtgtgctttcaattatgtgtgtgtatataaacatttagattttatgtactaaatatttatagtataagcttcatccagagtagaattacctgtgggaaaattggtacattatgaacaattccgccattaccagtagcagaactttgaaattttttggcatggtgttataattaaaatcttttttacaaaatcttccactcttcattcttagctccattcacacaaagaatgagtctatacttggtgcatagtaagcatagtaagagatgtcctacaaattattg

SEQ ID NO: 178470 - DNA, 489 bp, Homo sapiens
ctctccctccccaagccccgacacaggccccagtgtgtgttgttccctaccatgtgtccatgtgttctatcattcasctccctcttataagtaagaacatgtgttgtatgattttctgttcctccattagtttgctgaggataatggcctccagctccatccatgtccctgcaaaggatatgatcttgttcctttcaaataggatctttgagtgagaaactttcttaaactttgtaggtttgagaatttctttattaaaatggtagttaatctgggtgggtttttccttgaaaactctgaggacattatgtggtgttaaatgttgagaagcctgacatattctggcatttcttagggtcttttcttttgacctagaagcttttaaaattttctctttgtctttatgctcttaaattttgctataaactgtctggatattcatttttgtttttcacagtcttgtttagtatactatcagccttttttcct

SEQ ID NO: 178471 - DNA, 379 bp, Homo sapiens
ggccatgcgtacttccagtctgagtctgaaggtttgagaaccagaagagccaatgggattaggttcatctgaaaacaggcagcctggagaccaaaaaagagctgatgttttagtctgagtctggacatcagagaagtccaaagtgccagctcaagcattcaggcatgacttccctcttacttcgcctttttgttctaytcaggtcttaagtttattggttggggcccacacacattagggaaggcaatctgctttactcagtctactgattcaaatgtcaatcacatcttgaaacactttcacagactcagccagaataatattagaccaaatgtctggcaccctgtggccaagtcacactgatatataaaacaaatca

SEQ ID NO: 178472 - DNA, 379 bp, Homo sapiens
ggccatgcgtacttccagtctgagtctgaaggtttgagaaccagaagagccaatgggattaggttcatctgaaaacaggcagcctggagaccaaaaaagagctgatgttttagtctgagtctggacatcagagaagtccaaagtgccagctcaagcattcaggcatgacttccctcttacttcgcctttttgttctactcaggtcttaagtttattggttggggcccacacacattagggaaggcaatctgctttactcagtctactgattcaaatgtcaatcacatcttgaaacactttcacagactcagccagaataatattagaccaaatgtctggcaccytgtggccaagtcacactgatatataaaacaaatca

SEQ ID NO: 178473 - DNA, 559 bp, Homo sapiens
acatctcatgtcgttgtcagtttgggttgctatcacaaaatactatagactggtggcttaaacaacaagcgctgattcctcacagttctggaggctggggtgaccaacatcaaggtggwggcagagccagtgtctggccagggcgtgcttcctggcttgtgcacagctgccttttgcatcttcacatggcagagaaggagagcaagcatactctctcctgcctccattcttgagaacttcaccatcatgccctaatcacctttcaaagggcctgtatcctaataccatcacatctggggtgagtatttcgatctaattaatataattccaactaatagcaaacaagttagatcacatgattagtctatgctgatttattacaggtgaacatgaaatatcctataggatttttgaaataatgaaaacatactaaagagccccatgaggcctgcaaagaatgcaggaaatgccaatttggggaagcacagacctactcctttccatggaagcaatgccctgttttctacacccctcagcttctaacccatgtccaacttat

SEQ ID NO: 178474 - DNA, 563 bp, Homo sapiens
ggcaagagtttatgttgaggaaaatataaccatagttgtaattcacttgtgcagatgagagaacatgggtccagtgtaccaggagggacttagataatttcaataacagtttgcccattatggcaggaggaagacagagcacatgggcaaaaatgtgggtaggttggaaaatgcagtgagaagatatgttgaacctctctaccaataacttctattttcaaaactgaaataagatcctagatgaccagctaagagtgaggttgattcaaagagtgtgaaggtttcataaagaaagaataaatgtgactatrgtagtaactggatgacacagagtggaagcaagatcatcaaaggacaatcttggatagagggaagggcatgggagtacattgtctatgtgaatagtgatgttaccaagaatgatgacagaatttgtgggagtaaaaagacaaaccaggcatataaacatttaatgaattagggagagtgtctcggagggcaattgttgattccaacacggaggggtagtagatggtatagtctgaggcaggtatgtcagagag

SEQ ID NO: 178475 - DNA, 563 bp, Homo sapiens
ggcaagagtttatgttgaggaaaatataaccatagttgtaattcacttgtgcagatgagagaacatgggtccagtgtaccaggagggacttagataatttcaataacagtttgcccattatggcaggaggaagacagagcacatgggcaaaaatgtgggtaggttggaaaatgcagtgagaagatatgttgaacctctctaccaataacttctattttcaaaactgaaataagatcctagatgaccagctaagagtgaggttgattcaaagagtgtgaaggtttcataaagaaagaataaatgtgactatagtagtaactggatgacacagagtggaagcaagatcatcaaaggacaatcttggatagagggaagggcatgggagtacattgtctatgtgaatagtgatgttaccaagaatgatgacagaatttgtgggartaaaaagacaaaccaggcatataaacatttaatgaattagggagagtgtctcggagggcaattgttgattccaacacggaggggtagtagatggtatagtctgaggcaggtatgtcagagag

SEQ ID NO: 178476 - DNA, 465 bp, Homo sapiens
ctaatgtcccagtccaagcaatcaggaagagaaggcaaattccctctctctctccaccattttgttttactcagaccctcaaytgattcaattatgcccatccatattggagaaaacaattccacttcactcaatccactgaataaaatgctaatctcttccaaaaacgccctcacagacaacatgcagaaataatgcttaaccagacatctgggcatcctgtaatccagtcaaattgacacataaaattaaccatcacactttctctgcttaatgtttcctcttaggcacttaccactacctggcatataaatactagagtgtaaactccatgaggcaacagctttgtttgttttgcccactgttgtatcctgaccacctagaaccctgcctgtattataagcaggtacataaatatcagctaaattaaagcaatctttcagaaataaatattccttagcacat

SEQ ID NO: 178477 - DNA, 325 bp, Homo sapiens
aaacgccctcacagacaacatgcagaaataatgcttaaccagacatctgggcatcctgtaatccagtcaaattgacacataaaattaaccatcacactttctctgcttaatgtttcctcttaggcacttaccactacctggcatataaatactagagtgtaaactccatgaggcaacagctttgtttgtttygcccactgttgtatcctgaccacctagaaccctgcctgtattataagcaggtacataaatatcagctaaattaaagcaatctttcagaaataaatattccttagcacatagtcttctttataaataagaattc

SEQ ID NO: 178478 - DNA, 562 bp, Homo sapiens
agagatctggtctcttcttcttcttcttctccttccccatggattaatctaaatctaattatcttccaaaggccccacctccacatacatcacattaggagtttggtcttcaacataggactttttgggggggggacacaaacattcaatgtttgtgaacactgatctaaaccactcatcagctgtgttgtgtaccaactgctgagggacamttctacagggaaccttagtactttttcccacttgcatgatctgtgcagagtttgttttgcttgattattctatttttatttttttctatttaccggggaaatttccttgccttgtaggcataagtaaaactcacccatatattgtaaagtagatgtagcctactcttgactccttcctctccagtattcccctataacacccagccagaagtgacctcatcttcctctgaattaccatttgatatgatttggctgtgtccccacccaaatcttgtgttataactcccacaattcccacgtgtggtgggaggtgattgaagtatgagggtgggtctttcctgcactgttct

SEQ ID NO: 178479 - DNA, 578 bp, Homo sapiens
atatggtttttttcaacctggtttctatcacttaacagtacgcatttaaggttctttgtgtctcttcgaggtgtgatgattcatttatttttattactcaataatattccattgtatggatggactatatctacttacctattgaaggacatcttagttgcttacagttttggtgattattaataaagttactataaacatccctgcgtgtaaattttcaagtcaattgtgtaaatatctaagagcatatgtggtaagattttagttttggcagaaactaccaacctgtcttccaaagcagtggtgccatttttattttccaccggcaatgattgagactttctgttgttcagtatccttagtagtaattgatattgtcagattttggattttagtaattctaatacatgtgtaatatttttcattgctgttttaatttgcagttcctyaatggcaaattattttaggtatctttttttgtgtgcttatttttcatttgtatattttctttggggaggtgcctatttgatctttgccattattcattggattgtttgttctttttgtttaattttaat

SEQ ID NO: 178480 - DNA, 563 bp, Homo sapiens
gctgttttttgtattttttttttttttgtagagacggggtttcactgtgttgcccaggctggtctccaactcctggactcaagtggtccacctgccttggcccccagagtgctaggattaaaggcatgagccactgtgtgtggcctcatttcaaacttttacttcagtgaggcatgctggtgcctaytgctttgaacagaacatttctatgtttttaaatgtgactcttgggtagacagttgtacttaggctgctcttcactctgtcactccacacaggaggcaagttctttgcttcgtatttttatgcaacactggaagacttgctagacatagtacaatgtgcaggactttttggaggctggagatcttactctggcacctctttgagcctttggggttatgcaatccaccatgacacaagttcctgcaaagacagagctgctgacaatgctgtcatctctttatgtcccagtcacggaggctttcttcactcaggcttccttactagtgatcttggggatgcaaatggaaacaataattagtcacatttttcaccagtca

SEQ ID NO: 178481 - DNA, 563 bp, Homo sapiens
gctgttttttgtattttttttttttttgtagagacggggtttcactgtgttgcccaggctggtctccaactcctggactcaagtggtccacctgccttggcccccagagtgctaggattaaaggcatgagccactgtgtgtggcctcatttcaaacttttacttcagtgaggcatgctggtgcctattgctttgaacagaacatttctatgttttyaaatgtgactcttgggtagacagttgtacttaggctgctcttcactctgtcactccacacaggaggcaagttctttgcttcgtatttttatgcaacactggaagacttgctagacatagtacaatgtgcaggactttttggaggctggagatcttactctggcacctctttgagcctttggggttatgcaatccaccatgacacaagttcctgcaaagacagagctgctgacaatgctgtcatctctttatgtcccagtcacggaggctttcttcactcaggcttccttactagtgatcttggggatgcaaatggaaacaataattagtcacatttttcaccagtca

SEQ ID NO: 178482 - DNA, 632 bp, Homo sapiens
actttacgatgtatctgtcagaaccctttttctctttctstttttaaaatagcctttgggttttttttagagtagttttaggtttgtagcaaaattgataggaagttgcagagattttccatatactccatgtgcccacatacacatagcctctcccgttattaataccctttaccagagtggtaccttggttacaattgatgagcctacattgacatattattatcatccagagcccatcatttatattaggattccttcttggcgttgtacattcatcctatgggtaacaaatgtatagaatgacatgaatccatcattatagtgacagagtagtttcactttcctaaacatcctctgtgccctgcctatttatccctctctcctccctaacccctggcaaccactgatctttttgtctctaccattttgccttttccagaatgttatatagttggaattatacaatatgttgtttttttcagactggcttcttttatttattaatatgcatataagtttacaccatgttttttcatggcttgatagcctgtttctttttagtgctgaataatgttcaattatctggatgtaccacagcctattcattcacctaatggaggacatttgaa

SEQ ID NO: 178483 - DNA, 670 bp, Homo sapiens
gatgtatctgtcagaaccctttttctctttctctttttaaaatagcctttgggttttttttagagtagttttaggtttgtagcaaaattgataggaagttgcagagattttccatatactccatgtgcccacatacacatagcctctcccgttattaataccctttaccagagtggtaccttggttacaattgatgagcctacattgacatattattatcatccagagcccatcatttatattaggattccttcttggcgttgtacattcatcctatgggtaacaaatgtataraatgacatgaatccatcattatagtgacagagtagtttcactttcctaaacatcctctgtgccctgcctatttatccctctctcctccctaacccctggcaaccactgatctttttgtctctaccattttgccttttccagaatgttatatagttggaattatacaatatgttgtttttttcagactggcttcttttatttattaatatgcatataagtttacaccatgttttttcatggcttgatagcctgtttctttttagtgctgaataatgttcaattatctggatgtaccacagcctattcattcacctaatggaggacatttgaagctactgaagcaacttatgtttgtttccaattttggaaattatga

SEQ ID NO: 178484 - DNA, 443 bp, Homo sapiens
aaattcgcttcagcactgtctattagtgagaactggaagtggttttcactaaatatgctgataactatgctttttgatgtgacaataccttggcatttgtgaactcttaataaccagggaggaaatgttgtttatccaagccctgaagagcccacctgccagggtgggactcgagtggaatcaagcggggccctgcccagagtatggcagccccccaatatccccactcccacctccccaccccccacccctgccatcccaccaggcctgctccaaccaccacacttyctgcccccttggctcccttctgcagggaaggtgaagctagatgacgcacttgcccgggcatgaaacaaagggattcctttcccttttcttcccctttctagagtcacggcctcaccaacaccctctctccctgactgtctctcactataaagtca

SEQ ID NO: 178485 - DNA, 589 bp, Homo sapiens
tttttttctctccactcgactggattcaaaatgggttatccagaaacacttcaaaaagaacaggtgggcaatgcaaatggccagcaatggatgaataatggataaactaaatgtggtctatccatacaatggtatattattcagccttaaacagaatgaaattctgaaaatgctacaaaacatgaatgaaccttgaagacattatgctaagtgaaataaaccagatgcaaaaggacatatactgtatgatcccacttagataagggacttacagtagtcaaattcagaggtagaatgagtggttccaggggctgaggaaagaaggaaatggagagttattgcttaatgggtacagaatgttttttgtggatgataaaaaaaagttctggaaatggatagtaccagtggtttacaacattgtgaatgtacttaatgtcattaaytgtacacttcaaaattgttaaaatggtaaaatctatgttatacatattatatcacaataaaaaagtacaggtgggaatgctgacctgtgccctggcctctttatcatcttccttctcctcctagaggtgtgtgtgccctggaggag

SEQ ID NO: 178486 - DNA, 600 bp, Homo sapiens
atctaattttacaaattaagaaactagaaaatgaagaacaaactaaactaaactcaaagccagtggaagaaaaaaataatacagattagagtagagataaataaaatagaaaagtaatagaaaaggttgttgaaacccaaatttggttctttgaaaagttctaaaaaactgtcaaatatttagcaagatggaccaagtttctaaaatcagaaatgaaagtgaggacattactaccaattctacagaagtgaaaataactataggatagcacaakaagcaggtgcacttgaagaaattaaacaatctaaataaaatgaacaacttctagaaacacaaaatctaagtgaaataacctgtgaataaatataaaatctgactagacctggagctagtaaaaccactgaatcagaaaacaagaatctcccaacaaagaaaatccctggacctgattgcttcactggtgaattctgccaattatttggataaaaatgaatacaaatccttaaaattttcagaaattaaatagaagaaaacactccttaattaattttctaaggccaatgttattctgataacaaagccagacaaagacacaagtaa

SEQ ID NO: 178487 - DNA, 423 bp, Homo sapiens
aaatatatgtagagattccacaaaagaggaaaaaaaaccttgtagaattaataaatgaattcagcaaaatagcagcatacaaagtcaacacacataaatcagttgcatttctatacactaataatgaacagttcaaaaataaaattaacaaaacaattttatttacaataacctctcaagcaataacatatttaggaattaactaaccatgtgaaaggctacaatgaaaactacacaatgytgctgaaagaaattcacaaagacatatataaatagaaatacactctcttttcataaattggaagacctaatattgttaagttggcaatactactcaaagcaatctgtagattaaatacaatccctatcaaactctcaatgttatattttgcagaaatagaaaattccaccttaaaattaata

SEQ ID NO: 178488 - DNA, 600 bp, Homo sapiens
cttactgaccaagaagttggtatgtacccaagatatttccaaggagaggacatttgtactttttcaggtgctatgattaaacctcttaactatgtattccttatgacagaggcatataaccttaaaagtactggctctgttggggctgttagtaaaatatcatccataaaatgaaataatcttgcaattaggaaattcttttctactggggagcaaagtctgatttatgtaatactgacacatggtacgactgttcagcattccttggggaagcactttccaatgaaatcggcaagctggcctttcattattgatagctggtattgtagacgcaaatttttctctgttctgttctgctaggggaatagtataaaagcagtcttttaagtcaataaagattataggccaatctcgaggaattatcgcaggggaggggagcccctcctgaaggggccmcataggttgcaaattagcactgatagcacataagttatgcaaaagtctccatttaccacactttttgggaatgatgaaaatgggtgaattccaagggttctatatcgcaggcttttaattgctccacaactaactcatgaggtc

SEQ ID NO: 178489 - DNA, 600 bp, Homo sapiens
cttactgaccaagaagttggtatgtacccaagatatttccaaggagaggacatttgtactttttcaggtgctatgattaaacctcttaactatgtattccttatgacagaggcatataaccttaaaagtactggctctgttggggctgttagtaaaatatcatccataaaatgaaataatcttgcaattaggaaattcttttctactggggagcaaagtctgatttatgtaatactgacacatggtacgactgttcagcattccttggggaagcactttccaatgaaatcggcaagctggcctttcattattgatagctggtattgtagacgcaaatttttctctgttctgttctgctaggggaatagtataaaagcagtcttttaagtcaataaagattataggccaatctcgaggaattatcgcaggggaggggagcccctcctgaaggggccacataggttgcaaattagcactgatagcacataagttatgcaaaagtctccatttaccasactttttgggaatgatgaaaatgggtgaattccaagggttctatatcgcaggcttttaattgctccacaactaactcatgaggtc

SEQ ID NO: 178490 - DNA, 535 bp, Homo sapiens
ccaatttggcctttggaggtcacagttggccaccccctagatgctcaggggtttttagcgttgacattccctctaggattgtgggtgatagccccacccatgggggaatcttggtctcttggtgtcatttttttctgccctgaagttggaaattatcattttctgtaagagccagttgtggacccctctctatgtgctgtcttcctttctgtccaataaactgccttgctcaagcccatcttggactgttggatgaagagaatggggattcytggccccctgacctgttggataactacccacagttgcagacaagtggatgcttgaatactttcttcgatgtctctcttactgggtggattctctgttggcttggggcctgtaaggtctcctttcagcaacactatttacccttacccttcctcctttctacaatgaccttgtttttttaatccctctttgttcaaactaaaatgtttacttcaatctctttggaattcagaccctaagcattctactgcccaccactcatatc

SEQ ID NO: 178491 - DNA, 535 bp, Homo sapiens
ccaatttggcctttggaggtcacagttggccaccccctagatgctcaggggtttttagcgttgacattccctctaggattgtgggtgatagccccacccatgggggaatcttggtctcttggtgtcatttttttctgccctgaagttggaaattatcattttctgtaagagccagttgtggacccctctctatgtgctgtcttcctttctgtccaataaactgccttgctcaagcccatcttggactgttggatgaagagaatggggattcttggccccctgacctgttggataactacccacagttgcagacaagtggatgcttgaatactttcttcgatgtctctcttactgggtggattctctgttggcttggggcytgtaaggtctcctttcagcaacactatttacccttacccttcctcctttctacaatgaccttgtttttttaatccctctttgttcaaactaaaatgtttacttcaatctctttggaattcagaccctaagcattctactgcccaccactcatatc

SEQ ID NO: 178492 - DNA, 517 bp, Homo sapiens
cagtattaatcccatcatttcacctcactaataccacatactaaacacgtacattaagtgattcccaatagcataatttataatgccgagtagagtggaaaaaggggccttcaaacccaatagtcagtgaaaccaaaccccattcccagccccataaccaaaggtgtgaatcagtaaaacgaagggcttaagagtaacttaaatattcaacataaaaaaaggtgattcagaggcttccatatacactcatatatagccatattaatacttcacaaaaattgcaagtcagtccagagaggggtcctttctatctgaaagatactatattttatccaactatcctttctgtaccttcagaaaaaaaaaataatgagaaatgtttaactcttctgtcatagtttgttttcctttcacagtsaaaaatattgtgaggtaaaggggtatatacatttattttacatttaattcatttgaaaatagcatgttaataacttgcactgaaatattttcaataaca

SEQ ID NO: 178493 - DNA, 671 bp, Homo sapiens
agaataaatgcttaattttttaatgcccagatattgaaagacatccaaaagcacgaagaccattcaggaaattacagcatcacaaaacaaactaagtaagacaccagtacccaattctggagtgacagagatatgtgacctttcagaggkagaataaaaaatagctgtttctgagaaagctaaatgaaatttgaggtaaaacagggacaaaatttaataatcctatcaaataaatttaacagatttttaaatgattttttaagaaatagagcagaaattctggagctaaaacactcaattcatgtattgaataatgcatcagagtctctcagcagcacaacgatactttcaagcagaagaaaaaaataataagcttgaaaagaggctatccgaaaatacatgggcagaagaatctagagaacaaataatttaaaaaaataaacaacacctacaggatctagaaaacagcttcataaaagcaaatttaagagttggggggtacacacgcagatttgttagctgagtatgttgcataatgctgaggtttggagtacaactgatcctgtcaagcagatactgagcataagagccaatagtttttcaacacttgccccgctctattcctccctgctctggtaatccccactatctgtatttgccaggtttatgcc

SEQ ID NO: 178494 - DNA, 543 bp, Homo sapiens
tgagtagagtggaatttattaggaaaaaagaaaacaaataaaaaactctcaggaaagtgaaaggggttattgccaatgggctcccacctcacagattgaattccaggccactacacccaagctgaagagaccaggcccmtccccactgcacaaggcacaaaattcttctggctccacccaatttttccagtgtgcaggtgagttgaagattctctggggaactctccctcttatctgccttctgcatctatcaatacaatcttatattggaaaaacctaaagactccaccacaaaaactaaaacttggaactaataaacaaattcagtcagttgtaggagacaaaatcaacatagaaaaatcagtaacatttttacatgtcagcagtgaacaatgtgaaaacaaaatttaaaaaatcacatttacaataaccataagtgaaataaaataggaataaacttacccaaagaagtgagagatagctataatgacaactaaaaaacattgatgtaagagattgaagaggacattaaaaaacgaaaag

SEQ ID NO: 178495 - DNA, 543 bp, Homo sapiens
tgagtagagtggaatttattaggaaaaaagaaaacaaataaaaaactctcaggaaagtgaaaggggttattgccaatgggctcccacctcacagattgaattccaggccactacacccaagctgaagagaccaggcccatccccactgcacaaggcacaaaattcttctggctccacccaatttttccagtgtgcaggtgagttgaagattctctggggaactctccctcttatctgccttctgcatctatcaatacaatcttatattggaaaaacctaaagactccaccacaaaaactaaaacttggaactaataaacaaattcagtcagttgtaggagacaaaatcaacatagaaaaatcagtaacatttttacatgtcagcagtgaacaatgtgaaaacaaaatttaaaaaatcacwtttacaataaccataagtgaaataaaataggaataaacttacccaaagaagtgagagatagctataatgacaactaaaaaacattgatgtaagagattgaagaggacattaaaaaacgaaaag

SEQ ID NO: 178496 - DNA, 620 bp, Homo sapiens
cccttctttcttccttcctgcctggaatataaatgtaataactgaagcagactatcttatagtaatgatgtaaccttgagcatggaaattactaaataagatgtacagagcagaacataggagtctgaaattctagtaatgtctttgaacttccacgacaaacctggtctgcctttctaatacaattcacatatgacagaaaaataaaacaattgaaaaatactagggctaccatgaatctgggtctctgttaccagaagctgaacacaggtcatatctcattcaaggtaattagtacagtttgtaaggcctgtttcttactaactgtaccaattaacctaacccacccagtgacttctcttcagggaaaagactgaagagaagtcaccaggaagrttagaaacattaatttattcagccactgctaaatgcataatatggaattatattagtcattgacaatatagtggcagaaaggcacacttggtcttgtcacttttggggttatagcctagtcactggccataattcattattctttcagctaaaaaggctgttcccagaatcctaaaccaggatcatttcataaattaagagcacgtaagtctgctatgtatttt

SEQ ID NO: 178497 - DNA, 616 bp, Homo sapiens
cctattacctggcacgatttgcaagataattaaccagtactagaatattgatccagttttattgttgtcgttgttgttttcactacacatccttttttgtttcttctgagcagcaggaggaaatcactagttgattcaaaggaataagcaggaatagtctaaaatgtaggaaaaaaacttaaaaataactaatgagaacagaatttaataacatgttttgaaatataatttttccctctttagtcctcatttttgttaaaaacaaattataagactgagttgtttgcaaaataaagttcagcaaaaataattatttttcatatgattttcaaattgtctttgaaggaactctgttccacaaggaatcttataacagacctttttaaagtcgagcccagccatgagtttgtaccctcaaacacctatgagttgggtaaattcctctcttcttgaggtcctaaaaacatgaggatcctgggcctgttagaaagtgacattttttactcamcacaggtcagggacactgtacagggactgggtagatgaggtacgaggccagaaacacagaaacatatccatacatctacaatgaactaattttcaacaaaggtaccac

SEQ ID NO: 178498 - DNA, 605 bp, Homo sapiens
catcatttggcatgtacattgcatataaattgaaatgatatgcatggccaaattagtattttctgtctaattattttggtactaaaacaatatgcttaatgtgaacatgttggcaatatataaatgattaagctgtaaatgaatcctgatttcagatgttttgactaaaggaggcttaaatcacactcatgctgttctgagagctactaaaaatttccataggatgcttaatttgcaaatcactaggtcattttaatattgcatagcgaggtgatactcagcctcactgctgtactaataatgtcatggatgtccggtcagaaaaacagataaaaagggaaaagggggcattcaaagaaacaaacccaacacacacgttccactcattattacaggaaataagttctataaattctggccatttagtccctgtagctcacaattagtcttattttcattaatgggttcatcaacattagctacttttgtttcacatcatactgttatgtaaaattatgtgctgtgtcctactttaattacgataatttgattatgrgctccaacaccaataaagaggtatgagtccttcgattaattaaattatt

SEQ ID NO: 178499 - DNA, 601 bp, Homo sapiens
aagttattcccaaaagtaattgaaaatgatagtgatagtttgtgccaatttttctgctgaacaattggacaaatgcaaacactgatgtccagatgctacaattcttacaatcctggatgctttgggagagtttgcattttattaggctgatgatgagataaactgtcatccactgtatattattacacagcacattattaatattattactttactattaatagtaccatygccatttttccattaaatatcatatagattaatgctcatttataagatcttgcatctgaaagcaaagtttttgaagcaaaggatgatatattagagggagaaattaagtaaatcattacattccaatttagaaagagactattgagatgtcgaaagtgattgcattcaaactatttgtgtcagtaattttgtcacatttttatattattatttcaatatatcatagaataatatagctatatgattatgtagtgattttatttttcatatatggctggcatctgcttagtagccagaaatcttgttgagagaggaatcttgtttaatatttttctaatacactcaaaggggatttccaagcactgtactt

SEQ ID NO: 178500 - DNA, 395 bp, Homo sapiens
atcttataaattatcatgggctcccttttaaaaactcatttcattacacaatgtacacatatatcagattgtcactttgtataacttataaatatacartctttatttgtcaaccgtatattccaaaataaaaaaaaagttacatattttttctcattttttgtgttatacatgtgaaaatcttttgcatatcaatgtacaggtacatatgaaacagataaagaaaaatgtgggaataatagtataatttaatgcaaatatattcaaatggcaatatttcaggagtatttttctatgctggactaaattgtgttttccccaaactcataagtctaatgcccaatgtctctgtatttggagttaggtgtataagatattaattaaggtcataaact

SEQ ID NO: 178501 - DNA, 395 bp, Homo sapiens
atcttataaattatcatgggctcccttttaaaaactcatttcattacacaatgtacacatatatcagattgtcactttgtataacttataaatatacaatctttatttgtcaaccgtatattccaaaataaaaaaaaagttacatattttttctcattttwtgtgttatacatgtgaaaatcttttgcatatcaatgtacaggtacatatgaaacagataaagaaaaatgtgggaataatagtataatttaatgcaaatatattcaaatggcaatatttcaggagtatttttctatgctggactaaattgtgttttccccaaactcataagtctaatgcccaatgtctctgtatttggagttaggtgtataagatattaattaaggtcataaact

SEQ ID NO: 178502 - DNA, 395 bp, Homo sapiens
atcttataaattatcatgggctcccttttaaaaactcatttcattacacaatgtacacatatatcagattgtcactttgtataacttataaatatacaatctttatttgtcaaccgtatattccaaaataaaaaaaaagttacatattttttctcattttttgtgttatacatgtgaaaatcttttgcatatcaatgtacargtacatatgaaacagataaagaaaaatgtgggaataatagtataatttaatgcaaatatattcaaatggcaatatttcaggagtatttttctatgctggactaaattgtgttttccccaaactcataagtctaatgcccaatgtctctgtatttggagttaggtgtataagatattaattaaggtcataaact

SEQ ID NO: 178503 - DNA, 395 bp, Homo sapiens
atcttataaattatcatgggctcccttttaaaaactcatttcattacacaatgtacacatatatcagattgtcactttgtataacttataaatatacaatctttatttgtcaaccgtatattccaaaataaaaaaaaagttacatattttttctcattttttgtgttatacatgtgaaaatcttttgcatatcaatgtacaggtacatatgaaacagataaagaaaaatgtgggaataatagtataatttaatgcaaatatattcaaatggmaatatttcaggagtatttttctatgctggactaaattgtgttttccccaaactcataagtctaatgcccaatgtctctgtatttggagttaggtgtataagatattaattaaggtcataaact

SEQ ID NO: 178504 - DNA, 600 bp, Homo sapiens
tctgtaattgtctcaatattatctaaaaataacaattatattttccaattaaagtgatcatcaaatgaaaggtaaacaaactggactatgtgtcctgcttgaaaatcaagctattgaaatgccaggctagctctgtcaagtgtagattggtctactatgaactcaaactgagctaatgatagataaggaagacaggtatatttgctgggtctgctgctgtcatgaaggattcttggataaggtactctgagttattatctgtctttttgmgaaaagacaaatggattatgtaccatgtcaggaacttgtcatttgcataggtgtaaagtatgacaattactaatttaaaatgtctcagagcttgagacagatataatctttccataaactttccacatataatttgaaaggaagacatgagtcacattcttcatgtgtctgatattttcttagatgggataaactccaaggtttacatgatgcagagagacatatcttgaatgtgatattttgagatttaagtaaagtagtgatacatttcttgattttttaaagattgcattgtgaaaatagaatctaacaatgtgtacccaagggcat

SEQ ID NO: 178505 - DNA, 520 bp, Homo sapiens
tcttacatgtaaatctttaatctgtcttaagttcatttctgtccatggtaaaaagtaaaagtctagtttcattcttctgtgtctggctaggcagttattccagcaccatttgttgtatagggaatcctttccccattgcttgtttttgttggtcttgttgaagataagatggttgtagttgtgtggctttatttactagttttctattctgttttattgttctatatgtctgtctttaaaaattactttactgttttggttactgtagccttatattatagtttgaagtcaagtaatgtgatgcctccagcttattatttttgcttaagattacttttgctatgcaggcrtataaattttggaatttttaaaatatctgttatgaatgatgttggtagtatgacaggaataactttgattctgtacattgctttgggctgtagaacatttcaacaatattgattcttccaattcatgagaatggaatgtttttccatttacttgtgttgtgtgtgatttc

SEQ ID NO: 178506 - DNA, 520 bp, Homo sapiens
atctttaatctgtcttaagttcatttctgtccatggtaaaaagtaaaagtctagtttcattcttctgtgtctggctaggcagttattccagcaccatttgttgtatagggaatcctttccccattgcttgtttttgttggtcttgttgaagataagatggttgtagttgtgtggctttatttactagttttctattctgttttattgttctatatgtctgtctttaaaaattactttactgttttggttactgtagccttatattatagtttgaagtcaagtaatgtgatgcctccagcttattatttttgcttaagattacttttgctatgcaggcatataaattttggaatttttaaaatatctgttatgaatgatgttggtagtatgacaggaataactttgawtctgtacattgctttgggctgtagaacatttcaacaatattgattcttccaattcatgagaatggaatgtttttccatttacttgtgttgtgtgtgatttctttcagctatat

SEQ ID NO: 178507 - DNA, 574 bp, Homo sapiens
tcattgttccctaggcctgtattttaagagggcaatatgcatatttaatttgtgtgtgtgtcagagaacagcccagtatgactctcccttcactttcatttatgaaggaaatatcgaagcagccttagagtgcttgcttgattattccttgcccctctagcctttcggctaaagcagattatatctctctgcttttagttaattctatttcatttgcttgagtattgagaagaatattaggaaatgaaaatttccatctgcaaagacactggacactttcagtcaggtaaataaaaatgaagggcaaatctcatcactcacaaacaattagtttttccttcactatccttgagctctttgaccatctaatgttgtcrtgtctgcagaataaactgcagttttatcataaatgtactgtgattataactctgctctcaggctgcccgtgcatcttgccaactgcctggactcatttattatcctatatctcacccactcatcggacaggaaaatctgcagcacagtgattcaccccagcaagattgtcttggctggaataatgtgagactgggat

SEQ ID NO: 178508 - DNA, 574 bp, Homo sapiens
tcattgttccctaggcctgtattttaagagggcaatatgcatatttaatttgtgtgtgtgtcagagaacagcccagtatgactctcccttcactttcatttatgaaggaaatatcgaagcagccttagagtgcttgcttgattattccttgcccctctagcctttcggctaaagcagattatatctctctgcttttagttaattctatttcatttgcttgagtattgagaagaatattaggaaatgaaaatttccatctgcaaagacactggacactttcagtcaggtaaataaaaatgaagggcaaatctcatcactcacaaacaattagtttttccttcactatccttgagctctttgaccatctaatgttgtcatgtctgcagaayaaactgcagttttatcataaatgtactgtgattataactctgctctcaggctgcccgtgcatcttgccaactgcctggactcatttattatcctatatctcacccactcatcggacaggaaaatctgcagcacagtgattcaccccagcaagattgtcttggctggaataatgtgagactgggat

SEQ ID NO: 178509 - DNA, 470 bp, Homo sapiens
tatagcactatagcatgctgcccctgcacctataccttaccaccacattacaaaaggactatttacagcacttyctttgacccaacacattgtgtccagctatcaggaaaaaattacaaggcgtcctaaaaggcagcacacacaaacagaaaaacaaaaaacacaccacagagcaagcatcagtaccaggcatggcaatgatgttggaattatcagatcaggaatttaaaacaactatgattaatgtgctaagggctctactgggtaaagtagacagcttgcaaaaacagatgggcaatgtaagcagagagatggaaattctaaaaaagaacagaaaagtaatgcttaacggaaatgaagaatgcctttcataggattactagtagactggacatggccggggaaagaatctctgagcttgaggatatatcaatagaaactttgaaaactgaaaaggaaagaaaacaaag

SEQ ID NO: 178510 - DNA, 492 bp, Homo sapiens
agatctaattatagcactatagcatgctgcccctgcacctataccttaccaccacattacaaaaggactatttacagcactttctttgacccaacacattgtgtccagctatcaggaaaaaattacaaggcrtcctaaaaggcagcacacacaaacagaaaaacaaaaaacacaccacagagcaagcatcagtaccaggcatggcaatgatgttggaattatcagatcaggaatttaaaacaactatgattaatgtgctaagggctctactgggtaaagtagacagcttgcaaaaacagatgggcaatgtaagcagagagatggaaattctaaaaaagaacagaaaagtaatgcttaacggaaatgaagaatgcctttcataggattactagtagactggacatggccggggaaagaatctctgagcttgaggatatatcaatagaaactttgaaaactgaaaaggaaagaaaacaaagattgaaaaaaact

SEQ ID NO: 178511 - DNA, 470 bp, Homo sapiens
tatagcactatagcatgctgcccctgcacctataccttaccaccacattacaaaaggactatttacagcactttctttgacccaacacattgtgtccagctatcaggaaaaaattacaaggcgtcctaaaaggcarcacacacaaacagaaaaacaaaaaacacaccacagagcaagcatcagtaccaggcatggcaatgatgttggaattatcagatcaggaatttaaaacaactatgattaatgtgctaagggctctactgggtaaagtagacagcttgcaaaaacagatgggcaatgtaagcagagagatggaaattctaaaaaagaacagaaaagtaatgcttaacggaaatgaagaatgcctttcataggattactagtagactggacatggccggggaaagaatctctgagcttgaggatatatcaatagaaactttgaaaactgaaaaggaaagaaaacaaag

SEQ ID NO: 178512 - DNA, 470 bp, Homo sapiens
tatagcactatagcatgctgcccctgcacctataccttaccaccacattacaaaaggactatttacagcactttctttgacccaacacattgtgtccagctatcaggaaaaaattacaaggcgtcctaaaaggcagcacacamaaacagaaaaacaaaaaacacaccacagagcaagcatcagtaccaggcatggcaatgatgttggaattatcagatcaggaatttaaaacaactatgattaatgtgctaagggctctactgggtaaagtagacagcttgcaaaaacagatgggcaatgtaagcagagagatggaaattctaaaaaagaacagaaaagtaatgcttaacggaaatgaagaatgcctttcataggattactagtagactggacatggccggggaaagaatctctgagcttgaggatatatcaatagaaactttgaaaactgaaaaggaaagaaaacaaag

SEQ ID NO: 178513 - DNA, 631 bp, Homo sapiens
ggattctgtctcccagcttcagaagcagatattgagcctcaaatcttctaagattgccctgagtgagagtcttatctcctgtggagaaagagctgaaattgtggaaaatcacacacaagctcttatcacgcaagaggctgacctgcaatgaaaggtgcatgcacagcctcaccaggtgtctcctgttaaaatgagggcaatgattagaggagaatgggaccctgcaacttcgaatggggacgtgtgggatgaagctggggacactgagcttgtaaactctggtgaactctttttgccagaagaaacggcttccccatcaccagtagtggcaacattccctccctgacctacactggcatcagcctttccacctttctctgaggagataaaccctgcactgcctgaggcaacagtgatggcctcccctgagccagttgccaggcaagataatgttgattctcctcaggagccaccccaatactcctgtttgcttctgacctataagtcctggcagggccctakaagtgaggttgagagtgtgacccatgaggaggtacactacactcgaaaagaactgcttgagttctctaatttaaatgaacagaaatctggagaacaggcatgggaatgg

SEQ ID NO: 178514 - DNA, 579 bp, Homo sapiens
ggtttgaaagtgctattaaaatattaaatggtttactagctataatagtttgtagcattgtttagactggaactggggattcctgacagctaatttagcttcttttcatagttctggagagaaagttgtgactaacagcaagaagtagagaagataactaatgtttggacacaaaaggaagccagcacaagcaccatcacatccttcttggaaagacaattaaaaattttaccatatactcatggagtgttattcaagtcgtagttcagggcttagaaagcaaaggattctgtggtctaaaggggaaggacagtagtcaagctgagctatttcttttttcttttctttctttttcttttttattttctgagacagagtcttgctgtcttgcccaggctggagtgcagtggcatgaccttggctcactgcaacttctgccccccagatttaagtaattctcctgcctcagcctccaaagtagctgggattacaggcacacaccaccatgcatggctaatttttgtatttgtagtagagamgggtttctactacaggctggttggtgaactcctgacctcg

SEQ ID NO: 178515 - DNA, 614 bp, Homo sapiens
atgtttagctttttaacgcatgtctgtttagtctttgctaaacatgtcagccatttgcaggattaataagcaaatttgcttgtttatttctcttcacattgtgtaaatgcacattcaagttatatataacatgtttattcacatgagtttagtgcatttatatgatgcttgtgttgcagaataatagtggagaagatgagagctaacttctatctctgtgttgtttatcttctgttgagggcatgaaactgccatctgtgagagttgaatatcacagccctcagttggacttacataatatgctacaatatgtaatatatagtatactataacacataattgatacagtttggatatttgttcctgcccaaatctcatattgaaaygtaatccccaatgttagaggtggggcctggtggggggtgattggatcatggagatagattcttcacaaatggtttagtaccatccctcttggtactgtactcatgatagtgagtgagttctcaggaggtctggtcatttagaagcgtgtagcacccctctcgctctcttgctcctgctttcaccatgggacgtgcctgttactccttaacattctgtcataactgtaa

SEQ ID NO: 178516 - DNA, 614 bp, Homo sapiens
atgtttagctttttaacgcatgtctgtttagtctttgctaaacatgtcagccatttgcaggattaataagcaaatttgcttgtttatttctcttcacattgtgtaaatgcacattcaagttatatataacatgtttattcacatgagtttagtgcatttatatgatgcttgtgttgcagaataatagtggagaagatgagagctaacttctatctctgtgttgtttatcttctgttgagggcatgaaactgccatctgtgagagttgaatatcacagccctcagttggacttacataatatgctacaatatgtaatatatagtatactataacacataattgatacagtttggatatttgttcctgcccaaatctcatattgaaatgtaatccccaatgttagaggtggggcctggtggggggtgattggatcatggagatagattcttcacaaatggtttagtaccatccctcttggtactgtactcatgatagtgagtgagttctcakgaggtctggtcatttagaagcgtgtagcacccctctcgctctcttgctcctgctttcaccatgggacgtgcctgttactccttaacattctgtcataactgtaa

SEQ ID NO: 178517 - DNA, 458 bp, Homo sapiens
gaagtcagcataaagactgaaggtgtagggcagtgggaatatttgctttactactagtgatagaaaggctatctgtggtaaccttcaggatatctcccatggactccaagacttaagtaaaaatagcaaccactgtaactcctatgactagagctgcccctgctattataagtgcttaaatgtttactctatgccaagcccatatcaactacattgaatcctttacattagtccyctgaattaggtatcattatcttcaatgggctgcaaacatcagccatctttctgctctggcttctgttaacagcaaccagaccactcacagatttttttttagcctaagagcctacacttaccccacatgaacccttcctgactgcagctgtttagaacacaaacaagaacttgatctcggacagtcaatttatggactggttaagaaaaagggtcaactggac

SEQ ID NO: 178518 - DNA, 521 bp, Homo sapiens
tcacattatgtaattatttgttttttatctttgcctatattagaatgcaaggtgtaaacttttagtaaaaaaaaagattgaatgaatgaatgaaactgaaacagtgactttttcacctgtgtgtctacatattatataatactcaagagactcaacaaatatttgcagatttaaatactgtgtatatgatttttaaccatctagaaaattttaaatatgtattctaattttataagtaaaacattgataaaatatcttkagaaaaatgaataccttaatagatatggcaaaaattgactttgtccactttccctaattccttcccgtatacccttctggtttgacatgtattattctagacccatcttgctgcatttacactcaaacaacatctctatctttaactgtatcattgcaatcaataataatttgtgcattcttactaagtaggtaacaccattgcaagtgttcatgtgtgcatgcaatgaatggtattggagagtacatattatgcaacttac

SEQ ID NO: 178519 - DNA, 521 bp, Homo sapiens
tcacattatgtaattatttgttttttatctttgcctatattagaatgcaaggtgtaaacttttagtaaaaaaaaagattgaatgaatgaatgaaactgaaacagtgactttttcacctgtgtgtctacatattatataatactcaagagactcaacaaatatttgcagatttaaatactgtgtatatgatttttaaccatctagaaaattttaaatatgtattctaattttataagtaaaacattgataaaatatcttgagaaaaatgaataccttaatagatatggcaaaaattgactttgtccactttccctaattccttcccrtatacccttctggtttgacatgtattattctagacccatcttgctgcatttacactcaaacaacatctctatctttaactgtatcattgcaatcaataataatttgtgcattcttactaagtaggtaacaccattgcaagtgttcatgtgtgcatgcaatgaatggtattggagagtacatattatgcaacttac

SEQ ID NO: 178520 - DNA, 618 bp, Homo sapiens
agtgacctaggcctggccagacagagtactccattcattcccttgtacacagttgagtcaggaagagattgcaactcaagttagtctaatgagccccggccctaggagttcagctggaactattgcaagaaggcgctctctttgcctggtggtgctgacctggtagattgaaagcctggagcttctggcttgcccttgctttataataaaccaacacaggaggaagcagagctgagagacagattcccgctgacactgtgtgagtcctggatccagacatgcctaaagcaagaaatctctgggcgtctttgtagcagaagatcatgaatttcctcttttgcttaaggcaatctgagttgaatttttgtcagagtargtgttaaatttgctttcctttgttcatttgagagctcaggtaaattgatttgacataggcattttttttttttttagacggagtctcgctctgttgcccaggctggagtgcagtggcacgatctcagctcactgcaagctctgcctcccaggttcacgccattctcctgcctcagcctcctgagtagctgggaatacaggcgcctgccaccaagcccagccaatttttttttgtatatttaa

SEQ ID NO: 178521 - DNA, 618 bp, Homo sapiens
agtgacctaggcctggccagacagagtactccattcattcccttgtacacagttgagtcaggaagagattgcaactcaagttagtctaatgagccccggccctaggagttcagctggaactattgcaagaaggcgctctctttgcctggtggtgctgacctggtagattgaaagcctggagcttctggcttgcccttgctttataataaaccaacacaggaggaagcagagctgagagacagattcccgctgacactgtgtgagtcctggatccagacatgcctaaagcaagaaatctctgggcgtctttgtagcagaagatcatgaatttcctcttttgcttaaggcaatctgagttgaatttttgtcagagtaggtgttaaatttgctttcctttgttcatttgagagctcaggtaaattgatttgacayaggcattttttttttttttagacggagtctcgctctgttgcccaggctggagtgcagtggcacgatctcagctcactgcaagctctgcctcccaggttcacgccattctcctgcctcagcctcctgagtagctgggaatacaggcgcctgccaccaagcccagccaatttttttttgtatatttaa

SEQ ID NO: 178522 - DNA, 560 bp, Homo sapiens
atagctgcctgggtgcagtggctcatgcccgtaatcccagcagtttgggaggccgaggtaggtggatcacatgaggccaggagttccagaccagcccagccaacatggtgaaaccccatctctactaaaaatacaaaaattagccaggcatggtggtgcacatctataatcccaactactcaggaggctgaggcatgagaattgcttgaacctgggaggtggaggctgcaatgagccaagatcatgccactgcactccagcctgggcaacagagcaaggccccccccccccccccaaaaaaaaagkgatgtgggcaatactcaaatattaatctgtctcattctacagctgatttttaccccaccaaaccatatgcaacaaaaatgttgggtttgcatgaaatatatactgtgttgtattgcaagttgctttggccttcaggaatctcctacacataaatatagacatggtgtctgcctcaggcactcaaatgcacagagtatcaacttggcaagaggaaaaatccatctagtcaccagcctggagtcttctgatttatt

SEQ ID NO: 178523 - DNA, 560 bp, Homo sapiens
atagctgcctgggtgcagtggctcatgcccgtaatcccagcagtttgggaggccgaggtaggtggatcacatgaggccaggagttccagaccagcccagccaacatggtgaaaccccatctctactaaaaatacaaaaattagccaggcatggtggtgcacatctataatcccaactactcaggaggctgaggcatgagaattgcttgaacctgggaggtggaggctgcaatgagccaagatcatgccactgcactccagcctgggcaacagagcaaggccccccccccccccccaaaaaaaaagggatgtkggcaatactcaaatattaatctgtctcattctacagctgatttttaccccaccaaaccatatgcaacaaaaatgttgggtttgcatgaaatatatactgtgttgtattgcaagttgctttggccttcaggaatctcctacacataaatatagacatggtgtctgcctcaggcactcaaatgcacagagtatcaacttggcaagaggaaaaatccatctagtcaccagcctggagtcttctgatttatt

SEQ ID NO: 178524 - DNA, 560 bp, Homo sapiens
atagctgcctgggtgcagtggctcatgcccgtaatcccagcagtttgggaggccgaggtaggtggatcacatgaggccaggagttccagaccagcccagccaacatggtgaaaccccatctctactaaaaatacaaaaattagccaggcatggtggtgcacatctataatcccaactactcaggaggctgaggcatgagaattgcttgaacctgggaggtggaggctgcaatgagccaagatcatgccactgcactccagcctgggcaacagagcaaggccccccccccccccccaaaaaaaaagggatgtggkcaatactcaaatattaatctgtctcattctacagctgatttttaccccaccaaaccatatgcaacaaaaatgttgggtttgcatgaaatatatactgtgttgtattgcaagttgctttggccttcaggaatctcctacacataaatatagacatggtgtctgcctcaggcactcaaatgcacagagtatcaacttggcaagaggaaaaatccatctagtcaccagcctggagtcttctgatttatt

SEQ ID NO: 178525 - DNA, 560 bp, Homo sapiens
atagctgcctgggtgcagtggctcatgcccgtaatcccagcagtttgggaggccgaggtaggtggatcacatgaggccaggagttccagaccagcccagccaacatggtgaaaccccatctctactaaaaatacaaaaattagccaggcatggtggtgcacatctataatcccaactactcaggaggctgaggcatgagaattgcttgaacctgggaggtggaggctgcaatgagccaagatcatgccactgcactccagcctgggcaacagagcaaggccccccccccccccccaaaaaaaaagggatgtgggcaatactcaaatattaatctgtctcattctacagctgatttttaccccaccaaaccatatgcaacaaaratgttgggtttgcatgaaatatatactgtgttgtattgcaagttgctttggccttcaggaatctcctacacataaatatagacatggtgtctgcctcaggcactcaaatgcacagagtatcaacttggcaagaggaaaaatccatctagtcaccagcctggagtcttctgatttatt

SEQ ID NO: 178526 - DNA, 558 bp, Homo sapiens
ggagatggggagagagagagagaaagagagaggaagggagtggggtgtatggggagttgttcagagctgtcttggagaatatatgtcacaccaaaataatccaagatcagaatggcattagcgttcacaaaagaaacactgcaatgctttagaattctttgaagaagttatttacagcatagaattttgtatccagccaaattatcaatccaccataaatatgtaaaatatctccgatgaactccttttcagaaactttccggaaaatgtgctccaacaaaatgaaaaagtagtacaagaaagagaaaaacacamgatccaggaaagggggtctagaacaaggccctgatgggagagaaaacacacggtcattctggggacctgtacagagttgcacagctttaaggggagttgggagaatggcaagagatgaggctggagaccagggcaggtgccaaattttgaagtgtttcctatgtcaagcaaaagaaattggatttttccctaagaccaaaagggcaccactgaagggtttcagccagaggaagctcctgatta

SEQ ID NO: 178527 - DNA, 519 bp, Homo sapiens
tggcatggttctggggcttctgtttctcctcccttgatttttcccttggggtagcgtgtccacatgcacagtgamctgccagcacttgggaggggccacatgcacagtgtgtttactgaagttgtgtgcatgctcatttgaagcatttttcccttaccagtggtcttggaggaaggccatatgccagttaaactctgccatcttccctcctagtgcacatgcttgagtccacttgcccaactccagagatcttattcggaagctgcagatcaccagcttcaggtattttctatctattaagagcctgccctttcctggtgccaggtatggccaattagagacagtttaacaacaacttaactatcccctgatggtcgcctgacattcctggggtatagtggggcttctcctgtcctgttcatgtctccctagctacccactctaacaaaagcagctgggataataggcttggggaggaaagttgtattcttaatctaatctttgcatcggggctcaatc

SEQ ID NO: 178528 - DNA, 596 bp, Homo sapiens
caagagtctctgacttctcttgacactttgtattggcttgaaatgccaaactgtagggtgtgagatttggcttcttgggtgtccactagaggatatgatatatccagaaaaatggggagggaacttttaatgaggtgaactttgtcccaggaggcagtggggagaaagacacatacattacctctctttsctgcttccatccgatgcttccaagccacaatttcgtcatatagcctgactggggaagtccccattgcttagtagatgtacttacctagataccagcaatgtatctgtgactgtttatgctgcagtcacagccatggaaattgagtaccttgagtattctttcctaagcttctctcactttgcttttccttctctctgtactgggattctacttctcaaataaagtagcagaacccaatccctgtctaattttgttttctagataagcctagaaagccctagcattgtgatttttttttcttaccatttcccatacaacagaagacctggtttgacaactggtctgcagcccaaagtgtggtcattagaagtttgaccaaatggtttgccatttcatagcaaagatc

SEQ ID NO: 178529 - DNA, 588 bp, Homo sapiens
gcttttgtctttcttgcatagtctttgtcatgacatgcaatgctggttgtaaatgccaatataggaaaatttaacttatttatgtggagtctctgtaatgacaccatttggatttcattgcttgtatatatttttgtgtttccttcttaccataacagtagaaatgcagaacaatagcaatccaactgtttttaatttacttctacttctatgagtactctgtccttttgccttcctgatgagtaaagaaggactgaaggaaaaggacctatcagttgccctatatttccttttcattctatgtgttaactatctcaagttgtcataaccaaatatcatagactggacagcttaaacaacagaaattgattttcttacagttctggaggctggaagtctgagattggatgctagcatagtagggctctgttgtgggctctcttcctggcttgcaagacagccascttctcactgtgtccttacatggtggtgagaaagagagagatatttctgtcttcctcttgttactgcggtctcttcttaacagatcacaatcctgttaatgacgaacttcccctccaccccttt

SEQ ID NO: 178530 - DNA, 455 bp, Homo sapiens
agtggcatagtgtgtagacagagagggcatgaaactgctgtgtaggctttaccatggccccagtatagtgggaaggtgtccaacattgttcacccccttctaaaagggacctggaagtaactgatgaagaggacttaaggtcactacatggatgactctgtgacctgggtgrcttgatcactggagaccagatgggaactcatgtctcaatggatgccattgtggcatccacatgattctatacctgagcttgtgtccacaaatgttctattcattcccctgggcagtgaggataaaatggtaaatgagcctttcctcttgatagaatttggatatttgtccctgccaaaatctcatgctgagttgtaatccccagtgttgtgggtggggcctggtgggaggtgattggaacataggggcagatctctcatggcttggtgctgtcctcaagatag

SEQ ID NO: 178531 - DNA, 455 bp, Homo sapiens
agtggcatagtgtgtagacagagagggcatgaaactgctgtgtaggctttaccatggccccagtatagtgggaaggtgtccaacattgttcacccccttctaaaagggacctggaagtaactgatgaagaggacttaaggtcactacatggatgactctgtgacctgggtggcttgatcactggagaccagatgggaactcatgtctcaatggatgccattgtggcatccacatgattctatacctgagcttgtgtccacaaatgttctattcattcccctgggcagtgaggataaaatggtaaatgagcctttcctcttgatagaatttggatatttgtccctgccaaaatctcatgctgagttgtaatccccartgttgtgggtggggcctggtgggaggtgattggaacataggggcagatctctcatggcttggtgctgtcctcaagatag

SEQ ID NO: 178532 - DNA, 449 bp, Homo sapiens
aacttaacatgactttttataaatttaggggtgccaaaaatctttctttagtagctctgtatcaacattagtgatcgcctcgctaagaatttaataatttgacaaatatttktttaagtttttaccttaaatttccattagattttagaaatctgaatccttttgcctactatctaagtggtcattagtcaagagagtaaattatccattgggtaaaacacaatgctgctatctccatttctgggaagcagggtactaggagtaagttatccatcagctctgagccctgtatatgagcatgcaatgacaagtaaaaacaatctttggggggaaaataagtctaattttgcttcctaaatgactcatagctcaaatggattatagagaatcacccctggtatacaagttgtttggaatagcagagttctccgtatgcacagcttgaattc

SEQ ID NO: 178533 - DNA, 607 bp, Homo sapiens
acaacatcttgtttcattctcataactaccctgtgagaggcagacaggtctgtgagtttcattttggagataagggaacctagattcagagaaaacaaatgatgtatccactatatgtaattagtaaaaggcagacttggggctgtttcaggtctacggagctccatgctcctgctttctggacagaccttcttttccctacccactgcaaacgtggagtccaagggctgctcaggcagctggtgttatgtggggaaggtttggctctcctcatggtgtgaactgatgctgcttccttagccacttctatcatctgctcatagggtcctgcctcccagggacaatacatagcctctgcttgtttgatatttttggtccctcaaaagtatttcagcatttagccacctagctcacatgggccattgtgtggttatatgtaagttatggcatctctgagtctccaaggaaatcatgtctcctctaaacttttctgtcagaatggagtggggacaggaaattatttaagaartgaaataagacgttttcagaaaggacagaaccaacggaagggagacaaagactttgagcacctagccacaagatgaca

SEQ ID NO: 178534 - DNA, 549 bp, Homo sapiens
aaatactaataacattctgaggattaaaagatgggtctcagtttcaaaatggatagcacatagattttctttttccttttcttcagtgctccctactccctacaatccaagattcataaatttagagcaatctcaacatacatgtcttgattcatggactgagcccattattttcatcaggtcagtgataaagtcaatgttttgaaggtgttccctcaaccctagggcaggctgaaaggtcattactgattggagacaaaatcattttttctgacaaatctgatctcattggatttcacctgaggtctttctgttaccccttcagtgagataagctgcctgtcttgcttttatatgtttttaattaccaaaatcctgtatgttacgtaaaccacttgtcttctgaatwtactcattataatagttatttgccttcattttcctttagaatgattcagtttttaatttaatgatgtctgaattccgtaaccacattttaaaatgagactaataataaaccttacatcatagagtcagttgtgaggattaa

SEQ ID NO: 178535 - DNA, 478 bp, Homo sapiens
agagttcggtttttaagcacatcagttggaggaagaaatcccactgatttaagcaagaacactcgaatgctaaacccttcatgctgaggggattatatttcagtacaacatctactcttcaagagatgtgatttggagagctttaagagtcattatcttttctctccaacaaytacctgctctaatccttttctattcattgatttgaagatttttttttcctgttgttttatcccaaccctgtggtcagaaaagtcaccaaatttttttgaaatattattaagtgattacactttagaaggtacaacaaaaatctattttaggttttcaggatcttttacataagaagaaagaagacagccagagccacagtttgtacaactccagggagagctgtgaaaatattccacgtgaacagcagcccctgaatgctggacttcaacgtaacgacgtcctgggtctgcgcagtgtggcagca

SEQ ID NO: 178536 - DNA, 478 bp, Homo sapiens
agagttcggtttttaagcacatcagttggaggaagaaatcccactgatttaagcaagaacactcgaatgctaaacccttcatgctgaggggattatatttcagtacaacatctactcttcaagagatgtgatttggagagctttaagagtcattatcttttctctccaacaattmcctgctctaatccttttctattcattgatttgaagatttttttttcctgttgttttatcccaaccctgtggtcagaaaagtcaccaaatttttttgaaatattattaagtgattacactttagaaggtacaacaaaaatctattttaggttttcaggatcttttacataagaagaaagaagacagccagagccacagtttgtacaactccagggagagctgtgaaaatattccacgtgaacagcagcccctgaatgctggacttcaacgtaacgacgtcctgggtctgcgcagtgtggcagca

SEQ ID NO: 178537 - DNA, 472 bp, Homo sapiens
gaattcatttaacacccacaatactcacttaaatccagaatctgtctcattcattttcaaaattcactccatattttttgtagtaactcgagtatgtacctaaacacttgatattggaaagagcagtagcctttctcaatcaaaacccacaaatgcggcacatttttttttttacaagtaaaatgaaartaaacaacttatccaaaactacaaaaaaacctaaagtcttctatttcccacgaaatatgcatttctttgttatatacaacagatatcattttatttcacttaggtgcatgtcctggctggaaagtaaaatgcctttagaagtcaaccagaaagaaaatcaaacaaaaagcagttttatgatcatttgcattagctgattatttatgtgctatagattatcatgtagaatcttaatttccagtcaaaaatctcatatgttctattataaattctgaaatcatta

SEQ ID NO: 178538 - DNA, 537 bp, Homo sapiens
atttgttaaacataacttccatgtgtaacttgcatcttgaaataatttagttccattgaatccactgggattgtatttaatcctgtctctattagttttctattgctgccaaagcaaattaccacaaatttagcagcttgaaacaccacaagttttctgtctcagaattttccaggctagaagtccagtgggcttgactggctcctctgttccaggtctcacaaactgaagtcaagatggcagcagggccacatttttttctggaagctctgcaaagawcctgctttcacgctctttcaggttattggcggaaagaggagctggtttctgccaacaatctgaaggagggcggtggtccctgcttcctggctggcagtgggtgggagcctatcttaaagctacatgactcctgctcccatttccccctccattttcaagccaccaagggcatgtcaaacccttgtcatgcttcagatcttctcatgacttctgcctctagctggagaacaatctctccttttaagggctcatgtgatt

SEQ ID NO: 178539 - DNA, 463 bp, Homo sapiens
ctctcttgtctctctgttaaaggcactaattacatccaaggagctccaccctcatgacctatcatctcctaataccatcacattgagggttagaatttcaatataaaaattttggaggggagggcacaaacatccagtccacagcagtgagtttcttgtaatctcagaagtcttcttacataactaaattgttgttcagaattgatttgggtcctttgtgatttattgatcattaatttaaaattcaattaacttggggatgtattgaaaacttgacaatgtgaaactaattttgctatacattaactactwaaaaaaccactaccgttcattaagtcaccacccaatcccaatcacttttcttacattatctcatttaatcctcaaaacaactagaggtattcatttttactccggttttgccaaaaatgaagttaaagctcagatatattacataacttaa

SEQ ID NO: 178540 - DNA, 583 bp, Homo sapiens
ctagaagtgttattcaacttcttttcttctctytacacatctcatgaaagccatatggacttcctaatatagggacaattatttttaaaaacccacagtcacccaattcagtggaaaaaaattctgtccctatccatatatcttaggatagaagctggggtgaatgagaggagacatagaaaagtgagtccctcagctacctgacatgctattcgagcattgcaatcaattgggatttgacattttgccatccttttcgttttcatgctccaccttattcactctagagcagagtttcagttttttactagtcctcagtggctgaatattaggaatgatcacatctttatctctaagtctgaaattcctccagagtttcagacatattattctattgactgctgaacatttccccctggatgtcttatagacaacacatgtgacattttaaattccaactcatacttttttattgtcagttctgaagtcatcatcatgtattccctactttcattaacactatcattaaccaaattagaaacccaatttgtcataatatctctttccccattgcatgaattcc

SEQ ID NO: 178541 - DNA, 583 bp, Homo sapiens
ctagaagtgttattcaacttcttttcttctctttacacatctcatgaaagccatatggacttcctaatatagggacaattatttttaaaaacccacagtcacccaattcagtggaaaaaaattctgtccctatccatatatcttaggatagaagctggggtgaatgagaggagacatagaaaagtgagtccctcagctacctgacatgctattcgagcattgcaatcaattgggatttgacattttgccatccttttcrttttcatgctccaccttattcactctagagcagagtttcagttttttactagtcctcagtggctgaatattaggaatgatcacatctttatctctaagtctgaaattcctccagagtttcagacatattattctattgactgctgaacatttccccctggatgtcttatagacaacacatgtgacattttaaattccaactcatacttttttattgtcagttctgaagtcatcatcatgtattccctactttcattaacactatcattaaccaaattagaaacccaatttgtcataatatctctttccccattgcatgaattcc

SEQ ID NO: 178542 - DNA, 583 bp, Homo sapiens
ctagaagtgttattcaacttcttttcttctctttacacatctcatgaaagccatatggacttcctaatatagggacaattatttttaaaaacccacagtcacccaattcagtggaaaaaaattctgtccctatccatatatcttaggatagaagctggggtgaatgagaggagacatagaaaagtgagtccctcagctacctgacatgctattcgagcattgcaatcaattgggatttgacattttgccatccttttcgttttcatgctccaccttattcactctagagcmgagtttcagttttttactagtcctcagtggctgaatattaggaatgatcacatctttatctctaagtctgaaattcctccagagtttcagacatattattctattgactgctgaacatttccccctggatgtcttatagacaacacatgtgacattttaaattccaactcatacttttttattgtcagttctgaagtcatcatcatgtattccctactttcattaacactatcattaaccaaattagaaacccaatttgtcataatatctctttccccattgcatgaattcc

SEQ ID NO: 178543 - DNA, 583 bp, Homo sapiens
ctagaagtgttattcaacttcttttcttctctttacacatctcatgaaagccatatggacttcctaatatagggacaattatttttaaaaacccacagtcacccaattcagtggaaaaaaattctgtccctatccatatatcttaggatagaagctggggtgaatgagaggagacatagaaaagtgagtccctcagctacctgacatgctattcgagcattgcaatcaattgggatttgacattttgccatccttttcgttttcatgctccaccttattcactctagagcagagtttcagttttttactagtcctcagtggctgaatattaggaatgatcacatctttatctctaagtctgaaattcctccagagtttcagacmtattattctattgactgctgaacatttccccctggatgtcttatagacaacacatgtgacattttaaattccaactcatacttttttattgtcagttctgaagtcatcatcatgtattccctactttcattaacactatcattaaccaaattagaaacccaatttgtcataatatctctttccccattgcatgaattcc

SEQ ID NO: 178544 - DNA, 379 bp, Homo sapiens
cactccagcctgggcaatagagtgagactctgtctcacacacacacaaaaaaagattgacaaggctgggaagcaattctaaaattccaaaatgcccacatggaaggtgggagtttaacttggaactatcaccttagaaaatatgtggacagtagttcataaagctgcatttctatgtatatacttgaagtgaataaatgcatatatctacctaaagttatatgtaagaatattcataacagttttacccttcaatcacttctcattacttttacaatttcctaagtccttaacagagccagcaagtaccccctcctcagtttcatcagcttttctcctctctggwcacactaaacatatctcagctccttggggaattc

SEQ ID NO: 178545 - DNA, 589 bp, Homo sapiens
agattaatcaagaagagggaagacacaacttagcaatataaaggataaatgagggcagaagaaaatggaaattatcacaatagagaatctgtgaggctttgtcacatacagtagatgatattatggctttcacacattttttaaaaagttaactccttattttcccttagcagtatatcaggttatagaatcagagatacaacaatgacaaattacatttcaatttgtaaaattatgtgatgatatttatcattcgaaaatagaggaataaaaatctgtcctcatttcaccagatgtgaatttcaagtagagcagttgctattaagagttggtgcatgtttctgaccagtcccctcctgttatggcatcactggttgtcactagcagctagccaaaaaataaagtcttattttgctgtattagtcaggatttctgcagtttatgtttaaaaactggtttagagtatccaggtgatggatatatggtccaygtatccccttttggtaagctatagttacaatctgtgtgctttgttgcctgctacacagaaagcagcagataatcaaagatttaagggacacagacagct

SEQ ID NO: 178546 - DNA, 406 bp, Homo sapiens
ttccttccactcactagaatgagcctcatgtgttgtcatctggtttattgcaaaagcctattcatttcctgactccagcctgttctctccattctgttttccactctcctgccagggtaatttctctagcatgtaaacctgatcatgttactccctgtcttaaaatccattagcatttcctcattgctttcagattaatctgcctattggtatttcatctttttttagagctcccaaacactataccttaatggtgacaagtaagtgttttgattcagaggatctctctaataacagttccatcacgtattagcttcagtgtattgggtaagttaacctctgtctttcatctytaaaacgggagttaaaaacaatccacagagttgttaaaggattaagtgaattc

SEQ ID NO: 178547 - DNA, 576 bp, Homo sapiens
atctgccacaggctttttcaacaccagttgactggtcagtgagaggaaacattggggtctaagaatatgccagttccatagaaattctttccccaaatagtcgtgaacaaactgcttggccaacagatacacaacagacctcaggattttaagttgcagagcaactgtgttcagtggttggcatttcttaaatacttaaatccttctttggttcaacagctgatttcctcctttgtcatattctttcctatttgttttcccagggagtgacagccacgtctttccacattatacttcttgggtaagcagcttctgaaattgtcccacagcagtccatakctgtccagcggtgacctctttgcttgcaagttggatatcccttttgacaaatatctctatgaggcgtgtgtaatgtaaactttaagagaaacaaaacactgtgcatttttaattatgtcaaataagtcttaaagccattttaaatgtgcaattatttcggtagattacccttttccctttagtggagaaaaataaataaaataatgtggaaaatcaaactgtgtcaactagtcaata

SEQ ID NO: 178548 - DNA, 576 bp, Homo sapiens
atctgccacaggctttttcaacaccagttgactggtcagtgagaggaaacattggggtctaagaatatgccagttccatagaaattctttccccaaatagtcgtgaacaaactgcttggccaacagatacacaacagacctcaggattttaagttgcagagcaactgtgttcagtggttggcatttcttaaatacttaaatccttctttggttcaacagctgatttcctcctttgtcatattctttcctatttgttttcccagggagtgacagccacgtctttccacattatacttcttgggtaagcagcttctgaaattgtcccacagcagtccatatctgtccagcggtgacctctttgcttgcaagttggatatcccttttgacaaatatctctatgaggcrtgtgtaatgtaaactttaagagaaacaaaacactgtgcatttttaattatgtcaaataagtcttaaagccattttaaatgtgcaattatttcggtagattacccttttccctttagtggagaaaaataaataaaataatgtggaaaatcaaactgtgtcaactagtcaata

SEQ ID NO: 178549 - DNA, 576 bp, Homo sapiens
atctgccacaggctttttcaacaccagttgactggtcagtgagaggaaacattggggtctaagaatatgccagttccatagaaattctttccccaaatagtcgtgaacaaactgcttggccaacagatacacaacagacctcaggattttaagttgcagagcaactgtgttcagtggttggcatttcttaaatacttaaatccttctttggttcaacagctgatttcctcctttgtcatattctttcctatttgttttcccagggagtgacagccacgtctttccacattatacttcttgggtaagcagcttctgaaattgtcccacagcagtccatatctgtccagcggtgacctctttgcttgcaagttggatatcccttttgacaaatatctctatgaggcgtgtrtaatgtaaactttaagagaaacaaaacactgtgcatttttaattatgtcaaataagtcttaaagccattttaaatgtgcaattatttcggtagattacccttttccctttagtggagaaaaataaataaaataatgtggaaaatcaaactgtgtcaactagtcaata

SEQ ID NO: 178550 - DNA, 576 bp, Homo sapiens
ataggtccctggttcaattatttactgactatttaactttaataaggcaattacattttcctaaatctcagaactgtcagctacaaaatggcaataacaaccactataaattatagttaatgcaagtcaaggacttcttagcatcatattcgwtgagtagtaaacacataaatgctagctattattgtttgtagtctcaggtcttatgattttagttttaggttttttttgttttgctttagtgttcattaaagagaagaatgggaaaagcacttgctaactttttcattctttttatatgttgatttttactttttcctttataaaggaagtcaagtatgagtgaaaactgataatataacttgtttttgactgtctatatattttttgtggaaaaatagatttgcttctaccttaaattctgttatgttgtcagcatttgccacttaattaattagatcaatatgaaatttttacattaaagaattattagaagaattataagtgaaatgaaagattgaatgtattctcaaatgtgtcactcttaattccagataaaaatgaggaaaacagtat

SEQ ID NO: 178551 - DNA, 263 bp, Homo sapiens
agatctcatgataactcactatcatgagaacagcaccaraggggaaattcacctccatgatccaatcacctccaatcaggccccacctccaacactggggattacaatttgacatgaaatttgggtgatgacacagatccaaatatttccattctgttgactgcaatctacctaattccattaggtttaatgggataactcaagattcagaacaatataattactctatttacctttagaatggcctaagacaactaatcttg

SEQ ID NO: 178552 - DNA, 263 bp, Homo sapiens
agatctcatgataactcactatcatgagaacagcaccagaggggaaattcacctccatgatccaatcacctccaatcaggccccacctccaacactggggattacaatttgacatgaaatttgggtgatgacacagatccaaatatttccattctgttgactgcaatctacmtaattccattaggtttaatgggataactcaagattcagaacaatataattactctatttacctttagaatggcctaagacaactaatcttg

SEQ ID NO: 178553 - DNA, 412 bp, Homo sapiens
ccatgatccaatcacctccaatcaggccccacctccaacactggggattacaatttgacatgaaatttgggtgatgacacagatccaaatatttccattctgttgactgcaatctacctaattccattaggtttaatgggataactcaagattcagaacaatataattactctatttacctttagaatggcctaagacaactaatcttgtaagccggattggctttcatacttcattttttcaggccactattggtcaccactgtttcagggatttagcagattatttgccartctgggttatgtataacagttctgctttatatgatgtatttaattcaaggaagcatgtgccatgtgaagatacaatcaaagagataatatgaaatcaaatgaaatttactttcacgtaa

SEQ ID NO: 178554 - DNA, 402 bp, Homo sapiens
atcagacaattcttacttctcactgaaccactcacaagtcatatccaaccccttaaaaatgtccataccctcatagcctcacttctaagaatttatcctcaggaggaaatccagcagttggcaaagatgtcaaaggtaaaaatgtattaagagaacaagaaaaaacaataaaaatagcctatgcagcctagagtaagacaactggttacataaattataatcatccacataaatatatactatgaagctattaaaataataatgtagctctattgttgttggcaagaaataaataagtaagggaggaaaggagattacagaccaatttgtatataatatrgccttattttattaacgaataaatacatgaaatgtctatgtgactgtggacatgcttgtgac

SEQ ID NO: 178555 - DNA, 546 bp, Homo sapiens
ccaggataatagagtgaaataaaataagaggctgacattcacactgagcaaggaagagtcacttatagaactttagcacattaaattgggataatcattgcaaaacaaacaaaatcacacacagagataatcatatttcaaaggtattacacaagtcatttcagtgttcaaagatattaaacgatcactatgataaaatgtcacaactgtaamgtattatattaataattctctgacgtactgagtctttattcctggtaatttcagtgtgtagggctttgacatcagcatacgtgcagtcctcagaaatttccagaatcttcagattctccaggaaattaatatattcagctctatacactttttttctttccagtttttcagccttctttgggttttttttagtgctactatttaaaaaaaaaaaaaaacttttaagtaatgaaaactcatattcagttactgcaagaagcctaaggccccacagatttcccttggtcatccgacgttgacagtagctccatcaatcctgacttggtctcccct

SEQ ID NO: 178556 - DNA, 546 bp, Homo sapiens
ccaggataatagagtgaaataaaataagaggctgacattcacactgagcaaggaagagtcacttatagaactttagcacattaaattgggataatcattgcaaaacaaacaaaatcacacacagagataatcatatttcaaaggtattacacaagtcatttcagtgttcaaagatattaaacgatcactatgataaaatgtcacaactgtaacgtattatattaataattctctgacgtactgagtctttattcctggtaatttcagtgtgtagggctttgacatcagcatacgtgcagtcctcagaaatttccagaatcttcagattctccaggaaattaatatattcagctctatacactttttttctttccagtttttcagccttctttgggttttttttagtgctaytatttaaaaaaaaaaaaaaacttttaagtaatgaaaactcatattcagttactgcaagaagcctaaggccccacagatttcccttggtcatccgacgttgacagtagctccatcaatcctgacttggtctcccct

SEQ ID NO: 178557 - DNA, 582 bp, Homo sapiens
gcaaggttttctttttattctatgttatgcaacataaagaatcatcatttagcaattctcagattgaatttatgaagctagctagttggcagggacttcatttgaacacactagtaactgtattcattatctcagaaggtgaggatttcagtatctcataaactgcatcttgcaggtgaccaaatattctgtctataaatgaagccattcttgacttaagtaattagttttctaagaattatcaagtacatactaatgctrtgcttctattttggtctctagaataatagtgattcattttcaaagcatctcccttcctttatgaatgccttggtttcccgtctctaaaatgggaataattatccttacaccacagatttgttgtgaggattaaatgatataatgtatacaatatgctgttaaaatgcctgactctttttgagtatcccatccatcatagtgactgattattaactttcaggtattctttttcatcactttgtcaactgtatcactaaaaggatatattcaattcaattgttctcctctgcacaacatgtaattagctggtttctcttaagc

SEQ ID NO: 178558 - DNA, 582 bp, Homo sapiens
gcaaggttttctttttattctatgttatgcaacataaagaatcatcatttagcaattctcagattgaatttatgaagctagctagttggcagggacttcatttgaacacactagtaactgtattcattatctcagaaggtgaggatttcagtatctcataaactgcatcttgcaggtgaccaaatattctgtctataaatgaagccattcttgacttaagtaattagttttctaagaattatcaagtacatactaatgctgtgcttctattttggtctctagaataatagtgattcattttcaaagcatctcccttcctttatgaatgccttggtttcccgtctctaaaatgggaataattatccttacaccacagatttgttgtgaggattaaatgatataatgtatacaatatgctgttaaaatgcctgactctttttgagtatcccatccatcatagtgactgattattaactttcaggtattctttttcatcastttgtcaactgtatcactaaaaggatatattcaattcaattgttctcctctgcacaacatgtaattagctggtttctcttaagc

SEQ ID NO: 178559 - DNA, 491 bp, Homo sapiens
aaatagatactaagaagccgtaaataggaaaggataatgtctgtaaataaagaaaaggaataaactaaccaaagaacccgaattagaactctccattacttcctctccagttattaaactttgggtgtcccaaatgactttgaggatctaatgaaagctagaagaatgtatayacacacaatttaggggtttttcacttttctatgaagtccatccttgatgtccgtgtacctgaggttaagattatctgtaaagatggcctaatagaagcctcctgtgagaatcagcccctacaggaactccaaattgaacaactatgcacacaaaaggcacctttataagaaccaaaaatcaggtgagtgatcacagtatctggttttaactctgtatcactgaaggaggcactgaagagggcaggaaagacagtgtcgacctgccaatgccacccatcccacatcctccagcagtggccacatggcatgcagagagag

SEQ ID NO: 178560 - DNA, 351 bp, Homo sapiens
caaatgactttgaggatctaatgaaagctagaagaatgtatacacacacaatttaggggtttttcacttttmtatgaagtccatccttgatgtccgtgtacctgaggttaagattatctgtaaagatggcctaatagaagcctcctgtgagaatcagcccctacaggaactccaaattgaacaactatgcacacaaaaggcacctttataagaaccaaaaatcaggtgagtgatcacagtatctggttttaactctgtatcactgaaggaggcactgaagagggcaggaaagacagtgtcgacctgccaatgccacccatcccacatcctccagcagtggccacatggcat

SEQ ID NO: 178561 - DNA, 355 bp, Homo sapiens
tgtcactttgaaaaagagatatagaaatcaggtaatagtgttggatatgccataaaacaaatgaataataacataaactgtagtgcctagaacattcacttttttaaacaaaatccaatttaaaatctttgtcttacacaggcacaatggctcctgcaggtaatcccagaactttgggaggcctaggcaggaggattgcttgaatccttgagttcaagaccagcctaggcaacatagagagaccctatctctacaaaaataaaaattaaaaaaattagtcagatatggtggcacatgyctgtggtcccagctactcaggagtctgaggtgagaggattgcttgagccaggaggtg

SEQ ID NO: 178562 - DNA, 413 bp, Homo sapiens
ttcagatgaaactgttccacctcagatcatcaagcattagattcttataaggagtgggcatcctagatcccctgcatgcacagttcacagtagaattcatgctcctatgagaatctaatgctgccactgatttgacaggaggcagagctcaggcagtaatgctggctccagccactcacatcctgctgtctggcatggttcctaaaagatcaaggacttatagtggtctgtggcccaggggttggggacccttgagctagaacgttaatytgatcaaatgaacacaattaaatattcagaaaagcattataacaagaatctctaattttttatcttattctcattttattttgttacaatgtctacaaagagaatgctaactggaaaactttgacgtattttttttttccagg

SEQ ID NO: 178563 - DNA, 450 bp, Homo sapiens
gtagatctagaagaaaatggtaccaggaatcattatttacctagagtttttgtttctcctccttcttcttttcgtctcctcctcttcctctttatcttgaccatgtgcaatacaaagttaattagagaattatataattayatttgttattgttagaacatgattctaatgagaacattagtgttttgaaggaaacaaatgaaagaaatcaccatagaaaacacaaaatacagaagttttttgtacagtggaaacggtaatagagactgaagtttgggtgtggtacctgaatactaccattcaacacttgtattctaaatgttagagtcttcattcataaaaactgaaagcacagactcattattcctgatgataagcaaatccaagagtttaagatgagtgtacactatctttcctgaataaactcaaatatctgaaaataaaaggtta

SEQ ID NO: 178564 - DNA, 522 bp, Homo sapiens
tttttggcataaatttttcttgttctcaactttcaactagttgggggagatagagcatgaacacatataactggaagatactatatttaatctatgttacttttaaaaaactaatgttattttaaagaaaatttaaatttgttatactaaatgagagttaaaggtacaaaaagatgacattcaatatcagaggaaattaaatctttaaagtagmacaggaaacaaacaacagataccagtggagtatatgctttcatttattcaacaaacatttaattgaatatgtaacatatgccacactctattcaaggttctaggaaaatacctaactgtcaaaaagacatagtctctgcagttgtgagatgtaaaagctgttgagactcaatgacatgagaaatatgaatataaattagagaagggagaacaaggaaaagtacacacatgggaaggcaaatacattatttagagcataacaataatataaagttatggtgcacttcctaacttggacataatgtgatt

SEQ ID NO: 178565 - DNA, 455 bp, Homo sapiens
attgataccatatcatactgaattagaaattctactggagattagcagaagactaaataaagcagaagaaaaaaattaatgcatttgaaattaaataaaattaaacaaaacacccttaaacaacccatgggacataaaagaaatcaaaagggaaattagaarataccttgaaacaagcaaaaacaaaaacaaaatcaacttataaactataagatattttccttaaaccctatagtaaacacaaataaaatacctgtagaaattacacacaaaaaaagataaagaaatcaactcatattaatatggaaagttaagaaaacacaaagaaatagcaagagagaaaacatagggacaaaagaattacaagacaaatggaaaacaataaacaaaatgcagcagtaaataattccctatcaacaataactttaaatgtaagtggcttatggttcctgatc

SEQ ID NO: 178566 - DNA, 455 bp, Homo sapiens
attgataccatatcatactgaattagaaattctactggagattagcagaagactaaataaagcagaagaaaaaaattaatgcatttgaaattaaataaaattaaacaaaacacccttaaacaacccatgggacataaaagaaatcaaaagggaaattagaagataccttgaaacaagcaaaaacaaaaacaaaatcaacttataaactataagatattttccttaaaccctatagtaaacacaaataaaatacctgtagaarttacacacaaaaaaagataaagaaatcaactcatattaatatggaaagttaagaaaacacaaagaaatagcaagagagaaaacatagggacaaaagaattacaagacaaatggaaaacaataaacaaaatgcagcagtaaataattccctatcaacaataactttaaatgtaagtggcttatggttcctgatc

SEQ ID NO: 178567 - DNA, 484 bp, Homo sapiens
aaataaacttcagctttaaggacatgcagaggctgaaagtaaagggatagaaaaagatattttttggaaataacaactgaaagagagcaaagatgtatatacctatataagacaaaatagatgttagggaaaaagactgtcataagagacaaggaaacatatatttagaaagtgtcaatttattggcaagatattaatttaacaaattttaatatgtagacacacaacatcaggtatataaaacaagctgaatacataaaacaaactgacagaactgaagagagaaatatacagtaatacaataatartaggagtcttcaatacactactttcaattatggaaaaaacgcctgacagaaaatcaacagaaatgacagatttgaaaaacaccatacacctaattggtctaacagatgcacacagatcatttcacccaagataaacagaatttatcttcttctcaagcacacatgtaacattctcc

SEQ ID NO: 178568 - DNA, 428 bp, Homo sapiens
gaattcttgtttagttaatcacagaatttaaaccacatgcagtgctatctattttagctccttgttttcactgaagttttcagtccagatttgtagtgagtgttaaatttaataatttttgaaagagtgagaaattgcagcaaaaggagyaagataattatctggaaacataaaacaatctgtgtttcttacttttgttatgcaatgtaagtactcttggaaatgcaatctgaggatactgtaacaatttttaaaataagaaaggaggatagtgttagaatttaatatatattgttgctatgattaaacatttttcaaaaaactgaatttgtttacccatttttctgtcttaaaaattatctactcgaggattggtcacagtggctcatgcctgtaatttcagaactttgggagacctagtcaggagg

SEQ ID NO: 178569 - DNA, 410 bp, Homo sapiens
gttttcaaatccaccttatttaataaccccattttttactattccagtgaagtataagatttgagaactgatttccagagagctaatttcttacagaaaattaaagcatttacctttccagtttattatttcaggaatgtgaagtcactacatgaccatactattgtgtataagagtccatctttctggagctaagatgctgaattactaattatgataaggatgtctggggctttctagattaagttacttgcatagagatcatttcaatcatttattgacccattcatgratatatattgagtgcttactatgtgcaacaacgttctagaagctagaactagggctatgaataaaataaaaccttgtgcaaagtagaagaaattaaggaaatagataagaatttgtgt

SEQ ID NO: 178570 - DNA, 361 bp, Homo sapiens
acttcattataatttttttcttcggcgctaagactggcctgcttttatcagcttttgctggccaatagtttttgctaactctaccatttaaatatcagttttaccacttattaacattttaaacttaagctagtcacaatgtyatttaaccttagtttctcgtctgtaacacagtggtaatagatcctgaaaacagaagtttgtgttttgagagtgaatcataaaggattcatagatgtgtatctttgaatgtcaaatgttttccttgcaaagtgttttgtgtagtatgtactcaaaaaatactatgctatgcttttaagtgaaggaagtgataagaacaattgcaatacactaaatgtaa

SEQ ID NO: 178571 - DNA, 597 bp, Homo sapiens
tgttagaaatattccatgttcatgyaaagccaaaagtatttaagtaggaattatgataaaataaaaataactagcacattttatgaaactttttattcctgtttctacttttggaggtttaaatttcagatatttttagttttctattttgcttttgttgtaagtttgtgtttttcccagacttatatctgaaaattcccccttggacccaaatccaaattctgttaagaactagattaggccctgtctttggtggacttttgttcctcttttgctctttataacttttttctttctgatcttctcttggacttacagtaagcccccattctcaaagctcttgcttacacacagccttatataatggtcatttctaatttggggcatattcagcattttgaatagtcatttgtgaagacagactgcctcgagattcttaacatgacttgtggttttgaaaaggccactcaaaatgttcacttttccttatgctctaccagattttttttaagttctttgaaaagtttaccggtatccagggagcaaagaaatagctttggttaccttttaaagagttatcagctaagattacagtgt

SEQ ID NO: 178572 - DNA, 620 bp, Homo sapiens
caatatagtaataatttaggttttcaaaacttaactattttttccaagtaaagtcaatgtacatttttcatgcacttaatatgaaaatactatggaaggcagaggcaattccattcaaatacttgtatgccacacccatttgccaaacctatatattgtaatccttttcattctttaaataacggttcaaaacagcaatcctttatttcctaactagaaatgatttatattttatctaacctttgtgaaataatgttatattgcaagtatatttctatctacagacttattttgatgaaattatataaatmtttgctgaaaacatattcaatttaaagaccagaaatagagtctagaaatataaattccatgtctcaaaaatacctaaatttcttgtcaatttaagagaaacaaaacagtagttgtgaatttgggaaaagacactactatcaagtgtgtgtattttttaaatataaagtatgagattcaaataaaaatgttatcaaattgatgtatgacgttttactattattttttcttaattttcattcagagtcactctgaacctaaatgaccttttattaaatatgattatttggaagtctcaagtggctctgggt

SEQ ID NO: 178573 - DNA, 620 bp, Homo sapiens
caatatagtaataatttaggttttcaaaacttaactattttttccaagtaaagtcaatgtacatttttcatgcacttaatatgaaaatactatggaaggcagaggcaattccattcaaatacttgtatgccacacccatttgccaaacctatatattgtaatccttttcattctttaaataacggttcaaaacagcaatcctttatttcctaactagaaatgatttatattttatctaacctttgtgaaataatgttatattgcaagtatatttctatctacagacttattttgatgaaattatataaatatttgctgaaaacatrttcaatttaaagaccagaaatagagtctagaaatataaattccatgtctcaaaaatacctaaatttcttgtcaatttaagagaaacaaaacagtagttgtgaatttgggaaaagacactactatcaagtgtgtgtattttttaaatataaagtatgagattcaaataaaaatgttatcaaattgatgtatgacgttttactattattttttcttaattttcattcagagtcactctgaacctaaatgaccttttattaaatatgattatttggaagtctcaagtggctctgggt

SEQ ID NO: 178574 - DNA, 471 bp, Homo sapiens
tttgccaaacctatatattgtaatccttttcattctttaaataacggttcaaaacagcaatcctttatttcctaactagaaatgatttatattttatctaacctttgtgaaataatgttatattgcaagtatatttctatctacagacttattttgatgaaattatataaatatttgctgaaaacatattcaatttaragaccagaaatagagtctagaaatataaattccatgtctcaaaaatacctaaatttcttgtcaatttaagagaaacaaaacagtagttgtgaatttgggaaaagacactactatcaagtgtgtgtattttttaaatataaagtatgagattcaaataaaaatgttatcaaattgatgtatgacgttttactattattttttcttaattttcattcagagtcactctgaacctaaatgaccttttattaaatatgattatttggaagtctcaag

SEQ ID NO: 178575 - DNA, 471 bp, Homo sapiens
tttgccaaacctatatattgtaatccttttcattctttaaataacggttcaaaacagcaatcctttatttcctaactagaaatgatttatattttatctaacctttgtgaaataatgttatattgcaagtatatttctatctacagacttattttgatgaaattatataaatatttgctgaaaacatattcaatttaaagaccagaawtagagtctagaaatataaattccatgtctcaaaaatacctaaatttcttgtcaatttaagagaaacaaaacagtagttgtgaatttgggaaaagacactactatcaagtgtgtgtattttttaaatataaagtatgagattcaaataaaaatgttatcaaattgatgtatgacgttttactattattttttcttaattttcattcagagtcactctgaacctaaatgaccttttattaaatatgattatttggaagtctcaag

SEQ ID NO: 178576 - DNA, 471 bp, Homo sapiens
tttgccaaacctatatattgtaatccttttcattctttaaataacggttcaaaacagcaatcctttatttcctaactagaaatgatttatattttatctaacctttgtgaaataatgttatattgcaagtatatttctatctacagacttattttgatgaaattatataaatatttgctgaaaacatattcaatttaaagaccagaaatagagtctagaaatataaattccatgtctcaaaaatacctaaatttcttgtcaatttaagagaaacaaaacagtagttgtgaatttgggaaaagacactactatcaagtgtgtgtattttttaaatataaagtatgagattcaaataaaaatgttatcaaattgatrtatgacgttttactattattttttcttaattttcattcagagtcactctgaacctaaatgaccttttattaaatatgattatttggaagtctcaag

SEQ ID NO: 178577 - DNA, 504 bp, Homo sapiens
agcaaggcaatttattgggacattcagctcccaagaaagggagacagcaagaggaggcgtcccacagctagctctctggaagcaggttagtctagagttttattttctttggayttcctccaggcaaaaccattgcatgtttggagtggtctgtcagttgcacctgcgtggtttctcatcatgcttcttcatgtgatgcgggtctcattagtatcttaaatttcttctacctgtgggtgattttcactattctcatgcttcttcaggattagtatcttaaatttctacctgtcggtgattttcactattctcatcatgcttcttcaggtgatgcgggtctcattagtatcttgaatttcttctacctgtgggtgattttcactattctcatcatgcttcttcaggtgatgcaggtctcattagtatcttaaatttctgcctgtcggtgtgattttcactattaaaatgaagaaaagatcaggttaggacattactgggcatatg

SEQ ID NO: 178578 - DNA, 504 bp, Homo sapiens
agcaaggcaatttattgggacattcagctcccaagaaagggagacagcaagaggaggcgtcccacagctagctctctggaagcaggttagtctagagttttattttctttggacttcctccaggcaaaaccattgcatgtttggagtggtctgtcagttgcacctgcgtggtttctcatcatgcttcttcatgtgatgcgggtctcattagtatcttaaatttcttctacctgtgggtgattttcactattctcatgcttcttcaggattagtatcttaaatttctacctgtcggtgattttcactattctcatcatgcttcttcaggtgatgcgggtctcattagtatcttraatttcttctacctgtgggtgattttcactattctcatcatgcttcttcaggtgatgcaggtctcattagtatcttaaatttctgcctgtcggtgtgattttcactattaaaatgaagaaaagatcaggttaggacattactgggcatatg

SEQ ID NO: 178579 - DNA, 486 bp, Homo sapiens
cctgtttagcttttgaactatgcattttgttagtaatatattttaatataccacaataggttaacttctaatctacttttcattggttatatgaatcacaactcgatacttgcttaaagattgctagcaggatgtaaataatctatgtgttttaatgcattttattagaaaatcttaaggcctttttactatccagraatattttgtctattttgcactgtcttccggattagatcaggaattttatttattcattcatttactcagatagttgtttattatttgttgttcatttattcatttatttgttttctttttacttcattttgaatgggtaatatttgtatgtagttcaaaatttaaaagatacactaaagtatacaatgaaaagaaaattttctctcattttcattttctgttagatttttcatttccactcttacattctactttcggttttatttaagtttgttattattgttgtta

SEQ ID NO: 178580 - DNA, 470 bp, Homo sapiens
cttattacaattattttctctctgaacagctcatgttttcttttcttctcaccatttcttccctatgaagacatatttaatgctctgttattaataaaactgcctcaataactttacaattaagtatgatattttcgtgctgacttttagcagatctacagcaacatttttgtggttagtattcttcctttggttgtttctccttcttcttccatttctttcctattttattatgtttattttgtattagtctattattgtttgttttgaattatttctcttctttgcaccasgtaactcttcctgtaagataatctaggctcaggtacttggttgccacaatttccctcatgttttaggattatttgcatgtcaatgagatcaccccagccagtcaagattagcaccatagggctgttcacaatggtggtatcccttctcctcctagccacaaaactatgttcctctct

SEQ ID NO: 178581 - DNA, 429 bp, Homo sapiens
ttacagtctttgccttaattttcattgttgaagatatgactgttgcttcctacttcagggtgtactacttacttgataaagtgtactacgtatgcttttataagattcctcgcaatgggtatgctgagctatatatttctgcactcattattcaaccttctaaacatttagaaataccccctgcctccattttgcacttcagagttttacgtttctcttgtcctttgaagttgccatttttattttgatccttattttctatttgtttttcagtgatttccaagagaagaaaatgaaaagaaaaactttctgctgcaacttaaaaatacatgtwctctcagatatgtagaaacaagaaaataagctttgttagtcaagaactgtcccatcttatgttgatttcatcactatggaaaggatgtagttgta

SEQ ID NO: 178582 - DNA, 571 bp, Homo sapiens
tattctgtgaataaaattgtcttaaggaattattaacatcaacataataattgttcaaataacagttacaattttaaaaaaatgatatccaataaaaatacttacttastattgcactgcagatatcaaaaattgtgaggtctgatggcttctaagcaagatactgcactgagagcttaacatatttatatcacttgactcttttcacatcattcaaataagtgccatgggtactctcattttaaagatttaaaaaacgtcagtaacttttacaactcatatttcatctttccattttattgcaaatagtcctatatattttccaatgaaattcacttgttactttagatatgtatttccagttctataatattgaaattgactagagattatccattggtccttatgtatgtaccttgttttgtgtgtgtgtgggggggggggggtggatatgtctttgcaaacatctaatctggtaaattgggcagtgtaatgattgaactataattaaaaaatacatctgtacctgcagtttaagtgatagatttgaagggagctccatgacttaaag

SEQ ID NO: 178583 - DNA, 423 bp, Homo sapiens
aattgtttatttctctgaaatttgtccatgaaacaggcatgggcttcaagctatatgccgaaaccatataagactttggcatatctcttctggggagtaggcatgtgagtaaactgtatgcattgagaagaaaattggttgcttgttgactacaaatgtagactgtagtaaaagcaatgctatttgttcactggattttgttttaattttcttctttggaataaaaaacatatttccagtttttygtgtatttgtgtgggtcccagagcatagctctgaccaacaaaaaaatgtaagaaagaaagtgaagtacttcatttaaatcctaaatcctaaaatctacattgttttccatttttgctgtgtgtgtgtgtgtatgtgtgtgtgtgtgtgtgtgtgctttccttaatctgtatatgataa

SEQ ID NO: 178584 - DNA, 571 bp, Homo sapiens
tattctgtgaataaaattgtcttaaggaattattaacatcaacataataattgttcaaataacagttacaattttaaaaaaatgatatccaataaaaatacttacttagtattgcactgcagatatcaaaaattgtgaggtctgatggcttctaagcaagatactgcactgagagcttaacatatttatatcacttgactcttttcacatcattcaaataagtgccatggktactctcattttaaagatttaaaaaacgtcagtaacttttacaactcatatttcatctttccattttattgcaaatagtcctatatattttccaatgaaattcacttgttactttagatatgtatttccagttctataatattgaaattgactagagattatccattggtccttatgtatgtaccttgttttgtgtgtgtgtgggggggggggggtggatatgtctttgcaaacatctaatctggtaaattgggcagtgtaatgattgaactataattaaaaaatacatctgtacctgcagtttaagtgatagatttgaagggagctccatgacttaaag

SEQ ID NO: 178585 - DNA, 571 bp, Homo sapiens
tattctgtgaataaaattgtcttaaggaattattaacatcaacataataattgttcaaataacagttacaattttaaaaaaatgatatccaataaaaatacttacttagtattgcactgcagatatcaaaaattgtgaggtctgatggcttctaagcaagatactgcactgagagcttaacatatttatatcacttgactcttttcacatcattcaaataagtgccatgggtactctcattttaaagatttaaaaaacgtcagtaacttttacaactcatatttcatctttccattttattgcaaatagtcctatatattttccaatgaaattcacttgttactttagatatgtatttccagttctataatattgaaattgactagagattatccattggtccttatgtatgtaccttgttttgtgtgtgtgtgggggggggggggtggatatgtctttgcaaacatctaatctggtaaattrggcagtgtaatgattgaactataattaaaaaatacatctgtacctgcagtttaagtgatagatttgaagggagctccatgacttaaag

SEQ ID NO: 178586 - DNA, 571 bp, Homo sapiens
tattctgtgaataaaattgtcttaaggaattattaacatcaacataataattgttcaaataacagttacaattttaaaaaaatgatatccaataaaaatacttacttagtattgcactgcagatatcaaaaattgtgaggtctgatggcttctaagcaagatactgcactgagagcttaacatatttatatcacttgactcttttcacatcattcaaataagtgccatgggtactctcattttaaagatttaaaaaacgtcagtaacttttacaactcatatttcatctttccattttattgcaaatagtcctatatattttccaatgaaattcacttgttactttagatatgtatttccagttctataatattgaaattgactagagattatccattggtccttatgtatgtaccttgttttgtgtgtgtgtgggggggggggggtggatatgtctttgcaaacatctaatctggtaaattgggcagtgtaatgattgaactataattaaaaaatacatctgtacctgcagtktaagtgatagatttgaagggagctccatgacttaaag

SEQ ID NO: 178587 - DNA, 485 bp, Homo sapiens
caataggtaatcctcagataatccccaggaactttttcaccctaacattcatttttcaccctaacactactatttacctttcctctgacaataccatctttgaggcactgtgttcccatcatttgatgattacttttgcttggttattaggacacagggtacactcactatgccatgatccagaaatctgggttattctagaaatagatcttcagcacatatacagaaaaaggtacagaaatacagagaaggcctttcactgataattgctcactatgacttccagagaaattctgcccctattctgggggcttttcttgagttataatctgataaataatttatgaagcaaaaacacagttcacaataggtagctaatttattactattagtattattcttacagtarataggtcaatgccatggaattttctatctttacaactcactcatataatcccataaggaaattaataataaagctt

SEQ ID NO: 178588 - DNA, 417 bp, Homo sapiens
gcctgttcatatcctttgaccatttttaatgtagttgtttgttttttgcctgytgatttattcacttacttatagattttttatattagacctttgttggatggacactttgcaaatattttgtcccattctgtaaattgtctgtgtactctgttgatagtttattttgctgtgcagaagctcattaattagctcccacttgtcaatttttatttctgttgcaattgcttttggagtcttcatcatgacacctttgccaaggcctatgtccagaatggtatttattgggcaaaacgtgaatttttaaaatatgctgtacatgattctaagattttgcaaagacataagtgaaaattttgaacactattagtattcttagtgtacaaaattcttcttaggttaatattttggtttaat

SEQ ID NO: 178589 - DNA, 579 bp, Homo sapiens
tgcctggacactatattttttgaacaatggtgcacatgtacaattttttgctgaattaatcaaatgatattaatgtagttttgaaataaattaaccaaaacatgtccagtttaatactatttttagttatattcattgatgatgctaagaatggaacacagatgaggagagattcatgggtaggcatagtaaaaggaaaataagacttactgggttgctttactgtcagttaagaaaacagaaacaaagacatatgcatagaatgagtatgggcccactgtaaaagtaaaatagctattagcttggttattgtatagttaggaattatgactgtcacattaatttatttgaagactttgaaattcaggggttaattattacaaaaaacatttattgtctcatgaaacttatggaaaataaaagtgtaaccaagcattaagacattatagaaattaggatgcaaatataatcaagacatatttccagccaattttctctgctctacttttcatgttaacattttaccttttktcatgctataaagcgtttataacatgtcattccataaggggcaaacag

SEQ ID NO: 178590 - DNA, 584 bp, Homo sapiens
tagatatttcttctgccaaatatttacttttttttwtatttttaaattttattttttattttttttgagatggagtctcattctgtcacccaggctggagtgcagtggtgcaatcttggctcactgcaacctctgcctcccgggttaaaacgattctcctgcctcagcctcccaagtggctgggattacagatacgtgccaccatgcccggctaattttttgtatttttagtagagacggggtttcactatgttggccaggctgatcttgaattcctgacctcaagtgatgagcctgccttggcctcccaaagtgctgggattataggcatgagccactgcacccagctccaaatatttcatttcattgctcataagtttctcctttcacaaaacactagggcacaaacgtaattcaggaaagttctttgttattttataacaaggatggcctttcatccagtttccaataacatgttccttattttatctgagaccttatcaggaggtctttaccataccgtccatatactaccaacattctgatcacaaccactaaaataatctctaagacaactgaggctt

SEQ ID NO: 178591 - DNA, 584 bp, Homo sapiens
tagatatttcttctgccaaatatttactttttttttkatttttaaattttattttttattttttttgagatggagtctcattctgtcacccaggctggagtgcagtggtgcaatcttggctcactgcaacctctgcctcccgggttaaaacgattctcctgcctcagcctcccaagtggctgggattacagatacgtgccaccatgcccggctaattttttgtatttttagtagagacggggtttcactatgttggccaggctgatcttgaattcctgacctcaagtgatgagcctgccttggcctcccaaagtgctgggattataggcatgagccactgcacccagctccaaatatttcatttcattgctcataagtttctcctttcacaaaacactagggcacaaacgtaattcaggaaagttctttgttattttataacaaggatggcctttcatccagtttccaataacatgttccttattttatctgagaccttatcaggaggtctttaccataccgtccatatactaccaacattctgatcacaaccactaaaataatctctaagacaactgaggctt

SEQ ID NO: 178592 - DNA, 584 bp, Homo sapiens
tagatatttcttctgccaaatatttacttttttttttatttttaaattttattttttattttttttgagatggagtctcattctgtcacccaggctggagtgcagtggtgcaatcttggctcactgcaacctctgcctcccgggttaaaacgattctcctgcctcagcctcccragtggctgggattacagatacgtgccaccatgcccggctaattttttgtatttttagtagagacggggtttcactatgttggccaggctgatcttgaattcctgacctcaagtgatgagcctgccttggcctcccaaagtgctgggattataggcatgagccactgcacccagctccaaatatttcatttcattgctcataagtttctcctttcacaaaacactagggcacaaacgtaattcaggaaagttctttgttattttataacaaggatggcctttcatccagtttccaataacatgttccttattttatctgagaccttatcaggaggtctttaccataccgtccatatactaccaacattctgatcacaaccactaaaataatctctaagacaactgaggctt

SEQ ID NO: 178593 - DNA, 584 bp, Homo sapiens
tagatatttcttctgccaaatatttacttttttttttatttttaaattttattttttattttttttgagatggagtctcattctgtcacccaggctggagtgcagtggtgcaatcttggctcactgcaacctctgcctcccgggttaaaacgattctcctgcctcagcctcccaagtggctgggattacagatacgtgccaccatgcccggctaattttttgtatttttagtagagayggggtttcactatgttggccaggctgatcttgaattcctgacctcaagtgatgagcctgccttggcctcccaaagtgctgggattataggcatgagccactgcacccagctccaaatatttcatttcattgctcataagtttctcctttcacaaaacactagggcacaaacgtaattcaggaaagttctttgttattttataacaaggatggcctttcatccagtttccaataacatgttccttattttatctgagaccttatcaggaggtctttaccataccgtccatatactaccaacattctgatcacaaccactaaaataatctctaagacaactgaggctt

SEQ ID NO: 178594 - DNA, 547 bp, Homo sapiens
aaaagaaatccattgctaggcctgatgcagaggctcatgcctgtaatcccagtactttgggaggccaaggcaggtggatcacctgagatcaagagttcgagaccagcctggccaacatggtgaaaccttgtctctactaaaaatacaaaaattagctgggtgcagtggcgggcacctgtaatcccagctactgaggaggctgagtcaggagaatcactcgatcccaggagatggagtttgcactgagctgagatcacaccattgcactccagcctgggcaacagagcaaaaactccatctcaaaaaacaaaaagaaaaagaaaargaaaaagaaaagaaaagaaatccattgctaggaaagaggtaggcctagaaggtttcatgcttaatattttattatacagctcaagtaatagtgggccttgatgaccattaaactgagtttccccaccttatttctgatgtttaagtatgcaccccctgcttccattctagaatttcagatcattttgaaagtagcaagaagaaagtgactcatttatacaca

SEQ ID NO: 178595 - DNA, 564 bp, Homo sapiens
catttatcatttaatcttttcttcttgatgcacattccaagtaccagattgctcaatatataacacgtcagggtaaaagctgagctgaaygttgccctggaagtcacgctgatttaaagaaaaaataaatacaactttagtctagctctgcaggctctactgctcctttgtgcctgtcctctgtgggtacctcattgatagcacatattttcctttattgtttagtttttgcatgtgcctttgtttttctactagactgcaagtccctcaggtcttaggactattttactgaatcaaaaccttgcctctaatcacctgtgtagacttagacaacttgcttaacttctctgagccttggttgccttatttgaaatggaaataataatagctattttatattgtaaggatcaaaggagataaatcttataaaatatactatcatagtacttgggacatcataaatgcttattataagaaggaaaataggcatcgggcctaaaacagtggttaaaagctaacaatggaatgaaatgtctccaataatcttgggttctccagacgagg

SEQ ID NO: 178596 - DNA, 564 bp, Homo sapiens
catttatcatttaatcttttcttcttgatgcacattccaagtaccagattgctcaatatataacacgtcagggtaaaagctgagctgaatgttgccctggaagtcaygctgatttaaagaaaaaataaatacaactttagtctagctctgcaggctctactgctcctttgtgcctgtcctctgtgggtacctcattgatagcacatattttcctttattgtttagtttttgcatgtgcctttgtttttctactagactgcaagtccctcaggtcttaggactattttactgaatcaaaaccttgcctctaatcacctgtgtagacttagacaacttgcttaacttctctgagccttggttgccttatttgaaatggaaataataatagctattttatattgtaaggatcaaaggagataaatcttataaaatatactatcatagtacttgggacatcataaatgcttattataagaaggaaaataggcatcgggcctaaaacagtggttaaaagctaacaatggaatgaaatgtctccaataatcttgggttctccagacgagg

SEQ ID NO: 178597 - DNA, 564 bp, Homo sapiens
catttatcatttaatcttttcttcttgatgcacattccaagtaccagattgctcaatatataacacgtcagggtaaaagctgagctgaatgttgccctggaagtcacgctgatttaaagaaaaaataaatacaacyttagtctagctctgcaggctctactgctcctttgtgcctgtcctctgtgggtacctcattgatagcacatattttcctttattgtttagtttttgcatgtgcctttgtttttctactagactgcaagtccctcaggtcttaggactattttactgaatcaaaaccttgcctctaatcacctgtgtagacttagacaacttgcttaacttctctgagccttggttgccttatttgaaatggaaataataatagctattttatattgtaaggatcaaaggagataaatcttataaaatatactatcatagtacttgggacatcataaatgcttattataagaaggaaaataggcatcgggcctaaaacagtggttaaaagctaacaatggaatgaaatgtctccaataatcttgggttctccagacgagg

SEQ ID NO: 178598 - DNA, 597 bp, Homo sapiens
catcttttgtagtaatccccttggcctgttgaatattgaggtatgagactgcttagctctttctccaccatctcattcataaaaggaaaaagaaagggtggaacagaggaaagattttcctgttactttcttttgcattgatcactgcacacatcatcatcccmatcattgcagtggagagttggtggagacccaagtcggggacctgcctttgtgagcggaagaatcaggcatgagatacaatgtctaatttccagcctcccaattgcctaggcagacctcatcctctgaattcagctcttcctaaatgagaggggcagggagggagttctcctgctggcagagtgttgaaacacgatccatgacataggcctaggaggaagattttgcttgggaaatgtaagagcttcagtattttgcacaccaagcttgtcttctaatgacagccttgggagccagacatttctaagtgctaattagaggtgttgattatcgtggtagccctatgggggctcaacccaagcccgagagcaaaaggcacagataaaataaagattgttacagtagctcccagtgtcacatgaacatcaatactgg

SEQ ID NO: 178599 - DNA, 579 bp, Homo sapiens
tatatgtttgtttaatgatgtctccacggtctgtagaattaatatttaatagcacttgtcagcaagattctatacaagggtttgttctgcctttttttaacgcttgttagtgattgtgtcttcctgggttgttcttctttaatattagarttactctttgcattggcagcaattttttactactttcaattttgcattatttggcgggtgtgggagataaggcataggcaacagaattttaaagacctttagtgctgcttctcttctcagtcataatacactgggcgaaagcaaggttttttgtttcttgttgtttttactagtagcacaggacctatcatatagtatgcactcaaaaatgtttattgtttcattactactattatcacagctatcaacattagcaaagaattgggcttctaatagtaggcagatggtcaagttacatatatcacaaagatatgattttggtttgactcttctatctcaaagttatttgtcctaattctaaatggaatatcatactgtgatattaaagaaaacacaattagcaaattatgtagtctaaatcccatgtcc

SEQ ID NO: 178600 - DNA, 443 bp, Homo sapiens
tttttctgagaccctcttaggttggactggagagaagatttggtgcagtcttctggggaatatcattggctcagagtccgggctgtggctgagtcagctggscagacaccagaacacagcttcctgccatcaaaaccccaggtggcagaaacagtcaccagtttggccaggaatacatggcgccaccactcacaaaaccactcattttttcctataaaacaatcatcacctagcaggatgccaagaaaatcaatcatgactaaactcccaatttggtttgattcactgaccacatgtagacatgatcataatgtttggttatcattcttcataataatcatctgtgggtctgcagtaactgtgggcctgaacaaaccagtgatttttcaggtgaatctgccttgaaacaaatttccatcttaggaatcagttgtttagttcat

SEQ ID NO: 178601 - DNA, 443 bp, Homo sapiens
tttttctgagaccctcttaggttggactggagagaagatttggtgcagtcttctggggaatatcattggctcagagtccgggctgtggctgagtcagctggccagacaccagaacacagcttcctgccatcaaaaccccaggtggcagaaacagtcaccagtttggccaggaatacatggcgccaccactcacaaaaccactcattttttcctataaaacaatcatcacctagcaggatgccaagaaaatcaatcatgactaaactcccaatttggtttgattcactgaccacatgtagacatgatcataaygtttggttatcattcttcataataatcatctgtgggtctgcagtaactgtgggcctgaacaaaccagtgatttttcaggtgaatctgccttgaaacaaatttccatcttaggaatcagttgtttagttcat

SEQ ID NO: 178602 - DNA, 443 bp, Homo sapiens
tttttctgagaccctcttaggttggactggagagaagatttggtgcagtcttctggggaatatcattggctcagagtccgggctgtggctgagtcagctggccagacaccagaacacagcttcctgccatcaaaaccccaggtggcagaaacagtcaccagtttggccaggaatacatggcgccaccactcacaaaaccactcattttttcctataaaacaatcatcacctagcaggatgccaagaaaatcaatcatgactaaactcccaatttggtttgattcactgaccacatgtagacatgatcataatgtttggttatcattcttcataataatcatctgtgggtctgcagtaactgtrggcctgaacaaaccagtgatttttcaggtgaatctgccttgaaacaaatttccatcttaggaatcagttgtttagttcat

SEQ ID NO: 178603 - DNA, 409 bp, Homo sapiens
gttgagttgggaatgtgagttttagagccatgggtatggggatagtgactgaaaataaaagagagacaagcatggtggctaacacctttaatcccagctacttggraggctgtggcatgagtatcccttgaacccaggaggtggaggttgccttgagccgagattgcaccactactgtccagcctgggcgagagagcgagactctatctcacaagaaaagaaaatcccctgaagggaaagagtagaaaagaatagagggctcagcattgactctggaaaactttaaaactctaactgaagaaatgttttttctgttcatagaaaaattaaaactattaggttggtgcaaaactaactgcagttttgccattttttacttgggtggtttgtgcagccatagcaaaatacc

SEQ ID NO: 178604 - DNA, 434 bp, Homo sapiens
gttgggaatgtgagttttagagccatgggtatggggatagtgactgaaaataaaagagagacaagcatggtggctaacacctttaatcccagctacttgggaggctgtggcatgagtatcccttgaacccaggaggtggaggttgccttgagccgagattgcaccactactgtccagcctgggcragagagcgagactctatctcacaagaaaagaaaatcccctgaagggaaagagtagaaaagaatagagggctcagcattgactctggaaaactttaaaactctaactgaagaaatgttttttctgttcatagaaaaattaaaactattaggttggtgcaaaactaactgcagttttgccattttttacttgggtggtttgtgcagccatagcaaaatacctgagattggtaatttataagtaatagacat

SEQ ID NO: 178605 - DNA, 470 bp, Homo sapiens
gattgcaccactactgtccagcctgggcgagagagcgagactctatctcacaagaaaagaaaatcccctgaagggaaagagtagaaaagaatagagggctcagcattgactctggaaaactttaaaactctaactgaagaaatgttttttctgttcatagaaaaattaaaactattaggttggtgcaaaactaactgcagttttgccattttttacttgggtggtttgtgcagccatagcaaaatacctgagattggtaatttataagtaatagacatttatttctcaaagttctagaggctgagragtctaagatcaaggcaccagaaggttcagcgtctagtgaaggccaggtctctgcttccaggatgctactttgaatgctgtgccccttcatggtacaagggatcaaagaacagaagggcctggctactttccttctgccattttataaaataactaatcccatt

SEQ ID NO: 178606 - DNA, 576 bp, Homo sapiens
cagctcttcatgtaattaaggctacaaaatattttctctggcttccaaaataggtagacaatttttctaactcgcataaaatattatccatcattcaagactcctatgaaaacatgtattaattattgatttggactcyataaggcttaattacacaaggggaaacctgcttataaaataatatttaacaaattgttcttaagaatctacacattacctgtgtaatttaaaattagtgagcaatttctttcagctttggtgtttaacttgcttagagttgatcatgttaacactgaattcaagtaaagacagttctaacattgcaaagattgtaggtaatttaaatatctacatagaacattttaactttgccttgtttcaaccctgcataaaaatttaaactccaagtgtatgtcaacattttttttccttcagctatgcaaagtgttacaagactaagcaaagaatctttaaaaaggtgatgctaggtagcatttgtacaacaaataggcatttcagtgactgtcaataaagtaatggaaaaatgcctctatcctcagctatgtgtaaccccct

SEQ ID NO: 178607 - DNA, 485 bp, Homo sapiens
cttgccaccacttggttgtgtgtgtcttttctattacaaccatcattgtgggcgtgaagtagtttctcactgtggttttgatctgcatgtccttaatagctattaattttgagcatcattaactyacttgctgtccttttgcataatcttctttgaagcaatgtctatttaaattctgtcccagtttttaactaggtatttgcttctattattgaggcatcagagttcttatgtcttcaggatataagtccctttttagatgtatgactggcaaatattttcactatcctgtagattgtcttttcactttcttgacagtaccctttgaaacacaaacattttgcattttgatgcagtctaattaatcaacttttttctttttgtttgtgcttttggtgtcataactaagaaacagttacttaattccaaattacaaatatttactcttgtgttttcatctataagttttatagttttagcttata

SEQ ID NO: 178608 - DNA, 485 bp, Homo sapiens
cttgccaccacttggttgtgtgtgtcttttctattacaaccatcattgtgggcgtgaagtagtttctcactgtggttttgatctgcatgtccttaatagctattaattttgagcatcattaactcacttgctgtccttttgcataatcttctttgaagcaatgtctatttaaattctgtcccagtttttaactaggtattkgcttctattattgaggcatcagagttcttatgtcttcaggatataagtccctttttagatgtatgactggcaaatattttcactatcctgtagattgtcttttcactttcttgacagtaccctttgaaacacaaacattttgcattttgatgcagtctaattaatcaacttttttctttttgtttgtgcttttggtgtcataactaagaaacagttacttaattccaaattacaaatatttactcttgtgttttcatctataagttttatagttttagcttata

SEQ ID NO: 178609 - DNA, 610 bp, Homo sapiens
ggacatgtagttatttttattttctgttttcagtaggagacattgtattagtctgttctcatgctgctaataaagatgtacccaaaactggctaatttataaaggaaagaggtttaatggactcacagttccacatggctggagaggcttcacaaacacagcagaagatgaaaaaagaacaaagggatgtcttacatggaggcaggcaaaagagagcatgtgcagggtracccctccttataaaaccatcagatctcacaagacttactaactatcacaagaacagcacaagaaagacttgtccccacaattccattacctccaaccaggtccctcccaggaattatgggagctacaattcaagatgatagttgggtggggacacagccaaaccatatcagacagtaaacttggaatggataatgatgtcagtttcaaacctgttcaacaattttatttatttcagtgtcttagcctatgcctatttttggactacttttaactattacaagtcatatgagggtgacagtaatatataatgcctgatacaacagagacagtagaagaaataaaagattaagagtcaaaacagttgttctaaaaatacctg

SEQ ID NO: 178610 - DNA, 567 bp, Homo sapiens
agcaatatttcaagcaaaacatttaaaaaaaaagattacttgagttttactattacttcagtccattccattaactcttgttttgcttgatattcattaacatttcatctcttcatgagtcctgtatgttttaattttattccaacctcacaatcctcaaaattatcagaaatccacattgagaacacctgtcaaagttctatagctgattataaaccatcttttgaagaggatcaaaacaagacacsaattgtccccaaatgacaaaatgtccagggtagttacagttaaaaacacaattgacaaataattttgtttatctccatggtttacaatactttaacataaccttaattatgattgacagcatatactcagacattagaatttctagaaatcccatgcaattttggaacatatattaatattattccttaaaatataacatgaagaagattaaacatcattttggcaatcccacatatctaaacatgtctaataatacagtttaactccttctggatgctccaggggccccgtgtagcatccaaaagatagggtccagga

SEQ ID NO: 178611 - DNA, 577 bp, Homo sapiens
atggcgtggatactcagtctgagattttgggtgtcttctgcarctgcccaaaagtagcagttgcaaagttgattgctacccattttttctactccattttgttacagatgttttaagttgaattcttcgaaaagcagatcctggggccagtatatgggtgaatttagttcatttggcagattctttcaggaataatctttaggggatcacatatgtgagactagaataaaaagagaccactataaaatatatggtcaacagattactgctgcagagaaacagtgtagaaaatacctcagagttacctcaacagtgggagatggcagtcaagatagttccacatggaatcccttgtttcactcccattcttagggagcataaacgctctggaatttcttgcttgtcccatgcatcctggataaatacccactcctactcacagttggtagccatgggatctggagatgccaaatactaaggggggaaatggtgagatattgatggcatctgctctaagtaatatccacaatcttgtctttttttctgtatgttattttgttggacctcttatcctttg

SEQ ID NO: 178612 - DNA, 624 bp, Homo sapiens
tggtaaaaaaaaaaaaaagtttctgaaaaggatttggatactctattcaaggcaggctaacctaattaaattgataattcagatcaaagagcagtctggagctaatgtcatgttttctaaatgcacctgcctagttacagttgtcatactgagttttatatatgactgtatacgatagtgttcrgtgttcagtcatgattcttttctagttagtggtttatacattttcttttcagaaaagttcagaggaaaatcatttgctccaacaatgtttctggatatttaggacatcggattcttaaaacagctgtataccaagcaatggtatacaacaggtgcacttatgtgactttgaatatttgaagtcttataagatttattctcataaacctgagtatactagcataggttggttaaggatagcaattttccacattgcttaaatttctgagtaatttcttcttttttatcttgagtctcataaaacatatatgacactagctgacctaatccttcaacaaattacagaaaaaaagactttatagtaatgattaacatataccaagtactttatattttctgaattctgaatttggtatgtatgacaatttattcaattccaat

SEQ ID NO: 178613 - DNA, 624 bp, Homo sapiens
tggtaaaaaaaaaaaaaagtttctgaaaaggatttggatactctattcaaggcaggctaacctaattaaattgataattcagatcaaagagcagtctggagctaatgtcatgttttctaaatgcacctgcctagttacagttgtcatactgagttttatatatgactgtatacgatagtgttcagtgttcagtcatgattcttttctagttagtggtttatacattttcttttcagaaaagttcagaggaaaatcatttgctccaacaatgtttctggatatttaggacatcggattcttaaaacagctgtataccaagcaatggtatacaacaggtgcacttatgtgactttgaatatttgaagtcttataagatttattctcataaacctgagtatactagcataggttggttaaggatagcaattttccacattgcttaaatttctgagtaatttcttcttttttatcttgagtctcataaaacatatatgacactagctgacctaatccttcaacaaattacagaaaaaaagactttatagtaatgattaacatataccaagtactttatattttctgarttctgaatttggtatgtatgacaatttattcaattccaat

SEQ ID NO: 178614 - DNA, 546 bp, Homo sapiens
ccctggtaacaaattgtatattcaccctgtgatgatttcaccctagcaacaactgattgatatgagtttggcgataataagtctgcagtgggagcagagaggcagtggaagccagtggagaaaatgaggtgaggaattcagacagccaagtataaaatggtccccagaaaaactccagctggcctgcacactggcagaagggtggagcctcggaagttagcatcttttgcagcggggaggagcttggcctctcctcttctggggtggtaaactgggattccatctgtgaggtgggaaacctactaccaggactctcgctttgctgagagtccctgtttccccttttaatttccttttcacccaatagaacctgtccttctcagcattcaaagtgtctgcaagcctaatctttcatgatcacgtgacaagaacccggcttttaggkgaactaaggagaaagtcctataacagaatttagaactcaaaattgtatgtttagatatagttttcctaaacagtcacaagaaataaacaacaaacatcatc

SEQ ID NO: 178615 - DNA, 603 bp, Homo sapiens
ttctgtttataaagccaaagcaactaaattaggtatgaaacacatacatgtgtgttgtgtttgaggccagggcacagatagccaatgcgctgtctttgtagaccttacataatagagggaaagtgggacaataatccaataagtaaataaattaaaattgtaaatgtcagaggtggaagtgctaggtagaaaataagcagggtaagagtagttgtgggggartggaggtgcttttggtctggaaaggcctctctggagagatgtcattgagtacactccgaatgatgtaaaggagctgttaatacatcttgagaaaatcttatgcaagagtgtaatgaataataaggaaacaggtcccaagatgacaacaagtttgattcatttgatttatagctaaggagtctgttatgtctggacagaatggtatgaaatgaggttagaaagatagacaaaagcagattgtatttaggatattgtaggctgtggtaaagagttcggactttaaatgtaatagaaaaccattggagacttttaaaaagcaaaaagtgatgtgataggatttgcatttttaaaactgttactccagctgatttgggaaaaagt

SEQ ID NO: 178616 - DNA, 603 bp, Homo sapiens
ttctgtttataaagccaaagcaactaaattaggtatgaaacacatacatgtgtgttgtgtttgaggccagggcacagatagccaatgcgctgtctttgtagaccttacataatagagggaaagtgggacaataatccaataagtaaataaattaaaattgtaaatgtcagaggtggaagtgctaggtagaaaataagcagggtaagagtagttgtgggggaatggaggtgcttttggtctggaaaggcctctctggagagatgwcattgagtacactccgaatgatgtaaaggagctgttaatacatcttgagaaaatcttatgcaagagtgtaatgaataataaggaaacaggtcccaagatgacaacaagtttgattcatttgatttatagctaaggagtctgttatgtctggacagaatggtatgaaatgaggttagaaagatagacaaaagcagattgtatttaggatattgtaggctgtggtaaagagttcggactttaaatgtaatagaaaaccattggagacttttaaaaagcaaaaagtgatgtgataggatttgcatttttaaaactgttactccagctgatttgggaaaaagt

SEQ ID NO: 178617 - DNA, 603 bp, Homo sapiens
ttctgtttataaagccaaagcaactaaattaggtatgaaacacatacatgtgtgttgtgtttgaggccagggcacagatagccaatgcgctgtctttgtagaccttacataatagagggaaagtgggacaataatccaataagtaaataaattaaaattgtaaatgtcagaggtggaagtgctaggtagaaaataagcagggtaagagtagttgtgggggaatggaggtgcttttggtctggaaaggcctctctggagagatgtcattgagtacactccgaatgatgtaaaggagctgttaatacatcttgagaaaatcttatgcaagagtgtaatgaataataagkaaacaggtcccaagatgacaacaagtttgattcatttgatttatagctaaggagtctgttatgtctggacagaatggtatgaaatgaggttagaaagatagacaaaagcagattgtatttaggatattgtaggctgtggtaaagagttcggactttaaatgtaatagaaaaccattggagacttttaaaaagcaaaaagtgatgtgataggatttgcatttttaaaactgttactccagctgatttgggaaaaagt

SEQ ID NO: 178618 - DNA, 603 bp, Homo sapiens
ttctgtttataaagccaaagcaactaaattaggtatgaaacacatacatgtgtgttgtgtttgaggccagggcacagatagccaatgcgctgtctttgtagaccttacataatagagggaaagtgggacaataatccaataagtaaataaattaaaattgtaaatgtcagaggtggaagtgctaggtagaaaataagcagggtaagagtagttgtgggggaatggaggtgcttttggtctggaaaggcctctctggagagatgtcattgagtacactccgaatgatgtaaaggagctgttaatacatcttgagaaaatcttatgcaagagtgtaatgaataataaggaaacaggtcccaagatgacaacaagtttgattcatttgatttatagctaaggagtctgttatgtctggacagaatggtatgaaatgaggttrgaaagatagacaaaagcagattgtatttaggatattgtaggctgtggtaaagagttcggactttaaatgtaatagaaaaccattggagacttttaaaaagcaaaaagtgatgtgataggatttgcatttttaaaactgttactccagctgatttgggaaaaagt

SEQ ID NO: 178619 - DNA, 488 bp, Homo sapiens
aaacatggaaaagaaagaaagataccaaaacatgtataaggacataaccccattggcactataaagcaactrtataatcaagtctacataacaaccagctaacagcacaatgacaggatcaaatcctcacatatcaatattgacccttaatgtcaatgggctgaatgccccactaaaaggcatacaggggcaagttggataaagaagccaagacccacctgtctactttcttcaagagacccatatcacaagtaatgacagccataggcacaaaataaagagatggagaaaggcctattagccaaatggaaaacaagagctggggtagctattcttatatcagaaaaaaacagactttaaactagtaatgatcagaaaggacaaagaagggcattgcataatgataaagagctcaatctaacaagaaaacctaactatcttaaatatatatgcactcaacattggagtacccagattcataaaacagg

SEQ ID NO: 178620 - DNA, 444 bp, Homo sapiens
tgatatctttgaggtatgcctatactatatgtatgtgtgtgtstgtgtgtatgtgtgtgtgtgtgtttgtacatatatactataaatcttaatagatattaatcatcaatttataccaatcctattaagacagctaatttaaatgcatctaaaataaatgtcataatttaattataattttccaatatctggaatcaattaagtttctgaaaagtttcaagtgggccacccagtaataaacacaaaataaattgtgtctgctgtcctgttagtgataattttttattgctacctcagtttcagatgtcagagtaatgacttccatattctgattgaaatgcaaattgaagccatatgttggaaagcacaggctttcaatatcatcgctttcttattttaggcacagtaaaactatgtttataaaggctaacaattattcagata

SEQ ID NO: 178621 - DNA, 450 bp, Homo sapiens
tgatatctttgaggtatgcctatactatatgtatgtgtgtgtgtgtgtgtatgtgtgtgtgtgtgtttgtacatatatactataaatcttaatagatattaatcatcaatttataccaatcctattaagacagctaatttaaatgcatctaaaataaatgtcataatttaattataattttccaatatctggaatcaattaagtttctgaaaagtttcaagtgggccacccagtaataaacacaaaataaattgtgtctgctgtcctgttagtgataattttttattgctacctcagtttcagatgtcagagtaatgacttccatattctgattgaaatgcaaattgaagccatatgttggaaagcacaggctttcaatatcatcgctttyttattttaggcacagtaaaactatgtttataaaggctaacaattattcagataaattgt

SEQ ID NO: 178622 - DNA, 466 bp, Homo sapiens
tttttcttatttttctctgctggtttgaaatcagaactgaactagatattctttccaaattagaaggtacctctttcactgacaacaggaatttagaggayttggggtttagaacaatgttatttaagttcaataactggaaaatctcttgatgaagcaaaacctgcattaacatagtaatcatactttttggctgataaagaaaaataaacagctctcgaaaagaactttttccaaaaatgaaaacattctttagctttttagggtacttcatataaaataaaatgaagaaatttaaaatgacaaaaaagagaagtactctaaattcatcatcactctgcaaattatctttaccatataaaataccaaaaagaaaagaaatatcttagagaattaaacatttgttaaatctaaaaagatgaatctttcttcatgataaagttaagtgtctcttgattcaacatgt

SEQ ID NO: 178623 - DNA, 378 bp, Homo sapiens
tgacaaacaaacaaaaaaccaaaaacaacaacaacaacaacaaaaaacacaggtagkctatgcccttggcccatttctctgaagccaggtttcaactaaattgcggtcatactaagagactagccacggtcttagctttaatggattgataggtcacactaagagggatgggggaagtggttacggttaccagtggagtcctgagactcatcaaggtcttcttctagaatttatccagagtggaggagcaaatgaggccacaagataaagaccctggccttccccatctctaaccctcccaccaatccccattgccatcagcaggaggcctgcactcatggaactaaatttcagaccccaggacttagcattctgcct

SEQ ID NO: 178624 - DNA, 513 bp, Homo sapiens
agagagaacagaaatccaaggtccctttcttccagaagcgtatattctggtagggttttcmgaacaagtaaatggatgagcgtgtaatggaaaacgcacatgtcttggggaaacttgatatctattaatgcggagcttaagatatggaaggggaagaaatggccagttcacctgctttcaagccagtgtgaatcacgctgtcttcctcacttccttcccgcctttcaactctcaacagatatttctttgagcatctctcatgtgctaggtactggcaataggtcatgggcaagccaaacatcatcccacaaattgcatgtttgagcattgactatggtgagtgcaagcagataggccatagactctttcaagaatagtggctgccaatccttggagcaggagaggagcagattagatgagtgcacctgcctcagatggctccatgtgagacatcctgggaagggaggagggtgggaagaagaaaggataacaaccaaagtgacaacatagtaa

SEQ ID NO: 178625 - DNA, 513 bp, Homo sapiens
agagagaacagaaatccaaggtccctttcttccagaagcgtatattctggtagggttttccgaacaagtaaatggatgagcgtgtaatggaaaacgcacatgtcttggggaaacttgatatctattaatgcggagcttaagatatggaaggggaagaaatggccagttcacctgctttcaagccagtgtgaatcacgctgtcttcctcacttccttcccgcctttcaactctcaacagatatttctttgagcatctctcatgtgctaggtactggcaataggtcatgggcaagccaaacatcatcccacaaattgcatgtttgagcattgactatggtgagtgcargcagataggccatagactctttcaagaatagtggctgccaatccttggagcaggagaggagcagattagatgagtgcacctgcctcagatggctccatgtgagacatcctgggaagggaggagggtgggaagaagaaaggataacaaccaaagtgacaacatagtaa

SEQ ID NO: 178626 - DNA, 513 bp, Homo sapiens
agagagaacagaaatccaaggtccctttcttccagaagcgtatattctggtagggttttccgaacaagtaaatggatgagcgtgtaatggaaaacgcacatgtcttggggaaacttgatatctattaatgcggagcttaagatatggaaggggaagaaatggccagttcacctgctttcaagccagtgtgaatcacgctgtcttcctcacttccttcccgcctttcaactctcaacagatatttctttgagcatctctcatgtgctaggtactggcaataggtcatgggcaagccaaacatcatcccacaaattgcatgtttgagcattgactatggtgagtgcaagcagataggccatagactctttcaagaatagtggctgccaatccttggagcaggagaggagcagattagatgagtgcacctgcctcagatggctccatgtgagacatcctgggaagggaggagggtgsgaagaagaaaggataacaaccaaagtgacaacatagtaa

SEQ ID NO: 178627 - DNA, 572 bp, Homo sapiens
catgttttacaggtacagtttataagtgcatagaacaastctataaggagaacttctccctggtaatggtggttaaatctggagaagaagagaggggattgggatttggcatggtcatcgggaaagatgttggcctcatctataacattttgtttatttttacaaggtgaatgtattgctttggcaattaaaatttaatttacaaagagcataattataagcaccaacaaaaacatgcctgctggttttgatgattgacaatagcaattgtattgctaccacatttggattagggcatcctgcctaaccataactttttatcccaatatagtcttctacaaatataaggcccatcttctgattttgaatctgtctggactcacaaagtgtgacctaaccggaagagatcaaagccgcagatgtctattcaacaaagcagcaggaatagtcatacaaagaaaacactgaagcctaaaggaaagatagaattcatctggttttaccaccacccagaattccttttccttccatagcaatgcttctctaatcatcaaagccagttttttttcccc

SEQ ID NO: 178628 - DNA, 572 bp, Homo sapiens
catgttttacaggtacagtttataagtgcatagaacaactctataaggagaacttctccctggtaatggtggttaaatctggagaagaagagaggggattgggatttggcatggtcatcgggaaagatgttggcctcatctataacattttgtttatttttacaaggtgaatgtattgctttggcaattaaaatttaatttacaaagagcataattataagcaccaacaaaaacatgcctgctggttttgatgaytgacaatagcaattgtattgctaccacatttggattagggcatcctgcctaaccataactttttatcccaatatagtcttctacaaatataaggcccatcttctgattttgaatctgtctggactcacaaagtgtgacctaaccggaagagatcaaagccgcagatgtctattcaacaaagcagcaggaatagtcatacaaagaaaacactgaagcctaaaggaaagatagaattcatctggttttaccaccacccagaattccttttccttccatagcaatgcttctctaatcatcaaagccagttttttttcccc

SEQ ID NO: 178629 - DNA, 572 bp, Homo sapiens
catgttttacaggtacagtttataagtgcatagaacaactctataaggagaacttctccctggtaatggtggttaaatctggagaagaagagaggggattgggatttggcatggtcatcgggaaagatgttggcctcatctataacattttgtttatttttacaaggtgaatgtattgctttggcaattaaaatttaatttacaaagagcataattataagcaccaacaaaaacatgcctgctggttttgatgattgacaatagcaattgtattgctaycacatttggattagggcatcctgcctaaccataactttttatcccaatatagtcttctacaaatataaggcccatcttctgattttgaatctgtctggactcacaaagtgtgacctaaccggaagagatcaaagccgcagatgtctattcaacaaagcagcaggaatagtcatacaaagaaaacactgaagcctaaaggaaagatagaattcatctggttttaccaccacccagaattccttttccttccatagcaatgcttctctaatcatcaaagccagttttttttcccc

SEQ ID NO: 178630 - DNA, 572 bp, Homo sapiens
catgttttacaggtacagtttataagtgcatagaacaactctataaggagaacttctccctggtaatggtggttaaatctggagaagaagagaggggattgggatttggcatggtcatcgggaaagatgttggcctcatctataacattttgtttatttttacaaggtgaatgtattgctttggcaattaaaatttaatttacaaagagcataattataagcaccaacaaaaacatgcctgctggttttgatgattgacaatagcaattgtattgctaccacatttggattagggcatcctgcctaaccataactttttatcccaatatagtcttctacaaatataaggcccatcttctgattttgaatctgtctggactcacaaagtgtgacctaaccrgaagagatcaaagccgcagatgtctattcaacaaagcagcaggaatagtcatacaaagaaaacactgaagcctaaaggaaagatagaattcatctggttttaccaccacccagaattccttttccttccatagcaatgcttctctaatcatcaaagccagttttttttcccc

SEQ ID NO: 178631 - DNA, 593 bp, Homo sapiens
gaattccacttctacccattccctgaatgtgtgaacttggaaagtaaatrctccctgtgactctcagcttctcccggggtaaggtgggaataccaccaccacgttatggaatgttgaaggaaggaacatgctgatgcgtttgcaatgttggcaatggaggctgcttttaataatcacatcatatctgcagctcacaatctgcttcctggatctctttaaactgggttaggcattttgggaggccaaggcaggtggatcacctgaggtcaggagttcaagaccagcctaaccaacatggagaaacaccgtctctactaaaaataaaaaattagccgggcgtggaggcgcatgcctgtaatcccagctactccggaggctgaggcaggagaatcgcttgaacctgggaggtggagattgtggcgagccgagattccaccattgcactccagcctgggcaacaagagcaaaaactccttctcaaaaaaaaaaaaaaaaaaaaaaaaaaaaggattaatcacaaacctcatcagctttacaagaactgtgctcctttggcagagtttactaaatgtgttccctttggtgctcacatg

SEQ ID NO: 178632 - DNA, 571 bp, Homo sapiens
cctgaatgtgtgaacttggaaagtaaatactccctgtgactctcagcttctcccggggtaaggtgggaataccaccaccacgttatggaatgttgaaggaaggaayatgctgatgcgtttgcaatgttggcaatggaggctgcttttaataatcacatcatatctgcagctcacaatctgcttcctggatctctttaaactgggttaggcattttgggaggccaaggcaggtggatcacctgaggtcaggagttcaagaccagcctaaccaacatggagaaacaccgtctctactaaaaataaaaaattagccgggcgtggaggcgcatgcctgtaatcccagctactccggaggctgaggcaggagaatcgcttgaacctgggaggtggagattgtggcgagccgagattccaccattgcactccagcctgggcaacaagagcaaaaactccttctcaaaaaaaaaaaaaaaaaaaaaaaaaaaaggattaatcacaaacctcatcagctttacaagaactgtgctcctttggcagagtttactaaatgtgttccctttggtgctcacat

SEQ ID NO: 178633 - DNA, 487 bp, Homo sapiens
ggatgaattcccaatggtgcgattgctcatttctgacattctgtctgctgatcgtgggccacagcaccggttgtctctttctctgactcaacccaagtctgatgagatttcagtttcactgcagcattgcagcaatgagaaaacatcccatcatgcactgcttctagatattgtcaagagaagggtatattattatgcaaaagcagtgtctatttacagatgatgaaacgacaatttttcatggggtttttctttttatttaacatcttaactgtcaattccaacaaacacacttgttttcctctatgactaatctaagaaccaagatggccaacagcacaataccaactttttgtttgtttggtttttaaatatggcaaaattayatatgagcttcccattttacaggtttctaagaacatcttaatgaaaataacagaactcagaaaatccactgtcattttgtccagaaatattttgttagcat

SEQ ID NO: 178634 - DNA, 588 bp, Homo sapiens
cctgctgatggcttctctgtgcctctcattccccagaagcatgacacagtaagagagccaagggagctggaaagttctaccccagttcagtaggagacctcctgcaacagcatggataagtaatactccttagcccatggcttctgttttgtaaagtgaaagtaattcttatcaaccctaaccatgaagaagaaacataaatgttatgtcaaacaggaccatgcaagttttctttgaacactacacatttatggtgtggtggtgatttttaaatcgaggaaaatattcctagcaacctgtttgcacttcctgatcagggatgctctgaggctgtgtgcaagatgcatctcagagacccagctgcctgtgccatccaactctgccttctagaattttcttggggccctttggggaagctcatgacatctgcatgagcctgagagccggctacacctttctccacccagagtgaagtgacaygtggtggctccagtcccaggccagcactcttctcaagttcagtctaaaagcttttcttgaagctcgtttcacccactctgtttacagcagctgtggtgaggagaggag

SEQ ID NO: 178635 - DNA, 437 bp, Homo sapiens
gggggttaggtcaaggtgttagtggggctggtaccttcaggaggctccagaagagaattcgtttcttgccttttccagcttcttgaggctacccacattccttggctcagggctgcatcactctaactgctgtccccattgccacatctctttctctgaccctcctctatccctcttgtaaggacacttctgattctattgggtctatccagatagtcaataacactgtctccatctcaagatccttaacttaatcacatctaraaggtttctttgaccatgtaagaaacatatttaggccgggcgcggtggctcacacctgtaatcccagcactttgggaggctgaggcaggcggatcaccaggtcagaagatagagaccacggtgaaaccccgtctctacccaaaatacaaaatattagccaggcggggtggcgg

SEQ ID NO: 178636 - DNA, 527 bp, Homo sapiens
taagccatatacccagattatatacagacacatgcagggggctgcagagggactggaaaacctggtcccaggtggcctgtggaygggaaagccagcagacgtgtgaggggagaaaggagcttattaaacaaacctcactggcagcccttctcctcatctcttttccagatgagcctgaaaatgctccgccaagaattctaatgagaaacagatttcctctggctcagcctgtccttcacctgcagacttctaagcagagatactgctgtccactcctgccgagagtccaaggggggtttgttttaaattctcttctgcagcaattggagctttgaacgtttgagaacacatttcagatttctcttcttttatactttagccaaaaagcacggggtcaaaatatgaaaggaagcaaacacagtcatttggtggagggttggggctaatcaccccgaagtcctggtcgttcatcagcaagcccttaagttgaaagtgcagggatcccagtttgcacggagaaatgtttg

SEQ ID NO: 178637 - DNA, 543 bp, Homo sapiens
gtctgtcagccttctaagcaggcagtacccatggcagrctatggtggcatcatgccctcacagcctcttttgctcccacagcattagtcatgaccacccccactctcccagcaccttgtcctcgcctgaaggacagatcacattctcttgcagccgtttgtttactcacctgctgtcccacctgcttctgatcaccttaggcctgtgagccatcagcccctgattcacaaatggtgacgcaggaagcagtttacacctttgccgaccccagcacccaaacggccaagagtgaaggataaagcgtgctgttctcacactgccacgggagcttgagggctgagtacacaggtctaaagagaggagttgctgtcaaggggaaggttggccttcatagcacaaagccgagccatttgcttggtacagtgcctttccttagattcccgaggacttttcctagcagggcaatgggaggagctggcccccaaaggaaggttggagtcacccaccagctctctgtccagcccgagagagcggctccagcag

SEQ ID NO: 178638 - DNA, 543 bp, Homo sapiens
gtctgtcagccttctaagcaggcagtacccatggcaggctatggtggcatcatgccctcacagcctcttttgctcccacagcattagtcatgaccacccccactctcccagcaccttgtcctcgcctgaaggacagatcacattctcttgcagccgtttgtttactcacctgctgtcccacctgcttctgatcaccttaggcctgtgagccatcagcccctgattcacaaatggtgacgcaggaagcagtttacacctttgccraccccagcacccaaacggccaagagtgaaggataaagcgtgctgttctcacactgccacgggagcttgagggctgagtacacaggtctaaagagaggagttgctgtcaaggggaaggttggccttcatagcacaaagccgagccatttgcttggtacagtgcctttccttagattcccgaggacttttcctagcagggcaatgggaggagctggcccccaaaggaaggttggagtcacccaccagctctctgtccagcccgagagagcggctccagcag

SEQ ID NO: 178639 - DNA, 543 bp, Homo sapiens
gtctgtcagccttctaagcaggcagtacccatggcaggctatggtggcatcatgccctcacagcctcttttgctcccacagcattagtcatgaccacccccactctcccagcaccttgtcctcgcctgaaggacagatcacattctcttgcagccgtttgtttactcacctgctgtcccacctgcttctgatcaccttaggcctgtgagccatcagcccctgattcacaaatggtgacgcaggaagcagtttacacctttgccgaccccagcacccaaacggccaagagtgaaggataaagcgtgctgttctcacactgccacgggagcttgagggctgagtacacaggtctaaagagaggagttgmtgtcaaggggaaggttggccttcatagcacaaagccgagccatttgcttggtacagtgcctttccttagattcccgaggacttttcctagcagggcaatgggaggagctggcccccaaaggaaggttggagtcacccaccagctctctgtccagcccgagagagcggctccagcag

SEQ ID NO: 178640 - DNA, 543 bp, Homo sapiens
gtctgtcagccttctaagcaggcagtacccatggcaggctatggtggcatcatgccctcacagcctcttttgctcccacagcattagtcatgaccacccccactctcccagcaccttgtcctcgcctgaaggacagatcacattctcttgcagccgtttgtttactcacctgctgtcccacctgcttctgatcaccttaggcctgtgagccatcagcccctgattcacaaatggtgacgcaggaagcagtttacacctttgccgaccccagcacccaaacggccaagagtgaaggataaagcgtgctgttctcacactgccacgggagcttgagggctgagtacacaggtctaaagagaggagttgctgtcaaggggaaggttggccttcatagcacaaagcygagccatttgcttggtacagtgcctttccttagattcccgaggacttttcctagcagggcaatgggaggagctggcccccaaaggaaggttggagtcacccaccagctctctgtccagcccgagagagcggctccagcag

SEQ ID NO: 178641 - DNA, 521 bp, Homo sapiens
atgttgatgtggctttgttacaaatgggtccaacggcctctgggaaagaccatctctctaagagtctgcgttcctcctttgtgaagggtaatgaggtggggtgggaggtgcctgggggtgggggtgggtgggattaatttagagttgttttccgatgaggtagccactagccacacgtggctatttaaatttaaatgcaaaataattaaaattaaatagaattgaaaattcaaattttcagctgcaccagctgcattaaaagtgctcgaaaactacgtgcggctaatggctaccatattggacagcacagatgaaacatttccatcattgtagmaagttttatttgcagtacctgcctagattggaaatcatagtgtaggattctattctacctctcctctgcatattgcccctgtgacagacattgctaatcgatcacagcattcttgtctactataccttgatgtgtcttcaccatcttcctcggagatccatttgtgctcaattgacctggaatatgc

SEQ ID NO: 178642 - DNA, 544 bp, Homo sapiens
ttgttacaaatgggtccaacggcctctgggaaagaccatctctctaagagtctgcgttcctcctttgtgaagggtaatgaggtggggtgggaggtgcctgggggtgggggtgggtgggattaatttagagttgttttccgatgaggtagccactagccacacgtggctatttaaatttaaatgcaaaataattaaaattaaatagaattgaaaattcaaattttcagctgcaccagctgcattaaaagtgctcgaaaactacgtgcggctaatggctaccatattggacagcacagatgaaacatttccatcattgtagcaagttttatttgcagtacctgcctagattggaaatcatagtgtaggattctattctacctctcctctgcatattgcccctgtgacagacattgctaatcgatcacagcattcttgtctactataccttgatgtgtcttcaccatcttccycggagatccatttgtgctcaattgacctggaatatgcatgtgagacaaaccatgtgcttctagggaccagatct

SEQ ID NO: 178643 - DNA, 487 bp, Homo sapiens
acattttttttttttcgtaggaacgaagtcttgctattttgccaggctggtctcaaactccaagcctcaaatgatcctctcgmcttggcctcccaaagtactggaatcacaggtgtgagccatcatgcctggcatggacaactatttttgcccctatgttgcagggaggaaactaaggcagagagcacaaatgatgtgcacaagctccacaatgaattaatgagctggcattagcatgaaggcctctgactcaggcaccaacgtctttccagggaccctatagtcccatgtaggccaaagaaagctccatacacctcccccctgcaggtgacaagtgctccacgcctaagtatcatttagcccacgtaacagtcctaggagctagggacagtgcctgcactcacagatataggcatgggggctcagagaattttttaaatttttaaattttttgtgggtacatagtaggtgtatatgtttatggggt

SEQ ID NO: 178644 - DNA, 487 bp, Homo sapiens
acattttttttttttcgtaggaacgaagtcttgctattttgccaggctggtctcaaactccaagcctcaaatgatcctctcgccttggcctcccaaagtactggaatcacaggtgtgagccatcatgcctggcatggacaactatttttgcccctatgttgcagggaggaaactaaggcagagagcacaaatgatgtgcacaagctccacaatgaattaatgagctggcattagcatgaaggcctctgactcaggcaccaacgtctttccagggaccctatagtcccatgtaggccaaagaaagctccatacacctcccccctgcaggtgacaagtgctccacgcctragtatcatttagcccacgtaacagtcctaggagctagggacagtgcctgcactcacagatataggcatgggggctcagagaattttttaaatttttaaattttttgtgggtacatagtaggtgtatatgtttatggggt

SEQ ID NO: 178645 - DNA, 586 bp, Homo sapiens
ttcattaggtcctgaagaggcagggaatttagctacatgcagggaccatagaaatcatagctacagctggacttctcatccattttttatcagatgccaatcccaaagtcgatgataattttggaaaattcttctggtccctaatacagccagaataccatttgccactactattaatcagattttacatgtcctttgcctgatggttagtgccaaaaggtttgggagtcagacagtcttcggtttaaatcccggctctgccttttacyagctgtaagagcttgagcaactcccttcacctcagtttcctcatgtgtgaaatagatctaggtaccacctaatagtgttattctgtgaagattaaatgaaagcatctgccctggtgcttggcacatggtagatgctcaatacatttaattcccttcctcctatctgtggctgatgggagctagtcacacttgcgtatttattctcctaccatccatctagtgatagaaatattcaatacaaattcttttcccagtatccagtgtttatacagatacatatttacacaagctattttgacaatttgaaataatttttt

SEQ ID NO: 178646 - DNA, 604 bp, Homo sapiens
atgttccctcacagcacagacttggcccctaaaaactgatttcctggatgcagggaccaccaactgtttatgatgatgattattattacagagcattggaattcctgcccaggttccaaaagtcacscccatgaaagagtgtttgcagcagcatcctaaatcctgtacaacatcgtggtcagagtgaaaaatataatggggtgtctccagtccaagctctgctatgacatggacagggccagagatggaggcgggggactatgctcactttgccttacatacacgacctcatcgaatcctcacggcaaatccaagcgggagacatcactacacgtgttttcatggacgcgccaactgaggcagagagaggttaagcataacatgagtaaagcccattattgtttatgaagtgctttctctttgttgtctcattttatcctcatgaaaccccattttatagatgactttcttgtggctcagtttcccaattttgcatgggtcataagtgccagaggttggacagactcagaactctgactcctatcccctaagacaaatctgcaaatatgcttctgtaataagaagcggatagagatgaacactt

SEQ ID NO: 178647 - DNA, 371 bp, Homo sapiens
gtcctttcaaattatatgggggctttgtttagcaggactacccaaaaattatttaattttctaggatatttgcttgacatacctatttactatctgattagggtctagacactgggaagtgacatgttaacttgtagatttctagcatatagaaaagataatccaaaaggttatggttttgttatcctgtaggacagtaagaacttttatatctaacctagcaatcttctaacatgttttctctttaatgtctctataaacacccagtttctcaaatgcttttggaaccaacatgaagtaatcktactagtttctgcgttaatcagttaacagatctttgagatgtgtttattctatttttgtatgagatc

SEQ ID NO: 178648 - DNA, 426 bp, Homo sapiens
ctacccacagtggtgttggcaggtgagggacccctcatcattttgactttcctaatccacggacgccctctcaggtatgagcaccatcccttcacacacaccttgtaaacccggaaggacttttttaaaatgaaaatttcatttccagcctcttacctggacacaccattcctgggttccctgatgtggtaagggccatggggaggccaggactatgcaggggcggggtgggtgtgagacagcacaggaatgcacatgggggctccctgcttccccagmggccttgctggttatgaggctgctccccgcattccctcacaccctcccagaccctctctcaaggcacggaggaggagagcagccactcctgccaccaccagctgctcttggatacctgaggaatggaaggagccggaaaccacctgg

SEQ ID NO: 178649 - DNA, 486 bp, Homo sapiens
tggacaacagtccaggggcccaaagctgagctgagagagagaaacagataaagaacaagacagaaagcagaggcaggtggtctggggaaaggcacaaggtagcctcccaacggtgtgtgcaaaaaggcaggctctctctggctgatctctttgtttgatttgtaggcacaaacctccacgcagagtgttctattgcccaggagctcagtctttaccacatcctaccagaagagttagaaaagagagaccagctctccccgcctcattcccaagtcagctatgcagttttaggaaaagagcaaartgcttgcttcctgagagcatcagagttacaccttttatttgttcataaagtacttgcacgcactgaattacatcacctcacaaaacatgaagtaatgttccaaacttacatagcagataaccgaagattataaaggcaaagcacatttccccaaaatcaaagcaaatgagacacagccgaca

SEQ ID NO: 178650 - DNA, 539 bp, Homo sapiens
tcagccactggtggtttgccaaactggctgattacccataaacacacaacatggttctgttttgctcctagcaatccttaaaccattgcatgtctaacattctcagactaattcacaaatcagaaacatctgatgcccaacccataccaaatgcatttcagggcaaaaattatgctcctataatgtctggcttcctgtcttcaaggcactttgcttacatgactgaatcctcactgtgaggtrtagctatccatcatttttgagcaagaaagccaagatggataaataagtgacttgcccaagacaactagagtggttggcaccatgatgggattggttgtcttatttttcagttggtacatggagtcttcgatgaccccaggatttggaaatgaaatttaaccaccttagagcttctggaattttcttctcttgtgttcaactgaaagtttctgactgccctgggtgaattagatgttatcttactggaaaagtgttatactgcctggtttcttctataaccattttaaccttaaaag

SEQ ID NO: 178651 - DNA, 432 bp, Homo sapiens
tcataaggctaaacaagcaatgttccattggacacctctgttaccttaataggcatctcatcacctccctgcccaaacgccactgctattcatactgaataagacattagctagacctggaggcaggtctaatgataatatttcttcacttgagcccccggtttggtcactggcagaaggtatccttgaggggcttctgtttatgtcagcagatgttagcctgagaagtagcagcttttgtttccatgacttcttccaaatgaagtcagaagcctccagggttctcagatacatcagagagttctaggggcattgyttcctttgtggccagaactataatgtggggagggaaatgctgactttcattgcacagtagaaaatgtcagtcatatttccaagaatctctcaaaggggtcagcatgttcacttcag

SEQ ID NO: 178652 - DNA, 536 bp, Homo sapiens
attaccactttacatatgttatctgttaccctgtgcactacaaccttttgaggtagaggctcttattatccccattttatagctgaggaaagaaaagacagagaggttgagtaacttgccctggtggatacagttattaaatgacagagccaggatttgatctcagactccatgatttccagtcgttgtccattcccattgtctcactaagactcaggaggaccagtggcaatcccacatattaacctcatagcacagtgtctgatgggtaggaggcaytaagaaagggctgattcattcatcatctctttttccctacaatgaacaatgtcacatggacacagagagggaatatttctttccctgaattgttgggaattaggttcgttgttttaagctctagaaatcacatcctgagaatgtgcccagatttgcagatatacatcgattcacatctcagctggagagggtgaaataccatttggaattctgcatccagatcttctgagggaaaagggggtaaatcaaaggcatcc

SEQ ID NO: 178653 - DNA, 353 bp, Homo sapiens
cctttcatcagccaaaaaaaaaaaaaaaactctcttggcttctcttctgatttcagcctgtcacttgatgaggtccctgctatttatatttttgtttgttagaagggagcgggggaaacataaataaagcccgggcaaacccaaccaccctgctggatatgaagggactccctcatattgtggcagcagggctgcctaactggtatttaagcagggaccaagaggtccacactgtgaatgccgttgaaagggttactgggaaatgcaaacaaaaacaacatgyaaatgaggctgccagcaacaggtagacttaatcagatgctgtcagatgaattcagcatctccccgattgt

SEQ ID NO: 178654 - DNA, 626 bp, Homo sapiens
gtaccaggcagttttcctttgcttataccacaacttttcttcatattgattgtattttttaaaatttgctaccctaagttttaaagtaggaatttagtccccatacaaattcaagctttagaaaagactatgttcatagtttgtcttaacctgttctcagaggagctcctacatgttttgagaataaaacagtcaaaacagagtaagcaagtcaattttatataatctctatttctattttgaaataacagccaattatttcaatagctaaataatttcctactggctaaacatcttggaaaacttgaataacctcaagccacaaaaatgtctatttattatttgttaacttttattttttattaatttatttttaattgagaaaaataattgtgtgtatttatggggtaaaatgtgatgtttcaatctatttatacattgtaggaagattcaattaagctaaataacatattcatcacctcaccaacttatcttttttttggtgagggtgggaaaaattcttttagcaattttgaaatatgcaaatacattagtattaactgtggtcaccatacagaaataaatggctatatatttawaaatgcctttctcatttggggtgctag

SEQ ID NO: 178655 - DNA, 611 bp, Homo sapiens
  misc_feature (1)...(611): n = A,T,C or G
nngctaccatcattcaacattaaatatgtactgtatctattatccmaccctaacaaccacttgctaagtcttcgatcagtgtcttaagagctttaatattgtcttatttttcacaataatcctttgaagtaagtactatgttatacctttttttctttttgaattggagtctcttatagatgctaaacacaagacacagaaagattaaatcatttgcctcaggccacacagttagcgagtagtggtgccagcattttaattcaagaaatctagctctagaggccctgctctcactgctatgacctatggcctctcaaacagtttaactatggccttctgacaaatccaggggtttgtttgtttgtttgtttgtttatttatttacttatttacatcttcttactatctaaatgattttttaaacaatgctgagcacctcttcctttttgaagcattgctctctaccttcaagggcagtgtttcttcctgatttaccttttatacctccagttgtctcataatagccttttacttcacgtccatcgcctattgatttgccccttacacattaatgtacctaaatgagtcttttcccagtcctgtattctttc

SEQ ID NO: 178656 - DNA, 611 bp, Homo sapiens
  misc_feature (1)...(611): n = A,T,C or G
nngctaccatcattcaacattaaatatgtactgtatctattatccaaccctaacaaccacttgctaagtcttcgatcagtgtcttaagagctttaatattgtcttatttttcacaataatcctttgaagtaagtactatgttatacctttttttctttttgaattggagtctcttatagatgctaaacacaagacacagaaagattaaatcatttgcctcaggccacacagttagcgagtagtggtgccagcattttaattcaagaaatctagctctagaggccctgctctcactgctatgacctatggcctctcaaacagtttaactatggccttctgacaaatccaggggtttgtttgtttgtttgtttgtttrtttatttacttatttacatcttcttactatctaaatgattttttaaacaatgctgagcacctcttcctttttgaagcattgctctctaccttcaagggcagtgtttcttcctgatttaccttttatacctccagttgtctcataatagccttttacttcacgtccatcgcctattgatttgccccttacacattaatgtacctaaatgagtcttttcccagtcctgtattctttc

SEQ ID NO: 178657 - DNA, 611 bp, Homo sapiens
tttctttggggtttcttccttcctccctatttcttatctctttaaccatttaggtaatctgttgagaatttctttaccaacatatttttaaaatatcaagatttgatatttgctcaacaacaatgttcctaacatattttctttgttttctcatcgataaagtgggattaataacagcatctattttatggcactattaggaggaatacattgactgattaatctcttttgaaagagcatggcacagaataagtactatgtaagtccttaaaaattaaaggaatttatttacataatctaataaataacaccaaagatgtgtgtaatcaatttactatatctctatcttgcagacatttgtctagctcaatctcaaaactttgagaaaggccatgtccttttattagtatgatctatagttgtgaaagtgagacataaatatttatgatcaaactctgccagtctttataactgtatatgtgtctctccgatagagataattaaattgaaaaaattgtctaaagcatgkttcaaagaacaataaaagaacatatcaattattgactttttaagaacacaaaaaggtacactaaaattaattctaaattgat

SEQ ID NO: 178658 - DNA, 326 bp, Homo sapiens
tggcttaacacaataattctgtagaagatatagtcaatgaaagcacacatgaaggagtaatcagttctgcctaagagagtgtttaaaagattcacaggggaggaaacttgaagaatgaagatatgttttcaaagaagttggaaaataacataggaagtgagaactgcatgaacaaaatttagggattaaagaatgaacactggccacttcatgggaaatttagtttggccgaaacrcttgacacaaaagaaatgagaatagaccctggaaggggctcaaggatggaaagtaaaactaggccagatcttgaagccctttggatacct

SEQ ID NO: 178659 - DNA, 267 bp, Homo sapiens
gggtttaaatagcctcgggcgcagcctakcagcggaaagggcggagcttcactcctcctttccatcagtcacccccaactttcccaggctacacctcgtaggaaactgttctcctgctttgatttcatgcgccacctttgggacaatctaagaacttacaggttttcttggccagatttattaggaattgtatgcactgaaacactgaaaaccaactagtggttctgtgcttcccacgttgtggttttgacaccagcagcatccttg

SEQ ID NO: 178660 - DNA, 507 bp, Homo sapiens
tatgaaatatatttttaagtgataagacttgaaagttgaaattattctgtgatccaagggcactagaatgaatgttgggttagtaggcatgaaaacaatattcagctctttatacatctctgtaaawgcccttgagtaccaggggcattgtcagtgagcggtaatactttgaaagtaatcttatttcttgagcagtaggtgtcaacagtgggcttaagatattcagtaaaccgtatttgtaaaccgatagtctgtcatccaggctttgttcccatttgtagagtacaggcagagctgtgttttatcataattcttcagggcccttggattttcagaatagtaaatcatcattggtttcaagttaacatcaccaactgcattagcccttaacaaaagagtcagcatgtcctttgaagccttaaagccaggcatcaactcctctctagctgggaacatcctagatggcatctccttctagtagaaggctgttttgtctccattgcaaat

SEQ ID NO: 178661 - DNA, 514 bp, Homo sapiens
tagctttatgaaatatatttttaagtgataagacttgaaagttgaaattattctgtgatccaagggcactagaatgaatgttgggttagtaggcatgaaaacaatattcagctctttatacatctctgtaaatgcccttgagtaccaggggcattgtcagtgagyggtaatactttgaaagtaatcttatttcttgagcagtaggtgtcaacagtgggcttaagatattcagtaaaccgtatttgtaaaccgatagtctgtcatccaggctttgttcccatttgtagagtacaggcagagctgtgttttatcataattcttcagggcccttggattttcagaatagtaaatcatcattggtttcaagttaacatcaccaactgcattagcccttaacaaaagagtcagcatgtcctttgaagccttaaagccaggcatcaactcctctctagctgggaacatcctagatggcatctccttctagtagaaggctgttttgtctccattgcaaatc

SEQ ID NO: 178662 - DNA, 517 bp, Homo sapiens
gaaatatatttttaagtgataagacttgaaagttgaaattattctgtgatccaagggcactagaatgaatgttgggttagtaggcatgaaaacaatattcagctctttatacatctctgtaaatgcccttgagtaccaggggcattgtcagtgagcggtaatactttgaaagkaatcttatttcttgagcagtaggtgtcaacagtgggcttaagatattcagtaaaccgtatttgtaaaccgatagtctgtcatccaggctttgttcccatttgtagagtacaggcagagctgtgttttatcataattcttcagggcccttggattttcagaatagtaaatcatcattggtttcaagttaacatcaccaactgcattagcccttaacaaaagagtcagcatgtcctttgaagccttaaagccaggcatcaactcctctctagctgggaacatcctagatggcatctccttctagtagaaggctgttttgtctccattgcaaatctgtttagtgtag

SEQ ID NO: 178663 - DNA, 507 bp, Homo sapiens
tatgaaatatatttttaagtgataagacttgaaagttgaaattattctgtgatccaagggcactagaatgaatgttgggttagtaggcatgaaaacaatattcagctctttatacatctctgtaaatgcccttgagtaccaggggcattgtcagtgagcggtaatactttgaaagtaatcttatttcttgagcagtaggtgtcaacagtgggcttaagatattcagtaaaccrtatttgtaaaccgatagtctgtcatccaggctttgttcccatttgtagagtacaggcagagctgtgttttatcataattcttcagggcccttggattttcagaatagtaaatcatcattggtttcaagttaacatcaccaactgcattagcccttaacaaaagagtcagcatgtcctttgaagccttaaagccaggcatcaactcctctctagctgggaacatcctagatggcatctccttctagtagaaggctgttttgtctccattgcaaat

SEQ ID NO: 178664 - DNA, 514 bp, Homo sapiens
tagctttatgaaatatatttttaagtgataagacttgaaagttgaaattattctgtgatccaagggcactagaatgaatgttgggttagtaggcatgaaaacaatattcagctctttatacatctctgtaaatgcccttgagtaccaggggcattgtcagtgagcggtaatactttgaaagtaatcttatttcttgagcagtaggtgtcaacagtgggcttaagatattcagtaaaccgtatttgtaaaccgatagtctgtcatccaggctttgttcccatttgtagagtacaggcagagctgtgttttatcataattcttcagggcccttggattttcagaatagtaaatcatcattggtttcaagttaacatcaccaaytgcattagcccttaacaaaagagtcagcatgtcctttgaagccttaaagccaggcatcaactcctctctagctgggaacatcctagatggcatctccttctagtagaaggctgttttgtctccattgcaaatc

SEQ ID NO: 178665 - DNA, 587 bp, Homo sapiens
ctcagctaggaaaggaaaatccctcaaacccttgcactttcttgatgagttgatgccctgtcctgcttcggctaaccctccatgtgatgaacccactgtccaaccaatcccgatgagatgaatcasgtacctcagttggaaatgcagaaatcaaccattttctgcttgattacactgggagcaaaatcgaatgccattaggtatgcttgcagcagccaaaggaggggtttgaaccttgctgcatactgaatgttgtgtgtgtatccctgacagttctcacaatattactttccttgcccaagacatgcaaggacaactaaaacagttagaatctgtcaggaccccatcatgaattggctgtccaactgacattggcgttggccttggtgggtgtgattttatttaattgtgctttaattctcctctgcttaccctgcttctttaacctctaccaatgatgtattccccgtatatctgcaagggtgttttcctacacttgagtatcaagtgggaccgaatacacagaaaaagttaaataatatatttcaactcaattgaacatggacacactgggcaccaagtcccag

SEQ ID NO: 178666 - DNA, 587 bp, Homo sapiens
ctcagctaggaaaggaaaatccctcaaacccttgcactttcttgatgagttgatgccctgtcctgcttcggctaaccctccatgtgatgaacccactgtccaaccaatcccgatgagatgaatcacgtacctcagttggaaatgcagaaatcaaccattttctgcttgattacactgggagcaaaatcgaatgccattaggtatgcttgcagcagccaaaggaggggtttgaaccttgctgcatactgaatgttgtgtgtgtatccctgacagttctcacaatattactttccttgcccaagacatgcaaggacaactaaaacagttagaatctgtcaggaccccatcatgaattggctgtccaactgacattggcgttggccttggtgggtgtgattttatttaattgtgctttaattctcctctgcttaccctgcttctttaacctctaccaatgatgtattccccgtatatctgcaagggtgttttcctacacttgagtatcaagtgggaccgaatacasagaaaaagttaaataatatatttcaactcaattgaacatggacacactgggcaccaagtcccag

SEQ ID NO: 178667 - DNA, 293 bp, Homo sapiens
ggatctccggggtttgattgtggcaaggatgctgctggtgtcaaaaccacaacgtgggaagcacagaaccactagtkggttttcagtgtttcagtgcatacaattcctaataaatctggccaagaaaacctgtaagttcttagattgtcccaaaggtggcgcatgaaatcaaagcaggagaacagtttcctacgaggtgtagcctgggaaagttgggggtgactgatggaaaggaggagtgaagctccgccctttccgctgctaggctgcgcccgaggctatttaaacccacc

SEQ ID NO: 178668 - DNA, 293 bp, Homo sapiens
ggatctccggggtttgattgtggcaaggatgctgctggtgtcaaaaccacaacgtgggaagcacagaaccactagttggttttcagtgtttcagtgcatacaattcctaatawatctggccaagaaaacctgtaagttcttagattgtcccaaaggtggcgcatgaaatcaaagcaggagaacagtttcctacgaggtgtagcctgggaaagttgggggtgactgatggaaaggaggagtgaagctccgccctttccgctgctaggctgcgcccgaggctatttaaacccacc

SEQ ID NO: 178669 - DNA, 293 bp, Homo sapiens
ggatctccggggtttgattgtggcaaggatgctgctggtgtcaaaaccacaacgtgggaagcacagaaccactagttggttttcagtgtttcagtgcatacaattcctaataawtctggccaagaaaacctgtaagttcttagattgtcccaaaggtggcgcatgaaatcaaagcaggagaacagtttcctacgaggtgtagcctgggaaagttgggggtgactgatggaaaggaggagtgaagctccgccctttccgctgctaggctgcgcccgaggctatttaaacccacc

SEQ ID NO: 178670 - DNA, 541 bp, Homo sapiens
cagttccaggcacccacgatacaccaccgaactcacgaatttcactgacttactcccccgtctccctcatgttctcacccccagccctcagggactcttctgtctctctcagctactctccaaccatctccagatttcacctggagtcagcttcccgcacccaggaatcacctacaaactcacggaccttactgcaaccctcccccatttctttcacctcttcaccccctgccttcagggactctcctgggtctcccagcttctctccagccttccccagatttctgccacagtcagccccaggcacccaggacaaccctagacactcacaggcctcacgagactatctccctatgacctgtacctatacaggratggctcccacgcatacctcagtgaccccaaacccatctccacttacactcaggcactcccagggtctgacagctactccccgttatcgtccttcagttcgaagccctggccaatctactagcccacatgacgcagttacctggccatttctccacggttcccgtga

SEQ ID NO: 178671 - DNA, 541 bp, Homo sapiens
cagttccaggcacccacgatacaccaccgaactcacgaatttcactgacttactcccccgtctccctcatgttctcacccccagccctcagggactcttctgtctctctcagctactctccaaccatctccagatttcacctggagtcagcttcccgcacccaggaatcacctacaaactcacggaccttactgcaaccctcccccatttctttcacctcttcaccccctgccttcagggactctcctgggtctcccagcttctctccagccttccccagatttctgccacagtcagccccaggcacccaggacaaccctagacactcacaggcctcacgagactatctccctatgacctgtacctatacaggaatggctcccacgcatmcctcagtgaccccaaacccatctccacttacactcaggcactcccagggtctgacagctactccccgttatcgtccttcagttcgaagccctggccaatctactagcccacatgacgcagttacctggccatttctccacggttcccgtga

SEQ ID NO: 178672 - DNA, 541 bp, Homo sapiens
cagttccaggcacccacgatacaccaccgaactcacgaatttcactgacttactcccccgtctccctcatgttctcacccccagccctcagggactcttctgtctctctcagctactctccaaccatctccagatttcacctggagtcagcttcccgcacccaggaatcacctacaaactcacggaccttactgcaaccctcccccatttctttcacctcttcaccccctgccttcagggactctcctgggtctcccagcttctctccagccttccccagatttctgccacagtcagccccaggcacccaggacaaccctagacactcacaggcctcacgagactatctccctatgacctgtacctatacaggaatggctcccacgcatacctcagtgaccccaaacccatctccacttacactcaggcactcccagggyctgacagctactccccgttatcgtccttcagttcgaagccctggccaatctactagcccacatgacgcagttacctggccatttctccacggttcccgtga

SEQ ID NO: 178673 - DNA, 531 bp, Homo sapiens
aaaaatatggtcccctatgttagaacaacaaggttttcttaaagtattgatttagttttcataaaattgcaagaggttttgagttttaattctgaaatctgttcccttaacagccgtcttctaaactacagacaatttccatttctgtcaaatatttttctgagatctatttaatttgcctagtttgagggtggagattcagctccccctttttcttgcctaaaaaggcacaacatcttggctgaggtgataacttttctttttttgtcaactcttgtaccttttttttctgtggttccaactctgctgttatgtcctgatgctgaaatttatatcctgaaaaatctakaaaaacagtgtgttactccaatataactcgaagttaataaaagtctgatggtcctgatgtgatgtagtcagtcatgatactggtgtgcatgtaataaaaataaccacagtttccttgtcaattgggacatttgatcacatattaaatcatggctattccaagtttttgtcattcacacatgt

SEQ ID NO: 178674 - DNA, 531 bp, Homo sapiens
aaaaatatggtcccctatgttagaacaacaaggttttcttaaagtattgatttagttttcataaaattgcaagaggttttgagttttaattctgaaatctgttcccttaacagccgtcttctaaactacagacaatttccatttctgtcaaatatttttctgagatctatttaatttgcctagtttgagggtggagattcagctccccctttttcttgcctaaaaaggcacaacatcttggctgaggtgataacttttctttttttgtcaactcttgtaccttttttttctgtggttccaactctgctgttatgtcctgatgctgaaatttatatcctgaaaaatctataaaaacagtgtgttactccaatataactcgaagttaataaaagtctgatggtcctgatgtgatgtagtcagtcatgatactggtgtgcatgtaataaaaataaccacagtttccttgtcaattgggacatttgatcasatattaaatcatggctattccaagtttttgtcattcacacatgt

SEQ ID NO: 178675 - DNA, 572 bp, Homo sapiens
tagcattacattttcccaagtcatttataagtactctattttcatggaaatatcattcatgaatagataactgctctggagctctaatcttttgggtttgactattaaggataaataagaagtttatttactttagaagagcctaacatagtttgctaatcatattgcactttttaaatgtcaggkttcacatctttaaagaaacaagatcctcacatacttttatgccataagctgcttgtgaggtttctatagttggatctattaatgggatcttttaagtattaataattcagcttgcttgaatttgtgtttatgctctttagtctatgctatgatgtgtaacatgaaatactgctaatttataatatattatcaaaaattatcttgagtgaaactaatgaaaaacttttatataactatttttgcttggtataattacatagactttacaaataataaaatttatctttaggaaataactaattttttaatttctatattgaaatttgtaatattaataggaattccgagatttatcattgattttttattttgtaatatattcacaa

SEQ ID NO: 178676 - DNA, 529 bp, Homo sapiens
tacaggcttcagatctgtctcagcagagtcccgtggcagtggccaaaggggtgcttggatcaccacacccccagttctagatgactcagtgcagagagagagactccattcrtttgggagaaagtaagggaaaagaacaagaatgtctacctcataatccagataatttttctagattttatccaagaccaccaaggtggtacctctacaagtctgcaaaaaccacaacattattgggcttacggcccaagttccttcaaatacttgtaaagctttcccaataagtacaggcacaaacaagcctagactgagaaggctgtaataaatacccaactcttcaatgcccagacacagtcacacatctgcaagtatcagcactatccaggaaaatatgacatcaccaagtgaactaaataaggcaccaaagaccaatcctggagaaacagagattatcctttcagaaagagaatttaaaatagtcattttgaggaaactcaaagaaattcaagataacacagaatagtaattc

SEQ ID NO: 178677 - DNA, 614 bp, Homo sapiens
acaaaacatatggaatatagtgaaagcagtactaactggaagtttatagctataagtgcctacatcaaaagaagaaaatgttcaaacaaatgatctaatgatgcatcttaaagaactgaaaaagcaagyacaaactcaacccactattagtagaagaaaataaataatgaagatcagagcaaaataaatgaaatgaaatgaagaacacatacaaataaaataaaaaggtgcttttttgaaaagataaacagaactgaaaaaactctatgcagactaacgatgaaaaacaagagaagactcaagtaattaaaatcagagatgaaaaggagaccttacaactgatacttcagttgtacaactgatacttcagatattaaaatgatcattagtgactactctgagcaattatatgccaataaattggtaaatccagatgaaatagataaattcctataaacatacaacctaccaagattaaaccaataagaaatccaaaacatgaacagaccaataaagagtaacgagattgaagctgtaatgaaaactctcccattaaacaattatcttgggacccaatggtttcactgctgaattctaccaaacatttaaagaat

SEQ ID NO: 178678 - DNA, 614 bp, Homo sapiens
acaaaacatatggaatatagtgaaagcagtactaactggaagtttatagctataagtgcctacatcaaaagaagaaaatgttcaaacaaatgatctaatgatgcatcttaaagaactgaaaaagcaagcrcaaactcaacccactattagtagaagaaaataaataatgaagatcagagcaaaataaatgaaatgaaatgaagaacacatacaaataaaataaaaaggtgcttttttgaaaagataaacagaactgaaaaaactctatgcagactaacgatgaaaaacaagagaagactcaagtaattaaaatcagagatgaaaaggagaccttacaactgatacttcagttgtacaactgatacttcagatattaaaatgatcattagtgactactctgagcaattatatgccaataaattggtaaatccagatgaaatagataaattcctataaacatacaacctaccaagattaaaccaataagaaatccaaaacatgaacagaccaataaagagtaacgagattgaagctgtaatgaaaactctcccattaaacaattatcttgggacccaatggtttcactgctgaattctaccaaacatttaaagaat

SEQ ID NO: 178679 - DNA, 515 bp, Homo sapiens
ctccaaaactgcactaaatagccagccacccaaccaccagtacgacatagggtaaaaattgccggctagctcaggatatctaaatttcacttgtagctctaccgctgtatgacactgggtggtgtaattaaaagctcaaatcctcagtttcttcaactttaaactgtaagtggtaataattatatttaaatattaataaaataatgtaattagcccatgtwctacctatttctattatttgctttgaccttttacattttggttctcagtcaagtttgtgtatttattatcatcatcgttgtcaatctgtccattctctatgcagagacagagatcaatcacaaactatcatagttatgtgacaccccaaaatccaccctagataaatgtgttatagcaggaggagaaagtgtctctttgacctgaaaggcaagtcagatattaatgaaatggcttgcaagttataaagatatatttgcctctttgctttctcaatatcttttcccttatgtctt

SEQ ID NO: 178680 - DNA, 490 bp, Homo sapiens
  misc_feature (1)...(490): n = A,T,C or G
attattactatactaattatattttttctatgatatttcatcagaagatacaaatgaacttattattaaaaacaaataattggcartatgtacaatagaattactttcttagtaaaatctagttagactttttccaatggcatatatgtctaaattatcttgatataattatattttaaaattgtggattttagagtatgtcataattctaacaactganatatacacaaaatatttacttcatgggtgcgtttatatgtatgtacttaggcgaggtgagttagaataagcaagtatataaaaacatgaaaatattttgccactcatgtgttttaagtaatgcaaatgtagaaaattatggccttgttacctagtgtaccacagatattttagtgcagctttacaattttaaaatagcatgaagtgattaatattcatcaaaaggaagtgggaagagaagcataattttattctcaattaatagaaaaca

SEQ ID NO: 178681 - DNA, 464 bp, Homo sapiens
ttgtgggcaagcacgtgatcaatctttgagtatgctgtgtgtgtaaatgagaagaatgtatattctgtggttgatgggtggagttccctgtagacgtctagtaggtccaattggtcaagggtcaaatttaagtacagaatttyttttgttagttttctgccttgatctctctacaactgtcagtggtatgttgaagtccctcattattattgtgtggctaagtctttttgtaggttcaaaagtatttgtcttatggatctgactgctccaatgtgaagtgcatatatatttaggatagttaagtcatctcgttggattgaagcctttatcattatgtaacggccttctttgtccttttttactgtgattggttaaagctgatatgaaaacagctgatatgaaatataaaaatagcaactctgttcttttttgtgttccgcgtgtataatagatctttctccaac

SEQ ID NO: 178682 - DNA, 595 bp, Homo sapiens
aaagagagaattatgaatattaccaacacaaaggaatgattaagtttgatgtgatggatatgctgattactcagatttgatcattacacattgtatgcttttatcaaattatcacaggtatgtcataaatatgtacagctattttgtttccataaagattaaagataacaaatgtggagaaaaggaaacactgtacattgtaggtcaaggtacaaaatgtgaaaagttggtatagccactatggaaagcagaatggagattcctcagaaaactaaaaatagacctaccatatgatctagactcctcacttattggtatatatctgcactcctgtgttcattgcagcattattcacaatagccaagatctggaagtatcctaaatgtcaattgtttaataagtggataaagaaaagttggcatatatacacaatgaggtactatttagccttgaaaagatggaaatcctgccatttgccatcaacatggataaacctggagaacataawcctaagtgaaaaagaaaaaaaaaacagacacaaaaagactaatactacataagtgcacttatatgttaagtttaaaatcatcacatt

SEQ ID NO: 178683 - DNA, 569 bp, Homo sapiens
ttcttttatcttatcacttatatatataaagagtacaaaatcaaacatttttaaaaattgaaaaataattctaaatatctccctatacatatgataatattatactcaaatattttgaacctatagaatgacttttgggagtattttggttgtgctcctgtgggtgtgtgttgatgtgcattacacttaattttaatttttatagatacataatagttgtacatatttatatattacatgtacaaacaatgtacttattggatgattaataaaaacgttgtcattatagatttatgtgaatttaaaaaaaatggagcaccaaaacaactaatgtttttctaaaggatcacttccagtgagaagataacctcttgctttataaatctgttaaaggaaatgtatattaattggtgatggtacccttcctttacttgtaaagatttttctggtgtgtgtgtgtgtgtgtgtgtgtgygtgcgcgtgtgtttaaatttccacttaatagtttttttgtgctcaatagaatttatttatttatttatttatttacttatttatttttaagacag

SEQ ID NO: 178684 - DNA, 569 bp, Homo sapiens
ttcttttatcttatcacttatatatataaagagtacaaaatcaaacatttttaaaaattgaaaaataattctaaatatctccctatacatatgataatattatactcaaatattttgaacctatagaatgacttttgggagtattttggttgtgctcctgtgggtgtgtgttgatgtgcattacacttaattttaatttttatagatacataatagttgtacatatttatatattacatgtacaaacaatgtacttattggatgattaataaaaacgttgtcattatagatttatgtgaatttaaaaaaaatggagcaccaaaacaactaatgtttttctaaaggatcacttccagtgagaagataacctcttgctttataaatctgttaaaggaaatgtatattaattggtgatggtacccttcctttacttgtaaagatttttctggtgtgtgtgtgtgtgtgtgtgtgtgtgygcgcgtgtgtttaaatttccacttaatagtttttttgtgctcaatagaatttatttatttatttatttatttacttatttatttttaagacag

SEQ ID NO: 178685 - DNA, 556 bp, Homo sapiens
ctcatttaaggctgtatttctcttaattatattgccggcatttgaatacagatattgtgcacagattctaaaatggatcccaatgataaccatacctttgtgtaacccgcttcacttctgtgtacaccagatctgccggcttgcttctaataaacagaataccacaaatgtgatgaaatgtcacttcagaaattgggtgataaacaactttgagctacctcactttctttctctctmtttttttttctctctctcacttctctcaggacttgctctgagagaatatcaataggtgttcatcttgaaaataaaattaagaagactgaaatgttaccttaccataaaatgattattctgacaatgcttttgccacattcgaggtgaaaatcatgacaagcgtctatggtactgccattttaaaatagtaaactagtaaaaaaataatgaatgaatctcacagaacaacttgaggaccacaaaaataaaaatgtgatgattaaagtctcaggaagataaacacataagatacatttcactaaagtcgaagaaaaataaa

SEQ ID NO: 178686 - DNA, 466 bp, Homo sapiens
atttaacgacaactaataaaatgaaattatggtaatatattttgtaatgaactcaccataagatgaggcaaagtaagttttagtactaaacctggaagttgagcacatttcaatggctgggtaggtgaatgaatcctatggggaggcaagagacactaacatgattgtggtagagaatgttaataagaggtcagatatataaaatttttattgcactttgacaattggagctgcccctcctgattttcatatatgttatattcatctmacattcaaaaggcaaattaaagaatatattgctaaacttctattctagctcctccatacccaaacatgaagtgactatttcattatccattggtatcatcattggtatgattttggaagaacatgaaatatgttccctgaaatgctttctttttttcctacttgtgcctcctttagcacattgtttgagattttcgga

SEQ ID NO: 178687 - DNA, 513 bp, Homo sapiens
tgagtattgttataattattctattttagtattatttattgtcaatctcatagtgtgcttaatttataaattaagcttttttgtagttatgtatgtatagggaaaaacatagtattaataaatacagggttcagtactactcgaggttttaggcatccactgggaggtcttacaacgtatatcctgtggataggggaaractactgtattcagataattatagtatgttatgactggatcaataaatttgtaatgaatttattttaagtcttaattaatatttctcagttaacctgaaatatattattttagctatatacttggtaagttgtatttcagggatgtttttggagttagtgtgagattttataagttaagaaaaatactatgatatcatatattttgggagtaataaatcattcagtatgatttacagctgtaagggggaataaaaatgcatcataaaaatacttatataattaggatgcatttgatttgtctatagaaattgat

SEQ ID NO: 178688 - DNA, 545 bp, Homo sapiens
tttaattatgtatttaataaaccaatctcaaattattaaaataaactcaacaactaaaaaaacaaacagaaagattggtttgacatgagtatartgattaaaatacaggttcaaattaatgatgaaaaagtaacatagtctctgaggaaggttcctttaagaaacctggagtatggaagataagaataattttcggtattaatctgatgtttatgagaacacaaaaacacttaaaaatatttacccacttaaaaaacagaacatttacccacttagaaaacagaatttctttagaattcattaaaaacatagtcagggatgaatactaaagtcaaaggctgatttcaattgattacataattatgtatgtgtatatgtacatgtctacacatatgcatatgtatgtgtatttgatagtccctacacatatgtatatgtatgtgtatttgatacatatgtgaggggtatgtgcatacccaactgcgtagacatatttatagttactatcgttcatgcaagtaatatacaattctgtataacacaag

SEQ ID NO: 178689 - DNA, 593 bp, Homo sapiens
tcattcagttgggaaatcaaattgacttaaaataccacagtgagatagtggaaaacgctacatactcactgttttgaaaatatatttaaatttatgtatgcatttccagaaatattcatctcatgtctctacacatataataaaagcaatttattccaatatacatccttttactgtcattgtgatattctcaggaaatattcaaattagtttatattctaatatggaaaactgaggcatcatgaaattatcacatacgtttaattttgcttctgatatttattttcatgacttttttttaagtgtgggaaaataagcccctttctgtcatcctacctttcctgtcctgtttaaatgcacttatgcagacatttatttgagaaaagtctaggtgtcatttkcccatgtactttaaggcgttaagtacctaggacataaaatcacctaaagtttaagcagttagtggtaacgtgtttgaaaataaactcctgatcttttcctttaaaattgatcccacagattctttaccatgtcaatcaatagctgctctatcatcttagattttcaggaaaaacagtgtatatataaatcat

SEQ ID NO: 178690 - DNA, 575 bp, Homo sapiens
cagtacaatagctgagctacatgagctggaaaatttgtaaaacagcatcaattgtaaatttggaacagcctttgttggttttaaggccttattttttataactcagaataagaaaaaaataacagttccctattttatttcctccctggttcatgcagcattatagacaygtttataacatattatataaaatagttaatatcttatgtaatattttataatttaatattttaaacatttactaataatcgattttaaatcacagtaatacatttttaaaaaatatgttaataaaggatgacagcagaccaatctttactctctgaattgaaacaacccaaaatggatttttttcattatgccaaccttttcatcaaattgcaaagattaagtcttattactattgaacaattcttattgcctaaatgtacagaaaatattctctaggatttgaatgtaagaaattttcccaattggaatatgtccagaaaatatattaataaaattaatgaaataaaatctagtcctaatattgtagacacttcctctctagaacaatcccatttggaagtaaa

SEQ ID NO: 178691 - DNA, 527 bp, Homo sapiens
cataagaaccaaattatctgctctcattgacctttcgcttttaagttgaggaaggactgataaaataaataaactcataaatgattatctaatatttcaaatggaaaaaagtgttatgaagaaaaataaagtggaaaggattaaaaataatggagtgtgatacatggtgcagtattaatacttttaagcaaacttgaatgatacaattagaagagccatgtgggaatcaccagaagagaattccagagacacctgaaattgaaatgccctactcataaatggatagctggtaacaaacttatatgtggtaattaataaaatggacaattctaatgaatagattaatattaagtagctgaagatttggtgtttaagttaaggatatcaacgtgtaaamacaatggatatttatgaccccatgtctaagcacaactcaccttagttttgcaggttgagggccccttacatatcatactaggcacaactttcacaatcacagttttaatgaatataattcatgttcttag

SEQ ID NO: 178692 - DNA, 527 bp, Homo sapiens
cataagaaccaaattatctgctctcattgacctttcgcttttaagttgaggaaggactgataaaataaataaactcataaatgattatctaatatttcaaatggaaaaaagtgttatgaagaaaaataaagtggaaaggattaaaaataatggagtgtgatacatggtgcagtattaatacttttaagcaaacttgaatgatacaattagaagagccatgtgggaatcaccagaagagaattccagagacacctgaaattgaaatgccctactcataaatggatagctggtaacaaacttatatgtggtaattaataaaatggacaattctaatgaatagattaatattaagtagctgaagatttggtgtttaagttaaggatatcaacgtgtaaacacaatggatatttatgacmccatgtctaagcacaactcaccttagttttgcaggttgagggccccttacatatcatactaggcacaactttcacaatcacagttttaatgaatataattcatgttcttag

SEQ ID NO: 178693 - DNA, 527 bp, Homo sapiens
cataagaaccaaattatctgctctcattgacctttcgcttttaagttgaggaaggactgataaaataaataaactcataaatgattatctaatatttcaaatggaaaaaagtgttatgaagaaaaataaagtggaaaggattaaaaataatggagtgtgatacatggtgcagtattaatacttttaagcaaacttgaatgatacaattagaagagccatgtgggaatcaccagaagagaattccagagacacctgaaattgaaatgccctactcataaatggatagctggtaacaaacttatatgtggtaattaataaaatggacaattctaatgaatagattaatattaagtagctgaagatttggtgtttaagttaaggatatcaacgtgtaaacacaatggatatttatgaccccatgtctaagcacaactcaccttagttttgcaggttgagggcccmttacatatcatactaggcacaactttcacaatcacagttttaatgaatataattcatgttcttag

SEQ ID NO: 178694 - DNA, 570 bp, Homo sapiens
ttgaatactatgctaatggaagcattcagcytctaaattttatactattattttatacatttgtctattacctatgatataacaattcaaatatgtagttaatattatggtacataatgtgattatggtatacaacattataatatgtattttatagtcatcctaatttttctactatgtatgaagcatgggtttctaaaaataatattctcagagcatctagatatgaatatttgcttggttaaaaatataagagacacttaattcctacaagataggaaaattgttttcttccttaggggaatactctttattgtaatatgtaaaataataatatatttaagtcatggaaaatgatgtattcattttcttttgcacattttgcataatattttccttttatttcttaaggttcaataggtttagaatatatttccctctatgtatcttttagctttgatttaactcctttagttgtgtgtttctcagtacaataaagacttgcctttagtcaactgttgaggtacacagagaaatttatttcatttgattaaacatgttttatttgcc

SEQ ID NO: 178695 - DNA, 566 bp, Homo sapiens
atatatacacaatgaaatactatttagctttgaacaagaagttttgccatttacaacagtatggatggaactggagaacaatatgctatgtcaaataagccaggaatagaaagayaaatagtacatgtcttcacatatgtggaatctaaaacaatcaaactcttagaaggcaagagtagaatggtggttgctagaggcagaggctgagggagggggtggtggtcgacagaggaatggagagatggccaaagggcacaaagcctcagaaaggaggaatactttggattttttttttttttgagatctattgcacagcatggtgaatatcataaataacagtctgttgtacatttcaaaataactaacacagtaaatttcaaatgttctcaccattaaaaaatggtacgtatttgaggtgatggatatgttaattagcttgatatattctacattgcattcgtaaattttaatatcactttgtaccccataaatatatgcaatgtacatttgtcaattacaagaaaaaagaataatctctttgcaacgattcctcacaaaactgaata

SEQ ID NO: 178696 - DNA, 566 bp, Homo sapiens
atatatacacaatgaaatactatttagctttgaacaagaagttttgccatttacaacagtatggatggaactggagaacaatatgctatgtcaaataagccaggaatagaaagacaaatagtacatgtcttcacatatgtggaatctaaaacaatcaaactcttagaaggcaagagtagaatggtggttgctagaggcagaggctgagggagggggtggtggtcgacagaggaatggagagatggccaaagggcacaaagcctcagaaaggaggaatactttggattttttttttttttgagatctattgcacagcatggtgaatatcataaataacagtctgttgtacatttcaaaataactaamacagtaaatttcaaatgttctcaccattaaaaaatggtacgtatttgaggtgatggatatgttaattagcttgatatattctacattgcattcgtaaattttaatatcactttgtaccccataaatatatgcaatgtacatttgtcaattacaagaaaaaagaataatctctttgcaacgattcctcacaaaactgaata

SEQ ID NO: 178697 - DNA, 524 bp, Homo sapiens
gaaaggatctagagaatagatgcctctctccatatggcatctattctctagattgttttacatggagagaaagagattgaaagggagggagggggagagggagagagagagcgagggagagagggagagasacactaaggaacaccaaggaaacagataatgtgaataaagaagccaactttgtagtggatgctccagtcaagcccatccaagcagacaccacatgacttagaaatgaactgcccagtttaggagattttgttatataggtaattggaattatgatagataaaaaaatccaatcaaaacatagtatctctttccatgagaacgtattactgaccttttgttgaagaaaagattcagtataatcaatttgataccaaagagttggcttgtccactctagtttatggtaccatatcaggtgctcaggttgttccctgccattggcaactcgagcactatgaagaacttgtaactcgattggcccacatatggacaatctctattgtttactcaatt

SEQ ID NO: 178698 - DNA, 524 bp, Homo sapiens
gaaaggatctagagaatagatgcctctctccatatggcatctattctctagattgttttacatggagagaaagagattgaaagggagggagggggagagggagagagagagcgagggagagagggagagagacactaaggaacacyaaggaaacagataatgtgaataaagaagccaactttgtagtggatgctccagtcaagcccatccaagcagacaccacatgacttagaaatgaactgcccagtttaggagattttgttatataggtaattggaattatgatagataaaaaaatccaatcaaaacatagtatctctttccatgagaacgtattactgaccttttgttgaagaaaagattcagtataatcaatttgataccaaagagttggcttgtccactctagtttatggtaccatatcaggtgctcaggttgttccctgccattggcaactcgagcactatgaagaacttgtaactcgattggcccacatatggacaatctctattgtttactcaatt

SEQ ID NO: 178699 - DNA, 524 bp, Homo sapiens
gaaaggatctagagaatagatgcctctctccatatggcatctattctctagattgttttacatggagagaaagagattgaaagggagggagggggagagggagagagagagcgagggagagagggagagagacactaaggaacaccaaggaaacagataatgtgaataaagaagccaactttgtagtggatrctccagtcaagcccatccaagcagacaccacatgacttagaaatgaactgcccagtttaggagattttgttatataggtaattggaattatgatagataaaaaaatccaatcaaaacatagtatctctttccatgagaacgtattactgaccttttgttgaagaaaagattcagtataatcaatttgataccaaagagttggcttgtccactctagtttatggtaccatatcaggtgctcaggttgttccctgccattggcaactcgagcactatgaagaacttgtaactcgattggcccacatatggacaatctctattgtttactcaatt

SEQ ID NO: 178700 - DNA, 510 bp, Homo sapiens
aagcatacaacttatctttaagattcatgatggacaaatcatcccttcataatttttacgcattttaaggggatggtgaaactaaagggggaaacacctttaaaagatttgaacctgtggctttttcctgtgtttcccaacagaattgagttttaatactcctgcagattttgctgtgcatccaaaaataaatccaaatactgacagcactcttaatggatccttgatctcagtaatgaaaggatgagtaaatgtcagcattcccaaacatctattkttttttaatgctagaggtcaaacaataatttacactagcattgagagaaatatttcctgggatgataagcagggagtcatgtctatagtcatgtctatggatatatttgaatgtatatagttacatgagaaattaaatacagcaacacattactcacatgaatttagcttaaaaaataattctagacagtgaaaataattgttttaatatccctttactacaacataaacaat

SEQ ID NO: 178701 - DNA, 586 bp, Homo sapiens
tagcagaaatccacgtcaagattgcctcatacaactattaaacaggatgcctaaggaaggcttcaggcattgttcaaccatagggaacaaatgatatgatccggactttcttaccattgcttttttgtcatcttttggttctgcctttttctgcatattagtttcatgtttttgtgttgtaagcatcttcatctacaytgtaatggagatagttacttgaagattctctaggggaagtcaatacatgtttataataataggtcctcaaatgcaattgatgtcttattaattggatccagcagaaccgattggaaggaattttcattagcctggcaatagttacgtgtctttatctgaacaaatcactgtgatccaatacatatgaaaccattattagatagtatgagttaagtgctcactcactgaatgtgtttaaaaacagagtagtctgaatgatgctccaccagatctacaaatagaaaaggtagaattctctaaaagaagaaatcttgggcaaatgctaacttcgtggagttcatagtcacttgaggcaatggttcccaggggaaaatagtaaataagtaag

SEQ ID NO: 178702 - DNA, 609 bp, Homo sapiens
cccctgcatgccctagttctctctcctgctgccttgtgcagaggcgttttccactgtgattgtaagtttcctgagcacccaagccaagtggaactgtgggtcaattaaatctcttttctttataaattacccagtcttgggtatttcttcttagcagtgtgagactgggctaacacattaatataccagcatttggctccagagtcataaaatggatactgggaaaaatataaatgcaggtcacataagaataatcttcaaagawgactgcttaaaaacacaggagtgtcaaaaatgaaagtgtacaactctaaacaaaattgctcacaacagaaaagtagctattgcactcagtaaacattggtgggaacacttggatatgaggctgtgtatgttggatattgcattaatcactaacacaatttggtaaaactgtaaaggtgggatgtagaaaaggctcaaatttcagttcccccttgatcaccttcaaatagatttcaagtaaatatcttgaatggcttttgtacatgtgcctgacactgtttccttattcttaggataaattgaagcctttcattgcctgagagttctaaagtgataaacaattac

SEQ ID NO: 178703 - DNA, 584 bp, Homo sapiens
ctcaaagggcttagagagctggcagctgcaactctggtgctggtcacccctccctccaagagctcagcaggcttaagcttagtggctgttgagaatctgcagggctccacagttgggaccctaggccccagttgcatggactcaccagtgggctcttccgatctgtgartttcacagttccttggaaagagcacattttccaaggctgagtaacatactcactccctgcctcctttggctgagggctgccctgccccatgtggctctcaggtgggctcccacacaacagtcctcttccttcctctttgtgggtcactccagccatctagtcagttctgatgatagaagctgaatacctcagttgctggtgcaagtttcacatgtggttacagttcttttcaatggaaacctcctattcccactacttctagttggccatcttggccctgcctgccaatgttttggtttctaacatactatcttttctgttttttcatactatcttaattaatagggccaatgattaatcagatgctactggttaaagctggggaactgtctgttgtattgcagagagtgtatgc

SEQ ID NO: 178704 - DNA, 611 bp, Homo sapiens
attttatgatattagtactgttattttaaataattttgctactcagacacattttctctagtagaacacaagtataaatatattgaggattctctatagtaattgcaattagtgctcaataggggtttaattaacaacacagaaaacatatattaatgatgcaggctgtktttgattaatagcatatctaaattaattacaaacattatgttaatattaactgtgtattgtgtaaaaacatgactagaatttataaatggatagaaaaattattttgtttcattttatttacttattttagacttaaaaaatgaaaataccttttatgagttaaaatatttaaggctaaaatatattaacattaacagtatttattttgattggtgtatttttacttctctttatttatcatctgtcatatttgttaaatagctatattatcaaagatgccttcctgatataaaacatcaagttacatttgatctctcaaacatacactcagtgattgctataaaaattatttatttctaaatgtagacacggactcaaaagacctggaatttctcaggttattaaataaaaatgataattactgcgtaaagctcctgaga

SEQ ID NO: 178705 - DNA, 611 bp, Homo sapiens
attttatgatattagtactgttattttaaataattttgctactcagacacattttctctagtagaacacaagtataaatatattgaggattctctatagtaattgcaattagtgctcaataggggtttaattaacaacacagaaaacatatattaatgatgcaggctgtgtttgattaatagcatatctaaattaattacaaacattatgttaatattaactgtrtattgtgtaaaaacatgactagaatttataaatggatagaaaaattattttgtttcattttatttacttattttagacttaaaaaatgaaaataccttttatgagttaaaatatttaaggctaaaatatattaacattaacagtatttattttgattggtgtatttttacttctctttatttatcatctgtcatatttgttaaatagctatattatcaaagatgccttcctgatataaaacatcaagttacatttgatctctcaaacatacactcagtgattgctataaaaattatttatttctaaatgtagacacggactcaaaagacctggaatttctcaggttattaaataaaaatgataattactgcgtaaagctcctgaga

SEQ ID NO: 178706 - DNA, 611 bp, Homo sapiens
attttatgatattagtactgttattttaaataattttgctactcagacacattttctctagtagaacacaagtataaatatattgaggattctctatagtaattgcaattagtgctcaataggggtttaattaacaacacagaaaacatatattaatgatgcaggctgtgtttgattaatagcatatctaaattaattacaaacattatgttaatattaactgtgtattgtktaaaaacatgactagaatttataaatggatagaaaaattattttgtttcattttatttacttattttagacttaaaaaatgaaaataccttttatgagttaaaatatttaaggctaaaatatattaacattaacagtatttattttgattggtgtatttttacttctctttatttatcatctgtcatatttgttaaatagctatattatcaaagatgccttcctgatataaaacatcaagttacatttgatctctcaaacatacactcagtgattgctataaaaattatttatttctaaatgtagacacggactcaaaagacctggaatttctcaggttattaaataaaaatgataattactgcgtaaagctcctgaga

SEQ ID NO: 178707 - DNA, 611 bp, Homo sapiens
attttatgatattagtactgttattttaaataattttgctactcagacacattttctctagtagaacacaagtataaatatattgaggattctctatagtaattgcaattagtgctcaataggggtttaattaacaacacagaaaacatatattaatgatgcaggctgtgtttgattaatagcatatctaaattaattacaaacattatgttaatattaactgtgtattgtgtaaaaacatgactagaatttataaatggatagaaaaattattttgtttcattttatttacttattttagwcttaaaaaatgaaaataccttttatgagttaaaatatttaaggctaaaatatattaacattaacagtatttattttgattggtgtatttttacttctctttatttatcatctgtcatatttgttaaatagctatattatcaaagatgccttcctgatataaaacatcaagttacatttgatctctcaaacatacactcagtgattgctataaaaattatttatttctaaatgtagacacggactcaaaagacctggaatttctcaggttattaaataaaaatgataattactgcgtaaagctcctgaga

SEQ ID NO: 178708 - DNA, 497 bp, Homo sapiens
atccactgtaactcacttgagtctccaactttataaaattcagtctttaacctgatattcaaggttgattaacatttcatctcaccttcattctccaaacacartttaaatattctgttccttaaatctggcagtgaaaaaaactacgaatattaaaaaaatactgagcttgctatatatttttaattaatagaggttatgattatcatagtagttataagtgtgatccatggtatctaatctttagcttcatgtgtgatataatcttaccaatccataaataagtaatttattcagaagttacttataagaaatctacaagatctttatctcctacctgactcccacctaccaaacttgaattttctgctttaagtccctggatttcagtatgacttttatatgttttctttatagcattttaaatagcacattaaaattatttgttcatatatccatgcctcaaaagcctatgaactccttgagatttatacttc

SEQ ID NO: 178709 - DNA, 377 bp, Homo sapiens
tggccaaaaacaaaaagctaaaaaggacaaaatctttataggtgcacctaaattaaratatctatatttgttctgataaaaaattcagaaaaatcttaatctgctctgagattttactattaaatagaaaaaaagaagtttaattggcttacaatcccataggttgtacagttagcatggctgggcaggacttaggaaacttacaattatggcagaaggcaaagaggaagcaggcacatcttacatggacagaacaggaggaagagaggggggtagatgctacacacctttaaatgaccagatctagcgagaactcactcactatcatgagaatagcaagggggaaatccgcccccatgatctaatcacatcccacc

SEQ ID NO: 178710 - DNA, 377 bp, Homo sapiens
tggccaaaaacaaaaagctaaaaaggacaaaatctttataggtgcacctaaattaagatatctatatttgttctgataaaaaattcagaaaaatcttaatctgctctgagattttactattaaatagaaaaaaagaagtttaattggcttacaatcccataggttgtacagttagcatggctgggcaggacttagraaacttacaattatggcagaaggcaaagaggaagcaggcacatcttacatggacagaacaggaggaagagaggggggtagatgctacacacctttaaatgaccagatctagcgagaactcactcactatcatgagaatagcaagggggaaatccgcccccatgatctaatcacatcccacc

SEQ ID NO: 178711 - DNA, 614 bp, Homo sapiens
gtaatataaatgtttgcttgtgtagcatctaagatttctgaactagtaatcaaactctaattaaatcacaccacaggaggatggaaatgcaattcaattaacaagattcttcttttttgatacayttgattctttctccttggtctatttctttgatagtgtgttctaatttttcaatgtcacattagctgataaaaatcaacaagaagctgaagagagtgagaagcccgtcacattgtcgaattgctgtaaatataacctgataatgaatgatgcattttgaaaatatatgcatatgcttctatcttggtcaatgtagcagcacgtaatagagagatttgggaattcaactgcagtttttaaaattaaaatacttaaaagtgagacattatacttacccagtgttaaagacacaattattcaattagtttatttttattctaaaagcatatgctgagcatctaagagctatagctttagtgaaattataattacagttcatctattctagagatacttataatccaagagcagaatcagatatatacacaacaaattagggaagatataaggtattgagttcaaagatgaagaagtataaaaggaagggcggg

SEQ ID NO: 178712 - DNA, 614 bp, Homo sapiens
gtaatataaatgtttgcttgtgtagcatctaagatttctgaactagtaatcaaactctaattaaatcacaccacaggaggatggaaatgcaattcaattaacaagattcttcttttttgatacatttgattctttctccttggtctatttctttgataktgtgttctaatttttcaatgtcacattagctgataaaaatcaacaagaagctgaagagagtgagaagcccgtcacattgtcgaattgctgtaaatataacctgataatgaatgatgcattttgaaaatatatgcatatgcttctatcttggtcaatgtagcagcacgtaatagagagatttgggaattcaactgcagtttttaaaattaaaatacttaaaagtgagacattatacttacccagtgttaaagacacaattattcaattagtttatttttattctaaaagcatatgctgagcatctaagagctatagctttagtgaaattataattacagttcatctattctagagatacttataatccaagagcagaatcagatatatacacaacaaattagggaagatataaggtattgagttcaaagatgaagaagtataaaaggaagggcggg

SEQ ID NO: 178713 - DNA, 578 bp, Homo sapiens
tggcaattaatcttttatatttgaatatctttgtaagttaatttcaaacatttccgttacaatgttgatgataaacaaaagaaaaatgtatagcaaaagaaaatagaatgtatatatacacaaatatgtgtgtgtgtgtataaacacacatgagcacacagtgtctttgtaatatgctatctttaaataatggaagaaagaaaaaaacatgtgattaagttcatctgatgaaataagaaaatatcctgactatagatattgattatactttaaaaaaygtttacctatgaaaaatttaagcacttgaaaatatgaaatgcaatatgagatagctatagattctctgcttaaatttaacaaaagctaacttttttggcaaaattaaagaatgaatgaatttatatgattgacgaggaaataaaaggtgctaggatataactccgatgattcactcctttgttcagcaccctcaccttgagtgaaggtggacaccgtgactttcttgcaaccaatggaacatagaaaagccgacaggctgtcactcttatgagtactttgcattgcataagattctgtcg

SEQ ID NO: 178714 - DNA, 475 bp, Homo sapiens
tgcctccacttgcctagtaactctcttattctcttatcatgatgcacttgccactattttagattattgatcagatgggtcattgattattaattcttacagatttctacaaaaacttaagctgcataggaataagcactttaaatttttcatcactgctttcctagaaatattccctcagacatggtagtcctttaagaaatatttattgaataaataaaaactgcaaaaagaaaggttgcaaaatttcacttaatgcttgaatagctatcttacaatgatgrtaaaaacaaacatgaatctccagaaagtaaaatattatttaaacaatttaaggaagaaagtctgttggaggtaggatataattctgacataaaaattagaaaatctaaggtttttcaacgtgctttctaaatatgaaagaaaatttaaggatcaaaattattttctactctgcagaatctttagtttcata

SEQ ID NO: 178715 - DNA, 416 bp, Homo sapiens
tagaacatcagaagtagttaagaaaaaactgataatgttagatatgttatttcagatgttatctccaaagtctttcccatgaggcagttttgccatgattaagtcctagaagcaataaaaggttaaatatgctgaagactttaggggaaggtctttaccatttttgaataaacactgctcaggagtaaatcctaaaatatgtatgatctggtgctttcctcaagttttgctaatggttttaagtaagaaatagaaaattaamtatggaagaaaaactgaaatcagaagtcatctcattaccaatcttccaatacctttctgaactttttgagagtcctagaaccaaaacaggatagcattcagatagactgatagctttacagataaaaacaaaacaaaaataaaataaaattttt

SEQ ID NO: 178716 - DNA, 589 bp, Homo sapiens
tagatctgtatccagaacatccacactctaattggaaggaggaagaaagcatgtcttacagtgttaaggttactgccaggaattcagagacactgcatctgcttacatgtgtgggaagaagagttaagaatccaatatgcatttaaagaaagaaagaaggcaagtgacgtgttttartatccttttatatatgtcaatcacagacttcctggccaaaaaacaaacaaacaaaaaaactaatgatattggatagcagcaaagtctgtatgccttggacactttcagagggaagtacttggcaggccgtttaggactgtttgtaggaaacaaaaataaaatatgtggatatatggacaatggctccctggaaaatgtcactaaagctctatcactatcttaacataaaatggaagtgtttcataactgatatgactctctcttgtgtaagtactgtggttacacatatcagttagatgccttatatgtaagtcatgaccaagcatgtctaatgtagtgagaaggagcccagtaaccacattaaaagtcctgtatcactctttttaaagtgccatgagattacttgtgtaac

SEQ ID NO: 178717 - DNA, 351 bp, Homo sapiens
tactgccttggattgctcatgtctaagttagtatctcgtgtagacacagctgatggagrgaggctgggtcatgtgcctgtaccctgcttgctctggcatctgccttggagaggcaggactcattcttgtgttaggaaattcccagaacataggcagggttttcaaaccctgctaagcagccagaacacatgacacatgtccactctgcactgactgagcattccagtctgaggaaacatgcaaaggcacagaggtgtgaaccggcagagcacatttggggaacggtaagcagtttggttctgcaggagaatagagcagggagtgctgggagagtggcttggagcagccggc

SEQ ID NO: 178718 - DNA, 531 bp, Homo sapiens
aaaatcctagccaaaacaaagaacacagctaataaccctggaattatttcaccccctccagagctctgcctttatgtgaggctgactgcctttgcccatacccaccctcacatgggatggagcccttgcttgaggcctccagctacttggccgcaacttttgggcaggaaagacaactaggatgggtgaaaagtgaggaggtgattggaggtgatakagaatgaggaactcacatgggattatacgaagcgggacttataaagtgaatttgaactataattaaatgctctccaaaaatgctgttacacattgaggtgtagatacccttacttaatctggatgcatcactatgttcacagactaaaatgctcactgttggcatatgaaacctcatttctaataaaaagacaacatgccatcccacgtcaatttagtgatatacgtacatgtgaataattaaagtgtgactagggaatgacacatatactaactgtagctatttattgcaaaacattagaattacgcattgtg

SEQ ID NO: 178719 - DNA, 531 bp, Homo sapiens
aaaatcctagccaaaacaaagaacacagctaataaccctggaattatttcaccccctccagagctctgcctttatgtgaggctgactgcctttgcccatacccaccctcacatgggatggagcccttgcttgaggcctccagctacttggccgcaacttttgggcaggaaagacaactaggatgggtgaaaagtgaggaggtgattggaggtgatatagaatgaggaactcacatgggattatacgaagcgggacttataaagtgaatttgaactataattaaatgctctccaaaaatgctgttacacattgaggtgtagatacccttacttaatctggatgcatcactatgttcacagmctaaaatgctcactgttggcatatgaaacctcatttctaataaaaagacaacatgccatcccacgtcaatttagtgatatacgtacatgtgaataattaaagtgtgactagggaatgacacatatactaactgtagctatttattgcaaaacattagaattacgcattgtg

SEQ ID NO: 178720 - DNA, 611 bp, Homo sapiens
ttatggtgcttattattctatttgatactgagaccttacatgatgctaaggaatgaaaggtagagaagaatatgagcctagtgccaaagtcttcaataaatgtggaaggggaccaagaawtacatatatactgggacaaggagcagagattttccaaactacgcttcccagtggagccaatatatcataattattttgctttaagcatgtatttcattatgcaactaataactttctgaaaacaagagactaatatgacttctgctcctgtcatttaactcaaagtgtttcaacccattcccattatttataactacatgggtcctgattaaaatacacctatggggtaagatgcaactgggatacagtgagaagactggtactcctaactgtcaaaggtaattattttaaactgttctgagaattaggagaatagagttaacacagagctgttgctaggatataaacatttctcagaaattttccatatacaaacttcatcaagatcaatagctttggttactctcctctcaaatagtaattaattgagaagggcttagggcaaattaattacttctttttgtttgagcttactcattaaaaataacttt

SEQ ID NO: 178721 - DNA, 484 bp, Homo sapiens
gtgtgctattgaacagcaaagtcaatttgatattagtttctgaagagcccccaaaaagccaattgccaattggcaattagcaagactaccatttttagtctagatgctcaaaagaaagtgctgaggtcaaaaagggtgaaaagagttaatctgtagtttagcttgatctttagttttgtaacattaccattgaactgtaatccaaagctttttgttcaataatawtattttcccttgaacaattgtgttgtaagtctgtgcacagtaggcttctaaaatgttaagacatgtttatatacacatttacactttaaaaagtaggtctctcagtgaataaattttcatttatctatacaatattctttctacttgtaaaaatgtttcattccagtgttcatgtttaagaatgcctataattaattgtttgtaatagtcatccatcaagaataaaattgcaaaataaatattttacatacgtataata

SEQ ID NO: 178722 - DNA, 484 bp, Homo sapiens
gtgtgctattgaacagcaaagtcaatttgatattagtttctgaagagcccccaaaaagccaattgccaattggcaattagcaagactaccatttttagtctagatgctcaaaagaaagtgctgaggtcaaaaagggtgaaaagagttaatctgtagtttagcttgatctttagttttgtaacattaccattgaactgtaatccaaagctttttgttcaataatatyattttcccttgaacaattgtgttgtaagtctgtgcacagtaggcttctaaaatgttaagacatgtttatatacacatttacactttaaaaagtaggtctctcagtgaataaattttcatttatctatacaatattctttctacttgtaaaaatgtttcattccagtgttcatgtttaagaatgcctataattaattgtttgtaatagtcatccatcaagaataaaattgcaaaataaatattttacatacgtataata

SEQ ID NO: 178723 - DNA, 481 bp, Homo sapiens
ttttcatacatgtttggacttttcatacatgtttgtaattttcacttttgtgcataagattaatataactatgaaaatatttgaatttrccatctgatttaccaaagccctacagggggtaattatataaatattcccccactattctgtgatattcaccggcaatgactaaaggctttcctactagtagtcgtcgtcatcataagtaaatagtgatacttaaaagttgcttattttgcacttggtaatctcttcatttgaaaggaacactgctatgtgcttggtagattacaaacaaaaaggaaaaaaaaaaaaagaaggaacagtactaagcaatattgcattttctctgccccatggataacaaagcagccttgaagtggggtgcctccatttcctggggcttccataacaaagtaccacaaactgaggggcttacaacaacagaaatgtcttctctcacagttctggaggtcagaat

SEQ ID NO: 178724 - DNA, 481 bp, Homo sapiens
ttttcatacatgtttggacttttcatacatgtttgtaattttcacttttgtgcataagattaatataactatgaaaatatttgaatttgccatctgatttaccaaagccctacagggggtaattatataaatattcccccactattctgtgatattcaccggcaatgactaaaggctttcctactagtagtcgtcgtcatcataagtaaatagtgatacttaaaagttgcttattttgcacttggtaatctcttcatttgaaaggaacactgctatgtgcttggtagattacaaacaaaaaggaaaaaaaaaaaaagaaggaacagtactaagcaatattgcattttctctgccccatggataacaaagcagccttgaagtggggtgcctccatttcctggrgcttccataacaaagtaccacaaactgaggggcttacaacaacagaaatgtcttctctcacagttctggaggtcagaat

SEQ ID NO: 178725 - DNA, 483 bp, Homo sapiens
gaaacaacacacactggggacttctggagggtggaggttgggagggagaggaggatcargaaaaatagctaatgggtactaggctcaatgcttgggtgatgaaataatctgtacagcaaatccccaagacgcaagttgacctatgcaacaaacctgcacttgtacctgttaaattaaaataaaagttaaaaaaatgaccatatagtgaaaaaaagaatgtttttatctttctatattttctatattttacaattttgcttctatgaaaatcatctagttttaccaaataaaaaagttttaaaattagttctataacaccagtttttactgattccaaactataattcttaagaaaacactcttcaatttaaacacgtaaattgaatttaatggtaacattgttagtatttcaatttaaatgaaaatgtgttggcagggaaagaatgtgtgaccaatatcatagatgtatatcaattgcttatt

SEQ ID NO: 178726 - DNA, 482 bp, Homo sapiens
tatggcacaggcagctcccaatattacaaagaaactacagaagcaagttataggaccagagagcaccttagagaacctcctgaaggtggccactttggtcttttataatagggaccaggaggaggcctaagagaaaaagaggaakctcaggagaagaacaaaggctctagcagctgctttgcaggattacaaagtccaggacccctgaggtacatcggctagttgctatcagtgtggcaggcaagggcattttaaggagtgcccaaacagcaagaggaagccaccttgaccctgtccagcctgtggtggagaccactggagatcaaactgaccccggaggtagaggtcaccaggttcggaaccagtttcacagatattccagcaggacggatggatcccagggctcaaacccccggcttcagtagctcaaactgccattacagcacaagagccctgggtgattctgtaaattgaaggaagta

SEQ ID NO: 178727 - DNA, 581 bp, Homo sapiens
ttgtggatgaataaaatatatgttgcaattgttgttttgttgttgttcataacagattatgagaaacaaaatatgtaatgggaacaattttttcctgttctatgtgtaatatattaactttcaaagaagctgaaacccagtaacgtatttccctatattttgtggagctatccagttcctcattgtcacagcatttattagagatatatgtgttttctccagagtaagagacatctgggaaacaaggtctcctgaaatatcatgtgacttggcctcagcaattagtatgaacagaatggaaataaaaaataaaaacacaaaaacttctgaaagtaaacagaataagcaataacataatacctgtacagattgcattaaaagctgtcatatggtcrgagaggaaaagttcttggatgaggaaggggagtaggtagaaaagaaaagtgatagagtggttgtcttgatatgttggagagaatggaatttctaattgttgtctgatgatagtgcttagatgcaataaaaaacaaaatccatcttttaaattagtatatttgaaggttaagaaaacagttccccga

SEQ ID NO: 178728 - DNA, 620 bp, Homo sapiens
ttatataaaaaaagtctattaaaaataatttactgatttccaccttaaggaagatgaagtgtatgcatttttcttaatcttcccactaaatgcaactgaaaatccaggatattatacataaaataaacaagattctgaaagatagaaagaagaagacaaccctgtataaactccaagatctgaaggttgacatggtgatgagttgcccaggtgtataccacatttggagctgaagaagccaaaagcccagaaatgctcatgattgaagmcaaaaaaaaaaaaaaaaaagaaagaaagtaagaaaagaaaagaaaaaaaaacagcccaaataaaaacttgctctctcttaccaaggatcaaaaagagaaggttcagtaagacacaataattttaagcaataacttctctaccagccaaatcgcataaaataattgtgtggccacattctaaccaacaaacgctgagtagggagtgtatacaaccacctttgcaaggcatccaaaatctcccacatgaggggtgccagagaaagccaattaggaagtaaggagcaggactgaaatctcaaaaagtccgtaatgatctctccctgacaccccagcatcagtaaagaacatggg

SEQ ID NO: 178729 - DNA, 624 bp, Homo sapiens
  misc_feature (1)...(624): n = A,T,C or G
ctggatatttacccaaaagaaaagaagtcatttatattttaaaaaaggcatatgcacacaaatgtggattgcagcacccttcacaattgcaaacatatggaaccaacctaagtgctcatagaccaatgagtagatgaagaaaatgtggtttatatacaccatggaatattattctaccataaaaaggagtgaaaaaatgtattttgcagtaacttggattgagccagagtaccttattctaagtgaagtaactcagaaatagaaaacccaatgccttatgtcctcacttataagtgggagctaagctatgggtatgcaaagacatacacagtgatataatggactttgaagactcanaagtgggggaatgggatgagggtgtgggataaaaatctatgtattgggtaaaacgtacaccacttgcatgacaggtgcactaaaatcttaaaattcaccactatgtaattcatccatttaaccaaaaaccacttgtaccccaaaagccaytggaaaaaaaggttttttaaaaatacatttatcccagcctaggggaaagtttaatgggaagggtaggaggcaatatagctctgaatttatgaagtcgcaggtagcaggaccagccct

SEQ ID NO: 178730 - DNA, 578 bp, Homo sapiens
caaccctggggcacagggaggaaagaaaacatttcagggctattagacaccaaacaccactttcaaacggggctgtacctggtgagaaagggggatggccatccaagtgtccacacttggagattctgcaaagaggcttccccttgcaatgattctttatgcagcccatatttttctgtgagaagtggcaagacagaaatgaaagctgtgaattgatctgcctgcttagtaagccaagcttataaaagaaaaaaatttgctcaagtttcctgaccttgtcaccttgtttaagagactgaaagaacctgacctttccttctaccattttgtgtgcttcttcaacttggcatgaattgtgatttggaatagagttaaaatctcttttggtgttagacttattcarggaaaaatatatccaaggatatataattctgaacttccaagaaaaaatcctaaatgcagcaagtaatgcattttaaaggaaacgtgaaagtataatttgtgttaaattgttaaagggttttaaaacattaaaattcatttattaaaataacttgcattttacatgtattgtagaa

SEQ ID NO: 178731 - DNA, 615 bp, Homo sapiens
tattgtgttggagtattgaaggccagaggcatgtaacagggtccaaatatgcatgaaaaaaaatggcgaagaccaagtctcaagttagaagctagttwgcctaggaaggcatgcattccaggtattgggacagagaaaaatgggcagcctaaaatcaagtcacaggacaagtggtttgtaagaggagaagaaagaaagaaggctgaagaggcctcagcaatgggcataatgccaagcctagtgactgcggtcattgtgtttcacagaaatttgtaagaaaatctaccttttgtggaaagatgatgaacagtttttagtttgcatggtggtggtgttcaagcaaaaaatgtccaagatgtaattggagaaaagaatatggagctgctagaagagctcaggcacagagacagatttaacagtgagagctaacatttgttggaggctcaccttgcaccacacaccatgtcgcattcttctcttgtggtagaaaaaacaccagatggtatataacatcctttcagaggaaaaggtaatgtcttataagaggagaagggcttgtgaaagctagacttacaagaaaccttgttattaaaatttgggtctatatttaagccc

SEQ ID NO: 178732 - DNA, 615 bp, Homo sapiens
tattgtgttggagtattgaaggccagaggcatgtaacagggtccaaatatgcatgaaaaaaaatggcgaagaccaagtctcaagttagaagctagttagcctaggaaggcatgcattccaggtattgggacagagaaaaatgggcagcctaaaatcaagtcacaggacaagtggtttgtaagaggagaagaaagaaagaaggctgaagaggcctcagcaatgggcataatgccaagcctagtgactgcggtcattgtgtttcacagaaatttgtaagaaaatctaccttttgtggaaagatgatgaacagtttttagtttgcatggtggtggtgttcaagcaaaaaatgtccaagatgtaattggagaaaagaatatggagctgctagaagagctcaggcacagagacagatttaacagtgagagctaacatttgttggaggctcaccttgcaccrcacaccatgtcgcattcttctcttgtggtagaaaaaacaccagatggtatataacatcctttcagaggaaaaggtaatgtcttataagaggagaagggcttgtgaaagctagacttacaagaaaccttgttattaaaatttgggtctatatttaagccc

SEQ ID NO: 178733 - DNA, 290 bp, Homo sapiens
ttcagcctctggtaagctaggagtgaccatgtgctctggtgggagtccctgggaagacccattctctcaaataaaatttcaaaaagagaagggttttacactttgccctttagctattctttattctgttctgcctgmaaatcagatatattgcctttcagggtctcaccaaacctaagaggtgcaacattctctttattatgacaaatgctcttctatgctaagtgtggtagaacagggaagatggaggtaacttaggtcctagatggcatccttacttcagctctgga

SEQ ID NO: 178734 - DNA, 488 bp, Homo sapiens
cagtggcttcctcctgaaacaagtctctgcctgggccactaggagttcaacaacatcctttgaaatctgsatggagctgccaaatcttcacagctctttctttctgcaagcttgcagaattagcaccacatggatgttaccaaggtttacaatttataccttctgaagctgaagcataaggcatacatgggacttatttagccacagctggggtagctgtgaagcactgcactgtggtacaggattagaatcccaaggtggccctgggcagtgatctcatggagaatgtgatgtccagtctctggaaattattttgctctcctaggcctcttgacctgtgatgaaaggggcaacctcaaagttttctgaaatgtctttgaggtctttctcccattgtcttgaggtagagcacctagctcccttctattcatgctaatctctttggcaaatggttgctgggcttggtttcttctcctgaacatacttct

SEQ ID NO: 178735 - DNA, 523 bp, Homo sapiens
aaggaagtcaatgtttttttttttttgtagatgaagccaccaacaggcttcagaaagaatagacggtaaatgtctcttattggaccttaacagatgtcagtctctccagaaaagactttttaagagaaggagattgtctacagaatgcaaatttccctgacaagagatagctttgcagggccatttcaaaatatgtcaaagaaatacatttaggggtaaaatactttgatcctctgcagggcctatctgtcatgtgatgcttcaccagcataargttggaatttggtattttattgctacaaaaagtgttttgtcagttttaagatctctatttaatgttaaagctggtcagttgtgcctaaattccaaagggaagaggatataccaaggcatgtcagatgcccccttcccatcatggcctgaacagatttctttggggtccctttggccaagagggagggtccatcagttggttaagaggcttagaattttatttttggtttacacaagctagttaacatgt

SEQ ID NO: 178736 - DNA, 641 bp, Homo sapiens
ttttgacttctttttcttctttgtctcattatttacaagggtttttatttctttattgttgttttctcaaacattaggtaattttaattttatgatattgataggtaattcaattctctgttgtcaacaayattacattttattattcattgtgacaaataatatttgagcaacctggttttgcataatagattttaaaaatggggaagaaagtgaacagattgagagatttgcaaaatgagtgttaggctcttgccttaccaaaaattaaaagctaacatagacttgaacactagacaaatactgtttttcacatactaatcagtatgatggcaagatgaacttgttgactcataaataaactatgagtttgttgccatttcttgcttagaggtaatcagagtcaaatctctatgaacgactaataaaatgtgcaaggctaggtgcagttgacataaccaatgtaggcttccagaagggatattatctaggtatgggacatgtatccgacagcttaaactgaatgctgggaaagttatgtaagtttacagcgctataccaagaagcaaaggggaaacaagtgatatcctagtttatatttaaaaaatgaagacaaagtcctgctaatttttgtgtttcgg

SEQ ID NO: 178737 - DNA, 521 bp, Homo sapiens
aataatgcccaagcaaaagctatgaagagccagataacaaaagcaagaacacaaaataaatgtcatgtaaatatacaagagggttctgtactcagtaatatttaaatacataatctcaacatgattatagaaatgagatcttatattttgtctatcaaattgaaattgaatgcaaaggaattgagaaatatgcacatctcttacattactaaatatctacacatttcctgaagattagtttggccatgctgatcaaagtttcacratttagaataatatttatgttgtttttgttaagtagccattactacattgaaaaaacttttcccctatctgatgaattttattaattacatttttggtctctattgatataagcacaaattttttagtaagttaggtgtatcagattcataaaaaggaaaattaaaatacttagctattattgcacgtttgtctagttccctttgaatgtcatgtaatttgtttctctatagcttttaagctaaaatgttgtgttt

SEQ ID NO: 178738 - DNA, 568 bp, Homo sapiens
ttacttctcccctactttattttctgttaattcatttctgtggagtggtagttcctgaatacacttagaaatagaggatgaggggtgagggtgctacaggagcatttgtgtttctttggaagtggtgtgctcatatttctgggtagtacagattttgaatatatatacttgtcagaagaacaagaactgttctaaccttttaggcctgggctattagctgacctcttaaatctagtaccatcacctttctagtgaatggagctttctttaagaatstagcaagaggctcactttccattttcagttttggtggtgtgaatttggatgtgttttctaggtctttttgttggatttttgagtgagaaattacgaacacctgcatttaagataactagctagatgacattttaaattagactttggttacacaccctttttctacagcaaacagtattatgccaccctattagttttaaataaattacattataaatttaaggttagatgttcatttattaatttaatataaagtatctttaagacgtcaaacctggggtagaaacataaa

SEQ ID NO: 178739 - DNA, 617 bp, Homo sapiens
ttttgacaattatgaagaaaacttctgtaaacatttatgaatgggtttttatgtggatgtaaactttttttttttttttaggcggagtttctctcttgttgcccaggctgaagtgcaatggcatgatcttggctcactgaaacctgtgcctcccaggctcaagtgattctcctgcctcagcctctgagtagctgggattacaggtgccaatgaaaacttccaaacsttttaggtaaaaaccaagaaacacaattgttggattgcatggtaagagtatatttggttttgtaaaaaactggtgaactgtttctaagtggctgtactattttgcattcccactagcaatgaatgaaagctcttgtttctccacattcttgtcagtgttaggtgttgtcagtgttttgtatttgggccattctgatagtgtatattggtatatcattttattttccaattctctagtgacatatgatgttgagcatcttttcatatatgtttatttgccatacgtacatcttctttggtaaagtgtttgtatagatctttgcacatttttaaagggggttgttgagctttaagtgtcttttgtatactacactttggataacagtccttta

SEQ ID NO: 178740 - DNA, 617 bp, Homo sapiens
ttttgacaattatgaagaaaacttctgtaaacatttatgaatgggtttttatgtggatgtaaactttttttttttttttaggcggagtttctctcttgttgcccaggctgaagtgcaatggcatgatcttggctcactgaaacctgtgcctcccaggctcaagtgattctcctgcctcagcctctgagtagctgggattacaggtgccaatgaaaacttccaaaccttttaggtaaaaaccaagaaacacaattgttggattgcatggtaagagtatatttggttttgtaaaaaactggtgaactgtttctaagtggctgtactattttgcattcccactagcaatgaatgaaagctcttgtttctccacattcttgtcagtgttaggtgttgtcagtgttttgtatttgggccattctgatagtgtatattggtatatcattttattttccaattctctagtgacatatgatgttgagcatcttttcatatatgtttatttgccataygtacatcttctttggtaaagtgtttgtatagatctttgcacatttttaaagggggttgttgagctttaagtgtcttttgtatactacactttggataacagtccttta

SEQ ID NO: 178741 - DNA, 633 bp, Homo sapiens
ttttgtagggcagtgaagatgtgtgtagaaagttagatagaatatatagaaaattaatgatgcagagtcagcatttaattttatggggctagcattaaattgaaaaactgaataaatgatgtcatcatcaaattatgaaaggcttattagttatgcctagtatgaagattgtggattatttgtttatagaccctcatgttatttctaattattatattgcatgtaaataaaattttcccaactacagtgtaatcggttgacgaacagatattttttattaggggattattacatctctagttaatagcaagttttcacacagtcagagaatttatcttatacttccctggtgtctgtccatctcattgctttaggccaagcttaaagtattragttatttgattgaatcttctgagattttataactccccctttgtttgtttgtgaagaagagtttgtaatttagtatttactgatgatcttgtgacatattttacaggttaaggtggttgagtctcaaatcttaatatttacctaactcactatcaaatgaggaagtggaataaggaataacatgaggaaagacaaccaaatggaaaatgaagcataactttattattttggtaagctcct

SEQ ID NO: 178742 - DNA, 635 bp, Homo sapiens
atatttgaagggattctggtgttgattaaaagaaaattatagcaacatttgcaatgtttcataaagaaattggtggagaccattttactcttttattttttattctaaatcatttttcagactcatacataattaaagctatacaataaaaaagcatgattagaactaaccaactatttagctattttagttaaaaatgaatgggggcaactcaaaatcacaggttatttgctaccatttcacagttgatgttatcttaaactttcaacagaatttcagttctagtacatgattcgagtactttcgaagttccatttgaagtaccttgaagttgagcaattatatttgcattattatgggaggaaaaggggctttctaaacaaaaagagtatatttgctcacacacaatacaaacatgccactgttaagtaaaaacattgaaggtagagagaaactaaatgtataaaaagtgcaggtaaataatagctcaaacttaaataatggtaagcactatgttgagggaaaaagaaggtgtgaaattgcttaagactggaaaccaaacttagacttcttttttagaygctaaatgcaaaagacgtttttaatactagaaaccaaacactgttcttttacat

SEQ ID NO: 178743 - DNA, 584 bp, Homo sapiens
tttgccattgttttgtacaagtgaaaggtccgtggagcaatgactcttattgtttagataaaaagtagcatgatagaaattatattaaaacaacaaaaacaggagcatacttctctaaaataagaaaggggaagtattctttgaaatagtttttaacagttgcttgtgtaaggctaatttggattattttatggtaagatasagagaatttagatgaaattatttaaaaatgagtcctgaaaacttttctagaagtctaaatgaacactgtcacattgttctagtctggagctagtgagccaatttatctcccatacagtctctgtatgataatcatttccaggttaaccagggggtcagtctacttaaaaaatgagctaggcccctcagttttactctacaattaaatatttctcatcttttataataccttttttaaatactaagaaattcttagataattattgaatcaaagtgaattatttatctccagttatctttgttcttctgtgctaatgcttgcatattactattattattcagctatataacacaatgttagatgacatttttcctgttgccca

SEQ ID NO: 178744 - DNA, 386 bp, Homo sapiens
ggatagtttaacttcctctcaacctatttggatggcacttacttctttctcttgcctaattgctctgtctatatttctctcaccctttactttgtgtctataggtgtcattatacgtaagatgggtttcttgaaggtggcagacaaatggactttgtttttgctttttttatatccaacttgccactctgtgccttttaagtaggtcagttagatcacttacattcaaggtttacatttatatgtgaaattttgatgctatcatgaagttgttagctggttgctttgcagtttctattgtggttgctttatagtgtctatgagctmtgtacttaggtgtgtttttgtggtaggaggtattgttctttcacttccatgtttagaaac

SEQ ID NO: 178745 - DNA, 569 bp, Homo sapiens
gctgctatagaaattctcctcccaccccaggcttgtgatgggggatagcacaattccagcacctactgctaaggcaccttccacagttctggctgtggaggcccctgtgctccagagcaggaacttcaatctgtggcccaagacttaaatgattgtgcatccacactgcctgttgccaaagaacrgctttgtatcttcaagtctttttgaatgagatttttaaaagatcaaacaggaatataaaaaccaaaagaattaaggttccctccgccttcactactgactagtattagagtatgagaaaggcaaactatacaaatagaatattctagaagtaagtcaaataaattgatctacaggaaaatataattgtacactcaaaagagtgttgagattattagtggattattatgtccacaaattactgataacactaatgtatagagaattgttgatataataattttatgcaggacatctctgagatctgaagattatttcaagagttctagggtaaaaagtttaaggaaggctgctttaagttttttctcaccattcctccaccccac

SEQ ID NO: 178746 - DNA, 550 bp, Homo sapiens
tacatatacaatattactggaaaggggtagcctctgagtgagcatggcataggcatccctaattatcaatgaggtcacttacagggaaatcaaaccaccttagttcatctttcaatgttgttcaggactgacctgacctctatctggaayctgtgtatccattttcacctctgctaatatctaggcaagcaatgaaatagacatttgatttttgtggacagccttcttatacatttcctcattttcaataataagagcaaactggtgacatgcatgtttgctaatttttttattgcttgtgctaagtgttccattttgagaagaaagcaatttggcagtgtttagtgaccctctttcttagtgtcttcaccttggcatgtttttctgtctctgtcagacctgtgagaagatagttgttgctcagtgatatgttgttcacagaggggaaagcctcagtcacagggtctgtctccagtaacatttacaacacagggagtaccataaccagcagagtttgtgaaacctctttcttacagcgtgccaagaattc

SEQ ID NO: 178747 - DNA, 550 bp, Homo sapiens
tacatatacaatattactggaaaggggtagcctctgagtgagcatggcataggcatccctaattatcaatgaggtcacttacagggaaatcaaaccaccttagttcatctttcaatgttgttcaggactgacctgacctctatctggaatctgtgtatccattttcacctctgctaatatctaggcaagcaatgaaatagacatttgatttttgtggacagccttcttatacatttcctcattttcaataataagagcaaactggtgacatgcatgtttgctaatttttttattgcttgtgctaagtgttccattttgagaagaaagcaatttggcagtgtttartgaccctctttcttagtgtcttcaccttggcatgtttttctgtctctgtcagacctgtgagaagatagttgttgctcagtgatatgttgttcacagaggggaaagcctcagtcacagggtctgtctccagtaacatttacaacacagggagtaccataaccagcagagtttgtgaaacctctttcttacagcgtgccaagaattc

SEQ ID NO: 178748 - DNA, 618 bp, Homo sapiens
tgtttagtgaccctctttcttagtgtcttcaccttggcatgtttttctgtctctgtcagacctgtgagaagatagttgttgctcagtgatatgttgttcacagaggggaaagcctcagtcacagggtctgtctccagtaacatttacaacacagggagtaccataaccagcagagtttgtgaaacctctttcttayagcgtgccaagaattcaatctgtttctggttcctgcaaactaacaaagctgttgctatgttatcactctaaaagatgaagccatatagtcatatgtaggcttccctttatacagtaaatactatcctctgatagaccaaaagcttagaaaactgtatctcaaaggttaacgtgtctattagcagcatgttgactatcttcagcacaaggtgcgcaccttgttgataatgtctaaactagtctatatccttccattgacgtcagcaatagcttaaaattccaactgctttgattgacccaagatttaaatttaatagcagaaacataattataagagaaataaactttggggggggggaaattccaactgtgatataattaatatgtttctaatacataactaataaaaattataacaacaat

SEQ ID NO: 178749 - DNA, 388 bp, Homo sapiens
ggacatagtgttggtcttttgctggcagtttggacattgaacagtatcaaaagatagtctagccttgatcagagggaccccaaacttagagcccatgcatagccttcacctctgtcaccatggctactcagttcatggctctattgcatagtcacaagagtggctaagggtagaggcttgctgacaaccagtggatgcatcatcttgtccacccagttaagtgctgcytctgcaatggatggtctgtggtggacattattaacattagataaaaagatcaacatggattttgaccacttccatgggtacatctacatacttctttcccagctccccttgtctctgatctaatctttctctttcctagccgatgaccaagcatccatgc

SEQ ID NO: 178750 - DNA, 254 bp, Homo sapiens
tgggagaacattttaacaattgaacaaccactttgtgctaggggcgtttctatgagggatggaatcctcataatcagacaatcagtgagtggtcaagttctaaaatataaacttatcattcctggtaccaagtgggccattttagactctctakgaggggaggctgagatggaatttggaatacaaggagtttcttggggagtaactcctgtaaaaggaaaaggaaaggagaaagatggggcactgggtggggt

SEQ ID NO: 178751 - DNA, 610 bp, Homo sapiens
aagagctttagaaatatatttaaatctatccaaatacgagatgtaacatagacrctagtatttgtgtattttgatggtagcatttgggtgttatccaattaaattcccttaattgttttgaattttactaggcagcagagtgggcagacatatgggaaagagggaggtagaaagggacatacagtactcaaccctaaaaggagcttccagttcgaccctaaagtattataaatggaagcatcctgcactgcaactttctaccttcaccctaatgtaaaaatttatgtcctaagatttggtgaaggaaccaaacatgtatgactcagttgctacctcattctttttattcatactcccaccaattgtgcatccctgaggtgaggacacatagatcgaaatcaaggtattttgtctagatgttggtctgcatgcctgtttctctcagtcaccactaatagactccaacatttgtgaggcgctaattctagataagtgattctacttggcagatccaacttcttcagctatgcctagggataaaggtggcacaaagcccagtggggaccatagatcccagtaaatttcccaatctatatttacaaataattct

SEQ ID NO: 178752 - DNA, 610 bp, Homo sapiens
aagagctttagaaatatatttaaatctatccaaatacgagatgtaacatagacgytagtatttgtgtattttgatggtagcatttgggtgttatccaattaaattcccttaattgttttgaattttactaggcagcagagtgggcagacatatgggaaagagggaggtagaaagggacatacagtactcaaccctaaaaggagcttccagttcgaccctaaagtattataaatggaagcatcctgcactgcaactttctaccttcaccctaatgtaaaaatttatgtcctaagatttggtgaaggaaccaaacatgtatgactcagttgctacctcattctttttattcatactcccaccaattgtgcatccctgaggtgaggacacatagatcgaaatcaaggtattttgtctagatgttggtctgcatgcctgtttctctcagtcaccactaatagactccaacatttgtgaggcgctaattctagataagtgattctacttggcagatccaacttcttcagctatgcctagggataaaggtggcacaaagcccagtggggaccatagatcccagtaaatttcccaatctatatttacaaataattct

SEQ ID NO: 178753 - DNA, 610 bp, Homo sapiens
aagagctttagaaatatatttaaatctatccaaatacgagatgtaacatagacgctagtatttgtgtattttgatggtagcatttggktgttatccaattaaattcccttaattgttttgaattttactaggcagcagagtgggcagacatatgggaaagagggaggtagaaagggacatacagtactcaaccctaaaaggagcttccagttcgaccctaaagtattataaatggaagcatcctgcactgcaactttctaccttcaccctaatgtaaaaatttatgtcctaagatttggtgaaggaaccaaacatgtatgactcagttgctacctcattctttttattcatactcccaccaattgtgcatccctgaggtgaggacacatagatcgaaatcaaggtattttgtctagatgttggtctgcatgcctgtttctctcagtcaccactaatagactccaacatttgtgaggcgctaattctagataagtgattctacttggcagatccaacttcttcagctatgcctagggataaaggtggcacaaagcccagtggggaccatagatcccagtaaatttcccaatctatatttacaaataattct

SEQ ID NO: 178754 - DNA, 599 bp, Homo sapiens
agtttttaacttttgcaatgggttccatgcagtttattccacgcaattccaatttatttttatgaattgccacctaacatcagtatctttggggtttggacatctcatttatcattggtaaccaaggactcctggatgagtgacatttttcagaaagctgaaacttattccataaaaatgtgaaaatatttattttaattgctttgacttacatatttttctaccttaatagaagatattaaaaataatttaacctcttggatracccaagatcatgatttgagatttcattactagaagtaataagataaatagatttgagtcagaaaacctagaattaagatctggttctgccatctatgtccacgtaactttggacaagtaacttaactaatttgagataccaatgttttcatctgcaaaattggtatcaataatacataactcatattatgttgttgtcgtggttgggtgaaataatatgaaatatataaaagactatcatttatgatttcctcttactataggcttactgggtaatatgctttttgttgatataaatttttttcccagaaagatattccatttgaagtattatg

SEQ ID NO: 178755 - DNA, 599 bp, Homo sapiens
agtttttaacttttgcaatgggttccatgcagtttattccacgcaattccaatttatttttatgaattgccacctaacatcagtatctttggggtttggacatctcatttatcattggtaaccaaggactcctggatgagtgacatttttcagaaagctgaaacttattccataaaaatgtgaaaatatttattttaattgctttgacttacatatttttctaccttaatagaagatattaaaaataatttaacctcttggataacccaagakcatgatttgagatttcattactagaagtaataagataaatagatttgagtcagaaaacctagaattaagatctggttctgccatctatgtccacgtaactttggacaagtaacttaactaatttgagataccaatgttttcatctgcaaaattggtatcaataatacataactcatattatgttgttgtcgtggttgggtgaaataatatgaaatatataaaagactatcatttatgatttcctcttactataggcttactgggtaatatgctttttgttgatataaatttttttcccagaaagatattccatttgaagtattatg

SEQ ID NO: 178756 - DNA, 415 bp, Homo sapiens
aaaaggaaggtgagagtcaaagtatgtaagttaaagctcagaaaccaaatagtcaaacaccaactaagtaaaaggagaatgaagaacatttttcacctgctagtgtatagataactactagaacacaaataaaagtacttctaagtacaaaaagatgtaagaaaaagtaaaacaaagaaaataatagacattgaccgatagatgctgtgaaataccacccaagtcctccttcactgattgagagaaaagtataaaagcccagctcccctttttactctaactsaggataactctgagaggccatcttagcttcagagatttctacgggtttcgctgaggcctttattgtgtttgcatcactgcacaatttcactttcttccttatcccacttcctttaccttccttctacaggtg

SEQ ID NO: 178757 - DNA, 508 bp, Homo sapiens
gggcttaacaacatgggaggagatcatttgtgacctaaggaagagcacacttagttgagtagtagcaacagaagccagagtggaatcacatgacagtgaatacagtgtagaaataaaggctgcttgcccaaatactctttggataaaagttgctattagagggatagagggaagggtcagtagcttgagaggcatacatgattcagggaggatataattgttgttacgttgatttttctaaaacagagagactgtagcattactgaatgcttatagtaagcgtccagaaggtagaaagaatttaaggatattaccasagtgtggagaaagcacagaggcagttgggcagggacacagatgccagaggcacaagaaaacctcaaaggcccaaagttgtgtgcgtgcacacacacatacacacacatgcacacacaccatccgtgagaaagaagtagctggtgaaaggcattctgcaggactcattagtcctgctggataccaaatgtgc

SEQ ID NO: 178758 - DNA, 508 bp, Homo sapiens
gggcttaacaacatgggaggagatcatttgtgacctaaggaagagcacacttagttgagtagtagcaacagaagccagagtggaatcacatgacagtgaatacagtgtagaaataaaggctgcttgcccaaatactctttggataaaagttgctattagagggatagagggaagggtcagtagcttgagaggcatacatgattcagggaggatataattgttgttacgttgatttttctaaaacagagagactgtagcattactgaatgcttatagtaagcgtccagaaggtagaaagaatttaaggatattaccacagtgtggagaaagcacagaggcagttgggcagggacacagatgccagaggcacaagaaaacctcaaaggcccaaagtygtgtgcgtgcacacacacatacacacacatgcacacacaccatccgtgagaaagaagtagctggtgaaaggcattctgcaggactcattagtcctgctggataccaaatgtgc

SEQ ID NO: 178759 - DNA, 419 bp, Homo sapiens
tgcaaaacaatctgtgcagccctatttcttcaacaggcattgcacttggtgtctccccacattctatctggtggcagaaaacttcatcttgctcattccaggtctgataaggmatttccagttgaaacttggttgattcaacctctcgagctctgcctgatctgcccaagattgacccaggagggcaagctcgtcatggcactgccctgtgggggaaatgttaggtcttcaggtattcaccctcttgtggcttccttcacaggggtgtacgattccatcgtttagccctgaaattcaccaaggcatccatgtttctacctggtctccaagtacatggtctgtgccatcctcactgctccacccattcttcctgcaagaaactgaggccaggttcagacttgcctccgttctcacctcag

SEQ ID NO: 178760 - DNA, 398 bp, Homo sapiens
tggcgtaacgtagctgcacagtcagagccaaggctgtgtgagtcaaggtccaggttcccaacgagggactccgggtctcccccactgccacccgrttcctctggccagagcaagaacagcacctcagtcttggcaactcccttttagactgttattctcctgccagattaaggagaatggtgttgagtcacatcacataaggagacgcaggaggttcaggctgtccaggggcaaggggtgtagacatgctggactggaagctgcatgcaggcaggctgaggctggctcaggcagacatatgttcttcagccttgtttttgtttttaaagacagggcctcgctctgtcaccaggctggagtacagtggcaccatcacagctcattgcagccctgaattc

SEQ ID NO: 178761 - DNA, 380 bp, Homo sapiens
tatttcttcccattaattctttcaataagtatagattgatcacraaaaacttgtttgctccctgaggcactactgtgatgaaactatttttttacttttaggtcctgacctagaggaagttacaattcagttgaacacctacctacctttttgttgaactattcacagaataaaactaatcttggtatactactgatgagaataatgtcaaaacaacaaaactatgtttcatacattaatatattaaatatagttgactcttctgtttataaacctacagctgtgtgtttcaaggtccttgaactttgtaactgtttttaagaaaagctaggttttgatgacttgataaaaccaattttcatgataccttatttatctaa

SEQ ID NO: 178762 - DNA, 380 bp, Homo sapiens
tatttcttcccattaattctttcaataagtatagattgatcacgaaaaacttgtttgctccctgaggcactactgtgatgaaactatttttttacttttaggtcctgacctagaggaagttacaattcagttgaacacctacctacctttttgttgaactattcacagaataaaactaatcttggtatactaytgatgagaataatgtcaaaacaacaaaactatgtttcatacattaatatattaaatatagttgactcttctgtttataaacctacagctgtgtgtttcaaggtccttgaactttgtaactgtttttaagaaaagctaggttttgatgacttgataaaaccaattttcatgataccttatttatctaa

SEQ ID NO: 178763 - DNA, 380 bp, Homo sapiens
tatttcttcccattaattctttcaataagtatagattgatcacgaaaaacttgtttgctccctgaggcactactgtgatgaaactatttttttacttttaggtcctgacctagaggaagttacaattcagttgaacacctacctacctttttgttgaactattcacagaataaaactaatcttggtatactactgatgagaataatgtcaaaacaacaaaactatgtttcatacattaatatattmaatatagttgactcttctgtttataaacctacagctgtgtgtttcaaggtccttgaactttgtaactgtttttaagaaaagctaggttttgatgacttgataaaaccaattttcatgataccttatttatctaa

SEQ ID NO: 178764 - DNA, 296 bp, Homo sapiens
gtgaaaatgaccctttttaggagcagtgcattaacccatgctacttacagtctgaaattcttgtctcacctgtgtcaactttgatcaccatttcaacaagccctgaggaaagatgtttgacctaaaagttgatggttttctctgtagtatatgaaaattcgttttcctgggttkggtcttaattgcagttgttggtagaacattaaaccactccctgggattacatgattacctagcacattagctatcacagcaattctaggagctgatttgcattatccccagatgcttataaa

SEQ ID NO: 178765 - DNA, 674 bp, Homo sapiens
tttttaggtaattcccatagtctggtcagttgtttgtttgtttgtttkttaccatagcctcctgattagcaggaactaccaggctcatgccaccaacctgactaattttttcaattttttttgtagagacggggtctcgtcatgttgcccaggctggtcttgaagtcctgggctcaagctatcctcctgtctcagcctcccaaagtgctggaattacaggtgtgagccactgcgccaggcctctagtcaaattattgaagctccttttataatcaattttttctttttattttgtgaagcattttttaatggacaaaagtgtattattagattaaatagggagcttctaaattctaccatatttcaacagaagcttttgcaggtctatcccaaaaaattattacctttagaaactttatccttctgccctatgtgagctctccaattaattgctgatatctgagaaggcgattgtaaaaccgctgacaattcaactatcactttttcaggaaatatcttagttatcattgaagtaaaaaaagtcatattaaaaatgtggttctgttgcatgacagacactatatgtgtgtgtgtgtgtgtgtgtgtgtgtatataaaatccagaaccaagaattacaactctagtaactgctattcactcatctttttgtgtag

SEQ ID NO: 178766 - DNA, 674 bp, Homo sapiens
tttttaggtaattcccatagtctggtcagttgtttgtttgtttgttttttaccatagcctcctgattagcaggaactaccaggctcatgccaccaacctgactaattttttcaattttttttgtagagacggggtctcgtcrtgttgcccaggctggtcttgaagtcctgggctcaagctatcctcctgtctcagcctcccaaagtgctggaattacaggtgtgagccactgcgccaggcctctagtcaaattattgaagctccttttataatcaattttttctttttattttgtgaagcattttttaatggacaaaagtgtattattagattaaatagggagcttctaaattctaccatatttcaacagaagcttttgcaggtctatcccaaaaaattattacctttagaaactttatccttctgccctatgtgagctctccaattaattgctgatatctgagaaggcgattgtaaaaccgctgacaattcaactatcactttttcaggaaatatcttagttatcattgaagtaaaaaaagtcatattaaaaatgtggttctgttgcatgacagacactatatgtgtgtgtgtgtgtgtgtgtgtgtgtatataaaatccagaaccaagaattacaactctagtaactgctattcactcatctttttgtgtag

SEQ ID NO: 178767 - DNA, 674 bp, Homo sapiens
tttttaggtaattcccatagtctggtcagttgtttgtttgtttgttttttaccatagcctcctgattagcaggaactaccaggctcatgccaccaacctgactaattttttcaattttttttgtagagacggggtctcgtcatgttgcccaggctggtcttgaagtcctgggctcaagctatcctcctgtctcagcctcccaaagtgctggaattacaggtgtgagccactgcgccaggcctctagtcaaattattgaagctccttttataatcaattttttctttttattttgtgaagcattttttaatggacaaaagtgtattattagattaaatagggagcttctaaattctaccatatttcaacagaagcttttgcaggtctatcccaaaaaattattacctttagaaactttatccttctgccctatgtgagctctccaattaattgctgatatctgagaaggcgattgtaaaaccgctgacaattcaactatcactttttcaggaaatatcttagttatcattgaagtaaaaaaagtcatattaaaaatgtggttctgttgcatgacagacactatatgtgtgtgtgtgtgtgtgtgtgtgtgtatataaaatccagaaccaagaattacarctctagtaactgctattcactcatctttttgtgtag

SEQ ID NO: 178768 - DNA, 599 bp, Homo sapiens
gattaagcctcttatttttaatgtttgttttccgttacaaaacgcaaatctaatctgttcaaaactgaaatcctcatcctctccttaaaatctatacagccacagttttcccaaattcagttaatggcaattccatttttctcccaaatttaaaacacctaaatcattttctgtctttcttcctcaatagactttactttcaaaagatacccagaatctgaccacttattattacctccactgataacactggactaagccactttcattctcgttgaaatattttatcttcttactgtttccaatcttagttccaactttggcccactcccccaaagtgcagctacattctacttttagtgtggcagccaggctaattcatttaaaataaaaatcaaatcatttttcttctagtcaaagtgctgcaacagcttaccaaaatcatccaagtaagacactaggcacttaaaatgatccctgaaattctgtattatctgcttcttcatactattatctttctaactttattgcatagttatcctcatcattcattctgctgtagacacaggctracatccttgctgttacttttatatgcc

SEQ ID NO: 178769 - DNA, 501 bp, Homo sapiens
aactgtattttttaaacaaataaaataaaaaagatactcaagcacaaaagcaaatcttcatggacaagaaatgcaatgttgcattacatgttggagtcatctgtgtgtggcagtaggtagagacggataagagttcgcttatataagaaatgtgtagcacaaataccccaaatgcaaattcaagtgaaagatttagtctcaccrctatattctcattaaatgggtcgttatagtaaatgagtaaaatgagtcattacagtaaatgactactagaggtcatgccttatgcaaataaggcctaaaggcatgggtacaacacatactatgctgtgttacccactatctgtgtactcattatgaaatatatccaatatcgtaatgtggcagtcgtcctaaccaatttaaatgagcctaggtttagaaaggagatacccacaagaaagtaggatcataatatatgcaggagctgaaaagtgtggctgagaaaagagggtgtgagac

SEQ ID NO: 178770 - DNA, 621 bp, Homo sapiens
caggcattcgggggatctttgtaaatcaacaactcatagagcaagcagctttgcttcaggtggtaggaacagaaagtacagttgtcctttctgttgtaactgcactttttcaaataaaatcaagccagctgaactcttgaatatattgtttcagtgggaagagtctcttcccttatgagtcattgagtctaagttgacaaacatcaaaataagagcttcaggtgagaaaaacttcacagtgactccattgagcttgtattcagtttcaataagagtttagtagctagttaacagttgtttkggatttttaaaatttacacttagtggctacatgagacaggtggtgctgttgtactgggaaataacatctctgaatactctatgaagcatcaactatttaactaatattgttactcttcattctccagattttctgttttacttctgttgaaactcataggagtagacagagaatatctccctatatgtggctgtctctgaatagaattccccctgacactcctgggtgttcacagggcttgcactttattcataacagttgtacattcaaaagcagaaagcacaagaagaatacacagaattatcacagaaggcctcaca

SEQ ID NO: 178771 - DNA, 519 bp, Homo sapiens
tgcactttttcaaataaaatcaagccagctgaactcttgaatatattgtttcagtgggaagagtctcttcccttatgagtcattgagtctaagttgacaaacatcaaaataagagcttcaggtgagaaaaacttcacagtgactccattgagcttgtattcagtttcaataagagtttagtagctagttaacagttgtttgggatttttaaaatttacacttagtggctacatgagacaggtggtgctgttgtactgggaaataacatctctgaatactctatgaagcatcaactatttaactaataytgttactcttcattctccagattttctgttttacttctgttgaaactcataggagtagacagagaatatctccctatatgtggctgtctctgaatagaattccccctgacactcctgggtgttcacagggcttgcactttattcataacagttgtacattcaaaagcagaaagcacaagaagaatacacagaattatcacagaaggcctca

SEQ ID NO: 178772 - DNA, 519 bp, Homo sapiens
tgcactttttcaaataaaatcaagccagctgaactcttgaatatattgtttcagtgggaagagtctcttcccttatgagtcattgagtctaagttgacaaacatcaaaataagagcttcaggtgagaaaaacttcacagtgactccattgagcttgtattcagtttcaataagagtttagtagctagttaacagttgtttgggatttttaaaatttacacttagtggctacatgagacaggtggtgctgttgtactgggaaataacatctctgaatactctatgaagcatcaactatttaactaatattgttactcttcattctccagattttctgtttyacttctgttgaaactcataggagtagacagagaatatctccctatatgtggctgtctctgaatagaattccccctgacactcctgggtgttcacagggcttgcactttattcataacagttgtacattcaaaagcagaaagcacaagaagaatacacagaattatcacagaaggcctca

SEQ ID NO: 178773 - DNA, 578 bp, Homo sapiens
cttctggattagatttaaaagacagcacttcaagtaacataagcattggcatgtacctcaattccctttccagacaagtcccaaagaagcaatataggggctagatcaatattgcacattcagtaggtttgcatcacagctgagggacacggacctaggaaatctacccctttcagactaagcaataggaagcctgcttttggttctaggaggtgatattacctcatctctcaaagttgtttaccccaaacacaatcatgaaaaatggtccagtttaaaaagaagtggtcaagccttgcaatcttggcatatatgttgtcaaggatgytctgggtttgtggcaaatcacctctcccaacacatacatttcacattttcccaggagccacaaatctcttttgctattactctggaagtgcaagccaagtaagaaaagaaaaaaaaaagcctgaagtaaaaaattgcataggtgatcaaaaattgtattaattttgtataatacatgtaaagctgaaaaaatattagagttaaaataaagttttgtttcacatatataaataaaaatatatatgcaaatg

SEQ ID NO: 178774 - DNA, 578 bp, Homo sapiens
cttctggattagatttaaaagacagcacttcaagtaacataagcattggcatgtacctcaattccctttccagacaagtcccaaagaagcaatataggggctagatcaatattgcacattcagtaggtttgcatcacagctgagggacacggacctaggaaatctacccctttcagactaagcaataggaagcctgcttttggttctaggaggtgatattacctcatctctcaaagttgtttaccccaaacacaatcatgaaaaatggtccagtttaaaaagaagtggtcaagccttgcaatcttggcatatatgttgtcaaggatgctctgggtttgtggcaratcacctctcccaacacatacatttcacattttcccaggagccacaaatctcttttgctattactctggaagtgcaagccaagtaagaaaagaaaaaaaaaagcctgaagtaaaaaattgcataggtgatcaaaaattgtattaattttgtataatacatgtaaagctgaaaaaatattagagttaaaataaagttttgtttcacatatataaataaaaatatatatgcaaatg

SEQ ID NO: 178775 - DNA, 578 bp, Homo sapiens
cttctggattagatttaaaagacagcacttcaagtaacataagcattggcatgtacctcaattccctttccagacaagtcccaaagaagcaatataggggctagatcaatattgcacattcagtaggtttgcatcacagctgagggacacggacctaggaaatctacccctttcagactaagcaataggaagcctgcttttggttctaggaggtgatattacctcatctctcaaagttgtttaccccaaacacaatcatgaaaaatggtccagtttaaaaagaagtggtcaagccttgcaatcttggcatatatgttgtcaaggatgctctgggtttgtggcaaatcmcctctcccaacacatacatttcacattttcccaggagccacaaatctcttttgctattactctggaagtgcaagccaagtaagaaaagaaaaaaaaaagcctgaagtaaaaaattgcataggtgatcaaaaattgtattaattttgtataatacatgtaaagctgaaaaaatattagagttaaaataaagttttgtttcacatatataaataaaaatatatatgcaaatg

SEQ ID NO: 178776 - DNA, 578 bp, Homo sapiens
cttctggattagatttaaaagacagcacttcaagtaacataagcattggcatgtacctcaattccctttccagacaagtcccaaagaagcaatataggggctagatcaatattgcacattcagtaggtttgcatcacagctgagggacacggacctaggaaatctacccctttcagactaagcaataggaagcctgcttttggttctaggaggtgatattacctcatctctcaaagttgtttaccccaaacacaatcatgaaaaatggtccagtttaaaaagaagtggtcaagccttgcaatcttggcatatatgttgtcaaggatgctctgggtttgtggcaaatcacctctcccaacacatacatttcacattttcccaggagccacaaatctcttttgctattactctggaagtgsaagccaagtaagaaaagaaaaaaaaaagcctgaagtaaaaaattgcataggtgatcaaaaattgtattaattttgtataatacatgtaaagctgaaaaaatattagagttaaaataaagttttgtttcacatatataaataaaaatatatatgcaaatg

SEQ ID NO: 178777 - DNA, 537 bp, Homo sapiens
tatcattatatagtgactttttcatcttttttttttaactgttgttgatttaaagcctattttatctgatataaaaatagttactcctgcttgcctttgttttctgtttgcatggaatatctttttcatccatttactttaaatctgtgaaggtctttatcattaggagggtttcttgtaagcatatcattagatctaatttttttaatgcaatctgccagtctacaccttttaagtagaatatttatttsatttgcattcaatgttaatattgagatatgagattttgttcctgttataatggtaattattacctagttgctttatagtctcaattgtgtattttttgtgctttacataattgtgcattatatgattcgtgaattttgtacattcatgtgctttatgattgtatcattcatttgttttcatgtttagaactccttttagtatttctttcaggattagtctagtggtgaaatattctcttaccattttcttatctggaaaagactttatttctccttcatttaggaa

SEQ ID NO: 178778 - DNA, 537 bp, Homo sapiens
tatcattatatagtgactttttcatcttttttttttaactgttgttgatttaaagcctattttatctgatataaaaatagttactcctgcttgcctttgttttctgtttgcatggaatatctttttcatccatttactttaaatctgtgaaggtctttatcattaggagggtttcttgtaagcatatcattagatctaatttttttaatgcaatctgccagtctacaccttttaagtagaatatttatttgatttgcattcaatgttaatattgagatatgagattttgttcctgttataatggtaattattacctagttgctttatagtctcaattgtgtattttttgtgctttacataattgtgcattatatgattcgtgaattttgtacattcatgtgctttatgattgtatcattcatttgttttcatgtttagaactccttttagtatttctttcaggattagtctagtgrtgaaatattctcttaccattttcttatctggaaaagactttatttctccttcatttaggaa

SEQ ID NO: 178779 - DNA, 553 bp, Homo sapiens
aggtcaggagatcaaaatcatcctggctaacacagtgaaaccctgcctctacttaaaatacaaaaaatcagccaggcatggtggcacacgcctgtggtcccagctactcggtaggctaaggcaggagaatcgtttgaacctgggagatggaggtttcagtgagccgagatcgcaccactgcattccagcctggagacggagcaagactccatctyaaataaataaataaataaataaataaataaatgtatgtaaacatcatggtaaattctctgcaaactaaaaacacaaaaataaaacaaaatcaaatacccaaaaccaataatggtttttgtttttcactttatgcattagaccaacaataaaggtatgaggcaatagctgcattttatttcagatgtgatgggagcaaagaaataacacaatcagatttaagtttttaagagattcactctggctgctgtgggagaatcaactcacacaagttggtggtacaacgattcaaagcacataatgagttaggaagctaagtaattctctaggggagactaaa

SEQ ID NO: 178780 - DNA, 279 bp, Homo sapiens
aatggtaataaaataaatttgttgataaatacattcagcatatgctataaatgataygagtgtgtatgtatatggatttataaatatgcacacaaatatatgcatgtaagtatatattcacacatacacactttttttttttaatttgccagatctgtcctagaccaacttctccaaatctatatttcagggaccagaaagacaaatctaatatctcaagctcttgtatacaatattttcaactccatggatcatagtcttataatgaaactagcgaaa

SEQ ID NO: 178781 - DNA, 463 bp, Homo sapiens
ctctactagaactttcagcgaacttttctcccagtactaaaatgttaatatattttcacattttatctcaaaaawtatttttaaatggctgtattttttctttgaaagatttagggtttgagcagttttatacaattcttgatgttgcattttgctatatttaataaaagtattgttatgaactaagtcttattgatgctatatattatacataaaatcctaattatttgcttgtagtttctctctataatcttttcagattatactcagttataaaatagaagtataacattttaaaaatattttataagtgtttaacttgtctctgtttgtgtactgttgtcaggcttttttcagctggtcaccagatcttgggacttgtcatcatatctgtcaccatttgctgacataaaatagaatcaaagtaattgtgttacctgcccaaggtcacataacttgtgta

SEQ ID NO: 178782 - DNA, 547 bp, Homo sapiens
actaaaacatagactggcatatatatattcacttgatttgtggcaaagacatcaacaccatttaaagaaaaaggatatgtttttggttttaccttttcaataaatcatgctgaagccgtaggatagtcataagaaaaaaataaccttgctctccactttacatatacaaaaatttaattggagattargggttttttcttaagaatatattattctgaatttaatactcaaaaatgatgtcttggtgatacttctatttgcattttttgaatactaatctagtttaactttttaaattttctgtttatattttttcatttatgatattcctttttgtgttttttgcttatttttccactaattaattaggtaaaagcaccctaagggaaagaatattaacccttttctattacatgtgctatcattagtttatagttcatgatatttatgtctcattaaaattaatagttaaattttatttaggcaaatttattaatgtttttctttatgactaaggttgtatgtgccatgcttagacactcttctt

SEQ ID NO: 178783 - DNA, 449 bp, Homo sapiens
aatgtttaaagttctatattaatatagcaatatcagtatcttagatggaattgatgtttgtatacctgaagcatattattaacagatcatgatattttatccattgctcagttgttataacagattgccagtttatgttgaaaatagaatgtatttttattttcctccatgtctagtactgcttcaaattagctgccacgtatctgtaaaacatttttggcattcagcttttcctaatcattaataaccatgatgttcttgaagcatgttctccatgtcttcatttaaggtaagaattcctgctttcttctgtaaatgcctgggcaggtatcagtgatttcctaaagagaatttttggtaagggaattggcatattttttttttttttttggaattggccttttatactacatttcatttcagacawctttcttaaagaaaaaaggtgt

SEQ ID NO: 178784 - DNA, 405 bp, Homo sapiens
ggtccacatccttattactcttcccacactgtatccttatctcataaccgtgcttattagtttcctatcactgttataaaaataaccagaaatctagtgccttaacacaaatttgttaacttacagctctagaacccagacgtctgaaatggtactcaaagccaaaatcaagattggaagggctgtgttctttctggaggctctagaggagaattcattaccatgcctttttcggtttctagaggccccatatttcttgctatgtggcatttagtcagtaatcatgtctttccgatatctgcttccagtgtcacatcttctctggctctgcytcttctgccttgtataaggactctgtgattccatagggcctgcttgaatagtccaggataacctcctcattcc

SEQ ID NO: 178785 - DNA, 399 bp, Homo sapiens
aaaaactcagtgagttaggcgcagtgactgtcacctgtaatcccatcaggtgggtyatttgagcccaggagttggagaccagcttgggaaatatgacaaaaatgcatctttacaaaaaggaaaaattagtatggcatggtggtgcacacctgtggtcctagctacttgggaagctgatgttggaagattgcttgagcccggaggttgaaactgcaatgagcgttgattgatcatgccactacactcgatcctgggcagcagactagacactatctgaaaacaaaacaaaacagcaacaaaaacaactcagtgagtcactgttcattttaaaagctagggactgaggaccaaagatgttctcacatgtacaagttgacatagtgagcagcagagcaggaa

SEQ ID NO: 178786 - DNA, 399 bp, Homo sapiens
aaaaactcagtgagttaggcgcagtgactgtcacctgtaatcccatcaggtgggttatttgagcccaggagttggagaccagcytgggaaatatgacaaaaatgcatctttacaaaaaggaaaaattagtatggcatggtggtgcacacctgtggtcctagctacttgggaagctgatgttggaagattgcttgagcccggaggttgaaactgcaatgagcgttgattgatcatgccactacactcgatcctgggcagcagactagacactatctgaaaacaaaacaaaacagcaacaaaaacaactcagtgagtcactgttcattttaaaagctagggactgaggaccaaagatgttctcacatgtacaagttgacatagtgagcagcagagcaggaa

SEQ ID NO: 178787 - DNA, 399 bp, Homo sapiens
aaaaactcagtgagttaggcgcagtgactgtcacctgtaatcccatcaggtgggttatttgagcccaggagttggagaccagcttgggaaatatgacaaaaatgcatctttacaaaaagraaaaattagtatggcatggtggtgcacacctgtggtcctagctacttgggaagctgatgttggaagattgcttgagcccggaggttgaaactgcaatgagcgttgattgatcatgccactacactcgatcctgggcagcagactagacactatctgaaaacaaaacaaaacagcaacaaaaacaactcagtgagtcactgttcattttaaaagctagggactgaggaccaaagatgttctcacatgtacaagttgacatagtgagcagcagagcaggaa

SEQ ID NO: 178788 - DNA, 392 bp, Homo sapiens
tacttaatcttcataaaaactcagtgagttaggcgcagtgactgtcacctgtaatcccatcaggtgggttatttgagcccaggagttggagaccagcttgggaaatatgacaaaaatgcatctttacaaaaaggaaaaattagtatggcatggtggtgcacacctgtggtcctagctacttgggaagctgatgttggaagattgcttgagcccggaggttgaaactgcartgagcgttgattgatcatgccactacactcgatcctgggcagcagactagacactatctgaaaacaaaacaaaacagcaacaaaaacaactcagtgagtcactgttcattttaaaagctagggactgaggaccaaagatgttctcacatgtacaagttgaca

SEQ ID NO: 178789 - DNA, 411 bp, Homo sapiens
aaaaactcagtgagttaggcgcagtgactgtcacctgtaatcccatcaggtgggttatttgagcccaggagttggagaccagcttgggaaatatgacaaaaatgcatctttacaaaaaggaaaaattagtatggcatggtggtgcacacctgtggtcctagctacttgggaagctgatgttggaagattgcttgagcccggaggttgaaactgcaatgagcgttgattgatcatgccactacactcgatcctgggcagcagactagacactatctgaaaacaaaacaaaacagcaacaaaaacaactcagtgagtcactgttcattttaaaagctagggactgaggaccaaagatgttctcacatgtacaagttgacatagtgagcagcakagcaggaatttgaatctaga

SEQ ID NO: 178790 - DNA, 674 bp, Homo sapiens
aaatagggtactctgcaataatagtaatgataatgttgacagagggtttactttagtctaagcaccatttttaatgttttatattcatcaaattgcttaatatttccagcgttatgaagtagagactattattattttcttcatttatattattaggtaaagaaactgaaactgaggttgtgtaactggccctaagtcacttggctagtaagctggaatttgtgatcagcctggtttcagagcccactactatgctatatacctactttttgaaattggctttagcctgttttgttgttgaaggtgatggtatttttgtgacttttaatactcatagtaaacattccgtaagtcctggaatgcaaaaaaaaattaactcaattaaatctaagttaccaattacataatgtaggttgttttccatttttgtatattgttcygtcattgactgcatattagaaataacattttcttactactattttaattttataacttttctttgtaagttcctgtcttttttgtaatgtatactaatatattataatgattatgcttaaatgtttgcaaaattcaccatttggtgttgtgctcttttattcctttttattgtattttatagggtcctttgctttaaattgtttttgaactgaatttattacagttaatatcac

SEQ ID NO: 178791 - DNA, 563 bp, Homo sapiens
ggaagtccgtaagcaaaaggaagtaagtcatatattttgagaaggaaacatrtattgattattatttataaacataaacatggcaaattttaaaaatgaacagcattttaataattcatgtgattaaaaatatatatttgaataataaagtacatttaataaaattaattgctaatattaaatgatatttaattatttaagaaattaaataataaattcaccataagaaaacaaaataatgtttgccaaacacttcattaaatatatgcatcacatttttcaattttcacaaccctttgaaataagtgacatttgtattttatagataaaatacaatgaatacatgcaaaaatagaaattcagaaagtacaatggcttaatccaaattatataagtagtaagatactgataaagttagggtttcacagccaggtctgtctgaccccaaaaccaatgttcttttcaggccactttaagtgctgacagctggcttggaagagaaacctgacctacaaattatagccctgaaaaagcactagttttgtttttcacgaaaaaagatc

SEQ ID NO: 178792 - DNA, 563 bp, Homo sapiens
ggaagtccgtaagcaaaaggaagtaagtcatatattttgagaaggaaacatgtattgattattatttataaacataaacatggcaaattttaaaaatgaacagcattttaataattcatgtgattaaaaatatatatttgaataataaagtacatttaataaaattaattgctaatattaaatgatatttaattatttaagaaattaaataataaattcaccataagaaaacaaaataatgtttgccaaacacttcattaaatatatgcatcacatttttcrattttcacaaccctttgaaataagtgacatttgtattttatagataaaatacaatgaatacatgcaaaaatagaaattcagaaagtacaatggcttaatccaaattatataagtagtaagatactgataaagttagggtttcacagccaggtctgtctgaccccaaaaccaatgttcttttcaggccactttaagtgctgacagctggcttggaagagaaacctgacctacaaattatagccctgaaaaagcactagttttgtttttcacgaaaaaagatc

SEQ ID NO: 178793 - DNA, 397 bp, Homo sapiens
ctgattggtgcaaatatatctcaaatctaacagctaaagccagatgtacttaggaaagagctcacaatctctgggcagattgaacagcagtccctgcacccaaagaataatataagttttgtgtccagtaaattgttgttgaatatattcttgaagagccactttttatttcatttttgtaaagcaacacagcaccatcttctttataattatttccactttaattccatctgwttaaattgaaataaactactatgtcataaaaagattcctcttttcaaagagtttataattgcagtagaacaaagataaaccatgcttattttcagaatatagttgaactttagaggatgttacatggttaagtgacaaaatcagtgctaggaaagaaaatcca

SEQ ID NO: 178794 - DNA, 607 bp, Homo sapiens
tggggactctgtgtggggacttcaaccccacattttccttacgcactgctctagcagaggttctccatgaggtctccactcctgcggcagacatctgcctggacatccaggcattcctatgcatcctctgttgacttctgtgcacctgaaggccaaacaccacttggcagcaatcaaggcttggggttgcaccctctgaagcagtgacttgagctgtactttggccccttttagccacagctggagcagctaggatgcaagacaccaagtcttgaggcagcacacaacagcaaggccctgggcccagcccacaaaaccatgtttttctcctagttctctgggyctgtaatgggaggggctgccatgaagatctctgacataccctggagacattttccctcattttcttggcaattaacattggattcctcattatctatgcaaatctttgtagcaggcttgaatatctccccagaaaatggttttttcttttctaccacatggtcaagctgcaaattttctaaacttttacactctgtcacctcttgaacgctttgctacttagaaatttcttctgccagataccctaaattgtctttctgaagtt

SEQ ID NO: 178795 - DNA, 607 bp, Homo sapiens
tggggactctgtgtggggacttcaaccccacattttccttacgcactgctctagcagaggttctccatgaggtctccactcctgcggcagacatctgcctggacatccaggcattcctatgcatcctctgttgacttctgtgcacctgaaggccaaacaccacttggcagcaatcaaggcttggggttgcaccctctgaagcagtgacttgagctgtactttggccccttttagccacagctggagcagctaggatgcaagacaccaagtcttgaggcagcacacaacagcaaggccctgggcccagcccacaaaaccatgtttttctcctagttctctgggtctgtaatgggaggggctgccatgaagatctctgacataccctggagacattttccctcattttcttggcaattaacattggattcctcattatctatgcaaatctttgtagcaggcttgaatatctccccagaaaatgkttttttcttttctaccacatggtcaagctgcaaattttctaaacttttacactctgtcacctcttgaacgctttgctacttagaaatttcttctgccagataccctaaattgtctttctgaagtt

SEQ ID NO: 178796 - DNA, 540 bp, Homo sapiens
ctaatagacacatctagctaacatgcttgtgtgtctgtttgtggtgtgtgtgtgtctgtgtgtgtgcttttctgtggtcaatattggaatataaatttttctctttcaaagtaaagttactttgctcattaaacaagcaaacaaaacccaacagataaaaagccctgtwatacttagctcttccttaatttcagaatagaataaaacttacagctcagcattaattactatcacgatctaaccctcacctactcttccagactgtattctgttctcacactgctataaataaatgcctaagactgggtaatatataaagaaaaaaggtttaattggttcatggttccacagggtgttcaggaaacatgtctgcagaggcctcgggaaatttacaatcatgttggaaagcaaagaggaggcaggcacttcttatatggccagagcagggaagaaagagaggggaaggtgctacacacttttaaacaaccagatctcatgataactcactctcatcataacaacaccaaaggctatagtgtt

SEQ ID NO: 178797 - DNA, 540 bp, Homo sapiens
ctaatagacacatctagctaacatgcttgtgtgtctgtttgtggtgtgtgtgtgtctgtgtgtgtgcttttctgtggtcaatattggaatataaatttttctctttcaaagtaaagttactttgctcattaaacaagcaaacaaaacccaacagataaaaagccctgttatacttagctcttccttaatttcagaatagaataaaacttacagctcagcattaattactatcacgatctaaccctcacctactcttccagactgtattctgttctcacactgctataaataaatgcctaagactgggtaatatataaagaaaaaaggtttaattggytcatggttccacagggtgttcaggaaacatgtctgcagaggcctcgggaaatttacaatcatgttggaaagcaaagaggaggcaggcacttcttatatggccagagcagggaagaaagagaggggaaggtgctacacacttttaaacaaccagatctcatgataactcactctcatcataacaacaccaaaggctatagtgtt

SEQ ID NO: 178798 - DNA, 540 bp, Homo sapiens
ctaatagacacatctagctaacatgcttgtgtgtctgtttgtggtgtgtgtgtgtctgtgtgtgtgcttttctgtggtcaatattggaatataaatttttctctttcaaagtaaagttactttgctcattaaacaagcaaacaaaacccaacagataaaaagccctgttatacttagctcttccttaatttcagaatagaataaaacttacagctcagcattaattactatcacgatctaaccctcacctactcttccagactgtattctgttctcacactgctataaataaatgcctaagactgggtaatatataaagaaaaaaggtttaattggttcatggttccacagggtgttcaggaaacatgtctgcagaggcctcgggaaatttacaatcatgttggaaagcaaagaggargcaggcacttcttatatggccagagcagggaagaaagagaggggaaggtgctacacacttttaaacaaccagatctcatgataactcactctcatcataacaacaccaaaggctatagtgtt

SEQ ID NO: 178799 - DNA, 470 bp, Homo sapiens
gaattccatcctctcatttcttttttctccattaacactttctttactaagatctggtcgagagggaacagtatgatgtcatgccattgttagaaaggtccctaaatatcatttattaccctgscgtgtgggctttctggggcttctcaacagacaagactgtctttatgaagtgctcattactttgttaacagtagctcatctgccacaaactatttaacttcctgcagttgagtgaagagtgaagggtaaattccttgacatgtgagttttaagtgttagttcaaacatcatgatccataactaagctgaatttcaaagcaagaagcaaatgtatacaaggtaggggattgctagatgcaatcagttatttcctttttagtagcagaatttgctattgtaaggaaaaaatatatgagtccataatcctagtggtaggaagtctacacaaaccctggaaagcagaactg

SEQ ID NO: 178800 - DNA, 470 bp, Homo sapiens
gaattccatcctctcatttcttttttctccattaacactttctttactaagatctggtcgagagggaacagtatgatgtcatgccattgttagaaaggtccctaaatatcatttattaccctggygtgtgggctttctggggcttctcaacagacaagactgtctttatgaagtgctcattactttgttaacagtagctcatctgccacaaactatttaacttcctgcagttgagtgaagagtgaagggtaaattccttgacatgtgagttttaagtgttagttcaaacatcatgatccataactaagctgaatttcaaagcaagaagcaaatgtatacaaggtaggggattgctagatgcaatcagttatttcctttttagtagcagaatttgctattgtaaggaaaaaatatatgagtccataatcctagtggtaggaagtctacacaaaccctggaaagcagaactg

SEQ ID NO: 178801 - DNA, 469 bp, Homo sapiens
tctttactaagatctggtcgagagggaacagtatgatgtcatgccattgttagaaaggtccctaaatatcatttattaccctggcgtgtgggctttctggggcttctcaacagamaagactgtctttatgaagtgctcattactttgttaacagtagctcatctgccacaaactatttaacttcctgcagttgagtgaagagtgaagggtaaattccttgacatgtgagttttaagtgttagttcaaacatcatgatccataactaagctgaatttcaaagcaagaagcaaatgtatacaaggtaggggattgctagatgcaatcagttatttcctttttagtagcagaatttgctattgtaaggaaaaaatatatgagtccataatcctagtggtaggaagtctacacaaaccctggaaagcagaactgtaggaaagcttcctcttcctggagccagcaccaatttgg

SEQ ID NO: 178802 - DNA, 479 bp, Homo sapiens
cattacataacaaaaaggacgtaaattaaattagataaatatcaatacaaacacagttatgaatgcacatgwggaacagcacgagaaaataaaaacacctaattagtgaacagggatgtagtgaaatgagagaattgtttctttgcactaaatttctattcacaacatacataatagtaaaagtaaaaaaaacaaaaaacggaagagaaagcaacatttcagggtgcactgtcagagtagctttgccattgacaactgcaatggttaatattgagtgtcaatatagttggagtgaaggatacaaagtattgttcctgggtgtgtctgtgagggtgttgccaatatatattaacatttgagtcagtggactgggagagacagacccaccctcaatctgagggggtaccatctaatcagctgccagcacagctaggataaaagcaggcacaggaacctggaaggaccagactggctgagtc

SEQ ID NO: 178803 - DNA, 502 bp, Homo sapiens
tctcttttgcagtagtcaggagtcccctaattatactcccagctagattacccttcctaaatagttctgctagtgtcatcttcacattcacaacactctactacaaactcttccttaccmagtcaagttccaattcaaggcctttcaatgttctgaagctggtcacctttccaaaccattgtgcttctgcattcactgtaggtctgtgtcccactgatctactatgctccctgggatttctcacttctaaacctttacttcaaggacacgaccttctgtctctgtttttcgaaatcttaccatctctcagagccaaacccaaatgctgcctcctccataaatccttccttagctatatcactccctccctgatctcccatgccacttgtgtgccttcctacctgtcttagtccatcctggctgctatgccaaatgccatagacaagatgccttatgaaaaacagacatttgtttctcatagttctggaggctggaagttcaa

SEQ ID NO: 178804 - DNA, 540 bp, Homo sapiens
ctttttctcaaatgtgtaaggaaaatatttactataaattgttctgtgtatcacacttaatagaactacagcagtagaaaggaggtaagtgattttactccttcattagctcaacaaatacatttgtagaatacctattggtacgatgggctggatactgacctcaatcctaaccaacccgtaataggaataatctgcagacatagaaataagagttaaatttctggactttaacaggaagctactttcaagaagactrtactgtctgtgattgtctgaattatacacaaagctcatctctcttattcccatgcagaatttgccagttccatgtgccagttccagaaatgatctaagtatcattgctctcacttaatctaccctcaaaatagaactgagtgcttttctatttaccatacccataaagaacctgatatatcggacccagcctggaaagactccctttgttgcacacacagtacagaacatattatttctggcaataagaacactgtgacccccatgtaaactcctttggaa

SEQ ID NO: 178805 - DNA, 455 bp, Homo sapiens
agatactatcaaaataaccacatgatctaaacttataacgtctgataacaataagtgttggcaagggtatggaggaataggatcattggtagcagtgttcactggcacaaccattagaaaatattttagcattatctactatggtagataaacacatggttgtggcttaatttatttcccccaaaargtaatgttcaagtcctaactgtgggtatcagtgaatataaacttatttggaaatagggtctttgcagatgtaattaagttaaaaagacatcacactggatttgaatgggccctaattcagtgactgatatccttataaaagagtaaataaatgaagtttggagacacagatgtagagacacaggcacatggagaaaaagaaggtcacatgaagacagaggccgagattggagtgacactgccacaagccaaggagtgccagaagctgg

SEQ ID NO: 178806 - DNA, 515 bp, Homo sapiens
tctttcaaaactagttcaagaaccattccctcaataataataataataattaaaataattaaaaaataattaaatataattacataataataattattattaaggcagagtttcattctgttgctgggctagagtgcagtggctcaatcacagttcactgcagcctcaactttctgggcccgaataatcctcccaccttagcctcctgagtagccgagaccacctgcatacgccaccacatctagctaaattttaaatttttctgtagagagcggttctcactatgttgcccaggctggtctcgatctcccgggctcaagcaatcctcccgcttcagcctctcaaagmgcttagattctaggcattaacgactgtgctggtctcccatcatcttcttcccattctgctcagcagaattacctcaatccctggcccccgtctttactcctactgctgctgtaacaaattaccataaacctaatgacttaacaggtttggagtgcaatggtgccatc

SEQ ID NO: 178807 - DNA, 515 bp, Homo sapiens
tctttcaaaactagttcaagaaccattccctcaataataataataataattaaaataattaaaaaataattaaatataattacataataataattattattaaggcagagtttcattctgttgctgggctagagtgcagtggctcaatcacagttcactgcagcctcaactttctgggcccgaataatcctcccaccttagcctcctgagtagccgagaccacctgcatacgccaccacatctagctaaattttaaatttttctgtagagagcggttctcactatgttgcccaggctggtctcgatctcccgggctcaagcaatcctcccgcttcagcctctcaaagagcttagattctaggcattaacsactgtgctggtctcccatcatcttcttcccattctgctcagcagaattacctcaatccctggcccccgtctttactcctactgctgctgtaacaaattaccataaacctaatgacttaacaggtttggagtgcaatggtgccatc

SEQ ID NO: 178808 - DNA, 466 bp, Homo sapiens
agatctcgtgagacttaaacactatcacgagaatagcatgagaaagacccacccccatgattcaaatacctcccactgggtccctccatgacatatgggaattgtgggagctacaattcaagataagatttgggtggggacacagccaaaccatatcagtacctctctcctgacatttactgcactctgctttgtatcgtaagtatcctatgaatatataaaaacgatgagtgactcattgaatgcttaccatatatgtgctaaggtaggcactgtgttggtggctcctctcctagggccaggattgtttctttttcatcttcgtttccctgcatatcttcagttgaagttagtagatcctcaggaaacatttgcaacattaaattgaaatgtrtgcacgtgaaattagcacgtttggaaagctgatttccttgaattcccttcctatgccctgagaacttaagac

SEQ ID NO: 178809 - DNA, 378 bp, Homo sapiens
atcaaagcagtttttcttaatatttcaggaagcataaagatcattggtcacaagcctataaagaggacataatgccaacgaaaacatakgtttgcttgtggctgaaattacattccatcagtatggaactgaaggggggatagaacacaaatatttgctcattggttgagcacacatttattgatcatctgcctctgtgcaattgctgtttgtattagttcattctcacactgctataaagatactacccaagtctgggtaatttataatggaaagaggtttaattgactcatagttctgcctggctggggaggcctcatgaaacgtaaaattgtggtggaaggggaatcacgcatgtcttacatggcagcaggagag

SEQ ID NO: 178810 - DNA, 398 bp, Homo sapiens
agcagtttttcttaatatttcaggaagcataaagatcattggtcacaagcctataaagaggacataatgccaacgaaaacatatgtttgcttgtggctgaaattacattccatcagtatggaactgaaggggggatagaacasaaatatttgctcattggttgagcacacatttattgatcatctgcctctgtgcaattgctgtttgtattagttcattctcacactgctataaagatactacccaagtctgggtaatttataatggaaagaggtttaattgactcatagttctgcctggctggggaggcctcatgaaacgtaaaattgtggtggaaggggaatcacgcatgtcttacatggcagcaggagagagagggcaagtgagagcagggaaaa

SEQ ID NO: 178811 - DNA, 367 bp, Homo sapiens
agatcattggtcacaagcctataaagaggacataatgccaacgaaaacatatgtttgcttgtggctgaaattacattccatcagtatggaactgaaggggggatagaacacaaatatttgctcattggttgagcasacatttattgatcatctgcctctgtgcaattgctgtttgtattagttcattctcacactgctataaagatactacccaagtctgggtaatttataatggaaagaggtttaattgactcatagttctgcctggctggggaggcctcatgaaacgtaaaattgtggtggaaggggaatcacgcatgtcttacatggcagcaggagagagagggcaagtgagagcagggaaaac

SEQ ID NO: 178812 - DNA, 398 bp, Homo sapiens
agcagtttttcttaatatttcaggaagcataaagatcattggtcacaagcctataaagaggacataatgccaacgaaaacatatgtttgcttgtggctgaaattacattccatcagtatggaactgaaggggggatagaacacaaatatttgctcattggttgagcacacatttattgatcatctgcctctgtgcaattgctgtttgtattagttcattctcacactgctataaagatactacccaagtctgggtaatttataatggaaagaggtttaattgactcatagttctgcctggctggggaggcctcakgaaacgtaaaattgtggtggaaggggaatcacgcatgtcttacatggcagcaggagagagagggcaagtgagagcagggaaaa

SEQ ID NO: 178813 - DNA, 270 bp, Homo sapiens
acttaattgtggtcttactttaagaaatacccacagccacctcaaccttcagcaacaaccaccttgatcagtcagcagccgtcaatatcaagccaagactctctagsagcaaaaagattatgcctcactgaaggctcagatgatcttcagcttttctagcaatagttgaggtatataaacttcttaggcataatgttaatgcacacttaacattacggagtcaagtgttagcaacgtaacttttctgctattagtctgttctcacagtac

SEQ ID NO: 178814 - DNA, 270 bp, Homo sapiens
acttaattgtggtcttactttaagaaatacccacagccacctcaaccttcagcaacaaccaccttgatcagtcagcagccgtcaatatcaagccaagactctctaggagcaaaaagattatgcctcactgaaggctcagatgatcttcagcttttctagcaatagttgaggtatataaayttcttaggcataatgttaatgcacacttaacattacggagtcaagtgttagcaacgtaacttttctgctattagtctgttctcacagtac

SEQ ID NO: 178815 - DNA, 608 bp, Homo sapiens
gccaagactctctaggagcaaaaagattatgcctcactgaaggctcagatgatcttcagcttttctagcaatagttgaggtatataaacttcttaggcataatgttaatgcacacttaacattacggagtcaagtgttagcaacgtaacttttctgctattagtctgttctcayagtactataaagaaatacctgtgaggtatgtctttaccttagcaactctgtgaaatcagattttcgtatctcccttgtttactccataatggtctatagtatggtgtaaatataatttttatatgcactgggaaacaaaaaaaaatgtgtgacttaccatattgcaatactcaattcattctggtggtctggaaccaaactcaccatatctcctaagtatgcctgtgttgaagccagttctcatttttcctttgtaattcactgtgaagtaattgtctactgagcaaatgttactattttatattaaacaaaattctacagcttgtctcttccatgagtaaaaagaaacgtaaagaagttatctcttttggccttcagtgtacaatgattattataatgtcttattctcagaaaaaatatttgaacaataacag

SEQ ID NO: 178816 - DNA, 467 bp, Homo sapiens
aggagcaaaaagattatgcctcactgaaggctcagatgatcttcagcttttctagcaatagttgaggtatataaacttcttaggcataatgttaatgcacacttaacattacggagtcaagtgttagcaacgtaacttttctgctattagtctgttctcacastactataaagaaatacctgtgaggtatgtctttaccttagcaactctgtgaaatcagattttcgtatctcccttgtttactccataatggtctatagtatggtgtaaatataatttttatatgcactgggaaacaaaaaaaaatgtgtgacttaccatattgcaatactcaattcattctggtggtctggaaccaaactcaccatatctcctaagtatgcctgtgttgaagccagttctcatttttcctttgtaattcactgtgaagtaattgtctactgagcaaatgttactattttatatta

SEQ ID NO: 178817 - DNA, 467 bp, Homo sapiens
aggagcaaaaagattatgcctcactgaaggctcagatgatcttcagcttttctagcaatagttgaggtatataaacttcttaggcataatgttaatgcacacttaacattacggagtcaagtgttagcaacgtaacttttctgctattagtctgttctcacagtactataaagaaatacctgtgaggtatgtctttaccttagcaactctgtgaaatcagattttcgtatctcccttgtttactccataatggtctatagtatggtgtaaatataatttttatatgcactgggaaacaaaaaaaaatgtgtgacttaccatattgcaatastcaattcattctggtggtctggaaccaaactcaccatatctcctaagtatgcctgtgttgaagccagttctcatttttcctttgtaattcactgtgaagtaattgtctactgagcaaatgttactattttatatta

SEQ ID NO: 178818 - DNA, 608 bp, Homo sapiens
gccaagactctctaggagcaaaaagattatgcctcactgaaggctcagatgatcttcagcttttctagcaatagttgaggtatataaacttcttaggcataatgttaatgcacacttaacattacggagtcaagtgttagcaacgtaacttttctgctattagtctgttctcacagtactataaagaaatacctgtgaggtatgtctttaccttagcaactctgtgaaatcagattttcgtatctcccttgtttactccataatggtctatagtatggtgtaaatataatttttatatgcactgggaaacaaaaaaaaatgtgtgacttaccatattgcaatactcaattcattctggtggtctggaaccaaactcaccatatctcctaagtatgcctgtgtygaagccagttctcatttttcctttgtaattcactgtgaagtaattgtctactgagcaaatgttactattttatattaaacaaaattctacagcttgtctcttccatgagtaaaaagaaacgtaaagaagttatctcttttggccttcagtgtacaatgattattataatgtcttattctcagaaaaaatatttgaacaataacag

SEQ ID NO: 178819 - DNA, 439 bp, Homo sapiens
agaagacaggtaatattctgtaaatgtgcataggtttctatgtaacaaggatttgtakctgtagataaaaatgcattacatggaatatatgtcacgtatattatactttatatggtaggtagaataacgtcccagcaaagatgttcatggcctaacctccagagcctgtgaatgttaccttgcagggtaaaaggtactttgcagatgtaacttatgtaagactcttgagagaagggaaccatcctgaattacctaggtagagccaatgtgatcacaagtgtccttaaaagaggaacaccttacaggcaatgtcagagagacagtgatgtgatgacaatagcaaaagggaaaggtgacatgtggggaggtccttaaaagatggataagagaggaaagagattcttcccagattctccagaagaaaacagttctactgaca

SEQ ID NO: 178820 - DNA, 440 bp, Homo sapiens
agaagacaggtaatattctgtaaatgtgcataggtttctatgtaacaaggatttgtagctgtagataaaaatgcattacatggaatatatgtcacgtatattatactttatatggtaggtagaataacgtcccagcaaagatgttcatggcctaacctccagagcctgtgaatgttaccttgcagggtaaaaggtactttgcagatgtaacttatgtaagactcttgagagaagggaaccrtcctgaattacctaggtagagccaatgtgatcacaagtgtccttaaaagaggaacaccttacaggcaatgtcagagagacagtgatgtgatgacaatagcaaaagggaaaggtgacatgtggggaggtccttaaaagatggataagagaggaaagagattcttcccagattctccagaagaaaacagttctactgacac

SEQ ID NO: 178821 - DNA, 439 bp, Homo sapiens
agaagacaggtaatattctgtaaatgtgcataggtttctatgtaacaaggatttgtagctgtagataaaaatgcattacatggaatatatgtcacgtatattatactttatatggtaggtagaataacgtcccagcaaagatgttcatggcctaacctccagagcctgtgaatgttaccttgcagggtaaaaggtactttgcagatgtaacttatgtaagactcttgagagaagggaaccatcctgaattacctaggtagagccaatgtgatcacaagtgtccttaaaagaggaacaccttacaggcaatgtcagagagacagygatgtgatgacaatagcaaaagggaaaggtgacatgtggggaggtccttaaaagatggataagagaggaaagagattcttcccagattctccagaagaaaacagttctactgaca

SEQ ID NO: 178822 - DNA, 578 bp, Homo sapiens
ataatttctgaagaggaaggggtaaggcagaagaatgaacttggttttacattttgggaatgggataatgtttggattgcaaaattcagtttcagaaagaaagtggatgattctytaagaatgggttctttaaaatatgctcagcagatctcaggagatctcaggagaagggatcctcagagtatttgttgaagtcaaacttttaatctctactgggtacaaggggtatggaagattttgctccattacaggtacacttttaataggcaagaattctagtttttgagaatccaagacactttcatgagtatgaaaaaagttatgagatatagcagggactcctcttagaggtagactgggcccagccaagcatggaaataaaggaaaatcttgatttccttcaagaaagatttgaggcacctgtgtagctttgaaaagtaaataagaagcctgataagcaagaaggtaataaccacttaaaacaattgccaaggaagttagagacacaaaatgtttgtttccttgtagaaaccaaagataacatcgtcacatatgttcctgaattttcagagacctgg

SEQ ID NO: 178823 - DNA, 405 bp, Homo sapiens
gtacagcatggtgactacagttaatagtaatgcattatatacttgaaatttgctaagagagtggattctaagtactcttacaacaaagaataagaaaaggtaattacgtgaaatgataaatatgttaactagcttgattgtggaaatcatttcacaacatatacgtataccaatgcatcacactgtacacctcaaatatatataaattttatttgtccattttactcagtaatgctgaaaaaaatgttataaaatattggctgtatayaaaatcacctttacagtcctattgaaataataacaatttctacgtataaagtttcagagcagaaaaacactctcataataaagcagctacttaatatctgggcaaaaaaaataataattattggtatctcagctttt

SEQ ID NO: 178824 - DNA, 435 bp, Homo sapiens
cacatcctttcaaaaagcctgcacatcctttcaataagcccacagaaataactgaaattattctctcactttctcttttgtacaacactcataaaatttattktttttctattgtaaaatgtacacagcataaaatttaccattgcagccacatttaagtgtattgctcagtggcattaaatacatttacattgttgggcagctatcacataagctttattttaggtgtagctgcatcacattttcagattttgtgtgtgtttaaatacatatggaaaagtccttatggaataagcatatagcttgataattcttcttcgactgcacacagccatgtaagcaggactcacatcaaataaccatgcattaccagcaccccagatttccaccccaacatacacacactaaataaatatttgttgaacgtatcaataa

SEQ ID NO: 178825 - DNA, 435 bp, Homo sapiens
cacatcctttcaaaaagcctgcacatcctttcaataagcccacagaaataactgaaattattctctcactttctcttttgtacaacactcataaaatttattgtttttctattgtaaaatgtacacagcataaaatttaccattgcagccacatttaagtgtattgctcagtggcattaaatacattyacattgttgggcagctatcacataagctttattttaggtgtagctgcatcacattttcagattttgtgtgtgtttaaatacatatggaaaagtccttatggaataagcatatagcttgataattcttcttcgactgcacacagccatgtaagcaggactcacatcaaataaccatgcattaccagcaccccagatttccaccccaacatacacacactaaataaatatttgttgaacgtatcaataa

SEQ ID NO: 178826 - DNA, 590 bp, Homo sapiens
cctgtgtatgtgtacactaagtaagcgtagaacacacaaattgtcagataattttttattaagtaatacttctaaaatgaatttttggttttgacaacataaaccactgggatgattctagacttacttggacaggagataattattcaagaacacgaggatatagtttaaggactgggtaaatagaacacaacatataccatcaaatttgtattcatagattatctaaaccctgggatggctttgaaaaaaaaaaaaagacaatcaataacgaatgacacatgaaatragggcaaaaaaattggatgttaagacataatgatcatcagggctaggaataaaaagtattaggatgacaacagctccataatctttaactgacatgtggggaaacaattatttaaatggaggaatctgtccacctagaaacacacagtcttatttcatagagaatggacacaagccttgaagaaagaaaaatcaaattttgaatctcagatttgccacctacaaaatatgactttgagcgttgttctaactttcataatcttagtgttcccatctgtaaaatggatttatcttgtgagttg

SEQ ID NO: 178827 - DNA, 209 bp, Homo sapiens
tgtccaagataattgattagctgagacaaagcttgcataagttagaactggtttcataccgcagctgagagccatttatgcacaytgcttctcaaacctgcatttagcgatgtcatttgggaagctttaaatcagctatagttagaatatttacatcagggaaatttgcaaatactgcagataagtgtttcctctctcccagtagctgg

SEQ ID NO: 178828 - DNA, 566 bp, Homo sapiens
atttatctggccttgcaaagtagagattttctgttgtcattatttctgattatattctcacatttattttttgcatattgaactctggctatatcaaacaggagagactgcccaaatgattgctaaaagaatttactcatatctttttttttgaaattgcaaagatagtctttgcaaacaagctagtttgaaactgtattcagttacaaccattaaatataactgtattcacattataaataaaacactttttagcatgatggaacttggagacatcaattttgttttattttgctttcttggttgtatgcagatagatttaagctcctatgccctcattccttttaaagcctacgtttttttaaagtccttggtggtcacggctggacaggatgttttcytcatttgacacatatagcatttaattgcattttattttattggaatacttatccatatctgcttggtaatgatttaaattaaattatttttcataaatatgccatattatatggtatgatatagcatctactatataatatgcaaatacaaatctttacatttct

SEQ ID NO: 178829 - DNA, 645 bp, Homo sapiens
attatgctttttaaatgtattataaattcaggttttttgatggctttagctttgttatttttgctcaagattgctttggctgtttaggttctttggagatccccctaataattttttgatattttaaaatttgtatgaaaaaagtcattggaattttgaaaggaattgcattgcagttgaatatcattttaggtagtatgaacttcttaacaatattaattcttccaatctgcgaggatatctttccatttatttgtgccttcttccatttgtttcatcaatggttcaaagttttatatgtacrgctctttcacctccttggttaaatgtattctaaggttttttactgtagctattgtaaacatgattgttttcatgatttcatttttggatagttcactgttagtatatagaaatgccaattatatttatatgttgatattgtatccttcaactttacttctcttttagttctaatcattttttggtggagtccatatatgtgtgtgtgtgtatatgtgtgtgtgtgtgtgtgtgtgtgtgtgtgtgtgtgtgattatgtcatctgcaaattgagacaatttaacttcttccattacagtttggatacctttatttctcttgcctaattgctccatctaggac

SEQ ID NO: 178830 - DNA, 645 bp, Homo sapiens
attatgctttttaaatgtattataaattcaggttttttgatggctttagctttgttatttttgctcaagattgctttggctgtttaggttctttggagatccccctaataattttttgatattttaaaatttgtatgaaaaaagtcattggaattttgaaaggaattgcattgcagttgaatatcattttaggtagtatgaacttcttaacaatattaattcttccaatctgcgaggatatctttccatttatttgtgccttcttccatttgtttcatcaatggttcaaagttttatatgtacagstctttcacctccttggttaaatgtattctaaggttttttactgtagctattgtaaacatgattgttttcatgatttcatttttggatagttcactgttagtatatagaaatgccaattatatttatatgttgatattgtatccttcaactttacttctcttttagttctaatcattttttggtggagtccatatatgtgtgtgtgtgtatatgtgtgtgtgtgtgtgtgtgtgtgtgtgtgtgtgtgtgattatgtcatctgcaaattgagacaatttaacttcttccattacagtttggatacctttatttctcttgcctaattgctccatctaggac

SEQ ID NO: 178831 - DNA, 566 bp, Homo sapiens
atttatctggccttgcaaagtagagattttctgttgtcattatttctgattatattctcacatttattttttgcatattgaactctggctatatcaaacaggagagactgcccaaatgattgctaaaagaatttactcatatctttttttttgaaattgcaaagatagtctttgcaaacaagctagtttgaaactgtattcagttacaaccattaaatataactgtattcacattataaataaaacactttttagcatgatggaacttggagacatcaattttgttttattttgctttcttggttgtatgcagatagatttaagctcctatgccctcattccttttaaagcctacgtttttttaaagtccttggtggtcacggctggacaggatgttttcctcatttgacacatatagcatttaattgcattttattttattggaatacttatccatatctgcttggtaatgatttaaattaaattatttttcataaatatgcyatattatatggtatgatatagcatctactatataatatgcaaatacaaatctttacatttct

SEQ ID NO: 178832 - DNA, 496 bp, Homo sapiens
catctgccttgggtggatacatctaattataactactaagacaaatctgattctagcgtgaaaggaaaataaaatcttgggatcccaagctcactatgcccaaaggaaaagttaagcctgtaaactgaggcacacacccaaaaaacttgcctttctttttgttctcaaacagatatctccccaggtagactccctcaccctgacaatgtaaattaacagtttatctagccgggtgtggtggctsacgcctgtaatcccagcactttgggaggctgaggcaggtggatcacaaagtcaggagttcaagaccagcctggccaacatggtgaaaccccgtatctacagaaaatacaaaaattagctgggtgtggcggcacgtgcctgtagtcccagctacttgggaggctcaggcaggagaattgcttgaacctgggaggcggaggttgcagtgagccaagaccatgccattgcactccagcctgggcaacagagtgag

SEQ ID NO: 178833 - DNA, 496 bp, Homo sapiens
catctgccttgggtggatacatctaattataactactaagacaaatctgattctagcgtgaaaggaaaataaaatcttgggatcccaagctcactatgcccaaaggaaaagttaagcctgtaaactgaggcacacacccaaaaaacttgcctttctttttgttctcaaacagatatctccccaggtagactccctcaccctgacaatgtaaattaacagtttatctagccgggtgtggtggctcacgcctgtaatcccagcactttgggaggctgaggcaggtggatcacaaagtcaggagttcaagaccagcctggccaacatggtgaaaccccgtatctacaraaaatacaaaaattagctgggtgtggcggcacgtgcctgtagtcccagctacttgggaggctcaggcaggagaattgcttgaacctgggaggcggaggttgcagtgagccaagaccatgccattgcactccagcctgggcaacagagtgag

SEQ ID NO: 178834 - DNA, 566 bp, Homo sapiens
atttatctggccttgcaaagtagagattttctgttgtcattatttctgattatattctcacatttattttttgcatattgaactctggctatatcaaacaggagagactgcccaaatgattgctaaaagaatttactcatatctttttttttgaaattgcaaagatagtctttgcaaacaagctagtttgaaactgtattcagttacaaccattaaatataactgtattcacattataaataaaacactttttagcatgatggaacttggagacatcaattttgttttattttgctttcttggttgtatgcagatagatttaagctcctatgccctcattccttttaaagcctacgtttttttaaagtccttggtggtcacggctggacaggatgttttcctcatttgacacatatagcatttaattgcattttattttattggaatacttatccatatctgcttggtaatgatttaaattaaattatttttcataaatatgccataytatatggtatgatatagcatctactatataatatgcaaatacaaatctttacatttct

SEQ ID NO: 178835 - DNA, 531 bp, Homo sapiens
taaattgtcatgaacattcctttgtccatttccctccgcatctgtcttcataatattgtaactaaggagctcagcacagtacctcgctcacaggtagaattgaataataccatggggataattctctaactataccattagggagaaaagtaaaacatatttttattgtagaccacagtgactatttttatattacyctgggcatgaaaatcagactggaattaaattttctaaacagtaacttctaggagtttctttcagaagcaaagtatcattttccagattgaatgaatcatttggtgacataaaaccaccttttcctggtggaaaaatgtttattgcatacagttgtatgcgaacaactatgttagttgctacaagaaaaagaaaaaatattagatattatcctacctaaaaatatactgcaatatattgggttagatagatttgcctgtagacataatagttgccgtgataaaactgacaaattgtgctcttgggagaagaaacttctaatatgtacttggaaat

SEQ ID NO: 178836 - DNA, 539 bp, Homo sapiens
aattgtcatgaacattcctttgtccatttccctccgcatctgtcttcataatattgtaactaaggagctcagcacagtacctcgctcacaggtagaattgaataataccatggggataattctctaactataccattagggagaaaagtaaaacatatttttattgtagaccacagtgactatttttatattaccctgggcatgaaaatcagactggaattaaattttctaaacagtaacttctaggagtttctttcagaagcaaagtatcattttccagattraatgaatcatttggtgacataaaaccaccttttcctggtggaaaaatgtttattgcatacagttgtatgcgaacaactatgttagttgctacaagaaaaagaaaaaatattagatattatcctacctaaaaatatactgcaatatattgggttagatagatttgcctgtagacataatagttgccgtgataaaactgacaaattgtgctcttgggagaagaaacttctaatatgtacttggaaatttggaaagat

SEQ ID NO: 178837 - DNA, 608 bp, Homo sapiens
cagattgaatgaatcatttggtgacataaaaccaccttttcctggtggaaaaatgtttattgcatacagttgtatgcgaacaactatgttagttgctacaagaaaaagaaaaaatattagatattatcctacctaaaaatatactgcaatatattgggttagatagatttgcctgtagacataatagttgccgtgataaaactgacaaattgtgctcttgggagaagaaacttctaatatgtacttggaaatttggaaagatctcacaaaatgttagcattttasctaggcatggaacatttcataagatttcactccatgaaggaaaggatatgagaaaaatagcatcagtatgatcacaaggtttgaaaattggtctgaataattagcaaattagaatgccattgtgagttaagtttgatgagagctgagtctagagatagactgaagccagccaagcagcatgacggtcatgatgagctgtacttgtgctactgaatctatcgatttagaccttaaagcattttcccagaaaagtagagcactgataaaagctgagtgatgtaacttggcttcaaaaattcttttgaaaagttagaaggcactcc

SEQ ID NO: 178838 - DNA, 608 bp, Homo sapiens
cagattgaatgaatcatttggtgacataaaaccaccttttcctggtggaaaaatgtttattgcatacagttgtatgcgaacaactatgttagttgctacaagaaaaagaaaaaatattagatattatcctacctaaaaatatactgcaatatattgggttagatagatttgcctgtagacataatagttgccgtgataaaactgacaaattgtgctcttgggagaagaaacttctaatatgtacttggaaatttggaaagatctcacaaaatgttagcattttacctaggcatggaacatttcataagatttcactccatgaaggaaaggatatgagaaaaatagcatcagtatgatcacaaggtttgaaaattggtctgaataattagcaaattagaatgccattgtgagttaagtttgatgagagctgagtctagagatagactgaagccagccaagcagcatgayggtcatgatgagctgtacttgtgctactgaatctatcgatttagaccttaaagcattttcccagaaaagtagagcactgataaaagctgagtgatgtaacttggcttcaaaaattcttttgaaaagttagaaggcactcc

SEQ ID NO: 178839 - DNA, 545 bp, Homo sapiens
gcacacacataaacacatacacacagattcatcatgaacctctagcaatatatacattaaaataataaattttaaaagctccctgacatgctgactaccccaaatgtaatcaatatgtctactgtttccattattttctgtccaaatcaactatggcaatcccaggaagagttkccagatttagaaaataaaagtacagaacttccagttatatttgaatatcagataaataatgaataatttggggtcatacttatacgaaaatgtcgttcattgtttatctgaattcaaatgtaagtaggagtcctgtattttataaggcaaccttcttcccatgggctcctaaaagtttaatagtctgtagtgaacttggctcacactggaaatatgatcacctcattacatgaaacttagcaataattggaatacctccatttacatattcagatttttacaaacagagttttggggagtttttgcccaaatatacatgtaagatcaaagaatcccaatggaattggtctgaagtttttaggagggaaaag

SEQ ID NO: 178840 - DNA, 407 bp, Homo sapiens
gtaaaactagtaatactctaggccattgggaaaatagaaaatgcttctttccctacaattcttttcatcycctattccatcccctccctcagttatctattgaccctcaactaactttttgagaagggggggtgtgctgtactctagctgtgtggtagaccacaggaggagacgtaggtagtgtaataaaagcaggtgagacaggagctgttctctcctgttcaagaaaatagaaatgatatcctggtaaacattcagaaatgtactctcaaattcaagctaagttatcaatgtgtgcgaggtatgttaacaaacaaatccatgccacttactcattattatttacataataagaaaggaagcctgggttaaagagctagcagctctaagtatatatctatatatac

SEQ ID NO: 178841 - DNA, 537 bp, Homo sapiens
caaatcagttcctcacttaggataacacataacatggctgaacacatgattacagtgaaaccatgtagtggatcatacacagtgtgggccttagaatagcgaaggtctgattttgaatgttgactctgtattagtctgctctcacactactaaaaagaattaccggagatgggtaatttgcaaagaaaagaggtttaattgactcacagttccaccggcttaataggaagcacaactcagagacctcaggaaacttacaatcatggtggaaagtgaaggggaaggaagcatgccttagcaaggtgtagaagagaaagagacsgaagggggcagtaacacactttcaaacagccagatctcatgaaaactcactatcaggagaacagcaaggggaaagtctactcccatgattcagtaacctcccagcaagcccctcccctgacacgtggggattacaattcgagatgagatttgggtggggacacagagtcaaactatgtcagactatcacttaacttgggcaagttatttacttaa

SEQ ID NO: 178842 - DNA, 393 bp, Homo sapiens
tctagacacaggtgaaagcaggcaattcaggtgaaagcagcagaaaatgctcaaccaagtcacaaaataagaaaaactaaattatcattttaagccattaggttttaaaggtagtttcgttatgtaacataattggtaaaatatcactttatagtacttacaatttgcaatatatagtatcttccgagtcagggatcagcaaacattttctataaagggcctgacagtaaaaacttcagactttracggccatatggtctatgtcataccaactcaactcagcacttgcagtgcaaaagcagctatagataatgggtaaataaactgcaaatagttttattgtgatccaataaaactatttacaaaaataggcagatgaatggatttggtttt

SEQ ID NO: 178843 - DNA, 562 bp, Homo sapiens
ctttaacggccatatggtctatgtcataccaactcaactcagcacttgcagtgcaaaagcagctatagataatgggtaaataaactgcaaatagttttattgtgatccaataaaactatttacaaaaataggcagatgaatggatttggttttcaggcacagttttctgaatcctgttctaagttgacagtctagaagaatgtgttaattctcatctcatagtgtgcattcaattactaataattagtctctttattgactttagaaaattatgtawgagaagaattcttgaaggctttgctctaaagaatatcaagctgccaccgtggttcatacctgtaaactcaacactttggtaggccaagacgggaggataactcgaggccaggaatttgagaccagcctgggcaacacagtgagctcccatctctacaaaaaaaaaaaaaagcaatatcaggaccaactatgatagttaacatccttgtgtgcagtgtggttgttgtgccaaatccctgttgactctagtagagatggcacctagtgcaagaggctgaagaagaga

SEQ ID NO: 178844 - DNA, 562 bp, Homo sapiens
ctttaacggccatatggtctatgtcataccaactcaactcagcacttgcagtgcaaaagcagctatagataatgggtaaataaactgcaaatagttttattgtgatccaataaaactatttacaaaaataggcagatgaatggatttggttttcaggcacagttttctgaatcctgttctaagttgacagtctagaagaatgtgttaattctcatctcatagtgtgcattcaattactaataattagtctctttattgactttagaaaattatgtaagagaagaattcttgaaggctttgctctaaagaatatcaagctgccaccgtggttcatacctgtaaactcaacactttggtaggccaagacgggaggataactcgaggccaggaatttgagaccagcctgggcaacacagtgagmtcccatctctacaaaaaaaaaaaaaagcaatatcaggaccaactatgatagttaacatccttgtgtgcagtgtggttgttgtgccaaatccctgttgactctagtagagatggcacctagtgcaagaggctgaagaagaga

SEQ ID NO: 178845 - DNA, 470 bp, Homo sapiens
ccaaaaaaggaggtaagagacaatagagctctacaggagtaacatttctacatcttttaatatttagtataaatctgaggtagattccagtaagctaagaagtatatgataagcacaatgggaagcattcaaaaaacctcaaatgtaacacaaaaaattttaatacattagaaatattaatacaaataaagcagtaaaagaggaaaagagataaacagataggaagcatatagaaaattaaatgtgaaacsgcagacctaaatcaatttatatcaattacaatgttactggcaggtctttgttcttagagctcttaagatggtggcaggccgttcccaggacggtgagattacttcctctacgtgtttttctcttgcctgatcttgaactcagcccccatcagtcataccagtatgggtgaagtaagtccaacagacagtggctccaagccctgcagcacaattaggatt

SEQ ID NO: 178846 - DNA, 470 bp, Homo sapiens
ccaaaaaaggaggtaagagacaatagagctctacaggagtaacatttctacatcttttaatatttagtataaatctgaggtagattccagtaagctaagaagtatatgataagcacaatgggaagcattcaaaaaacctcaaatgtaacacaaaaaattttaatacattagaaatattaatacaaataaagcagtaaaagaggaaaagagataaacagataggaagcatatagaaaattaaatgtgaaacggcagacctaaatcaatttatatcaattacaatgttactggcaggtctttgttcttagagctcttaagatggtggcaggccgttcccaggacggtgagattacttcctctacgtgtttttctcttgcctgatcttgaactcagccccmatcagtcataccagtatgggtgaagtaagtccaacagacagtggctccaagccctgcagcacaattaggatt

SEQ ID NO: 178847 - DNA, 557 bp, Homo sapiens
atggcacttcactccatttgccctcctttctacaaaataggtctagctgtaagatggtgttataatgtatacttccctcaggaggccaggtttctcccccttggagaggatattgtggccaggtgggactgcagaagaatataagtcatttctttcatagcatctgagggtcaaattggtcccagttctccagaatacatcttaggggcatttttgccttgtggggaatgtttcccatctgaaaaaagaacataattatgccagcacccctagtcattttctaatgatcattagtcytagagcatcctctctggtcctaatgcttattcctttccacggtgcgtaaccacccatggacctccgcttatcagattagttacgctcactaatgtagcagtcctgcaccccttttcccgcctttcttgactgcaaagaaaggggtctgggctgctggattctagtggtcctttaccagcgtgcccaacattgcctttgtgctcagggttgagttctagagctgggctggattcctgagtatttcataaccacccagttgc

SEQ ID NO: 178848 - DNA, 557 bp, Homo sapiens
atggcacttcactccatttgccctcctttctacaaaataggtctagctgtaagatggtgttataatgtatacttccctcaggaggccaggtttctcccccttggagaggatattgtggccaggtgggactgcagaagaatataagtcatttctttcatagcatctgagggtcaaattggtcccagttctccagaatacatcttaggggcatttttgccttgtggggaatgtttcccatctgaaaaaagaacataattatgccagcacccctagtcattttctaatgatcattagtcctagagcatcctctctggtcytaatgcttattcctttccacggtgcgtaaccacccatggacctccgcttatcagattagttacgctcactaatgtagcagtcctgcaccccttttcccgcctttcttgactgcaaagaaaggggtctgggctgctggattctagtggtcctttaccagcgtgcccaacattgcctttgtgctcagggttgagttctagagctgggctggattcctgagtatttcataaccacccagttgc

SEQ ID NO: 178849 - DNA, 557 bp, Homo sapiens
atggcacttcactccatttgccctcctttctacaaaataggtctagctgtaagatggtgttataatgtatacttccctcaggaggccaggtttctcccccttggagaggatattgtggccaggtgggactgcagaagaatataagtcatttctttcatagcatctgagggtcaaattggtcccagttctccagaatacatcttaggggcatttttgccttgtggggaatgtttcccatctgaaaaaagaacataattatgccagcacccctagtcattttctaatgatcattagtcctagagcatcctctctggtcctaatgcttattcctttccacggtgcgtaaccacccatggacctccgcttatcagattagttacgctcactaatgtagcagtcctgcaccccttttcccgcctttcttgactgcaaagaaaggggtctgggctgctggattctagtggtcctttaccagcgtgcccaacattgcctttgwgctcagggttgagttctagagctgggctggattcctgagtatttcataaccacccagttgc

SEQ ID NO: 178850 - DNA, 557 bp, Homo sapiens
atggcacttcactccatttgccctcctttctacaaaataggtctagctgtaagatggtgttataatgtatacttccctcaggaggccaggtttctcccccttggagaggatattgtggccaggtgggactgcagaagaatataagtcatttctttcatagcatctgagggtcaaattggtcccagttctccagaatacatcttaggggcatttttgccttgtggggaatgtttcccatctgaaaaaagaacataattatgccagcacccctagtcattttctaatgatcattagtcctagagcatcctctctggtcctaatgcttattcctttccacggtgcgtaaccacccatggacctccgcttatcagattagttacgctcactaatgtagcagtcctgcaccccttttcccgcctttcttgactgcaaagaaaggggtctgggctgctggattctagtggtcctttaccagcgtgcccaacattgcctttgtgctcagggttgagttctagagctgggctggattcytgagtatttcataaccacccagttgc

SEQ ID NO: 178851 - DNA, 439 bp, Homo sapiens
caataaaagaagagggagagaaatttccccaaaggtaaaactgaaagcaaatggactcttctctattgaatattcatctataatactggggaagagagcattaaaatgtctgaggaaaacaattatcccrtcgggctcttggagtccagtctccagagttcgagagcaatagttcctactgcacttcccagagacggttttctgacaaagccaacttgactctaatttttattcatatatttaatagatttattagccatctatcaaatgtcatgttctataaccaataaactaagaattgaaaaataaaatctaggccctagctttatgaaaggttcatagtcaaatgggcaagatagctatataataccaatcatgtggaagtgctatcatataagattatgaacagaatataaaagactggcacaaaaaaaaagga

SEQ ID NO: 178852 - DNA, 439 bp, Homo sapiens
caataaaagaagagggagagaaatttccccaaaggtaaaactgaaagcaaatggactcttctctattgaatattcatctataatactggggaagagagcattaaaatgtctgaggaaaacaattatcccatcgggctcttggagtccagtctccagagttcgagagcaatagttcctactgcacttcccagagacggttttctgacaaagccaacttgactctaatttttattcatatatttaatagatttattagccatctatcaaatgtcatgttctataaccaataaactaagaattgaaaaataaaatctaggccctagcyttatgaaaggttcatagtcaaatgggcaagatagctatataataccaatcatgtggaagtgctatcatataagattatgaacagaatataaaagactggcacaaaaaaaaagga

SEQ ID NO: 178853 - DNA, 439 bp, Homo sapiens
caataaaagaagagggagagaaatttccccaaaggtaaaactgaaagcaaatggactcttctctattgaatattcatctataatactggggaagagagcattaaaatgtctgaggaaaacaattatcccatcgggctcttggagtccagtctccagagttcgagagcaatagttcctactgcacttcccagagacggttttctgacaaagccaacttgactctaatttttattcatatatttaatagatttattagccatctatcaaatgtcatgttctataaccaataaactaagaattgaaaaataaaatctaggccctagcttyatgaaaggttcatagtcaaatgggcaagatagctatataataccaatcatgtggaagtgctatcatataagattatgaacagaatataaaagactggcacaaaaaaaaagga

SEQ ID NO: 178854 - DNA, 439 bp, Homo sapiens
caataaaagaagagggagagaaatttccccaaaggtaaaactgaaagcaaatggactcttctctattgaatattcatctataatactggggaagagagcattaaaatgtctgaggaaaacaattatcccatcgggctcttggagtccagtctccagagttcgagagcaatagttcctactgcacttcccagagacggttttctgacaaagccaacttgactctaatttttattcatatatttaatagatttattagccatctatcaaatgtcatgttctataaccaataaactaagaattgaaaaataaaatctaggccctagctttatgaaaggytcatagtcaaatgggcaagatagctatataataccaatcatgtggaagtgctatcatataagattatgaacagaatataaaagactggcacaaaaaaaaagga

SEQ ID NO: 178855 - DNA, 437 bp, Homo sapiens
ttacaccagttatataatttacacttattagtatacaatggggctaggataaatttcaatagaaaagstctttttttcaagatagtttattcttattttcctgtcaccttcctcacttaactgtcgggttcagcaaacaaatatatcaagataacattaaataccaataaaacaaccatagcatctgaagagaaatgttcatgttgaaatttagtttttatactaatttcatcctccactacattaaaatataatgatattaaaaatgtatttcctggggtagtggggatactctgaggggcctgctgctgtgtgggtagaggatagccatagtacagccagggaagctgcccaaggaacagaagctgaagctgtagaatgatcatgggcgagaggttttatttagaatctgctcatgtttgcctaataaatgtagc

SEQ ID NO: 178856 - DNA, 547 bp, Homo sapiens
tttacattctttgtgatgtactaggtgaaatccagtgtttatttcacgcttacagcacatctcaatttggactaatcatattgcaaattttaatagtcccatggggctagcagatatcctactggatggcaaaggtttagaatactaatttgataggtccaccacacccaaggtacagaaagtcccagcaaaagggttatggtgacttcaagactgatatatcttcccagtccagagatttttatcttgttgttatctttaaaatttttcattttgtaattgaaaaatctatttgagtttgctttccatggaaatgaaagggttattcctgttggattcttcaccatagtgaaggtaatagtttggggtttacactattatgtccctataaagcgtgcwgtacatctcctaacaagactgccattcatgttttcaataaatcttgcacaagggtattagggtctttgaactgacaattgatttactgcctggaaaattattctttattgatttatattacatggaggcgactgcaaatctatagtgt

SEQ ID NO: 178857 - DNA, 547 bp, Homo sapiens
tttacattctttgtgatgtactaggtgaaatccagtgtttatttcacgcttacagcacatctcaatttggactaatcatattgcaaattttaatagtcccatggggctagcagatatcctactggatggcaaaggtttagaatactaatttgataggtccaccacacccaaggtacagaaagtcccagcaaaagggttatggtgacttcaagactgatatatcttcccagtccagagatttttatcttgttgttatctttaaaatttttcattttgtaattgaaaaatctatttgagtttgctttccatggaaatgaaagggttattcctgttggattcttcaccatagtgaaggtaatagtttggggtttacactattatgtccctataaagcgtgcagtacatctcctaacaagactgccattcatgttytcaataaatcttgcacaagggtattagggtctttgaactgacaattgatttactgcctggaaaattattctttattgatttatattacatggaggcgactgcaaatctatagtgt

SEQ ID NO: 178858 - DNA, 656 bp, Homo sapiens
caacaactatagtttctcacctgaattattgcaatcacctcctaattgttctccctgctaggttgacacggtaacttccatttccaattcagtagtcaaaatgattcttttaaaacatctcaaatcacgtcaccttccaatagcttccaatgacgtggcratatcggagcaaaagaaaatgttcttccattacattggcttataataccttttaatatcttgctctttccagtctctcatattgcaacttttgcatatgttgcatatgtttgcattgcatcctgtcctacaacttttccctatgctttctaaacttcagcatcctagcccttcttcaaacatgccaagcacacttctacctcatggcccaacctcacgtactcttcctcctgcctgaaacattcattctccaataatcacatggcttgctttctcttatttgtgctcaaatagtttttattagaaaggccatctttgacaaccagaaataaacttcacccttacccctattgtttttcctttctttgttatcttgctttatttttcttaattcttatttgttaccatattttatatttatatttttgtttgtttaccatctatcttccagttaataaacctgaagttgtaaattctaggccattatgggctttgtg

SEQ ID NO: 178859 - DNA, 496 bp, Homo sapiens
atattgttccatttaacaaaactgcagcccttcacctatccttaagtcccttggccaatggtacagagccagagtatgctactccctagcaggaaatcaacaggatgacctactaaacaccattcagaagatgctaagacccatgaattgcaacaggaaagaaaagacagagaattagtcagacaggtacatgctgtgccaaagatgcactacagcccccacccaattctgcctaatcctagctgggctgacaccaacctgatgagacaggcctataagatctcaaactaaaacagaaactcctgaactgggttctttcgarcccaggaagcagcagtaaatcattaaagaacagataagttcttaaggtgagggagagtttcagataaatggaatgctggtagaacacagggcccaaaggagcaaaagttaacctaagcccaggtagaaccttgtttactagagtattaggcatgggttggggcaactattctaa

SEQ ID NO: 178860 - DNA, 367 bp, Homo sapiens
aactcctgaactgggttctttcgaacccaggaagcagcagtaaatcattaaagaacagataagttcttaaggtgagggagagtttcagataaatggaatgctggtagaacacagggcccaaaggagcaaaagttaacctaagcccaggtagaaccttgtttactagagtattaggcatgggttkgggcaactattctaaccagagaaactggcttcagtgagggcaagttggcaatccaaggtatagcatgcatagggctggcaaaattcagggtgactgaagcaaaagcttcagaaccagaaagaccacatctgggggtagagcacaaaactctcaagagatgaatctttgtaagagtgaggcaga

SEQ ID NO: 178861 - DNA, 435 bp, Homo sapiens
aaaaaggaaaaaaggaaggaaagaaaaaaggaaggaaggaggraaggagggaaaaagggaaggagggaaggaaaggaaggaaggaaaagaaggaaaggaaggaagggaaagagagaaagagggaaggaggaagggagggaaggagggagggagggagagagagagggagggaggggaagggaagaaaagggaggagaagggaaagaaggaagaaaaggaaaggaaaggaataaattttatttcttaacagttctggatgttaggaagtccaaggttgaggggcctgcatccggtaagggtcttcttgctgcatcatcccactacagaaggcagaaggaaaagagagtgcaagaaagcaagagggcaaaaggggctgaactctgttttataataagcccactctgtgattactaatctattaccacaataacaaca

SEQ ID NO: 178862 - DNA, 435 bp, Homo sapiens
aaaaaggaaaaaaggaaggaaagaaaaaaggaaggaaggaggaaaggagggaaaaagggaaggagggaaggaaaggaaggaaggaaaagaaggaaaggaaggaagggaaagagagaaagagggaaggaggaagggagggaaggagggagggagggagagagagagggagggaggggaagggaagaaaagggaggagaagggaaagraggaagaaaaggaaaggaaaggaataaattttatttcttaacagttctggatgttaggaagtccaaggttgaggggcctgcatccggtaagggtcttcttgctgcatcatcccactacagaaggcagaaggaaaagagagtgcaagaaagcaagagggcaaaaggggctgaactctgttttataataagcccactctgtgattactaatctattaccacaataacaaca

SEQ ID NO: 178863 - DNA, 435 bp, Homo sapiens
aaaaaggaaaaaaggaaggaaagaaaaaaggaaggaaggaggaaaggagggaaaaagggaaggagggaaggaaaggaaggaaggaaaagaaggaaaggaaggaagggaaagagagaaagagggaaggaggaagggagggaaggagggagggagggagagagagagggagggaggggaagggaagaaaagggaggagaagggaaagaaggaagaaaaggaaaggaaaggaataaattttatttcttaacagttctggatgttaggaagtccaaggttgaggggcctgcatccggtaagggtcttcttgctgcatcatcccactacagaaggcagaaggaaaagagagtgcaagaaagcaagagggcaaarggggctgaactctgttttataataagcccactctgtgattactaatctattaccacaataacaaca

SEQ ID NO: 178864 - DNA, 435 bp, Homo sapiens
aaaaaggaaaaaaggaaggaaagaaaaaaggaaggaaggaggaaaggagggaaaaagggaaggagggaaggaaaggaaggaaggaaaagaaggaaaggaaggaagggaaagagagaaagagggaaggaggaagggagggaaggagggagggagggagagagagagggagggaggggaagggaagaaaagggaggagaagggaaagaaggaagaaaaggaaaggaaaggaataaattttatttcttaacagttctggatgttaggaagtccaaggttgaggggcctgcatccggtaagggtcttcttgctgcatcatcccactacagaaggcagaaggaaaagagagtgcaagaaagcaagagggcaaaaggggctgaactctgttttataataarcccactctgtgattactaatctattaccacaataacaaca

SEQ ID NO: 178865 - DNA, 721 bp, Homo sapiens
ttattatgacatggcatgttaggataccaagtaaattgcatttgtaaaatgtgattttctgttggtgttcacttctgctctactgacatttggtaagtattattgactgactgactaactaatgtggtcattagtcttcataaagaaaggctctctacaaaaatggagcgatgccctttttctggcatttaatacgtaagaaattgcctctgatggaaaccagagttgcctgattactatcagcacaggagaaatgtattaatgtgcctttctagtaacaggtttttagaaagtcaaatataaacaaatctgtctgtttgtgtgtgtgcatgtggtggtggggagggaagagaaaaggagggggagagamagagaaataagaaccaagtttattatactgtattcagggggaaaaaaatttcccaaggtcctaacagaagagcaaagtgccactgtcaatagcctcagtagtgttagggttgcttttatttatttatttatttatttatttatttatttacttacttatttatttttcctttttttttctttttctttttttcttttttttttctttccttttttttttttttttttttttttgggacagagtctcacactgtcgccggggctggagtgcattggcgcaatctcgattcactgcaacctctgcctcccaagttcaagtgattctcctgcctcagccgcccaagtagctggg

SEQ ID NO: 178866 - DNA, 721 bp, Homo sapiens
ttattatgacatggcatgttaggataccaagtaaattgcatttgtaaaatgtgattttctgttggtgttcacttctgctctactgacatttggtaagtattattgactgactgactaactaatgtggtcattagtcttcataaagaaaggctctctacaaaaatggagcgatgccctttttctggcatttaatacgtaagaaattgcctctgatggaaaccagagttgcctgattactatcagcacaggagaaatgtattaatgtgcctttctagtaacaggtttttagaaagtcaaatataaacaaatctgtctgtttgtgtgtgtgcatgtggtggtggggagggaagagaaaaggagggggagagacagagaaataagaaccaagtttattatactgtattcagggggaaaaaaatttcccaaggtcctaacagaagagcaaagtgccactgtcaatagcctcagtagtgttagggttgcttttatttatttatttatttatttatttatttatttacttacttayttatttttcctttttttttctttttctttttttcttttttttttctttccttttttttttttttttttttttttgggacagagtctcacactgtcgccggggctggagtgcattggcgcaatctcgattcactgcaacctctgcctcccaagttcaagtgattctcctgcctcagccgcccaagtagctggg

SEQ ID NO: 178867 - DNA, 721 bp, Homo sapiens
ttattatgacatggcatgttaggataccaagtaaattgcatttgtaaaatgtgattttctgttggtgttcacttctgctctactgacatttggtaagtattattgactgactgactaactaatgtggtcattagtcttcataaagaaaggctctctacaaaaatggagcgatgccctttttctggcatttaatacgtaagaaattgcctctgatggaaaccagagttgcctgattactatcagcacaggagaaatgtattaatgtgcctttctagtaacaggtttttagaaagtcaaatataaacaaatctgtctgtttgtgtgtgtgcatgtggtggtggggagggaagagaaaaggagggggagagacagagaaataagaaccaagtttattatactgtattcagggggaaaaaaatttcccaaggtcctaacagaagagcaaagtgccactgtcaatagcctcagtagtgttagggttgcttttatttatttatttatttatttatttatttatttacttacttatttatttttcctttttttttctttttctttttttcttttttttttctttccttttttttttttttttttttttttkggacagagtctcacactgtcgccggggctggagtgcattggcgcaatctcgattcactgcaacctctgcctcccaagttcaagtgattctcctgcctcagccgcccaagtagctggg

SEQ ID NO: 178868 - DNA, 464 bp, Homo sapiens
ctggggagacaattcaatctaaacaaaaggtcatctgtacaaacacagtaaaaatctgggagtaactgaagacagagttggtaagtgaaataagaaacagttataagaaattaaactatgatatcaataggcacctggtataaaaggtcagttaatgttagctgctacttttttgttgttttgagacagggtctcactctgtcacccaggctggagtgcagaggcctgatcatgactcactgcagtctcagcctccctgggctcaagtgatcctcccacctcagcctcccaagtagctgggactacaggaacatgccaccacactargctaattcatgtatttttctgtagggatggtgactccccctttgtttccaaggcctatcgcaaactcttggcctcaagccatcctcctgcctcagcctcccaaagtgttgcaattaccagtgtgagccaccacacct

SEQ ID NO: 178869 - DNA, 344 bp, Homo sapiens
catcaatgaaatggattgcaaatagaaagagtaataccatgtcacttaagaatacaatcatggacgakgctgccacctgctgttgggggccactgcagaagaaattccagaacactggactggagagcacctcactttccttacagctctaagtttctgactcagtgacctgattcagtaccatatacacaaagacccacttacacaaatgactgttcttcacactaggcccatggagacagggataaaattctgaatttgctcagataccttctctgctattgacatctaggcattacacaattcatctcttcatacttaacctttgaagtttgctacttctc

SEQ ID NO: 178870 - DNA, 476 bp, Homo sapiens
cttaagaatacaatcatggacgatgctgccacctgctgttgggggccactgcagaagaaattccagaacactggactggagagcacctcactttccttacagctctaagtttctgactcagtgacctgattcagtaccatatacacaaagacccacttacacaaatgactgttcttcacactaggcccatggagacagggataaaattctgaatttgctcagataccttctctgctaytgacatctaggcattacacaattcatctcttcatacttaacctttgaagtttgctacttctcagagagactaatgagtagtgagcaaatatcctgaagctgagaatgcttctacctcctctcaaaacaacagaatattcatcaaaacacagcagttctgcacttaactttaggccttttctaacacctcatttcttggcagtaactgtggccagaatagctctttccacagagaaagg

SEQ ID NO: 178871 - DNA, 476 bp, Homo sapiens
cttaagaatacaatcatggacgatgctgccacctgctgttgggggccactgcagaagaaattccagaacactggactggagagcacctcactttccttacagctctaagtttctgactcagtgacctgattcagtaccatatacacaaagacccacttacacaaatgactgttcttcacactaggcccatggagacagggataaaattctgaatttgctcagataccttctctgctattgacatctaggcawtacacaattcatctcttcatacttaacctttgaagtttgctacttctcagagagactaatgagtagtgagcaaatatcctgaagctgagaatgcttctacctcctctcaaaacaacagaatattcatcaaaacacagcagttctgcacttaactttaggccttttctaacacctcatttcttggcagtaactgtggccagaatagctctttccacagagaaagg

SEQ ID NO: 178872 - DNA, 476 bp, Homo sapiens
cttaagaatacaatcatggacgatgctgccacctgctgttgggggccactgcagaagaaattccagaacactggactggagagcacctcactttccttacagctctaagtttctgactcagtgacctgattcagtaccatatacacaaagacccacttacacaaatgactgttcttcacactaggcccatggagacagggataaaattctgaatttgctcagataccttctctgctattgacatctaggcattacacaattcatctcttcatayttaacctttgaagtttgctacttctcagagagactaatgagtagtgagcaaatatcctgaagctgagaatgcttctacctcctctcaaaacaacagaatattcatcaaaacacagcagttctgcacttaactttaggccttttctaacacctcatttcttggcagtaactgtggccagaatagctctttccacagagaaagg

SEQ ID NO: 178873 - DNA, 476 bp, Homo sapiens
cttaagaatacaatcatggacgatgctgccacctgctgttgggggccactgcagaagaaattccagaacactggactggagagcacctcactttccttacagctctaagtttctgactcagtgacctgattcagtaccatatacacaaagacccacttacacaaatgactgttcttcacactaggcccatggagacagggataaaattctgaatttgctcagataccttctctgctattgacatctaggcattacacaattcatctcttcatacttaacctttgaagtttgctacttctcagaragactaatgagtagtgagcaaatatcctgaagctgagaatgcttctacctcctctcaaaacaacagaatattcatcaaaacacagcagttctgcacttaactttaggccttttctaacacctcatttcttggcagtaactgtggccagaatagctctttccacagagaaagg

SEQ ID NO: 178874 - DNA, 588 bp, Homo sapiens
gagtgaggctacataactacatggctaggtagacttttagaaaacttggctgctctagaaaattgacatatcctgatttcttccatagcttggatcttgacctagagggaaatataaaaatgttgacttgaacctgaggggtgccattttcactgctgaagtagtttcatggatcatgaattggagaaatgacttcagcaacacgggtgttaaaaacagcacaagtgacccacaacagatgatggagaacaaagagcaagctgggaaaagcagtggcctttaatacagaaaagaagaagtatagccacaataaatattaggcagacagcagttcagcagtttatactattaagctgttgtttaggggaatggtaaaccgacatgacccttgaggtgtaggtatatataggkaaattctatgtgtcccttgaaataggtgtatgacacaacttctggcatctacatggatttggtcactctaaagtagccatgaggcttaagatagttcagctgtttggggataagctaaatcatttgcagtggtctttctgcaatttgcatatcctacagctatcattgtcattactg

SEQ ID NO: 178875 - DNA, 565 bp, Homo sapiens
aaaacaagtaaatgtttgcctatggtctgagattctaatccacagagttcattctaatccacattcaacactatcatgtaccagtaggcctcataacccacctagccctgtgatttttcaggttcacttttctaaacttgtgaattaaatatttattttcttcgttcagaagagggaaaaaactcttgtaattgttgcccatttcaggagaaatcttgcatatgaaaacaagagataaatatacacaactgagggctgtggtttaaacaaaatcttgagaatgttttttgaccttatacatttgtgctttagtataacaaaatgatatagacaaaggtaacttttaatagaaccagtcactaaattaaaaaaatgacamattcttctgcttagctaagcaacagagaaggtaaaatactaattcaattcatcaatttaagcaatactcattaagagccaagtatgtgcttactgaataagctgctaaggtttggtggttacagagtgtgcggtgaaatgatgtctacatcacagtccaacattcacagagtttagaagcctacca

SEQ ID NO: 178876 - DNA, 608 bp, Homo sapiens
ttacaggattgttctaagaaagaccttctgcataagcaaaggtttatgtttctaatagatcacaaaatatgagacactttcagatcaaagactactgtttagactaagtcccaacrgggctttcattttgtcatgttaataaggattatattaaacaaattagtaaagtctgaaactatacttcaaaggctaaatcttatgttctaaattcaggatgaaaacagtacaggttttaaattaagcgctgtaactaactgaaagataatttagcaattaagatgggtagaaagtattttaaaagacatgaaaaggagtaactcctagtagcagctgtgacaccctgatgcacaatatagctcccaagtatcccatctttatactccattaacttaaatgaaactatagcatatcactgacctggcctcagaataagggagataggaaataagggctcataaagtggctctactacttaccacagtaacagagcagaactgctgcagtagtgatccctctcaactctggatctgtgagttggttgccatgccacactcctgcttgattctcacttcccaggttgacaccttgacctctcacactgtgctgtt

SEQ ID NO: 178877 - DNA, 608 bp, Homo sapiens
ttacaggattgttctaagaaagaccttctgcataagcaaaggtttatgtttctaatagatcacaaaatatgagacactttcagatcaaagactactgtttagactaagtcccaacagggctttcattttgtcatgttaataaggattatattaaacaaattagtaaagtctgaaactatacttcaaaggctaaatcttatgttctaaattcaggatgaaaacagtacaggttttaaattaagcgctgtaactaactgaaagataatttagcaattaagatgggtagaaagtattttaaaagacatgaaaaggagtaactcctagtagcagctgtgacaccctgatgcacaatatagctcccaagtatcccatctttatactccattaacttaaatgaaactatagcatatcactgacctggcctcagaataagggagataggaaataagggctcataaagtggctctactacttaccacagtaacagagcagaactgctgcagtagtgatccctctcaactctggatctgtgagytggttgccatgccacactcctgcttgattctcacttcccaggttgacaccttgacctctcacactgtgctgtt

SEQ ID NO: 178878 - DNA, 620 bp, Homo sapiens
actatggtggcttgtttagaagcagttgagatagatccaattgagatagagatattgactatataaacaaaagaatgacaaattaatagtgtaatggataayttgactttggcaaatattgtgaatttttgtgaaagtacaactaaaaggcaatgtcactccaataatcaccagagtaatcaatttgcttattgctgtccctttaaatatagttctctggtatcaactaacatgtttttaactaatgatgcttcttaaagaaaagggaaaagacctttttctttctttcagtcttcaatgattcactgcttcatctcgctccaccaaagataaatgaaatctacatctcttatacattaacaatgcatgacaatttataaatagctaaatttttggagctaactttaagtacctgaatggaatttaatcaacccactaatctcctcacttctcagttatttatcaagtttatgtcaagggacaaggaaaaattatccaaacattgtttaaaacaatcatcattaattagtaacacttatccagggggggttttaacctttcccccactcaaggattattctaatgtcagagtagaataaaaaataagtgcagcgatgctg

SEQ ID NO: 178879 - DNA, 484 bp, Homo sapiens
tccaggattcaatgaagaactatcaccttgttaatcattcagaaacatgttgcagacttaagccatttttgatatagatactgaaacaattacttgctaagagcaaacttgaaggtatggataaggccctgagtcatcttcctgagctgaatgatagttaagctgaatgtacgtataaaataygattttctaaccacttactcgccaacaaggaaaacttttaagtagagcagaacctgaatagacaagacatttctttcttttggtagaaaatgatttaccatcactgtctagttaattgtagactaggtaattttaactttgtgatttattgccggagacattttcttctgtactgtaaagtgtgtgtcaaaaaaaaaaatagcgattttggaggattaggggactttgataaattgcctgcaattctggcagtatgaactgcatattaattttctctttcaagaacatttttatttattaa

SEQ ID NO: 178880 - DNA, 484 bp, Homo sapiens
tccaggattcaatgaagaactatcaccttgttaatcattcagaaacatgttgcagacttaagccatttttgatatagatactgaaacaattacttgctaagagcaaacttgaaggtatggataaggccctgagtcatcttcctgagctgaatgatagttaagctgaatgtacgtataaaatatgattttctaaccacttactcrccaacaaggaaaacttttaagtagagcagaacctgaatagacaagacatttctttcttttggtagaaaatgatttaccatcactgtctagttaattgtagactaggtaattttaactttgtgatttattgccggagacattttcttctgtactgtaaagtgtgtgtcaaaaaaaaaaatagcgattttggaggattaggggactttgataaattgcctgcaattctggcagtatgaactgcatattaattttctctttcaagaacatttttatttattaa

SEQ ID NO: 178881 - DNA, 426 bp, Homo sapiens
tttcaaggtaattttgtttcagtgtagaatataaaaagaaatgccagtctttaaatacatagccataatacggaatgcatatatatcttttggatatcaatgtcatatatatagttaaatatcaaaacatagaaaggattacatcatctcccaattctacattctattgtcatcaatggacatggggttttaaattgtaagcactcagaccttctgtaatcacaaaayaatccaaaacacaatttgattcctgccaactcaatattctattctctgacaaagctacatactattgaaaattttctaaacgctaacttcaaatgagagtcttataaaatcttatttctatttttaatacaactgtaaaaatgttcaaacttaaaattgttacgtgtatctctttgttgggtaaaatggtactttcat

SEQ ID NO: 178882 - DNA, 387 bp, Homo sapiens
gaaataaagctaataagctaacataaggaaagataaaatatgtgacaaataggctgggcrcatggctcacagctgtaatcaagcactttgggaggccgaggcgggtagatcacgaggtcaggagttcgagaccagcctgatcaacatggtgaaaccacgtttctactaaaaatacaaaaattagccgggcatggtggcatgtgcctgtaatcccagctactcagaaggctgaggcaggagagtcgcttgaacctgggaggcacaggttgcagtgagccgagatcacaccactgcactccagcctggtcgacagagtgagactgcgtctcaaaaaagaaaaaagaatgggtgacaaagtaataatatgaggtctttcatttatcacac

SEQ ID NO: 178883 - DNA, 387 bp, Homo sapiens
gaaataaagctaataagctaacataaggaaagataaaatatgtgacaaataggctgggcgcatggctcacagctgtaatcaagcactttgggaggccraggcgggtagatcacgaggtcaggagttcgagaccagcctgatcaacatggtgaaaccacgtttctactaaaaatacaaaaattagccgggcatggtggcatgtgcctgtaatcccagctactcagaaggctgaggcaggagagtcgcttgaacctgggaggcacaggttgcagtgagccgagatcacaccactgcactccagcctggtcgacagagtgagactgcgtctcaaaaaagaaaaaagaatgggtgacaaagtaataatatgaggtctttcatttatcacac

SEQ ID NO: 178884 - DNA, 522 bp, Homo sapiens
agaatgaatcactccctaagaccctgacctatgcatggaacatgaaaaactgaagtttaactgggcacggtggatcacgcctgtaatcccagcactttgggaggctgaggcgggcggatcacctgaggtcaaaagttctagatcagcctggccaacatggtgaaaycccgtctctactaaaaatacaaaaattagttgggcatggtggtggacacctgtaatcccagctactcgggaggctgaggcaggaaaatcgcttgaacccggaaggcggaggttgcagttacttctagaagaatttccattagccctttgaaatccttcaacattcatgaaggccaaagagttttcacctaatttaatctgatgggtatgtcaccagagtctttctagggaatagagactcccaaacagttcagctgggaagtgaggagagaatttattactcaaaatcaaagggaaatgaaaagaggccaacatagaatgtcattattctttcttggcggggaatggattccagag

SEQ ID NO: 178885 - DNA, 522 bp, Homo sapiens
agaatgaatcactccctaagaccctgacctatgcatggaacatgaaaaactgaagtttaactgggcacggtggatcacgcctgtaatcccagcactttgggaggctgaggcgggcggatcacctgaggtcaaaagttctagatcagcctggccaacatggtgaaaccccgtctctactaaaaatacaaaaattagttgggcatggtggtggacacctgtaatcccagctactcgggaggctgaggcaggaaaatckcttgaacccggaaggcggaggttgcagttacttctagaagaatttccattagccctttgaaatccttcaacattcatgaaggccaaagagttttcacctaatttaatctgatgggtatgtcaccagagtctttctagggaatagagactcccaaacagttcagctgggaagtgaggagagaatttattactcaaaatcaaagggaaatgaaaagaggccaacatagaatgtcattattctttcttggcggggaatggattccagag

SEQ ID NO: 178886 - DNA, 522 bp, Homo sapiens
agaatgaatcactccctaagaccctgacctatgcatggaacatgaaaaactgaagtttaactgggcacggtggatcacgcctgtaatcccagcactttgggaggctgaggcgggcggatcacctgaggtcaaaagttctagatcagcctggccaacatggtgaaaccccgtctctactaaaaatacaaaaattagttgggcatggtggtggacacctgtaatcccagctactcgggaggctgaggcaggaaaatcgcttgaacccggaaggcggaggttgcagttacttctagaagaatttccattagccctttgaaatccttcaacattcatgaaggccaaagagttttcacctaatttaatctgatgggtatgtsaccagagtctttctagggaatagagactcccaaacagttcagctgggaagtgaggagagaatttattactcaaaatcaaagggaaatgaaaagaggccaacatagaatgtcattattctttcttggcggggaatggattccagag

SEQ ID NO: 178887 - DNA, 496 bp, Homo sapiens
atattgttccatttaacaaaactgcagcccttcayctatccttaagtcccttggccaatggtacagagccagagtatgctactccctagcaggaaatcaacaggatgacctactaaacaccattcagaagatgctaagacccatgaattgcaacaggaaagaaaagacagagaattagtcagacaggtacatgctgtgccaaagatgcactacagcccccacccaattctgcctaatcctagctgggctgacaccaacctgatgagacaggcctataagatctcaaactaaaacagaaactcctgaactgggttctttcgaacccaggaagcagcagtaaatcattaaagaacagataagttcttaaggtgagggagagtttcagataaatggaatgctggtagaacacagggcccaaaggagcaaaagttaacctaagcccaggtagaaccttgtttactagagtattaggcatgggttggggcaactattctaa

SEQ ID NO: 178888 - DNA, 546 bp, Homo sapiens
ggaggcagtactcagtatcttatcaaaacaaaaaccctcagaaatccatgaaagttggattaatttgaccagtcataggctctggaacttagagttctagtcaaatctaccaagatggcagaggaagcaggaggcttcagctgggccagctacatgcataattaaatctaacacatggtaagtaagaaaaaaatgcattgagagaaattcacaatactatatgatattaaagcagggaagaatcacttccagctgaagctattagggatatttcaaagaggcrgggtgtattagtctgttcttgcattactataaatacctgagactgggaaatttataaagaaaagaggttttattgactcatggttctgcaggctgtacagaaagcatgatgctggaatctgcttggtttctgaagaagcctcgggaaactaaatgatggcaaaaggtgaaggggaagcaggcacatcttacatggcaagagcaggagcaagagagagtgagtggggaggtgctacatacttttaaacaaccagatctcatgag

SEQ ID NO: 178889 - DNA, 609 bp, Homo sapiens
ttgtaatgattaaggatatatggataagaagccatttataacttcacactagaatagtattttgcttttgtactgtacgtatttgtatatgtcaccttatttaatatttatattagtgcactacattttatgagtcagaaaaatgaggcttacaactactacttgatagacccattaattggagaagcaaagactagaacctgagtttctaactgtccacttttccttgaatggtataaatgtgtttgtttttactttttcttcttcatatcagcatgagtagagaagaacagaaatgattccaaaagcaatgytaaatctaaaatcttttttaaagtgtgtattacaggatagatgtttaaacatgccttattgagatgggcttgtatttgtccaatctaacaactaaatcctttaaaaaagtgtagacatttgttttggctttcttgaaatggaggagacaatatatatgtagtgcttcatcctgaaaatgttatgaaaactcataattcttctctctctccagtgccccatatacaggacagatgtcaagatatctctctcactcttcctctgttcctttctccttcattttttgctgtcttcttt

SEQ ID NO: 178890 - DNA, 617 bp, Homo sapiens
ataataatgcatgtatcaaacttgtgtcattcattaaggaaacctacaatccacatgtatgttcttttccaaatttctggaattgccattatgggtaattttagatttatccaagggtgatattccaawttttttgtagccatagctgcataggaactaacaaatgcagtctttaatgctgtagcagagtttgtttgggggtcccctgctgtgctagacgttaaccctttgacttaggaaactcattatcagcactggaagtaccaattgaggcaaacctcaagaaaacatgctgatacatgctcagattacaatgggtattcaaactactttcctaagggttactgagcccttcagatgtgtcatttacccttgtaggccagtggaatcctatggggtgtcagggcttttcaataggtggcttcagttttctctctggcttctggtaccctgtttaaaagtacatttgatagttttaaacaataaatgcaggtttcagaagcatattgcctaaaatgagagaagcagtataggattgcaacctccatatcaaagagtgggacctcagaattaggatcattgttacagtgaactataccaaatgtttgccctagatt

SEQ ID NO: 178891 - DNA, 597 bp, Homo sapiens
ctccatgaaggcaggaatcttttctgtcttgtcaccaacaggtaacacctagtacagtgactggcacatgataaaagttcaaaaaatgttcacggaatgactcaattagtggatgaaaaattactatatttcaaagcagagtaatagacattttgtgagaaaaatactcacgaagtactgggatccaaagataagcatcttacctattagggtgggaattcgtgagtgtgtcatttgagatatccactaattatatatgttgcatttatatagacttaattatattgagattatacccaccccaatccttcatccaaaaacattctaaaactaaggtttcatgcttcagtccccaaaacatctcatgaagtgaaggcagggaatgtttaaaaaaaccaaacaaactgtacttaattattgccccaactttcacctacctgcaaagcctgtgmagtcattgtcactgtccttcctaaccacagggagagggagcgatcttggcttgtatttacagacaacagagctgaaggaatttcaagccatgtgtatgagtgcagaccacaagatcaatggagccctgcagagagttccacaggc

SEQ ID NO: 178892 - DNA, 656 bp, Homo sapiens
tttctgataaatataattcttccatcctgttaattttctaataatgtcctagtacccttaaagacagcagccctgggcactgcccatctagttcacctctcagtatgacttggccagtctcataccagtgcctcctggagttattgatgttagtaccattgaatacacataccttctttcctgcttatctacatgacagaaaacaaaaagtgcatctcaaagcacaggatcttggctcaggtggactcctactaaatgctgttcaattgaaatgaatagaagtgctgggtctaagggcaygaagaactattgtttttacaggccaaggtgcataagatgtatatctaaaatattcctgagcttcagtcatctgagtgtggtaagtcaaatgaagtttgaggacacttctttgtaccactgagtcttaaggaaatatttcttaaaaatttcccgaggaatatgctaacattctaacttgtttaataaatagaactttgtggacttcacaactctgccacttcattaacatgttttgcatgtaaatttctaattggtttctttatactcacttttaagatgaatacattcttgtgtgttcacattttatataaaatcatggtctagacttgtacatgtactgctaaaattaaatcatc

SEQ ID NO: 178893 - DNA, 249 bp, Homo sapiens
tggatcatggcccctgactccatcttcaaagccagargtgaagcatcttcaaatctccctctcttacctctgctttcatcaccacatctcctgctccaattctgaatctcctactctctttcttttataaagacccttgtgattgctgggcatggtggctcccacccagaatcccaacactttgggaggtcaaggcaggaggaacacttgaggcccgaagtttgaaactagcatgaaaaacacagtgag

SEQ ID NO: 178894 - DNA, 249 bp, Homo sapiens
tggatcatggcccctgactccatcttcaaagccagaggtgaagcatcttcaaatctccctctcttacctctgctttcatcaccacatctcctgctccaattctgaatctcctactctctttcttwtataaagacccttgtgattgctgggcatggtggctcccacccagaatcccaacactttgggaggtcaaggcaggaggaacacttgaggcccgaagtttgaaactagcatgaaaaacacagtgag

SEQ ID NO: 178895 - DNA, 421 bp, Homo sapiens
ctatattccaaggtttcaaggtaattttgtttcagtgtagaatataaaaagaaatgccagtctttaaatacatagccataatacggaatgcatatatatcttttggatatcaatgtcatatatatagttaaatatcaaaacatagaaaggattacatcatctcccaattctacattctattgtcatcaatggacatggggttttaaattgtaagcactcagaccttctgtaatcacaaaayaatccaaaacacaatttgattcctgccaactcaatattctattctctgacaaagctacatactattgaaaattttctaaacgctaacttcaaatgagagtcttataaaatcttatttctatttttaatacaactgtaaaaatgttcaaacttaaaattgttacgtgtatctctttgttgg

SEQ ID NO: 178896 - DNA, 539 bp, Homo sapiens
tccactttgctttgggtctgatgtaagtgactttgccttgtcattggcaactttcactgtagtataatctgcacatyaaagttacctaacaatagtacaaagaaagaaaattaaaggtatatctctttcaaaaatataaaccccaaaattgttaggaaattgtagtgagtataaaagataattcattataatagacatctcaagcttcacagaattctgacctttgctacactctcatccacaatcttttctcctagtaaatggcagctccttctgttaagttgctgaggcttcttattgcttttttcttcaaataacagtcagaactgaacaactgtaatcatcctagtccatacaattgttacattttcatttaaagaagatcaatgtgtgattctttttttatatatttctggacaattctttatattttaatagtcagaatttgatcaggaaaacagaagacatcctatgtattataatgataaaagtttaacattaattagggccttatgctattattggaagagcttggtgaa

SEQ ID NO: 178897 - DNA, 539 bp, Homo sapiens
tccactttgctttgggtctgatgtaagtgactttgccttgtcattggcaactttcactgtagtataatctgcacattaaagttacctaacaatagtacaaagaaagaaaattaaaggtatatctctttcaaaaatataaaccccaaaattgttaggaaattgtagtgagtataaaagataattcattataatagacatctcaagcttcacagaattctgacctttgctacactctcatccacaatcttttctcctagtaaatggcagctccttctgttaagttgctgaggcttcttattgcttttttcttcaaataacagtcagaactgaacaactgtaatcatcctagtccatacaattgttayattttcatttaaagaagatcaatgtgtgattctttttttatatatttctggacaattctttatattttaatagtcagaatttgatcaggaaaacagaagacatcctatgtattataatgataaaagtttaacattaattagggccttatgctattattggaagagcttggtgaa

SEQ ID NO: 178898 - DNA, 473 bp, Homo sapiens
cagaattctgacctttgctacactctcatccacaatcttttctcctagtaaatggcagctccttctgttaagttgctgaggcttcttattgcttttttcttcaaataacagtcagaactgaacaactgtaatcatcctagtccatacaattgttacattttcatttaaagaagatcaatgtgtgattctttttttatatatttctggacaattctttatattttaatagtcagaatttgatcaggaaaacagaagacatcctatgtattataatgataaaagtttaayattaattagggccttatgctattattggaagagcttggtgaatagatattagaaaagcagctagacaaaatcagaagaagtctgttttatatcagagatcttagcctgacagtctagagtgtgggcacagaacccaagcttataggaatttctgaaaggtctgtaaatcttatccagatggacag

SEQ ID NO: 178899 - DNA, 474 bp, Homo sapiens
acagaattctgacctttgctacactctcatccacaatcttttctcctagtaaatggcagctccttctgttaagttgctgaggcttcttattgcttttttcttcaaataacagtcagaactgaacaactgtaatcatcctagtccatacaattgttacattttcatttaaagaagatcaatgtgtgattctttttttatatatttctggacaattctttatattttaatagtcagaatttgatcaggaaaacagaagacatcctatgtattataatgataaaagtttaacattarttagggccttatgctattattggaagagcttggtgaatagatattagaaaagcagctagacaaaatcagaagaagtctgttttatatcagagatcttagcctgacagtctagagtgtgggcacagaacccaagcttataggaatttctgaaaggtctgtaaatcttatccagatggacag

SEQ ID NO: 178900 - DNA, 410 bp, Homo sapiens
tgcttttttcttcaaataacagtcagaactgaacaactgtaatcatcctagtccatacaattgttacattttcatttaaagaagatcaatgtgtgattctttttttatatatttctggacaattctttatattttaatagtcagaatttgatcaggaaaacagaagacatcctatgtattataatgataaaagtttaacattaattagggccttatgytattattggaagagcttggtgaatagatattagaaaagcagctagacaaaatcagaagaagtctgttttatatcagagatcttagcctgacagtctagagtgtgggcacagaacccaagcttataggaatttctgaaaggtctgtaaatcttatccagatggacagtgggagctcataaagaattctgcaag

SEQ ID NO: 178901 - DNA, 411 bp, Homo sapiens
ttaacattaattagggccttatgctattattggaagagcttggtgaatagatattagaaaagcagctagacaaaatcagaagaagtctgttttatatcagagatcttagcctgacagtctagagtgtgggcacagaacccaagcttataggaatttctgaaaggtctgtaaatcttatccagatggacagtgggagctcataaagrattctgcaagccatcacatctgtcaaacctgctatgtctaatccttaagcctgctttatgtgaagacctcctcttcactcctcacttccagctctcatgagtttctttcataggcaaacccaaacctggaacaatgtgcctgaagacttcgggtgacacagtacccagacttaaataggaggggagccatggtggaagtggccat

SEQ ID NO: 178902 - DNA, 486 bp, Homo sapiens
ctataaactctacagggaacattttctctctccactcagagctgagaccatagggaaatttatttgctagctcwctttgcaggtttattttatttatttttttaatttctagtacacgtgctcactgaaggtgtaatacttatgtgagaatctcaaaatcagttgtgttctttgtatgaccctggttttgtttcctcctgctctcttactttcagtgtgtctcaatatgtctgctgatgctatggtcatcttaaatttcgactgagggtggatcttcttcccagctcactcacatggttcttagctagattcagtttctctccatttgtaggactgaggacctcagttcttcacttagggttggctacaggcaatcatcaatttcttgtaacaggacttacactgggccactgacagcatgccagttggttttattcaaatgagagtgcaagagaaagagagagagggagagggcacaagatgaaa

SEQ ID NO: 178903 - DNA, 486 bp, Homo sapiens
ctataaactctacagggaacattttctctctccactcagagctgagaccatagggaaatttatttgctagctctctttgcaggtttattttatttattttttwaatttctagtacacgtgctcactgaaggtgtaatacttatgtgagaatctcaaaatcagttgtgttctttgtatgaccctggttttgtttcctcctgctctcttactttcagtgtgtctcaatatgtctgctgatgctatggtcatcttaaatttcgactgagggtggatcttcttcccagctcactcacatggttcttagctagattcagtttctctccatttgtaggactgaggacctcagttcttcacttagggttggctacaggcaatcatcaatttcttgtaacaggacttacactgggccactgacagcatgccagttggttttattcaaatgagagtgcaagagaaagagagagagggagagggcacaagatgaaa

SEQ ID NO: 178904 - DNA, 403 bp, Homo sapiens
tacttttgttctattctattcaatagaaacaagtacctgggaccagcttatactataggaaagagattatataagggtataaataccaagaggtagagatcatcaagagccattctggtagcagccacaatatcttatccagaatayttcttattcaggccttcaaatgtgctgtcttttctggtctaatggaaatgaaccttccttccatacaatttcttctcctaaattgtactctggctctcttatcacatacaaatgtctatgttaggtatttgtgtctgtcttgattcttggtaggcttctaaactctgtgaatgttggactgtgatgtagacatcatttcaccgcacactctgtaaccaccaaaccttagcagcttattcagtaagcacatacttgg

SEQ ID NO: 178905 - DNA, 535 bp, Homo sapiens
agaaacaagtacctgggaccagcttatactataggaaagagattatataagggtataaataccaagaggtagagatcatcaagagccattctggtagcagccacaatatcttatccagaatacttcttattcaggccttcaaatgtgctgtcttttctggtctaatggaaatgaaccttccttccatacaatttcttctcctaaattgtactctggctctcttatcayatacaaatgtctatgttaggtatttgtgtctgtcttgattcttggtaggcttctaaactctgtgaatgttggactgtgatgtagacatcatttcaccgcacactctgtaaccaccaaaccttagcagcttattcagtaagcacatacttggctcttaatgagtattgcttaaattgatgaattgaattagtattttaccttctctgttgcttagctaagcagaagaatttgtcatttttttaatttagtgactggttctattaaaagttacctttgtctatatcattttgttatactaaagcacaaa

SEQ ID NO: 178906 - DNA, 535 bp, Homo sapiens
agaaacaagtacctgggaccagcttatactataggaaagagattatataagggtataaataccaagaggtagagatcatcaagagccattctggtagcagccacaatatcttatccagaatacttcttattcaggccttcaaatgtgctgtcttttctggtctaatggaaatgaaccttccttccatacaatttcttctcctaaattgtactctggctctcttatcacatacaaaygtctatgttaggtatttgtgtctgtcttgattcttggtaggcttctaaactctgtgaatgttggactgtgatgtagacatcatttcaccgcacactctgtaaccaccaaaccttagcagcttattcagtaagcacatacttggctcttaatgagtattgcttaaattgatgaattgaattagtattttaccttctctgttgcttagctaagcagaagaatttgtcatttttttaatttagtgactggttctattaaaagttacctttgtctatatcattttgttatactaaagcacaaa

SEQ ID NO: 178907 - DNA, 403 bp, Homo sapiens
tacttttgttctattctattcaatagaaacaagtacctgggaccagcttatactataggaaagagattatataagggtataaataccaagaggtagagatcatcaagagccattctggtagcagccacaatatcttatccagaatacttcttattcaggccttcaaatgtgctgtcttttctggtctaatggaaatgaaccttccttccatacaatttcttctcctaaattgtactctggctctcttatcacatacaaatrtctatgttaggtatttgtgtctgtcttgattcttggtaggcttctaaactctgtgaatgttggactgtgatgtagacatcatttcaccgcacactctgtaaccaccaaaccttagcagcttattcagtaagcacatacttgg

SEQ ID NO: 178908 - DNA, 535 bp, Homo sapiens
agaaacaagtacctgggaccagcttatactataggaaagagattatataagggtataaataccaagaggtagagatcatcaagagccattctggtagcagccacaatatcttatccagaatacttcttattcaggccttcaaatgtgctgtcttttctggtctaatggaaatgaaccttccttccatacaatttcttctcctaaattgtactctggctctcttatcacatacaaatgtctatgttaggtatttgtgtctgtcttgattcttggtaggcttytaaactctgtgaatgttggactgtgatgtagacatcatttcaccgcacactctgtaaccaccaaaccttagcagcttattcagtaagcacatacttggctcttaatgagtattgcttaaattgatgaattgaattagtattttaccttctctgttgcttagctaagcagaagaatttgtcatttttttaatttagtgactggttctattaaaagttacctttgtctatatcattttgttatactaaagcacaaa

SEQ ID NO: 178909 - DNA, 564 bp, Homo sapiens
tggtaggcttctaaactctgtgaatgttggactgtgatgtagacatcatttcaccgcacactctgtaaccaccaaaccttagcagcttattcagtaagcacatacttggctcttaatgagtattgcttaaattgatgaattgaattagtattttaccttctctgttgcttagctaagcagaagaatttgtcatttttttaatttagtgactggttctattaaaagttacctttgtctatatcattttgttatactaaagcacaaatgtataaggtcaaaaaacattctcaagattttgtttaaaccacagccctcagttgtgtatatttatctcttgttttcatatgcaagatttctcctgaaatgggcaacaattacaagagttttttycctcttctgaacgaagaaaataaatatttaattcacaagtttagaaaagtgaacctgaaaaatcacagggctaggtgggttatgaggcctactggtacatgatagtgttgaatgtggattagaatgaactctgtggattagaatctcagaccataggcaaacatttacttgttt

SEQ ID NO: 178910 - DNA, 449 bp, Homo sapiens
gtattttaccttctctgttgcttagctaagcagaagaatttgtcatttttttaatttagtgactggttctattaaaagttacctttgtctatatcattttgttatactaaagcacaaatgtataaggtcaaaaaacattctcaagattttgtttaaaccacagccctcagttgtgtatatttatctcttgttttcatatgcaagatttctcctgaaatgggcaacaattacaagagttttttccctcttctgaackaagaaaataaatatttaattcacaagtttagaaaagtgaacctgaaaaatcacagggctaggtgggttatgaggcctactggtacatgatagtgttgaatgtggattagaatgaactctgtggattagaatctcagaccataggcaaacatttacttgttttagaataagcacatttgagtctgcaataagta

SEQ ID NO: 178911 - DNA, 449 bp, Homo sapiens
gtattttaccttctctgttgcttagctaagcagaagaatttgtcatttttttaatttagtgactggttctattaaaagttacctttgtctatatcattttgttatactaaagcacaaatgtataaggtcaaaaaacattctcaagattttgtttaaaccacagccctcagttgtgtatatttatctcttgttttcatatgcaagatttctcctgaaatgggcaacaattacaagagttttttccctcttctgaacgaagaaaataaatatttaattcacaagtttagaaaagtgaacctgaaaaatcacagggctaggtgggttatgaggccyactggtacatgatagtgttgaatgtggattagaatgaactctgtggattagaatctcagaccataggcaaacatttacttgttttagaataagcacatttgagtctgcaataagta

SEQ ID NO: 178912 - DNA, 341 bp, Homo sapiens
aatgacatcaagagacctatcaagacctgtatccaggaaaaggtaaatctgagctgaaattgtakcccttgtaaattacctatgtgacataccagatagtgttcatgatccatttagtactctgttctaaaaatgagacaatatccatttattcacttgttcatttatttagtgtttgttcagcccttactgcatattccaggcactattctgactgtggcaggagtgaacaaacaggcatggttcttacttgcatgtaattacagtcttatagtgaaaacaagtgttaaacagcaaaatctcccaattattttaaaattataaacttgattcgatactct

SEQ ID NO: 178913 - DNA, 341 bp, Homo sapiens
aatgacatcaagagacctatcaagacctgtatccaggaaaaggtaaatctgagctgaaattgtatcccttgtaaattacctaygtgacataccagatagtgttcatgatccatttagtactctgttctaaaaatgagacaatatccatttattcacttgttcatttatttagtgtttgttcagcccttactgcatattccaggcactattctgactgtggcaggagtgaacaaacaggcatggttcttacttgcatgtaattacagtcttatagtgaaaacaagtgttaaacagcaaaatctcccaattattttaaaattataaacttgattcgatactct

SEQ ID NO: 178914 - DNA, 448 bp, Homo sapiens
ggtaaatctgagctgaaattgtatcccttgtaaattacctatgtgacataccagatagtgttcatgatccattyagtactctgttctaaaaatgagacaatatccatttattcacttgttcatttatttagtgtttgttcagcccttactgcatattccaggcactattctgactgtggcaggagtgaacaaacaggcatggttcttacttgcatgtaattacagtcttatagtgaaaacaagtgttaaacagcaaaatctcccaattattttaaaattataaacttgattcgatactctgtggccatataattgttcctaatttggttggagaagggaggcagttagggaagccttccctgagttggtgccatttaacctgaattatgatagatgataagtaatttgtcaggggaaaaatactccaggaataaagaacaggtacaaa

SEQ ID NO: 178915 - DNA, 616 bp, Homo sapiens
tacctatgtgacataccagatagtgttcatgatccatttagtactctgttctaaaaatgagacaatatccatttattcacttgttcatttatttagtgtttgttcagcccttactgcatattccaggcactattctgactgtggcaggagtgaacaaacaggcatggttcttacttgcatgtaattacagtcttatagtgaaaacaagtgttaaacarcaaaatctcccaattattttaaaattataaacttgattcgatactctgtggccatataattgttcctaatttggttggagaagggaggcagttagggaagccttccctgagttggtgccatttaacctgaattatgatagatgataagtaatttgtcaggggaaaaatactccaggaataaagaacaggtacaaaggtcaggttctgggaagagcttgtcttggtccaggaactaaaaaatgttagagtggctggatctgggaaggagacaaaaagttattaaatgaggcagcaggcttcagcaggtgccacattgctcagggccttgtaggccatgctaaggatttggatgttagtgtcagtacaaacaattgagtcataagcagaaagtaaaagca

SEQ ID NO: 178916 - DNA, 616 bp, Homo sapiens
tacctatgtgacataccagatagtgttcatgatccatttagtactctgttctaaaaatgagacaatatccatttattcacttgttcatttatttagtgtttgttcagcccttactgcatattccaggcactattctgactgtggcaggagtgaacaaacaggcatggttcttacttgcatgtaattacagtcttatagtgaaaacaagtgttaaacagcaaaatctcccaattattttaaaattataaacttgattcgatactmtgtggccatataattgttcctaatttggttggagaagggaggcagttagggaagccttccctgagttggtgccatttaacctgaattatgatagatgataagtaatttgtcaggggaaaaatactccaggaataaagaacaggtacaaaggtcaggttctgggaagagcttgtcttggtccaggaactaaaaaatgttagagtggctggatctgggaaggagacaaaaagttattaaatgaggcagcaggcttcagcaggtgccacattgctcagggccttgtaggccatgctaaggatttggatgttagtgtcagtacaaacaattgagtcataagcagaaagtaaaagca

SEQ ID NO: 178917 - DNA, 616 bp, Homo sapiens
tacctatgtgacataccagatagtgttcatgatccatttagtactctgttctaaaaatgagacaatatccatttattcacttgttcatttatttagtgtttgttcagcccttactgcatattccaggcactattctgactgtggcaggagtgaacaaacaggcatggttcttacttgcatgtaattacagtcttatagtgaaaacaagtgttaaacagcaaaatctcccaattattttaaaattataaacttgattcgatactctgtggccatataattgttcctaatttggttggagaagggaggcagttagggaagccttccctgagttrgtgccatttaacctgaattatgatagatgataagtaatttgtcaggggaaaaatactccaggaataaagaacaggtacaaaggtcaggttctgggaagagcttgtcttggtccaggaactaaaaaatgttagagtggctggatctgggaaggagacaaaaagttattaaatgaggcagcaggcttcagcaggtgccacattgctcagggccttgtaggccatgctaaggatttggatgttagtgtcagtacaaacaattgagtcataagcagaaagtaaaagca

SEQ ID NO: 178918 - DNA, 545 bp, Homo sapiens
gaattcattgaagtgagtcaggaatgtatgattttggacaactgacacaatgcctgaggcatagtttcttcatatggaaattggagacaatgatcatatctaccttagcasattatataatgaattattttcctagggctcctgtaataaagtaccacaaactgggtaacttaagcaacagaaatttattgcctcacaattctagaggtgagaagtccagatcaagaagctggcagggctgggctgcctgaaaaggtgctaaggaaggaactgttccagtcctctttctctccttccagtagttccttggcttgtgacagcacagtgtcaattctcatatggcatcctccccgtgtgcctgtctctatgtccaaatctcccttttatttaaggacagagtcacagtggattagaacacccccataacatgaagattgcatgaaattatatacataaataattcaacaacatagcttccaaatagaaaacactcagcctttgtcatctcatcattatttgtttacacctttgtattattggtatag

SEQ ID NO: 178919 - DNA, 545 bp, Homo sapiens
gaattcattgaagtgagtcaggaatgtatgattttggacaactgacacaatgcctgaggcatagtttcttcatatggaaattggagacaatgatcatatctaccttagcagattatataatgaattattttcctagggctcctgtaataaagtaccacaaactgggtaacttaagcaacagaaatttattgcctcacaattctagaggtgagaagtccagatcaagaagctggcagggctgggctgcctgaaaaggtgctaaggaaggaactgttccagtcctctttctctccttccagtagttccttggcttgtgacagcacagtgtmaattctcatatggcatcctccccgtgtgcctgtctctatgtccaaatctcccttttatttaaggacagagtcacagtggattagaacacccccataacatgaagattgcatgaaattatatacataaataattcaacaacatagcttccaaatagaaaacactcagcctttgtcatctcatcattatttgtttacacctttgtattattggtatag

SEQ ID NO: 178920 - DNA, 545 bp, Homo sapiens
gaattcattgaagtgagtcaggaatgtatgattttggacaactgacacaatgcctgaggcatagtttcttcatatggaaattggagacaatgatcatatctaccttagcagattatataatgaattattttcctagggctcctgtaataaagtaccacaaactgggtaacttaagcaacagaaatttattgcctcacaattctagaggtgagaagtccagatcaagaagctggcagggctgggctgcctgaaaaggtgctaaggaaggaactgttccagtcctctttctctccttccagtagttccttggcttgtgacagcacagtgtcaattctcatatggcatcctccccgtgtgcctgtctctatgtccaaatctcccttttatttaaggacagagtcacagtggattagaacacccccataacatgaagattgcatgaaattwtatacataaataattcaacaacatagcttccaaatagaaaacactcagcctttgtcatctcatcattatttgtttacacctttgtattattggtatag

SEQ ID NO: 178921 - DNA, 263 bp, Homo sapiens
tgccagctggctttctgcagatgtacttcttgtgtgtaaatttccttctctgtgaggtattcatattgaacatgacctccaagtgtgtttgggtctgtgcagaagacaataggactgtgatttctgatgattaaaacctggattgtatgttactgtgatcagaccctgagactgwgttagcaagttttatagcatctgagtcgctctgttggaggaaagtgcacgtgatgggcatttgcttgcttccccaccagattctctac

SEQ ID NO: 178922 - DNA, 361 bp, Homo sapiens
ttacttaaactctataagcttcaacttctttatctataaggtaggtataaaacctgaaagttttggcatgagtttagtaaaactgtctgtgaagcccttgtggactgcttggtccatgtaggcatttgataaatggtggctttatatagaggagggaaatgcaagctatctcaaaaagaaatcaggsaaataagaatgccatctgaaatctgtcatatgagaatgaaaggagcatagacaggttttgagtgtggggtgaggagtaggggaggggaggagataagtgaactgcccctcagacttccagggaggagaaaaatgatgtcactgggaactgcagtcatttgaaaagatagcaatc

SEQ ID NO: 178923 - DNA, 529 bp, Homo sapiens
tgacatagaattatttaagagaaagcttttaaatttccatgctgtaatttctagttttgttgtgtcataatcagagaatataatctgtagcatttctacattctctactttgcttagatgtttttggggtggggtgtgtaatatgtactsaattttgtaaacattttatggacatacaaatttcaatgtttactttttcaggctataggctttgctacataatttttgtgtattttgtggtcctcatatagattttttaattatctttttgctgtgatagagattagaagggtaaattaatgtctcatttaccatcatttttctttctgtatctcttttcatttcctgatgctttggctttatgaaatctttatgtataaaaattgtgcacacatatctttatgcacagtgttttggattttacccttcataatgagcttttttctctcctttgaatttgacctggcctggtgttaacagcccaggtgtaaaattccagtgagaaagaagtctgatgaggagtcagtag

SEQ ID NO: 178924 - DNA, 266 bp, Homo sapiens
gatgacataaccttcagaaagattcatcctttctcacatattgataaatcaacttttacatctacaaagttgaaagccagaaattaaaaccttattaattcactaaggcatccctatgayggcagtcttccaactagctccattctggggcactctgacatcattgtacactttccaatgaaagcagggagtgtatgtgattaaagggagagccctgtggcactcctgaaaaatctcccctcccagttcacattgacttattaacc

SEQ ID NO: 178925 - DNA, 417 bp, Homo sapiens
aaagaaaaattccatatctgagtgtttactcctgagggggggagattgytattaagatcgtgctctactgtgatgatttgggtttgtttgataatcagaaaaaagcatattcttttgggtgttcagccacactgctttggtgtcacaactgcacattggtttcacagctgcaggacaagttcgagcatcttaaaatgattcaacaggaggagataaggaagctcgaggaagagaaaaaacaactggaaagagaaatcatagatttttataaaatgaaagctgcctctgaagcactgcagactcagctgagcactgatacaaagaaagacaaacatcgtaagaagcaatagtttctcttactattctgagagccttatcattctacatcccatcttcctgtgagattgtctttgtagc

SEQ ID NO: 178926 - DNA, 417 bp, Homo sapiens
aaagaaaaattccatatctgagtgtttactcctgagggggggagattgctattaagatcgtgctctactgtgatgatttgggtttgtttgataatcagaaaaaagcatattcttttgggtgttcagccacactgctttggtgtcacaactgcacattggtttcacagctgcaggacaagttcgagcatcttaaaatgattcaacaggaggagataaggaagctcgaggaagagaaaaaacaactggaargagaaatcatagatttttataaaatgaaagctgcctctgaagcactgcagactcagctgagcactgatacaaagaaagacaaacatcgtaagaagcaatagtttctcttactattctgagagccttatcattctacatcccatcttcctgtgagattgtctttgtagc

SEQ ID NO: 178927 - DNA, 589 bp, Homo sapiens
ttgttaaaatataaaagtgcaattgtgttacatgctgtacgaagtacatgttgacatgtgagcatataataaatgggctggaggccagaggattgccaaagagaatgggcctcctgctgagaygaaaagttgagcagggattagttggcgaaagtggagggacgatcctttctaggcaggaggaagaacatgtacagaatctctgaggtgtgatgcaacaaagtctatataaaaaactgaagaaaggtctaatgtggcttaaatacagaagctagtaggagaggagttgaaaagaggctggagaagtagaaagtgtctgcattctgcaggaacttatattgtataaaaagaatttctctttattctaagtgcaatgtgaagccaatgaagtgctttaaacaggtgatgtgatttgattgaatttattacttcacttaacaaatactcattacatgcccactgtttgtcagagactgctgtagcccctggtgatacagtagggaataaaacaggcaaaaatccctgtcctcttgcagcttataatggactgcaatgtttaatatgtcagaggagttccacggaggagtga

SEQ ID NO: 178928 - DNA, 589 bp, Homo sapiens
ttgttaaaatataaaagtgcaattgtgttacatgctgtacgaagtacatgttgacatgtgagcatataataaatgggctggaggccagaggattgccaaagagaatgggcctcctgctgagacgaaaagttgagcagggattagttggcgaaagtggagggacgatcctttctaggcaggaggaagaacatgtacagaatctctgaggtgtgatgcracaaagtctatataaaaaactgaagaaaggtctaatgtggcttaaatacagaagctagtaggagaggagttgaaaagaggctggagaagtagaaagtgtctgcattctgcaggaacttatattgtataaaaagaatttctctttattctaagtgcaatgtgaagccaatgaagtgctttaaacaggtgatgtgatttgattgaatttattacttcacttaacaaatactcattacatgcccactgtttgtcagagactgctgtagcccctggtgatacagtagggaataaaacaggcaaaaatccctgtcctcttgcagcttataatggactgcaatgtttaatatgtcagaggagttccacggaggagtga

SEQ ID NO: 178929 - DNA, 589 bp, Homo sapiens
ttgttaaaatataaaagtgcaattgtgttacatgctgtacgaagtacatgttgacatgtgagcatataataaatgggctggaggccagaggattgccaaagagaatgggcctcctgctgagacgaaaagttgagcagggattagttggcgaaagtggagggacgatcctttctaggcaggaggaagaacatgtacagaatctctgaggtgtgatgcaacaaagtctatataaaaaactgaagaaaggtctaatgtggcttaaatacagaagctagtaggagaggagtygaaaagaggctggagaagtagaaagtgtctgcattctgcaggaacttatattgtataaaaagaatttctctttattctaagtgcaatgtgaagccaatgaagtgctttaaacaggtgatgtgatttgattgaatttattacttcacttaacaaatactcattacatgcccactgtttgtcagagactgctgtagcccctggtgatacagtagggaataaaacaggcaaaaatccctgtcctcttgcagcttataatggactgcaatgtttaatatgtcagaggagttccacggaggagtga

SEQ ID NO: 178930 - DNA, 419 bp, Homo sapiens
taggcggctatcttcattgaaagttttttctcaaaagccttaagatagaacatagttcttggcagcaatttgaaagttatttgaggagaaggggagacttacaatgatgattcaaatgaaggaaactaaaaagtaatgaagcaaggcagaggaaaaagcagtaytcacttgagcacatcccaaaagaataacatttcaaatgtaactagaaaaaagtatgctgaagttcgcaatacagaaataattattaataagatagctttaaagccctgctcagcttgtgaatgttgggaattgacccagaggtggctgtaacctaagatggttccttcagtaatgaccattttttctttttcaggatgatgattattccccaccttctaagagacaaagaccaacgagccaccacagccaccagt

SEQ ID NO: 178931 - DNA, 446 bp, Homo sapiens
gtgctggtttccctgcctgggcagctcactccatcccatcccagcccaatccccatccctccacctcccccttccctccccactctcatacaactcttccttatcttacaggacttggcttcaatgtcaccttaactggaagcttctctccctctccagaagagcttcccattgcacttgatgcatgcactattatttgatcatttttgagttacagtccaagtctttttgtacctgaataacatgttgcccagtcagtttctcttcytggattcagaagtctttcatggtaggtccagctagaagtgacaaaaagacatttaaaaaaaaaaaaaaaaaaaaagagggatgacagagacagacatcagcacttaaaagttttaaacgatatgtgaaaaacaaaatttaagggcttctaggagaaatgtaggagggaaggtgttact

SEQ ID NO: 178932 - DNA, 573 bp, Homo sapiens
taataattatctcttcaagttgactttcatgtctttttgacgtgatcctgttggactttgatggcttccttgctttctggcaaaamagatgttccaggatcaatatactgcaccatacatggagtcagccatttctctagggaaccttgattccttttagtagagaacacagtttgaggtcttggactgaatgacttttgtgaacctcctctcctgagactacagcctgcatccctgcatataaccgtttggagctcttgctgggcaccaacagatctcctaaaactgctatatagttctgcctcactcttacaaagattcatctcttgagagttttgtgctctacccccagatgtggtctttctggttctgaagcttttgcttcagtcaccctgaattttgccagccctatgcatgctataccttggattgccaacttgccctcactgaagccagtttctctggttagaatagttgccccaacccatgcctaatactctagtaaacaaggttctacctgggcttaggttaacttttgctcctttgggccctgtgttctaccagcattccatt

SEQ ID NO: 178933 - DNA, 573 bp, Homo sapiens
taataattatctcttcaagttgactttcatgtctttttgacgtgatcctgttggactttgatggcttccttgctttctggcaaaaaagatgttccaggatcaatatactgcaccatacatggagtcagccatttctctagggaaccttgattccttttagtagagaacacagtttgaggtcttggactgaatgacttttgtgaacctcctctcctgagactacagcctgcatccctgcatataaccgtttggagctcttgctgggcaccaacagatctcctaaaactgctatatagttctgcctcactcttacaaagattcatctcttgagagttttgtgctctacccccagatgtggtctttctggttctgaagcttttgcttcagtcaccctgaattttgccagccctatgcatgctataccttggattgccaacttgccctcactgaagccagtttctctggttagaatagttgcccmaacccatgcctaatactctagtaaacaaggttctacctgggcttaggttaacttttgctcctttgggccctgtgttctaccagcattccatt

SEQ ID NO: 178934 - DNA, 384 bp, Homo sapiens
aaactgctatatagttctgcctcactcttacaaagattcatctcttgagagttttgtgctctacccccagatgtggtctttctggttctgaagcttttgcttcagtcaccctgaattttgccagccctatgcatgctataccttggattgccaacttgccctcactgaagccagtttctctggttagaatagttgccccaacccatgcctaatactctagtaaacaaggttctacctgggcttaggttaacttttgctcctttgggccctgtgttctaccagcattccatttatctgaaactctccctcaccttaagaacttatctgttctttaatgatttactgctgcttcctgggytcgaaagaacccagttcaggagtttc

SEQ ID NO: 178935 - DNA, 283 bp, Homo sapiens
ttttttccaattgaaatcccctcaactactcagaattactgctatccctyttatcctttcattaattttcttctagttttctcacatgtgaatctatttctaaatacatttctttattttgcaagtttttggacttcatataaatgtaaccatattgtatatattcttcttcagcttctttttcactaaacaatatgttttgctgatacttacattcatatgtacagtaatagttgatttattttaatggctatatattattccattgttagaatacaccagg

SEQ ID NO: 178936 - DNA, 583 bp, Homo sapiens
aagctttatattttgatgtagtcatrtgttcatttttcctccttaatgtttgtttttcttggttctatgacctaccaaaagtaacaaaaattctcatttatttttaatctaaatgttttaagtattttcctggaattcaccttgaattgatttctattggagataggtatccaatctaatttgcctcatttggataaccacttgttctattactgctgtaacaaatttctacaaactaagtgacctaaaataacacaaacttatcatcttacagtgtacacaagtcagaaatcaggcatgaattttagtgaactaaaatcaagttgtcgacaggcatgtttctttctggcggctagggtagaatccatatcctggccttttctatcttctagagaacatcagcattccttttctcattgcctctcctctctctttttaaagctggcgatgtcacatttctctgaccattctttcattgtcacatctctctctggactcagctaagaaaggttctccatttttaagaactcatgtgattagactgggcccatctggataacccaggaagatctctccatctcgg

SEQ ID NO: 178937 - DNA, 583 bp, Homo sapiens
aagctttatattttgatgtagtcatgtgttcatttttcctccttaatgtttgtttttcttggttctatgacctaccaaaagtaacaaaaattctcatttatttttaatctaaatgttttaagtattttcctggaattcaccttgaattgatttctattggagataggtatccaatctaatttgcctcatwtggataaccacttgttctattactgctgtaacaaatttctacaaactaagtgacctaaaataacacaaacttatcatcttacagtgtacacaagtcagaaatcaggcatgaattttagtgaactaaaatcaagttgtcgacaggcatgtttctttctggcggctagggtagaatccatatcctggccttttctatcttctagagaacatcagcattccttttctcattgcctctcctctctctttttaaagctggcgatgtcacatttctctgaccattctttcattgtcacatctctctctggactcagctaagaaaggttctccatttttaagaactcatgtgattagactgggcccatctggataacccaggaagatctctccatctcgg

SEQ ID NO: 178938 - DNA, 583 bp, Homo sapiens
aagctttatattttgatgtagtcatgtgttcatttttcctccttaatgtttgtttttcttggttctatgacctaccaaaagtaacaaaaattctcatttatttttaatctaaatgttttaagtattttcctggaattcaccttgaattgatttctattggagataggtatccaatctaatttgcctcatttggataaccacttgttctattactgctgtaacaaatttctacaaactaagtgacctaaaataacacaaacttrtcatcttacagtgtacacaagtcagaaatcaggcatgaattttagtgaactaaaatcaagttgtcgacaggcatgtttctttctggcggctagggtagaatccatatcctggccttttctatcttctagagaacatcagcattccttttctcattgcctctcctctctctttttaaagctggcgatgtcacatttctctgaccattctttcattgtcacatctctctctggactcagctaagaaaggttctccatttttaagaactcatgtgattagactgggcccatctggataacccaggaagatctctccatctcgg

SEQ ID NO: 178939 - DNA, 583 bp, Homo sapiens
aagctttatattttgatgtagtcatgtgttcatttttcctccttaatgtttgtttttcttggttctatgacctaccaaaagtaacaaaaattctcatttatttttaatctaaatgttttaagtattttcctggaattcaccttgaattgatttctattggagataggtatccaatctaatttgcctcatttggataaccacttgttctattactgctgtaacaaatttctacaaactaagtgacctaaaataacacaaacttatcatcttacagtgtacacaagtcagaaatcaggcatgaattttagtgaactaaaatcaagttgtcgacaggcatgtttctttmtggcggctagggtagaatccatatcctggccttttctatcttctagagaacatcagcattccttttctcattgcctctcctctctctttttaaagctggcgatgtcacatttctctgaccattctttcattgtcacatctctctctggactcagctaagaaaggttctccatttttaagaactcatgtgattagactgggcccatctggataacccaggaagatctctccatctcgg

SEQ ID NO: 178940 - DNA, 601 bp, Homo sapiens
attgttctaagaaagaccttctgcataagcaaaggtttatgtttctaatagatcacaaaatatgagacactttcagatcaaagactactgtttagactaagtcccaacggggctttcattttgtcatgttaataaggattatattaaacaaattagtaaagtctgaaactatacttcaaaggctaaatcttatgttctaaattcaggatgaaaacagtacaggttttaaattaagcgctgtaactaactgaaagataatttagcaattaagatgggtagaaagtattttaaaagacatgaaaaggagtaactcctagtagcagctgtgacaccctgatgcacaatatagctcccaartatcccatctttatactccattaacttaaatgaaactatagcatatcactgacctggcctcagaataagggagataggaaataagggctcataaagtggctctactacttaccagagtaacagagcagaactgctgcagtagtgatccctctcaactctggatctgtgagctggttgccatgccacactcctgcttgattctcacttcccaggttgacaccttgacctctcacactgtgctgtt

SEQ ID NO: 178941 - DNA, 615 bp, Homo sapiens
ctcatctgccccttcaacgcacactctttctcctctgggagtctctgaagtgggtaatatcctctgcttatamtatgcttccccttaaacctctactctcttcctagctagcttcgactcctctgtcacttgtccgctttggcatcacctcctcatagaagacttctctgactcccgagattctcaggagcatggcaggtgaggtgctcctcccatgaatggatggagattagggagtgtgtgttattcatgcttaattcaccagtgcttagctgagtacctggcataaaatagttactgtggtggccaaagtaataacccccaccgccaccaattgctcatgtcctatgttacacagcacaattacataggaagggggaattaagagtgcagataaaattaatgttgctcatcagctgaccttaaaacaagattatcctggagtatctaggagagcccatgtaattacaagcattctttaaaactggaagagggaggcagaaggttaagaaccagagacggtgggcacaatggctcatgcctgtaataccaatactttgggaggccagggcaggaaaatcccttgagtgcaggagttcaaggtcagccgcggca

SEQ ID NO: 178942 - DNA, 615 bp, Homo sapiens
ctcatctgccccttcaacgcacactctttctcctctgggagtctctgaagtgggtaatatcctctgcttatactatgcttccccttaaacctctactctcttcctagctagcttygactcctctgtcacttgtccgctttggcatcacctcctcatagaagacttctctgactcccgagattctcaggagcatggcaggtgaggtgctcctcccatgaatggatggagattagggagtgtgtgttattcatgcttaattcaccagtgcttagctgagtacctggcataaaatagttactgtggtggccaaagtaataacccccaccgccaccaattgctcatgtcctatgttacacagcacaattacataggaagggggaattaagagtgcagataaaattaatgttgctcatcagctgaccttaaaacaagattatcctggagtatctaggagagcccatgtaattacaagcattctttaaaactggaagagggaggcagaaggttaagaaccagagacggtgggcacaatggctcatgcctgtaataccaatactttgggaggccagggcaggaaaatcccttgagtgcaggagttcaaggtcagccgcggca

SEQ ID NO: 178943 - DNA, 615 bp, Homo sapiens
ctcatctgccccttcaacgcacactctttctcctctgggagtctctgaagtgggtaatatcctctgcttatactatgcttccccttaaacctctactctcttcctagctagcttcgactcctctgtcacttgtccgctttggcatcacctcctcatagaagacttctmtgactcccgagattctcaggagcatggcaggtgaggtgctcctcccatgaatggatggagattagggagtgtgtgttattcatgcttaattcaccagtgcttagctgagtacctggcataaaatagttactgtggtggccaaagtaataacccccaccgccaccaattgctcatgtcctatgttacacagcacaattacataggaagggggaattaagagtgcagataaaattaatgttgctcatcagctgaccttaaaacaagattatcctggagtatctaggagagcccatgtaattacaagcattctttaaaactggaagagggaggcagaaggttaagaaccagagacggtgggcacaatggctcatgcctgtaataccaatactttgggaggccagggcaggaaaatcccttgagtgcaggagttcaaggtcagccgcggca

SEQ ID NO: 178944 - DNA, 615 bp, Homo sapiens
ctcatctgccccttcaacgcacactctttctcctctgggagtctctgaagtgggtaatatcctctgcttatactatgcttccccttaaacctctactctcttcctagctagcttcgactcctctgtcacttgtccgctttggcatcacctcctcatagaagacttctctgactcccgagattctcaggagcatggcaggtgargtgctcctcccatgaatggatggagattagggagtgtgtgttattcatgcttaattcaccagtgcttagctgagtacctggcataaaatagttactgtggtggccaaagtaataacccccaccgccaccaattgctcatgtcctatgttacacagcacaattacataggaagggggaattaagagtgcagataaaattaatgttgctcatcagctgaccttaaaacaagattatcctggagtatctaggagagcccatgtaattacaagcattctttaaaactggaagagggaggcagaaggttaagaaccagagacggtgggcacaatggctcatgcctgtaataccaatactttgggaggccagggcaggaaaatcccttgagtgcaggagttcaaggtcagccgcggca

SEQ ID NO: 178945 - DNA, 471 bp, Homo sapiens
tagccacgttagaaaacagtctggcagtttctcaaaaggctaaatgtacagtcatcctataatgcaacaatttcactcctaggcatatatcccagaaaaataaaaatatatgtccacacaaaaacttgtayaacaatcttcatagcagcattattcataatgaccaatacatggaatacatggaaacaacccaaatatccaccaactgatgaacagataaacaaaatgcagtgtgtctctaccatggaatactgccatagaaggaatgaaatattgatacacactatgacataaaggaactttgaaaacactgtgctaagaggggaaaaaagccacaaaagatcacatattgtacaattctatttgtccagattaggcaaatctatagtgacaaaaaaattaatcaatggttgcctaaggctgggggcaaaggtaggtggggagagtaggaggtagtggctgaggggtatg

SEQ ID NO: 178946 - DNA, 559 bp, Homo sapiens
gagcttggcctaaagaggccactgggtggcaggagctgggtgtgtagaagctgctgaaaggttgggagcttggcttggggggtccacagtgaggcagatgctgggcctcaagaatctgctatgaggcagatgttgggactgtagaggccgacgggaggcagaggctgggcctggaggggccaccaagatgcaggagctgggcctggagaggctgcaaagaagcatgagctgggcctggtgaggtcgacttcagaaagttcagggcctrgagagaaggctgggaggcaggagctgggtctaaagaggccattgtaatgatggagctgtgcctgtggaggctgttgtgaggcagtaggctcatctgcggagactgccgtgaggtagggtatgggcctaaataggccattgtgagtcatgagcttggtctgtagaggctgactggagaaagttctgggcctggagaggctgccgggtggtaggagctgggccaaaagatttaagcacatttacatttattaggcacttcatttccattattacactgtaatatctaataaaa

SEQ ID NO: 178947 - DNA, 559 bp, Homo sapiens
gagcttggcctaaagaggccactgggtggcaggagctgggtgtgtagaagctgctgaaaggttgggagcttggcttggggggtccacagtgaggcagatgctgggcctcaagaatctgctatgaggcagatgttgggactgtagaggccgacgggaggcagaggctgggcctggaggggccaccaagatgcaggagctgggcctggagaggctgcaaagaagcatgagctgggcctggtgaggtcgacttcagaaagttcagggcctggagagaaggctgggaggcaggagctgggtctaaagaggccattgtaaygatggagctgtgcctgtggaggctgttgtgaggcagtaggctcatctgcggagactgccgtgaggtagggtatgggcctaaataggccattgtgagtcatgagcttggtctgtagaggctgactggagaaagttctgggcctggagaggctgccgggtggtaggagctgggccaaaagatttaagcacatttacatttattaggcacttcatttccattattacactgtaatatctaataaaa

SEQ ID NO: 178948 - DNA, 558 bp, Homo sapiens
gagcttggcctaaagaggccactgggtggcaggagctgggtgtgtagaagctgctgaaaggttgggagcttggcttggggggtccacagtgaggcagatgctgggcctcaagaatctgctatgaggcagatgttgggactgtagaggccgacgggaggcagaggctgggcctggaggggccaccaagatgcaggagctgggcctggagaggctgcaaagaagcatgagctgggcctggtgaggtcgacttcagaaagttcagggcctggagagaaggctgggaggcaggagctgggtctaaagaggccattgtaatgatggagctgtgcctgtggaggctgttgtgaggcagtaggctcatctgcggagactgccgtgaggtagggtatgggcctaaataggccattgtgagtcatgagcttggtctgtagaggctgactggagaaagttctgggcctggagaggctgccgggtggtaggagctgggccaaaagatttaagcacatttacatttattaggcacttcrtttccattattacactgtaatatctaataaa

SEQ ID NO: 178949 - DNA, 536 bp, Homo sapiens
gaattcactcgtttagttattgctatattggtgcgatttctctggggagtgtacaaagaaagtgttcctagtcaaaattaatcactcagccctctatctacctcttgcctttatgtcacaatcatattggttttgctgagctgccttgtaaagttaattaagtgcttgcataccttgtactacattgaagtttcagcaaaatttaaaccagtggaacactcccttcttgaaaatttctcttcctttgcttttttgtcatcacagtctcttgattttcattttactttcatatgccctgtcttctttatacacgtatcccttatgttttgttttcctgtgatttgcctgtgttctgctgccctcgtcattatatgtactctttcttggtggtttcataagcactacaagagtttcaaacaccttgtaaatgccattgaccctcaaatcatctttttaataaaattttctcttcytccttttctccctgactctgtgagttaaaccaccactgattacccaagccttacaagtgagag

SEQ ID NO: 178950 - DNA, 537 bp, Homo sapiens
aacctgccactcaaaaactaatattaaagaattttaagaaatgacaaggacttacctattttatactctccacaggwatcttgatttagataattaaagatgagatttcagaaaatgggaaataaaaataaaaaataatgttaacatagaatgaaaataaaatgagaaagaaaatacggcagagaaatatagatgtcttcgtcatctattatgtgttttccagggtgatatagcttttgatttggggctaggcacatggctatctagaatggtaaatctattcttcagaactgtttgcaaggaagtgtggacatatggcagtattttggtcaatgaaatgtaagtggcagtgtctcatggtgacttctagaagcgtttctttaaaaaaaaacaagcaaacaaacaaaccaagaaacccacaaaaatattccatttacagttttctttaaaatttattgattctactaccttccacctcccatagaggtgctttcctgaactatgagggtaagagacacaaatcaggaatggtggagc

SEQ ID NO: 178951 - DNA, 495 bp, Homo sapiens
gaaactggacccctacctttcctcatatacaaaaattaattgaagatgaactaaatatttaagtgtaagacctgaaattataaaaatcctagaaaacctaggaaatacccttcttgacatcagccttggcaaatcatttttggctaagtctgcaaataagttgtaataaaacaaatattggcaagtaggaactaattaaactaaakaacttctgcctgataaaacaaactataaatagagtaaacatacaacctccagaatgggagaaagtattcacaaactatgcatctgacaaaggaatgatatccagaatctatcaggaacttaaccaaatcaacaaacaaaaagcaaataaccccattaaaatttgggcaaagaataaacatatgaaaaatgctcatcattactaatcatcagagaaatgcaaatcaaaactacaatcagatactatctcacaccagtcagctattattaaaaagtcaaaacaacagatac

SEQ ID NO: 178952 - DNA, 495 bp, Homo sapiens
gaaactggacccctacctttcctcatatacaaaaattaattgaagatgaactaaatatttaagtgtaagacctgaaattataaaaatcctagaaaacctaggaaatacccttcttgacatcagccttggcaaatcatttttggctaagtctgcaaataagttgtaataaaacaaatattggcaagtaggaactaattaaactaaataacttctgcctgataaaacaaactataaatagagtaaacatacaacctccagaatgggagaaagtattcacaaactatgcatctgacaaaggaatgatawccagaatctatcaggaacttaaccaaatcaacaaacaaaaagcaaataaccccattaaaatttgggcaaagaataaacatatgaaaaatgctcatcattactaatcatcagagaaatgcaaatcaaaactacaatcagatactatctcacaccagtcagctattattaaaaagtcaaaacaacagatac

SEQ ID NO: 178953 - DNA, 495 bp, Homo sapiens
gaaactggacccctacctttcctcatatacaaaaattaattgaagatgaactaaatatttaagtgtaagacctgaaattataaaaatcctagaaaacctaggaaatacccttcttgacatcagccttggcaaatcatttttggctaagtctgcaaataagttgtaataaaacaaatattggcaagtaggaactaattaaactaaataacttctgcctgataaaacaaactataaatagagtaaacatacaacctccagaatgggagaaagtattcacaaactatgcatctgacaaaggaatgatatccagaatctatyaggaacttaaccaaatcaacaaacaaaaagcaaataaccccattaaaatttgggcaaagaataaacatatgaaaaatgctcatcattactaatcatcagagaaatgcaaatcaaaactacaatcagatactatctcacaccagtcagctattattaaaaagtcaaaacaacagatac

SEQ ID NO: 178954 - DNA, 622 bp, Homo sapiens
gaccatttgacattctaaagatggctgcatccaaacagttaaaactttgagagaatacagagcacagggagactactatctgactgtcaggaggataataccaagagtttggagtacgctcctcatccagaatccccataaaaccaacccatctaaaataaaatagatcaaagaatgagctagataaagataaagatgaaattatttatctagcttaaagactttaggtcttcattaatyccctaaaaataaatctctataatctacatttgatatatttcttcataggccacaagtaccagcagctgcacagatactcttgtttagccaataagtaatctagagcaattctattgtttagcagaactttcacaagagaatttaaagtctgtcatgtaaccataccctttacagtagaatctgctataaagcccatcatgagggatacatttctaatcattgcttcttttactccaacccaaggaaaaagtaactaacaaatgatgcccttctagaagagtgaagacctcctgccaatgttctctttaacccatgatataggttaagaggagtgaaacagtgttctgtttctgactgattttaaggcaatgtatgtaccatt

SEQ ID NO: 178955 - DNA, 474 bp, Homo sapiens
gacagaaaaaggaaagtgaggtaaagaaaatggaagtgaggtacaaaaatagctgggtttgtgacagctcagcatttgccatatttgaacacagactgaacagttggctgcatttgattggccaaaacttggtagttgacaaaagagtaggttaccatctgtttacacccccagttcttatagttcactatgtacaaaaaaccctttaggccaaacttaaaataygcaaggaggcggctttaggctaaacatgattcaacaatagcaatgagatatgttaggaaccagtagatggacaaaaaagaatgctttattggtccaaagtatctcaggaataatgccttcttaaaatcaccatggcacatgaatctgacaaaaaaatatacaaacccaaaacctaaacaatgatatttgttgttaacaaatcacatttacaaggtcaggaaaactacaagttaagtggataatttagaa

SEQ ID NO: 178956 - DNA, 658 bp, Homo sapiens
tatcttataggcttttttcttgttatattaagggagaagtacaacgtacacagtggtcatggtttgacccaagatataatcgaatctgtgaaatagcgaagtgctttgtaatagagttttactgtaattgctttgtcaggttatcagtcttgtagttcttccctaaatagaaaaagtttgtcctgttgcttgaaggtatagtgaattttggaagaatgagtatatgtcagctaaggtggcattgacccaaaaaaggcttgaacactgagcagaycaaggaataatacttctgattacagactagtgcagacagaataagaaataatcaggtgaatgtgttgatagggtggggatgagggttaaaaggacaaaaataaattcataaaaagttcatcctgtactggaagttttagactgaaggaaaatgagctaaaaatgctttggttaaattttccaccagttgctataaagtcattagaagcctctgtgagtaaaggaggtaactcccagaaagtatttatagatttagaaagagaataaggttaagtttccttggagacatagttctttcaagccagatctaacctgatctgaagtaactctaatattaagagaatttaactgaatattgtctgcttctttctcctaaatcaacaaa

SEQ ID NO: 178957 - DNA, 575 bp, Homo sapiens
aaaatgaagtccaaaggcttcactagactaccaaagtgatccatggcacaaaatatggcttaaaatctctggtgaaatttagaagcaataattttctgcttgtgaatttggggatgtttcagcattatatactcaggaaaatgtcaagaagtcaaatattacttgagagtggctttgtataattttgtgtgtgtgtgtgtgwgagagaaaggaggaataatggaacatttgagaggtagtctagaatccatccaagtcgaatgtaggaacatgagccataaaacttttgtaggtctttagacactttaaaatactgtattgtagcactaagttggtagggaaaaagagagattttctggacagattagggattccaaatgttgttagagacattctgaaatgatcacagtgtgacttagtagtccattttcatgtcattgatttttcactggtgactgaacttgatgaacaagcaagttcatcagaaattggctctagcacctaattttttttttatcaattttattttggtttttcttttttcatctaaatcacatcatattaatcagtgttgc

SEQ ID NO: 178958 - DNA, 633 bp, Homo sapiens
catttgaaaccattgtgataacatgggaaagtctgatttttattctcattgtaaattgtaaaccaatacaaacaaccagatatcatgtattttgttaacccttgcatagactatatacagtgaagtacagttactgrccaacaaattttagtaaatgatactagggaaaatttttcaataacagagagatagtagcacattatagagatttgttttcttctcagtatttatatttgtgctatttatcacaaggattgtgcaacaaggagatcttattcagcatcttgcttaggatcatcatgcatatagctattgtagttacaaagatggtgagtaatgattttataataatgtgccttttaaaaattcactttaagaataattcccgggataaaattatataactggtaataattcctttgaatgtagatctttctctcattaattttagtcttcctacttaacacactttccctgaaaaataacctgcttcattctattcattgactctcagattttgtcattattacattatcctatctttgttatcttttgatacattttacctattaaatttcccctgagttgtttctcagcgatatttagatgacatctaatcctgtcctagacatt

SEQ ID NO: 178959 - DNA, 544 bp, Homo sapiens
ttgggttataatcttccatatttctgctcattagattaaattttgattctctatagggaaaaatggatgttttctatcaatctgttcttcccaaagctctttctttagttaagaaaaarttagacttttgaaataaaaattagtttattccataaatggtttaaggtaatttctctgaaagtatctctctggaaagatattcatcagaaattttatgatgtttataagaaatgcatattcctgaatccaacctaacagtcttcaacaggagggcacaaggcatgatttttactgctaacacaaatttggagtgcttatttctagtactaatattagagaactattcttttataaactactggcctcccaaattgactgcacaaaaatgatatatatgttttcctataagactcagatgcctctgtattatctatagtgtgacaaaagtagctatagtactggctgaattttatttcaccatcatttataacattttaactaaggatgtatgtcctctgtgttctaactcagaaagccagttata

SEQ ID NO: 178960 - DNA, 501 bp, Homo sapiens
cagtatattaattcccacagagaagccaataaataaagtggggggcttgaaatgaggatgaggtcttgcatacatgcaggtagagtataagagtcaccaggatttaggcatatggttaacctctattttattcacatgctatgtatctcaaagtcttgctaagaatatatttcaggcagaaaggagttaatacccttggaggaaggatagaatacatatcagagaagatgtgtgatggtatcaggaaattttcaagtttcataacttacaggaaatcagcacttataatttcagctacctgcagcacctaattaattcatttataggagaatatctggaagagagcataaccttacttttagctgaagtcaatgtgcctgccmactgttagtggaacaaaaataaattctggtcctcttctgtctccaaaatcttatgacagtgtctctctttggcagactctaaattagaactcagctaggaagtgagtctgaagaatgt

SEQ ID NO: 178961 - DNA, 505 bp, Homo sapiens
tgagggactgtgccatgaggaatggtgctttctggcccagatactatgcttttcacatggtcttcacaacccgcaaaccaggcgattcccttgggtgcctaaaccaccagggccctgagtttcaagcacaaaactgggcagccatttgggcaggcactgagctagctgcaggagtctgtttttcataccccagtggcacctggaatgccagtgagtcagaactgctcacttccctggaaagggggctgaagccagggagccaagtggtctagttcagtagatcccatccccacagagtccagcaagctaagattcactagtgtgaaattctcactgccaacacagcagtctgaagtcaacctgggatactygagtttggtggggggtggggcatccgccattactgaggcttgaataggtggtttaccactcacagtgtaaacaaagtcacagggaagttcgaaatgggtgtagcccaccacagttcagcaaagccgctgtcgcc

SEQ ID NO: 178962 - DNA, 645 bp, Homo sapiens
gtattaagaagattaaatgtctttttaaatctctagtttatccttgcaaataccatatactatatatcaaaataattaattatcaataattattataaaaaatacaccagaggattgaaagtctctgctactaacttgctgtgtaattcacaataagtcagttaatatttctggtcatcagtgtcccccccyagttataaaataatgacataaactagattatcttcaatcttgcattccagtgctatgatttagcataaattgcctcccactgattagtttgcaatttctgagaattattttcctcgtttgtggttttttgagtataccatattactatacattcagtaaatatagatttttagtaaataagacttgagaaataccggtgattaagtatcacaaaaacctccaactcttcataactaaacagtatagagcatatgtataagttcatctttgggtagtattttaaaatatagaaatttcagtgagtaataatcaccactcattaagacttcaaattgcaaagttaaagacaatctttattttttctccatactagtgaaagcccacatctggattttaaagattttttttttaacccaaagctataattcattaaaataatattgcacctgtgaa

SEQ ID NO: 178963 - DNA, 600 bp, Homo sapiens
aattgttattgctcttctgggtctagccaccaaatggaactaccatgcgttgggctggtgctggagaatgtctacaaagagtgcagtgatgtgaccaatcttcaggtctcccaggcattgatgccagcacctggctatggtggagatggcaggtgagtgctgtagacactgagtttccttgtttgtagataggtttagtgcactggwttccttgaatactggttatgctaccagtgaagttgtcatgtgaacagactcaggacctctggttagccagggtgttgcaggcagtgctgttgttttctccttcctgggagcagtgttattctgccaagagttgctgtaatggctgcctctgctgtgcagtaggttcgtcaggggagtggggaatgaccagcagtgattggcctcacccaactgcccccacacagttggcaaggcaggtttcgctcagcagtgccctgctaaacagtgctgagtttagatccaggccactagcacatagaactcagacctgccccaggccataatcttccctgatgagaaagcaagcatggcttttgggccatgctcttccccatctgcttgcaattctgggtg

SEQ ID NO: 178964 - DNA, 619 bp, Homo sapiens
ttttttctttgctaatctagcttatggtctacaattttgtttgtcctttcaaaaaaaccaacttttgatttcattggccttttgtatggatttttgcatgtcagttttattttctcctctgattttggttwtttcttttcttcaggtagattgtaggttggttagatcttgtttttctagttcctctagatgcaataatagattagattgttaacttgagatctttctaacaccttgatgtagttatttaatattatgaaatttccttttaatgctgctttagcagcaccccaaaggttttgatatgttgtgttcctttccatttattgaaaataaatttttgatttctaccttaatttcattttatgcaaaagtaatctaggaccaatttgttttatttccatgtaactgtgtggttttgagagatcttattgttattgatttatattttactgcactgtagtctgatagtgtgcttcatacaattttcacttttttgaatttattgagacttgctttatgttggagcatggttgagctgggaatatgttctatgtgcagatgagaagaatgtacattttggtgttgttgggtggaatattctatagatgcctattag

SEQ ID NO: 178965 - DNA, 525 bp, Homo sapiens
ttcctgagtgggctgtcactccaatctacttttcctcactctccatatgtctcactgactgcttagtcagtcccagtgtgagaaactggatacctcatttgaaggtgtatatttcactcagtgtttttgtacttctctgtgagaggtgcagaccagagcggcttctaatcagccatcttggtctgccccaacaagttgttcatgacaagtgcagatgtatagccaaggagcagcaggaagagagtgtcagtgaatagaaaattwctgaaaggaaacatcaagggtagggagatagatggttgttaaaccaacctaataggattcttgttaaagacaggccaaagaattagacaaaatgagggaatgcagaatgttattatatatcaaaagggtgcggattctcactaaactaactaagcaagatcctttctaagactggggtaagcaggcaaaggcaggatgagggccagggccaagggctggtcaagaagagtgccccaaggagtctgaatatagtttggtgaa

SEQ ID NO: 178966 - DNA, 586 bp, Homo sapiens
acttttacactgctcctgggaatgtaaattagtacaaccactatgaaaaacagtatggagattttttgaagactaaaaatagaactcccatttgatccagcaatcctactgctggctatccacccagaggaaaataattcatgatttgaaaaagacacttgcacatacatgtttatagtagcacaatttgcaattgcaaaaagatggaaccaacctaaatgcccaccaaccaatgagtggataaagaaaatgyagtatatacacaccatggaatactactcagtcataagatgaaaagaaataatggcatttgcagcaatttggatggagctggaggccattattctaagtgaagtaactcaggaatggaaaaacaaattttgtatttctcacttataagtgggatctaagctatgaggatacagaggcataagaatgatacaatgggtttggggcacttgggggaagggtggaaggtggtgagcattaaaaactatatatttggtgcagtgtacactattcaggtgacaggtgcaccaaaatctcagaaatcaccactaaaaaacttattcatgtaacccaaaaa

SEQ ID NO: 178967 - DNA, 634 bp, Homo sapiens
cctggttacaggcggtcccaggattccttggatggtaacagaacttgaggacagtagtccaggacagaagattagcactgataaggccatatcagtgtccaggaggaagtcaatttcctggccttcaatggttaaatgtacccagggctcagtgagggtgatgacatgagctggctcttgccccgggcaccctcaatcctgttgttggatcatcttgtgtggggcttctgacccagagaacctttgttctctgtggcagtgcaccttccagtgattgcctcagcatagtggacatggacaagggggtggcttgtttctcaytggacaatcttttttaaagtgtccttgtaaaccacactgataacaagccctgctgggtgattagcctgctccattttctgtcctctctgaaccaccaaggtttgtttgtctgagggccatgactaaggctgcagcctttctctgatcttgcttttctttttgggcctactcctcttggtccctattatggaacactgaggttcccaggtttaataatgcctccagattttgttcagggcccagggcttgcttttggagttttctcctgatatctgtggctgactgggtaataaatttatcttttagaatcaat

SEQ ID NO: 178968 - DNA, 611 bp, Homo sapiens
tttagctagacacagagtgctgattggtgtgtttgcaatcctttagctagacagaaagttccccaagtccccacccaacccaggagaccagttgkcctcatctctcaatttatttttattttttgaaatagagtcttgctctgtcacccaggctggagtgcagtggtgtgatcttggctcactgcaacctccacatccctggttcaagcaattctcccgcctcagcctcccaaactgctgggactacaggcatttgccaccatgcccagctaatttttgtatttttagtacagacagggtttcaccatattggcaaggcttttctcaaactcttgacctcatgatccaccccccttcagcctcccaaagttctgggattacaggcataagccactgtgcccaacttctatcaggttttaaagaatattatactagctaaacttttccaacattctattttgtctgcatgtgtacaaagacagatatacacagaaacaggaaaaaactacatataacttacaaagaccatccataacatgagtggacttttcattttgtcttaattttttttaataaccattttactttaggactaaagttaaccaaacaag

SEQ ID NO: 178969 - DNA, 611 bp, Homo sapiens
tttagctagacacagagtgctgattggtgtgtttgcaatcctttagctagacagaaagttccccaagtccccacccaacccaggagaccagttggcctcatctctcaatttatttttattttttgaaatagagtcttgctctgtcacccaggctggagtgcagtggtgtgatcttggctcactgcaacctccacatccctggttcaagcaattctcccgcctcagcctcccaaactgctgggactacaggcatttgccaccatgcccagctaatttttgtatttttagtacagacagggtttcaccatattggcaaggcttttctcaaactcttgacctcatgatccaccccccttcagcytcccaaagttctgggattacaggcataagccactgtgcccaacttctatcaggttttaaagaatattatactagctaaacttttccaacattctattttgtctgcatgtgtacaaagacagatatacacagaaacaggaaaaaactacatataacttacaaagaccatccataacatgagtggacttttcattttgtcttaattttttttaataaccattttactttaggactaaagttaaccaaacaag

SEQ ID NO: 178970 - DNA, 611 bp, Homo sapiens
tttagctagacacagagtgctgattggtgtgtttgcaatcctttagctagacagaaagttccccaagtccccacccaacccaggagaccagttggcctcatctctcaatttatttttattttttgaaatagagtcttgctctgtcacccaggctggagtgcagtggtgtgatcttggctcactgcaacctccacatccctggttcaagcaattctcccgcctcagcctcccaaactgctgggactacaggcatttgccaccatgcccagctaatttttgtatttttagtacagacagggtttcaccatattggcaaggcttttctcaaactcttgacctcatgatccaccccccttcagcctcccaaagttctgggattacaggcataagccactgtgcccaacttctatcaggttttaaagaatattatactagctaaacttttccaacattctattttgtctgcatgtgtacaaagacagatatacacaraaacaggaaaaaactacatataacttacaaagaccatccataacatgagtggacttttcattttgtcttaattttttttaataaccattttactttaggactaaagttaaccaaacaag

SEQ ID NO: 178971 - DNA, 348 bp, Homo sapiens
tctaatggttttaaaagtgtggcacttcccctgcctctttctttctccctctctcctgccaccatgtaagatgtgccttgcttcccctttgccttccgccatgattgtaagtttcctgaggcatcctcaaccatgcagaactgtgagtcaattaaacctcttttatttataaattaccagtctcaggttttttttttatagtagtgtgtaaactgatgaatgtcattttcaaactgctattctataccatgggataggtgtccttatgagaaggaatagtacagcttgcttccttgctctctgttccartcatgtgaaaaaagcacaatagagctgtctgcaaaccag

SEQ ID NO: 178972 - DNA, 335 bp, Homo sapiens
gcatgttaatttattctaagttttggtctcastcagtgagtgaggctcttaatgatgtgtttagtcaaacattttgtcccaaatcccctgtagtaagtttttaaatcaagaagtgtgagcaccccaacttttttcaaaagttttaattcctttttaagattgttttggctactcgaagtcccctgagattccatagatattacatgataaaatttcctgtttaaaaaaatgctgttgaaattttggtagatagtgcattgaatctttaagaaattttgggtagtaatgtcatcttaacaatattagctgttccaatctttcagctttatacgtta

SEQ ID NO: 178973 - DNA, 558 bp, Homo sapiens
aaattctccattttttatgtatgtgtactgtcttcattattttgcaaatatatctcatgagtaagagcatattcaaagttagatcaagtcaatatcacaaaattgttaattaacagcttcaggtaaaacttgaatacattgctatttcttagctgtgtttaccagaatttgtactgtagtctgtattttacatagtgtcctgaggyatagtcccattagttcttcatgaagcatgtggaatgaaactgacctgtctcccagtgactggtgcttctctttcaacttaaatagcatggtataatttatccttgagattcttgttatcacttgatttatggtttccaagggggaaaaactgtatccagcaaataaaaaacttcaagtttcttagcatttttaagctaacatttttaagcataattattgaggtaaatcattaaaaaataaactgcacatcctgaatagtaatatatagatatagatgtagatgtagatttagatatatccgtgaaaccatcaatataatcaaaataaggactatatattatccccccaaaa

SEQ ID NO: 178974 - DNA, 547 bp, Homo sapiens
tctcatgagtaagagcatattcaaagttagatcaagtcaatatcacaaaattgttaattaacagcttcaggtaaaacttgaatacattgctatttcttagctgtgtttaccagaatttgtactgtagtctgtattttacatagtgtcctgaggcrtagtcccattagttcttcatgaagcatgtggaatgaaactgacctgtctcccagtgactggtgcttctctttcaacttaaatagcatggtataatttatccttgagattcttgttatcacttgatttatggtttccaagggggaaaaactgtatccagcaaataaaaaacttcaagtttcttagcatttttaagctaacatttttaagcataattattgaggtaaatcattaaaaaataaactgcacatcctgaatagtaatatatagatatagatgtagatgtagatttagatatatccgtgaaaccatcaatataatcaaaataaggactatatattatccccccaaaactacctctcccctcttacttcccccttacacattgccaagc

SEQ ID NO: 178975 - DNA, 547 bp, Homo sapiens
tctcatgagtaagagcatattcaaagttagatcaagtcaatatcacaaaattgttaattaacagcttcaggtaaaacttgaatacattgctatttcttagctgtgtttaccagaatttgtactgtagtctgtattttacatagtgtcctgaggcatagtcccattagttcttcatgaagcatgtggaatgaaactgacctgtctcccagtgactggtgcttctctttcaacttaaatagcatggtataatttatccttgagwttcttgttatcacttgatttatggtttccaagggggaaaaactgtatccagcaaataaaaaacttcaagtttcttagcatttttaagctaacatttttaagcataattattgaggtaaatcattaaaaaataaactgcacatcctgaatagtaatatatagatatagatgtagatgtagatttagatatatccgtgaaaccatcaatataatcaaaataaggactatatattatccccccaaaactacctctcccctcttacttcccccttacacattgccaagc

SEQ ID NO: 178976 - DNA, 601 bp, Homo sapiens
aacttgctaacttccataatggatggagacaggtccaactgcaatcttcaatttgatctcaaggaccaatattgcagccgtcctattctcataacatatgcttgtcttgtagatattgctaggccttcaagagaactggaagaacaagaaagataaaaaaagatggtgaaaggcatgtaagtttcccaggtggcaatggaggraagcccaaaataagaaagaaccatgaaaaaggaaacattctggagtagaaatgtaagagagagagagagagagagagcacgtgcaattatgtatgtgttaggtgtagtttggaggaggtgagaagagagtagtgatcagagaattgaggagaaaataggccaagtgaatcctgctctactgttagctgaaacctagaggaagtgcctagaaaaactagaacatcattttttatcagtaaacctcttttgccccaagttgtacagattgtattagagaatagactatttctgatgttcatttcttttgtacaactcaacagagggaataatctcaaattccagtagagtggctaacagatatagggaggccttagttgaaagcaatttatgagcaagct

SEQ ID NO: 178977 - DNA, 451 bp, Homo sapiens
aattccacttggttatgatgcattattctttttatatatttcttgactcaatttgctaacattttgctgaagattttgtaactgtatttatgaaagatactggtttgtggccaggcgcgatggctcatgcctgtaatcctagcactttgggaggccaaggtgggcagatcgcttgagctcacgagtttgagaccagcctgggcaacatggcaaaaccctatctccacaaaaaatacaaaaattagccagtgtggcagtgcrcacctgtagtcccagctacttgagaggttgaggtgggaggatggcttgaacctgggtagcagaggttgcagtgagcagagatcgcaccactgcacttcagcctgggtgatagagccagaccttgtctcaaaaaaaaaaaaaaaaagatatttctttgtagtttttttttttcttgtaacactttgtctgc

SEQ ID NO: 178978 - DNA, 621 bp, Homo sapiens
accttgcagaacccacctagaccctctttccacaactcaagattccactcatcaaggagctgcccaactcatctctcctccctcttcatatcgccaaactttctcagccacctaaaattctgtctctctctctctcctctccactcccaagtctttttcccctgtgggagtcaaatatcttccttctttgcrctgctcccagccagtgacagtgtgatggggctaccagagcccagccattcctgtccacaaggctgcttttggtctgggtacagcctttggtctgggtgccccaacagcctagcagacttcctcagagctgcactgtagcctgaagctcttcttgtccagccttccttccttctcactctttcttcacagataccaaacctccctcctgctcctcctgttccctcttccttttatcctacagatacttcccccaataaatcttttttcttctaattccgtcttggcctctgcttcttgaaagatcaaaaatgatacatcttctaaggcccagcttcatgatcccatgtctttgtatttttcaaggaaaggaggctcccccttgctcctgtctgcctcatcacctccacttacatttttcctaaatagtgt

SEQ ID NO: 178979 - DNA, 441 bp, Homo sapiens
gaattcatgagggtaggacagtccagacagacagaaaacatgtgtgatgactccaggtgagaggaagggagtgcgctaagagcatggcacgggggagaagcaagtctatagcacacacagaaaggagatggggtgaggaagagtgtaaggtgaggccacagagggaggcaggggccrtccaggtcgttgagggactcaccagaaaggtctgcaaagtcaagtagggaatgacattctggctgctatttttaaaacaccacacaggctactgcatggaggagggactggaggagtcatagggaaagcggggacctccagcaattccccctgggagaggtgaggatcacgtgcactagggcaacagcaggagagatagacaaaagtggaaaaatgaggcagaaatttgtcttcaacccatgaaaggacaagaccacttgatta

SEQ ID NO: 178980 - DNA, 596 bp, Homo sapiens
acttcaggaccctgacacaggacaggagctgatcaaatccactggaatctgaaacagctaaaatttccatccctgactcctgaaattatctgagctgcccatttttcaaacacatccagtttcccagcaaaaggacatgctttgtatggaaaacagcgtgagagaaaccactcagtaggttccagtcaccattcagacttggcttgggatttttgttgtgttaactgcatatgccaaggtttggcttagcatatyaggaccatccgtttcactgtcctcacgtatgcagacttgacagggcttcctggttatgtcagggcaaagtattatccaaacaatgacaaggaagacaattgcctgctgcaagctgggtatattttctttgttttatttcagaatgatcagtctacccagggtactttatattcagaaaggatcttcccagaaagccgtaggcaacatttacattttggttatgtttatacaggactggatttgggagtggctgaaaggaagtaaaatctaaatctcacttttgttcctggctcttagtttaccttaaataagcgatatgctgcctacacagtaaaagcatc

SEQ ID NO: 178981 - DNA, 578 bp, Homo sapiens
gagctatgtttagatacacaaatacttaccatcatgttacaatggcctayagtactgtatttagtactgtaatattcagtactgtgacatgccatacaggtttgtagcctaggagcaatggctataccatatagcctaggagtataggaggctatcccatccaggtttatgtaagcacactctgtgatgttttcaaaacaatggaattgcctacacattttgtaggatgtatctccctcattaagcaatgcatgacctgatatatatgagagaaaatttactagaggaattggctctcatggtcactgaggctgagacatcccatgataggtcatctgcaagacggagaatggggaagctgggagtgtggctcattccaagtctgaaagcctcagaaccagggaaactgatggtgtaaatctcagtccaaagccaaaggcctgagaaccccagggggccactggtgcaaataccagagtccagtccaaagatcagagaacctggagttctcatgtgtatcagctctaaaagagaaggagagaattcacctctcctctgcctttttattccagctgggg

SEQ ID NO: 178982 - DNA, 633 bp, Homo sapiens
cttctacttgttatttgttttgttaaaggtcataaattgtgattctcttttggtgggtgacaggaatgattatgtctttagctatgtaaaagaatacagtcttatgctagagcagaaaacataaaacaatgagcaaggaaactgggactgctttactacactgcacattaaaccacgtggacagcttttcaaatataagccataagctggccccaattcagaacatgcgaatcaggctctcaatcagtgcgaatcagtgattgcagctcaatcactggaattttgtaaaagctccccaggtgactctaatgtgtagtcaggattgagagctattgaactaaactgttttatatgaagtaaaagcatggtcttctttgtggggggcagagattgtctgagacttttggaagttgaggttcctttgcatggggctaragatgaggcactggaacttgggagaatattagaaaggagtctttaacctgatggaggagtgggctgtctgcaacatgatggctagcctagggctcaggtggtagacagccaatatagaattccccctcttgtcccacttctatgcttgcccaccatgaaaggacacagccagtgaactttagggttgtacaggtttgt

SEQ ID NO: 178983 - DNA, 371 bp, Homo sapiens
tgagtctcctgtagatggcatatatttggatctttcaaaaatccatttagccaatctatctcttgattggagaattttatccattcacattwgaagtaattactgataagaagggactacttctgtcattttcctgtttgttttatatgtgccttatagcttttctttttccctcattttctgtggtactatctttttttgtgtttggttgtatatttttgtagtgaaatgttttaattcccttctcatttcatttttttacattctatatctattttctttgtcatttctttggggattatatttaatatctgcaagttataatgctctaattagaatgtataccatcttaacttcaataacataaaaac

SEQ ID NO: 178984 - DNA, 371 bp, Homo sapiens
tgagtctcctgtagatggcatatatttggatctttcaaaaatccatttagccaatctatctcttgattggagaattttatccattcacatttgaagtaattactgataagaagggactacttctgtcattttcctgtttgttttatatgtgycttatagcttttctttttccctcattttctgtggtactatctttttttgtgtttggttgtatatttttgtagtgaaatgttttaattcccttctcatttcatttttttacattctatatctattttctttgtcatttctttggggattatatttaatatctgcaagttataatgctctaattagaatgtataccatcttaacttcaataacataaaaac

SEQ ID NO: 178985 - DNA, 460 bp, Homo sapiens
cagatcttggggttttctcagctaggaatgagcctcaggctgtttttactttatgtgggttacgtatctcaacttcttgcagctaataattaattaattaccctccccctaatgtgactcagcaaagtttgctcctgaatttgaatcaactggtgtgttatttatatttgtgactcgtgataggactsgcattttgtttgactaaaaataaaagcaaaaacaagtttacagaggcataaatatacatattaaactttagtgaccctaatacataaggccagaagttattatcttaataggaaagagtaaatagataagtatgaagagtatgaaattttctcttagattaataaaattcatctggaaataaagtctgtttcttccagctcaggaggccacgtatgtttgaggagagaacactgtggtacactcacgggttcaaattgcgtcgtgttggttt

SEQ ID NO: 178986 - DNA, 532 bp, Homo sapiens
gcttgggtaacgagcgaaactccatctcaaaaaacaaaaaaaagatttgctcatctttttctaatttgctgtttgttttagagacattttctagcaggtgtgatagcyatctggttattatgttttaaactggcaagatttttatttgctttccagtaatattaatgtcgtttcttttcctttaatttcagtgaaagtagagcctattcccgccattggccacgccacgctcggcactgccagccggatcattcagacggcacagaccaccccggtccagacggtgaccatagtacaacaggcacctctaggtcaacaccagctaccaataaaaactgtaacacaaaacggcactcacgtggcatcagtccccactgcggtccacggccaggtgaacaatggtaagacgtgctggtcggtggctccccgtggctgtgggtactgggagcagagccccttctcactcgtggtttcggttctgactgtaacaattttagcttttgtctgaggcaatgtttgcatttcgaagctg

SEQ ID NO: 178987 - DNA, 391 bp, Homo sapiens
ggaatggaatagaatggaatggaatggaatcaacgagagtgcaggggaatggaatggaatggaatgcaatggaatggaatcttccggaatggaatggaatggaatggaatggaatccacccgagtgcaatggaatggagtggaatggaatggaatggaatggaacaacccgaatggaatggaatgtaayggagagtaagggagttgaatacaatcaatccgaatgtaatggaatggaattgaacggaatggaattgaatggaatggaatggaatacaatggaatggaatcaacgcgagtgcaatggaatggagaggaatggaatggaatggaatggaaactacccgaatggaatggaatgtaatggagtgtaagggaattgaatagaatca

SEQ ID NO: 178988 - DNA, 436 bp, Homo sapiens
tattattttgtgaagttattttatttctatgttgcatttttcttattaaaattatacaatctttcagatgaacaggaaggacagtgtctgtaatctctcctcaccgccatctgcagtagtcgtacaaaggtgatgttttatgtgagtaagaatttctgtgtttcatttcacaggtggggagcattaagcgggaaatgaccttcacatttcagtcagaggacttaaaacgtgactgtggtaaaaaaatgtctcatcaacacgtgttttccttggccatggaggaagatgtgaaaacakcagacaccaaaaaagccagccggatccttgaccatgaaaaagaaaacactcgctccatctgtctccttgagcaaaaaagaaaagttgtttcctccaacattgatgttcctccagcaaggtaagggaacattaaatctca

SEQ ID NO: 178989 - DNA, 355 bp, Homo sapiens
caccaccagtatgttgtaaggagaaaaacaaattataaaggaatttatttcttttaaaaaattatcttgtataaaatcttaactgcaataattttccatctaaaatttgcctactccaatgagaggaggaaacagtttctttgccatattgtagccattatgatttagccggttcctactttcccatattagcaggatttcaagcatatttgcaaattgcaaaatcaaaacaccaggcagcataaatttatgacayattttatttttattaataaaattccaaacatgatagtcagaatttcatgcaatatgcagtgacatgatttttaaaaagtgttgcaataattagagtagt

SEQ ID NO: 178990 - DNA, 471 bp, Homo sapiens
cttctggccaaattttccttttttctttgttataactggtttgctaatacatttctctagctttagagttataattagaagacagttactactttgcataatcaaattgtaattgmtgtttgggtgaaatccaacgaatttaagcatcagtaccttcaaaaccatgatgtctggcaaaaacagaataacaaatgtcaggctctaatgatctaggttatctaacaatgcttaactgttgaattattttagaggctggacaataagtaataattgacttatcaatatattttgagcattacatttgtaaatgacaataagttaatggtctccaataaacacaaatggtgatgataaggaacaaaaattcacttgagatcagaaacctatcccagtcttaggtctgtcattggtgaaatatgtgtttctgggtgagtcacttaactttctgaatctgtttactcatttgcaaaa

SEQ ID NO: 178991 - DNA, 423 bp, Homo sapiens
caaattcttactataagacttttaacaagtcacttagcctttttgtaattcatctgtaaaatggaagtaatgataatacttacctcaaataattggtatgcaatttaaattagtatatagaaggcacttaaacagctctttgaaaatttaaatgctacacctagtacagaatcaggattttaagtctttatcagatttataccaaaaagcttctaccattccattaattttacaaattatatttacatgtattctgtaygcttaaatgtttatataatcaaccaatccatctcatcacatccagcagaactcctcaatacgctgtaaaagtattcaaatttagttctttaaaatattaaattccttcttctcattggcggtcattgtaaaatggagtatttttcttctctttactaaccattt

SEQ ID NO: 178992 - DNA, 498 bp, Homo sapiens
tcataaatatgaacaatctttctttgaggtagatcatctcttgcataccaygggaatatgtatgtattcatcttgtccacggagatgagcaggctcatttttttttctttgtaattcaagtcacttcaacaaacggtgctgtcccatgaaccatcagtaaagtcagtgagagagaagggtgaagctcttttggaactggtgcaggacgtcactttaaaggacaaaatagatcaacttcaaagtgattaccaggacctgtgcagcataggaaaggtaaggagagatgaaagactccgtaaaagggtttattttccaaaatgtgggccctgactcctttctctctgtcatgtaattttaaggcctggtacgggttagtatttttttttattcagatggatatttaattggcataatgactatgttgttttccattcctggtagttttctaagtagctctaactaccctgtgagttgcactgggtttttgtaatacaaaac

SEQ ID NO: 178993 - DNA, 578 bp, Homo sapiens
aaattttcctctgaaagaagagtcgatacataaaatagatagtctcagacggaaaaaaaataattatattgtggcagtaattattttatggttataatagattcatcttctattgtgtgtggagaaaataaaattatataaacattgtttctgcatacttaatgcctaaaaacctactacctggtatttgcattagttataatatacactctyatctgcagcattttgcagcttatgtagatattcctgatcattctcctagaccaccttccagaaatgagacagttcacatgaaaggctaagtgttctgctgaaatgtaaaactggctgttcctgctgggagagtgcaaggccaagtcagtgacaatagaccctaacatgcaggaagctacttaattcttcagggaggctcccacttctagcattgggctattccttactgttagcccattgtcttcttatgttctgagaggggtaaccaaaatcattgacaagggggctttgatatacagaaactgtgatttcactaacaacaacaacaataacaaataacacagaatgcttccatgtggttggct

SEQ ID NO: 178994 - DNA, 548 bp, Homo sapiens
caaagtagtttctagttttcacatatcacattaggctcacctgacacaacaacccacatgacctacattgtagccagagttctaaaaaaaaaataatctgagatttttgtaatatctctaaattttaaaacatgggaccatacacatggttttgtttatcaattataggttatatctaacacagtgaagactttgcaagaataatctacagctctcaaaatattcatatatcgattacttttggtatctaagtaaatacaaaggaatggaaagatgttcttcattcattctaagatgattcattccttatcttaacttaggtatgtgccagattttataaaaacatccaaaataacaatcatagaataaaaatgggtgtaaacatagactatttactcccagacctaagctagtgtgactgcttcagtgatgtgtattgaagacccaaatgagcagaycctctgtaaatgcacacttacagaacagatgaggccaaattaaagactaaattataccagtgtccctatattctaacacctgaaagttaa

SEQ ID NO: 178995 - DNA, 538 bp, Homo sapiens
ttgagcgtgaggcacaatcgagtgccctttttaaacaaaaacatcaggtgagaacaatccttttcaggagacaattattctaaagcatgtgtaacaagaccagggtgttgcttacaggaatagaaattcagtgaggacaagaaacatttttctagaatagtactactaactcaaaacaaaaatacatgtcttgtccaaagatgaaaatccattcactgtcagtgsaggggctatgtgagctgtttgtttccagggaatggtctagctggactcaggtgcaaaccaggctcattcatctgaatcagtaagttcactgagttgagcaaagttagaaaaaatggtttgttttgagcacccagctcccctttctatcaatggagcaacattgtgatctggcaatactcagcaagcatttataaacatctcctgtgtgcacgcgtaagccatgcatcctgagccccaactacagaaagtgcaaagttcacaatgtctctgtgaaataagggatgtgttatagagatggagccaaatccgccac

SEQ ID NO: 178996 - DNA, 538 bp, Homo sapiens
ttgagcgtgaggcacaatcgagtgccctttttaaacaaaaacatcaggtgagaacaatccttttcaggagacaattattctaaagcatgtgtaacaagaccagggtgttgcttacaggaatagaaattcagtgaggacaagaaacatttttctagaatagtactactaactcaaaacaaaaatacatgtcttgtccaaagatgaaaatccattcactgtcagtggaggggctatgtgagctgtttgtttccagggaatggtctagctggactcaggtgcaaaccaggctcattcatctgaatcagtaagttcactgagttgagcaaagttagaaaaaatggtttgttttgagcacccagctcccctttctatcaatggagcaacattgtgatctggcaatactcagcaagcatttataaacatctsctgtgtgcacgcgtaagccatgcatcctgagccccaactacagaaagtgcaaagttcacaatgtctctgtgaaataagggatgtgttatagagatggagccaaatccgccac

SEQ ID NO: 178997 - DNA, 557 bp, Homo sapiens
accatgggagatgagctgagtctgtcccatggaggctgacttcagactgcatgtcagattctggaagtagctgcagcacagtggagacccatggaaggctgtcttccttgaggtagacaggaggaagacagctctagctttaggtgagtgtgtactaccttgaggtgatatttcacatgcgctacatggaggagttttggagttcagaagattggcagctgaaactctctccatcaggttgtctcactttgtgtatttttaagatctcagtaacataagctaaataattatccctgtgcacaagaaaaacacagttaaagaaatatccttttyacttgctatattactaaatttgaaaattcaagtttttcattaaaaaaaggattcttaaagaaatccaagctttgttagatgtctttgaagcatatcatattgtaaatgtattatggaataaagactataactgaaggttgtattttattacacacacacacacacacctctaggatttaatctaggtgggactttccataggcccacctcatttttctcatcag

SEQ ID NO: 178998 - DNA, 557 bp, Homo sapiens
gaactaattttatgatatctgtattcttcgttgtatattccccagaactctctgttccattagtgatcagctaataattggacaaagatttccttaaatacttggaactaaaatatattgtataaaactaactttgtataaagtggtgagtaacactctctacaccttttatcagtttccrgtgataatctaaatgattccttaacatttcagaaagactcttgttgccttgaatgtgacatgcaaagtctgcactacatgggatataaagcttatatttgatttatgcattcagctgttaatgtatccatcaccaaatactacttgatgacaggtgttgtgaatttaaacaagacacagattctgggaggagccaagatggccgaataggaagagctccggtctacagctcccagagtgagcgacgcagaagacggtgatttctgcatttccatctgaggtaccgggttcatctcactagggagtgccagacagtgagcgcaggtcagtgggtgcgcgcaccatgcaccagccgaagcagggcgaggcattgcatc

SEQ ID NO: 178999 - DNA, 513 bp, Homo sapiens
ttttctgtaaattttgtttgaaaactgaacttccttctttagatcatgtccctctcctgtcatatttattcattgacagttaggggaggctggtagcactttccatgttsttcccagatgtctccttaggcagatccctgagatggtgcagtgccctttcagtttccatgttgtggtcgtagttttcccacagtccctcagcacgtaactctcaggccttttctccagtttccaatgacattttctcaccgtccttcaggccctgaccaagattcttgatgcccttccaggttgcatgaatggtctccttgaggcccagttacatatcagcctcacagtcgtggcaaatattttagcttctgattaccacagcggctcatttccagctaccatattctgttccagttatctattctgaagaaaccatccccaaaacttggcagcttaaaacaactcattattacttgttttttggcttagagagtcttggtggccagctcatctcacacacag

SEQ ID NO: 179000 - DNA, 353 bp, Homo sapiens
ccgtgtggtttccatcatggggtctcaggggagtgggatttcctgcctggtgactggctttctcctggataagtgttctgttttctcagcctggcttctgaagtccccaaataccacctttgtyaccttctgttggccaaacaaatcagtagtctgggcaaggtataaggggaattggttctcacagagagaggagcaggaaagaagttgtcacctttagtctaccagaaatatgatttttataacaagtttgttccaaatacattccagttccccttgtgaatacttttttgactcacagggtatttcaaagtttattacttggttttcagacatttgaggcttttctggat

SEQ ID NO: 179001 - DNA, 353 bp, Homo sapiens
ccgtgtggtttccatcatggggtctcaggggagtgggatttcctgcctggtgactggctttctcctggataagtgttctgttttctcagcctggcttctgaagtccccaaataccacctttgtcaccttctgttggccaarcaaatcagtagtctgggcaaggtataaggggaattggttctcacagagagaggagcaggaaagaagttgtcacctttagtctaccagaaatatgatttttataacaagtttgttccaaatacattccagttccccttgtgaatacttttttgactcacagggtatttcaaagtttattacttggttttcagacatttgaggcttttctggat

SEQ ID NO: 179002 - DNA, 353 bp, Homo sapiens
ccgtgtggtttccatcatggggtctcaggggagtgggatttcctgcctggtgactggctttctcctggataagtgttctgttttctcagcctggcttctgaagtccccaaataccacctttgtcaccttctgttggccaaacaartcagtagtctgggcaaggtataaggggaattggttctcacagagagaggagcaggaaagaagttgtcacctttagtctaccagaaatatgatttttataacaagtttgttccaaatacattccagttccccttgtgaatacttttttgactcacagggtatttcaaagtttattacttggttttcagacatttgaggcttttctggat

SEQ ID NO: 179003 - DNA, 353 bp, Homo sapiens
ccgtgtggtttccatcatggggtctcaggggagtgggatttcctgcctggtgactggctttctcctggataagtgttctgttttctcagcctggcttctgaagtccccaaataccacctttgtcaccttctgttggccaaacaaatcagtagtctgggcaaggtwtaaggggaattggttctcacagagagaggagcaggaaagaagttgtcacctttagtctaccagaaatatgatttttataacaagtttgttccaaatacattccagttccccttgtgaatacttttttgactcacagggtatttcaaagtttattacttggttttcagacatttgaggcttttctggat

SEQ ID NO: 179004 - DNA, 571 bp, Homo sapiens
ggtgcttttccttggcactgatgctactgctagaccatggtccctttaggtcatgggcatcttcccagatgctggtgttaccgctagaccaaggagccctctggtggccctgtccgggcataacagaaggctcacactgttgtcttctggtcacttctcactatgtcccctcagctcccatctctgtatkgtctggattttcctaggtttttattgtagagcaaggattattataatattggaataaagagtaattgctacaaactaatgattaatgatattcatatataatcatatctatgatttatatctagtataactattcttattttatatattttctttattacactggaacagctcttgccctcggtctcttgcctcgcacctgggtggcttgctgcccacataataacagatttccagaagaaaaaaatataaaaccatctgaccagtaaaccctggtaaaatgtacacggaccattttgaagatatttctatttttattttaccactaattttagaatagtttatttatcacagatttaattaagtcacatgaattaaaaag

SEQ ID NO: 179005 - DNA, 571 bp, Homo sapiens
ggtgcttttccttggcactgatgctactgctagaccatggtccctttaggtcatgggcatcttcccagatgctggtgttaccgctagaccaaggagccctctggtggccctgtccgggcataacagaaggctcacactgttgtcttctggtcacttctcactatgtcccctcagctcccatctctgtatggtctggattttcctaggtttttattgtagagcaaggattattataatattggaataaagagtaattgctacaaactaatgattaatgatattcatatataatcatatctatgatttatatctagtataactattcttattttatatattttctttattrcactggaacagctcttgccctcggtctcttgcctcgcacctgggtggcttgctgcccacataataacagatttccagaagaaaaaaatataaaaccatctgaccagtaaaccctggtaaaatgtacacggaccattttgaagatatttctatttttattttaccactaattttagaatagtttatttatcacagatttaattaagtcacatgaattaaaaag

SEQ ID NO: 179006 - DNA, 571 bp, Homo sapiens
ggtgcttttccttggcactgatgctactgctagaccatggtccctttaggtcatgggcatcttcccagatgctggtgttaccgctagaccaaggagccctctggtggccctgtccgggcataacagaaggctcacactgttgtcttctggtcacttctcactatgtcccctcagctcccatctctgtatggtctggattttcctaggtttttattgtagagcaaggattattataatattggaataaagagtaattgctacaaactaatgattaatgatattcatatataatcatatctatgatttatatctagtataactattcttattttatatattttctttattacactggaacagctcttgccctcggtctcttgcctcgcacctgggtggcttgctgcccacataataacagatttccagaagaaaaaaatataaaaccatctgaccagtaaaccctggtaaaatgtacackgaccattttgaagatatttctatttttattttaccactaattttagaatagtttatttatcacagatttaattaagtcacatgaattaaaaag

SEQ ID NO: 179007 - DNA, 571 bp, Homo sapiens
ggtgcttttccttggcactgatgctactgctagaccatggtccctttaggtcatgggcatcttcccagatgctggtgttaccgctagaccaaggagccctctggtggccctgtccgggcataacagaaggctcacactgttgtcttctggtcacttctcactatgtcccctcagctcccatctctgtatggtctggattttcctaggtttttattgtagagcaaggattattataatattggaataaagagtaattgctacaaactaatgattaatgatattcatatataatcatatctatgatttatatctagtataactattcttattttatatattttctttattacactggaacagctcttgccctcggtctcttgcctcgcacctgggtggcttgctgcccacataataacagatttccagaagaaaaaaatataaaaccatctgaccagtaaaccctggtaaaatgtacacggaccattttgaagatatttctatttttattttaccactaattttagaatagtttrtttatcacagatttaattaagtcacatgaattaaaaag

SEQ ID NO: 179008 - DNA, 581 bp, Homo sapiens
ggaattagtgaaagtactaaaagtctttgaaatgcatagtagaaataatgatgtaagctgtcctctctctctctccgcctcggctgccaaacaaggaaggtcccccgactggtggacacgagactcacgtaaccttacctatcattggagatggctcacactccttaccctgcccccttgccttgtatccaataaacaacagtgcggccaggcattcggggccactaccagtctccacatcttggtggtagtggtctcccgggcccaactgtcttttcttctatctctttgtcttgtgtctttatttctacgatctctcatctctgcacaaggtgaagaaaacccacagaccctgtagggctcatccytacagtagactacaggcttacatcatcacccctggctaattttttttgtagagatttggtttcaccatgttgctccaaatggtcgcaaactcttgagctccaaaagtgctgggattacaggcgtgagccactgcaccctgtcacacttagttcatttttaagtaataagtgctctatgagttcttaccattttatcaaatagaatactgaaaa

SEQ ID NO: 179009 - DNA, 581 bp, Homo sapiens
ggaattagtgaaagtactaaaagtctttgaaatgcatagtagaaataatgatgtaagctgtcctctctctctctccgcctcggctgccaaacaaggaaggtcccccgactggtggacacgagactcacgtaaccttacctatcattggagatggctcacactccttaccctgcccccttgccttgtatccaataaacaacagtgcggccaggcattcggggccactaccagtctccacatcttggtggtagtggtctcccgggcccaactgtcttttcttctatctctttgtcttgtgtctttatttctacgatctctcatctctgcacaaggtgaagaaaacccacagaccctgtagggctcatccctacagtagactacaggcttacatcatcacccctggctaattttttttgtagagatttggtttcaccatgttgctccaaatggtcgcaaactcttgagctccaaaagtgctgggattacaggcgtgagccactgcacccygtcacacttagttcatttttaagtaataagtgctctatgagttcttaccattttatcaaatagaatactgaaaa

SEQ ID NO: 179010 - DNA, 462 bp, Homo sapiens
tttattttttactgcttcatcaatgatattcttaagtaacatgaaaataaaattggcatgtttacttattgaggcaaccacgtgactgtaaatamtagaactgctactattgtttggagccactgtcttgttttgtgctacggttttacttactactgcatttgcaccaaagcagagaacaaaaacaagcgaaaaagacaagtaacatagctgtattatgatagaaagagtcttattttcatggagcactctgagatccactgttccagatatagttctctcccagaaccatcacctgttctgtcacaaagttttattaattctacttctcaagtattcttctactcactgcttcctctccacaactttatgactcagtgaaaccctcactctctctcacctgaaatatttccattttccatcatgtttccatcagactgcactcctcttacttcccgttat

SEQ ID NO: 179011 - DNA, 461 bp, Homo sapiens
ttattttttactgcttcatcaatgatattcttaagtaacatgaaaataaaattggcatgtttacttattgaggcaaccacgtgactgtaaataatagaactgctactattgtttggagccactgtcttgttttgtgctacggttttacttactactgcatttgcaccaaagcagagaacaaaaacaagcgaaaaagacaagtaacatagctgtattatgatagaaagagtcttattttcatggagcactctgagatccactgttccagatatagttctctcccagamccatcacctgttctgtcacaaagttttattaattctacttctcaagtattcttctactcactgcttcctctccacaactttatgactcagtgaaaccctcactctctctcacctgaaatatttccattttccatcatgtttccatcagactgcactcctcttacttcccgttat

SEQ ID NO: 179012 - DNA, 461 bp, Homo sapiens
ttattttttactgcttcatcaatgatattcttaagtaacatgaaaataaaattggcatgtttacttattgaggcaaccacgtgactgtaaataatagaactgctactattgtttggagccactgtcttgttttgtgctacggttttacttactactgcatttgcaccaaagcagagaacaaaaacaagcgaaaaagacaagtaacatagctgtattatgatagaaagagtcttattttcatggagcactctgagatccactgttccagatatagttctctcccagaaccatcacctgttctgtcacaaagttttattaattctacttctcaagtattcttctactcactgcttcctctccacaactttatgactcagtgaaaccctcactctctctcacctgaaatatttccattttccatcatgtttccatcagmctgcactcctcttacttcccgttat

SEQ ID NO: 179013 - DNA, 576 bp, Homo sapiens
ctgtttctgcaccttcctgtcaaactcataataagtctccgtattagtctgttctcatgctgctaatatggacatgcccaagcctgggtgatttataaagaaaaataagtttaatggactcacagtgccacgttgctggggagacctcacaatcatggcagaaggcaaaggtcaggtcatacacagcagcagacaagagagagcatgggcaggggaacttccctccatacaaccatcagatctcatgagacttattcactatcataagaacagaacagtcctcatgattcaattacttctcactaggtccytcccacaatacgtgggaattatgggaacaacaattcgagatttggatgaggacacagccaaaccatatcagtctcataataacgaccaaaggccaagccttccctaaatcgtccttaagagactcatgcagatttcataatttgctcccagttgggccttttctcaagactttgagattttgatctggactcagatgcctttgtggctcattatgaattccatttgtgttcttacactggactcagtaagatagctactctttca

SEQ ID NO: 179014 - DNA, 576 bp, Homo sapiens
ctgtttctgcaccttcctgtcaaactcataataagtctccgtattagtctgttctcatgctgctaatatggacatgcccaagcctgggtgatttataaagaaaaataagtttaatggactcacagtgccacgttgctggggagacctcacaatcatggcagaaggcaaaggtcaggtcatacacagcagcagacaagagagagcatgggcaggggaacttccctccatacaaccatcagatctcatgagacttattcactatcataagaacagaacagtcctcatgattcaattacttctcactaggtccctcccacaatacgtgggaattatgggaacaacaattcgagatttggatgaggacacagccaaaccatatcagtctcataataacgaccaaaggccaagccttccctaaatcgtccttaagagactcatgcagatttcataatttgctcccagttgggccttttctcaagactttgasattttgatctggactcagatgcctttgtggctcattatgaattccatttgtgttcttacactggactcagtaagatagctactctttca

SEQ ID NO: 179015 - DNA, 598 bp, Homo sapiens
tctgtcttatgcagttgaaataaggactgaaatacaccctggtctcctgcagtaccctcaggcttgctaggattgggaaattccagcctggtgaattctagtcagactggtctctgctcttgaaccttgttttctgttaagatgtttatcaagacaatgtgtgcacagtgggacacagaccctcatcagtggttctaattttgccttcaccttgtgatctttatgrccctttgaagcatgtgatccttatgacctactccctgttcatgcaccccttcccctttcaaaatccctaataaaaactggctggttttgcagctcaaggtcgccatcatggtccaatgtgatggcacccccagaggccaagctgtaaaatttctttctttttaccctttatttctcagaccagccaacacttaaggaaaatagaaagaacctacgttgaaatattgggggctggttcccccgataaaacctgatatgtgggacttgatactagcactgcagatcaagtagggaaagtgactgatattcaatgatggtgttagaacatatgatttctcataagaaaaaatataaacatatataccatctagga

SEQ ID NO: 179016 - DNA, 598 bp, Homo sapiens
tctgtcttatgcagttgaaataaggactgaaatacaccctggtctcctgcagtaccctcaggcttgctaggattgggaaattccagcctggtgaattctagtcagactggtctctgctcttgaaccttgttttctgttaagatgtttatcaagacaatgtgtgcacagtgggacacagaccctcatcagtggttctaattttgccttcaccttgtgatctttatgaccctttgaagcatgtgatccttatgacctactccctgttcatrcaccccttcccctttcaaaatccctaataaaaactggctggttttgcagctcaaggtcgccatcatggtccaatgtgatggcacccccagaggccaagctgtaaaatttctttctttttaccctttatttctcagaccagccaacacttaaggaaaatagaaagaacctacgttgaaatattgggggctggttcccccgataaaacctgatatgtgggacttgatactagcactgcagatcaagtagggaaagtgactgatattcaatgatggtgttagaacatatgatttctcataagaaaaaatataaacatatataccatctagga

SEQ ID NO: 179017 - DNA, 598 bp, Homo sapiens
tctgtcttatgcagttgaaataaggactgaaatacaccctggtctcctgcagtaccctcaggcttgctaggattgggaaattccagcctggtgaattctagtcagactggtctctgctcttgaaccttgttttctgttaagatgtttatcaagacaatgtgtgcacagtgggacacagaccctcatcagtggttctaattttgccttcaccttgtgatctttatgaccctttgaagcatgtgatccttatgacctactccctgttcatgcaccccttcccctttcaaaatccctaataaaaactggctggttttgcagctcaaggtcgccatcatggtccaatgtgatggcacccccagaggccaagctgtaaaatttctttctttttaccctttatttctcagaccagccaacacttaaggaaaatagaaagaacctacgttgaaatattgggggctggttccccygataaaacctgatatgtgggacttgatactagcactgcagatcaagtagggaaagtgactgatattcaatgatggtgttagaacatatgatttctcataagaaaaaatataaacatatataccatctagga

SEQ ID NO: 179018 - DNA, 454 bp, Homo sapiens
gatcacagcaggagtgttctggaatcctatgtgattaacgaacattcagacaacagcagcaatgttctggaatactatgtgagggacaaacactcagaatctagcagcagtgtctggaatcctatcagaggggcaaacattcagaccacagcaggagggttctggaatcctgtgtgaggtacaatcattcagactctcgtagtagtgttctggaatcctgtgtgagggagaaacactcagaacccagtagcagtgttctggyactgtatgtgagggacaatcattgagacctcagcaggggtgttctggaatcctacatgtgggacaaacattcagaccctcgtagcattgttgtggaatcctatgtgaggaaaatacgttcagaaaacagcaggattgttctggagtcctatgtgcggtacattcagaccctcgtagtagtgttcttgaattc

SEQ ID NO: 179019 - DNA, 457 bp, Homo sapiens
gaattctatatgaagcacaaacattcagatcacagcaggagtgttctggaatcctatgtgattaacgaacattcagacaacagcagcaatgttctggaatactatgtgagggacaaacactcagaatctagcagcagtgtctggaatcctatcagaggggcaaacattcagaccacagcaggagggttctggaatcctgtgtgaggtacaatcattcagactctcgtagtagtgttctggaatcctgtgtgagggagaaacactcagaacccagtagcagtgttctggcactgtatgtgagggacaatcattgagacctcagcaggggtgttctggaatcctacatgtgggacaaacattcagaccctcgtagcattgttgtggaatcctatgtgaggaaaatackttcagaaaacagcaggattgttctggagtcctatgtgcggtacattcagac

SEQ ID NO: 179020 - DNA, 413 bp, Homo sapiens
gagctcacagcgtcttgcgacttgraagcggattcagaggacaggacagaacacttgggcaagtgaatctctgtctgtctgtctgtctgtctgtcccattggttggttgatttccatttccttaaggggcccatacctcacaccgcacacacacaaacacacacacacacacacacgcacacgcacacacgcacacacactccttccttctgcgagttagaacattagtgggggcccctgggagctgcaggtttcctaatcatgtctgcacctaagaacagtagggtcttgtctggctcttcttatgaacggtcccccagcacggacaccccaaggtccatgcgagcctcacccagcttctccctctcccctctcagaaactcaggcttaaggggaagctcctcaccagggat

SEQ ID NO: 179021 - DNA, 445 bp, Homo sapiens
cagtactcgctgctttatcttgcgcttttatgttatggagatgacttttttccttaaacctcaagaaacaagctcttctagcttcagacttttcttctgcagctgcctcacctctctgagtcttcatagaattgaagagagrctggatgcggtggctgtcacacctgtaatcctagcaatttgggaggccgaggcgggcagatcacctgaggtcgggagttcgacaccagtctgaccaacgtggagaaaccccatctctactaaaaatataaaaaatcagccaggcgtggtggcgcatgcctgtaatcccagctactcgggatgctgaggcaggagaatggcttgaacttgggaggcagaggttgcgataagccaagattgcgccattgcactccagcttgggcaagaagaatgaaactctgtcttaaaaacaaagaaaaaaagt

SEQ ID NO: 179022 - DNA, 445 bp, Homo sapiens
cagtactcgctgctttatcttgcgcttttatgttatggagatgacttttttccttaaacctcaagaaacaagctcttctagcttcagacttttcttctgcagctgcctcacctctctgagtcttcatagaattgaagagagactggrtgcggtggctgtcacacctgtaatcctagcaatttgggaggccgaggcgggcagatcacctgaggtcgggagttcgacaccagtctgaccaacgtggagaaaccccatctctactaaaaatataaaaaatcagccaggcgtggtggcgcatgcctgtaatcccagctactcgggatgctgaggcaggagaatggcttgaacttgggaggcagaggttgcgataagccaagattgcgccattgcactccagcttgggcaagaagaatgaaactctgtcttaaaaacaaagaaaaaaagt

SEQ ID NO: 179023 - DNA, 445 bp, Homo sapiens
cagtactcgctgctttatcttgcgcttttatgttatggagatgacttttttccttaaacctcaagaaacaagctcttctagcttcagacttttcttctgcagctgcctcacctctctgagtcttcatagaattgaagagagactggatgcggtggctgtcacacctgtaatcctagcaatttgggaggccgaggcgggcagatcacctgaggtcgggagttcgacaccagtctgaccaacgtggagaaaccccatctctactaaaaatataaaaaatcagccaggcgtggtggygcatgcctgtaatcccagctactcgggatgctgaggcaggagaatggcttgaacttgggaggcagaggttgcgataagccaagattgcgccattgcactccagcttgggcaagaagaatgaaactctgtcttaaaaacaaagaaaaaaagt

SEQ ID NO: 179024 - DNA, 398 bp, Homo sapiens
catttcacttgtgtataagcatacataatctatctgtgtgtatttgttattgtctgtgaacttcttggtcagatcaattaagaataaatatataggtttttattgtaccgcaattctttctttaatgatctttttaaaaaattgttgatccaagtttcagttaaayatcttttgtttccctctaaagaatttcatttaacatttcttgcaagacaggtctcctggcaacaagtttcttgaatttttatttttctgaggaaggccttaattctccttcacttttgaagggtggtttcagtgtgtacagaaacttaggttggtggggttttttctgtcaatattttcaatttttcatttcactgtcttcttgctttcacaatttctgcaatgttgaatgc

SEQ ID NO: 179025 - DNA, 491 bp, Homo sapiens
tggaattctatgtgagggaaagacattcaaaccccagcagcagtgttctggaatccgatttgaggggcagacattcagaccccagcagcagtgttctggaatcctatgtgagggacaaacattcagaccccagcagcagtgttctggaatcctatgtgaaggaaaaatattaagaccctcgtagcagtgtcctggaatcatatggaagggacaaccattcagacaccagcagaagtcttctggaatcctaggtgtgggaaaaacattcagaacctagtagcagtgttctggaatcctatgtgagggacatacattcagaccacggcagcagtgttctggaatggtatgtgaaggacaaayattcagacccttgtagcagtgttccggaatcctatgtgagggacaaacattcagaccacggcagcagtgttccggaatcctgtatgacggaccaacattcagacccttgcaacagtgttctggaatactag

SEQ ID NO: 179026 - DNA, 446 bp, Homo sapiens
attccagaacacctctgctggattctcaaagtttatccctcacatatgattccaggacactgctacgagggtatgaatgcttgtccttcacataggattccacaacactgctacgagggtctgagtgtttctccctcacatagtattccagcacacttctgctggtgtctgaatgtttgtacctcacatcacattccagaacactgctgctggggtttgaatgtctgtccctcacatagaattccagaacactgctgggagggtctgaatgtatgtctctcctatgggattccagaacactgctccaagggtctaaatatctctccctcacataaaattccagcacacggctaygaagttctgaatgtttgtccctcacataggattccagagcccccttgctgtggtctgaacgtttgtccctcacataggatttcaaaacactg

SEQ ID NO: 179027 - DNA, 246 bp, Homo sapiens
cttggaatcagtccccttggatactgaggaagtaatgtaatgtaaaaatgataggtgcataaaaatttttgaaattargtcaaatatttaaatgcagaatcactgcataatcaattccttaaatattgcatttagctttcatcactgaccaggatcattcatctaggcatggtgctgtccagagttccattaaagtagtgtgtgttctctttgcctttgtcagtagacttctgatactttctcata

SEQ ID NO: 179028 - DNA, 246 bp, Homo sapiens
cttggaatcagtccccttggatactgaggaagtaatgtaatgtaaaaatgataggtgcataaaaatttttgaaattaggtcaaatatttaaatgcagaatcactgcataatcaattccttaaatattgcatttagctttcatcactgmccaggatcattcatctaggcatggtgctgtccagagttccattaaagtagtgtgtgttctctttgcctttgtcagtagacttctgatactttctcata

SEQ ID NO: 179029 - DNA, 246 bp, Homo sapiens
cttggaatcagtccccttggatactgaggaagtaatgtaatgtaaaaatgataggtgcataaaaatttttgaaattaggtcaaatatttaaatgcagaatcactgcataatcaattccttaaatattgcatttagctttcatcactgaccaggatcattcatctaggcatggtgctgtccagagttccattaaagtrgtgtgtgttctctttgcctttgtcagtagacttctgatactttctcata

SEQ ID NO: 179030 - DNA, 246 bp, Homo sapiens
cttggaatcagtccccttggatactgaggaagtaatgtaatgtaaaaatgataggtgcataaaaatttttgaaattaggtcaaatatttaaatgcagaatcactgcataatcaattccttaaatattgcatttagctttcatcactgaccaggatcattcatctaggcatggtgctgtccagagttccattaaagtagtgtgtgttcwctttgcctttgtcagtagacttctgatactttctcata

SEQ ID NO: 179031 - DNA, 417 bp, Homo sapiens
acctgccagttgctgacccaagaaaaactggctattttcaaggaakaatgatgaaaaaatagcaactactaaaacagccactattgttatatgaataaatagaaaaaaaagagagaaaacaaatgacggataatgagcacttattaaaacctatgagtaggaagtagatgcatattattaccaaataattctttgtgaaataaaaaagaaaaggaaaacttcaaaatgcaaagaaaaactcaattgaacattagaaaatatactgatttattacatgatgtcagaaggaacaggaaccatatgcatataaaaccaatacccattattaatttttatcaaatcttactccactgggataggaagtaatttttttcacctttacacaagcattctttaagacatgctcctgtgtggttc

SEQ ID NO: 179032 - DNA, 417 bp, Homo sapiens
acctgccagttgctgacccaagaaaaactggctattttcaaggaataatgatgaaaaaatagcaactactaaaacagccactattgttatatgaataaatagaaaaaaaagagagaaaacaaatgacrgataatgagcacttattaaaacctatgagtaggaagtagatgcatattattaccaaataattctttgtgaaataaaaaagaaaaggaaaacttcaaaatgcaaagaaaaactcaattgaacattagaaaatatactgatttattacatgatgtcagaaggaacaggaaccatatgcatataaaaccaatacccattattaatttttatcaaatcttactccactgggataggaagtaatttttttcacctttacacaagcattctttaagacatgctcctgtgtggttc

SEQ ID NO: 179033 - DNA, 417 bp, Homo sapiens
acctgccagttgctgacccaagaaaaactggctattttcaaggaataatgatgaaaaaatagcaactactaaaacagccactattgttatatgaataaatagaaaaaaaagagagaaaacaaatgacggataatgagcacttattaaaacctatgagtaggaagtagatgcatattattaccaaataattctttgtgaaataaaaaagaaaaggaaaacttcaaaatgcaaagaaaaactcaattgaacattagaaaatatactgatttattacatgatgtcagaaggaacaggaaccatatgcatataaaaccaatacccattattaatttttatcaaatcttactccactgggataggaagtaatttttttcacctttacacaagcattctktaagacatgctcctgtgtggttc

SEQ ID NO: 179034 - DNA, 440 bp, Homo sapiens
ctggtgaggagcttccccttaagcctgagtttctgagaggggagagggagaagctgggtgaggctcrcatggaccttggggtgtccgtgctgggggaccgttcataagaagagccagacaagaccctactgttcttaggtgcagacatgattaggaaacctgcagctcccaggggcccccactaatgttctaactcgcagaaggaaggagtgtgtgtgcgtttgtgcgtgtgcgtgtgtgtgtgtgtgtgtgtgtgtttgtgtgtgtgcggtgtgaggtatgggccccttaaggaaatggaaatcaaccaaccaatgggacagacagacagacagacagacagagattcacttgcccaagtgttctgtcctgtcctctgaatccgctttcaagtcgcaagacgctgtgagctccaagtccacgcagagtccgccaaacgc

SEQ ID NO: 179035 - DNA, 440 bp, Homo sapiens
ctggtgaggagcttccccttaagcctgagtttctgagaggggagagggagaagctgggtgaggctcgcatggaccttggggtgtccgtgctgggggaccgttcataagaagagccagacaagaccctactgttcttaggtgcagacatgattaggaaacctgcagctcccaggggcccccactaatgttctaactcgcagaaggaaggagtgtgtgtgcgtktgtgcgtgtgcgtgtgtgtgtgtgtgtgtgtgtgtttgtgtgtgtgcggtgtgaggtatgggccccttaaggaaatggaaatcaaccaaccaatgggacagacagacagacagacagacagagattcacttgcccaagtgttctgtcctgtcctctgaatccgctttcaagtcgcaagacgctgtgagctccaagtccacgcagagtccgccaaacgc

SEQ ID NO: 179036 - DNA, 263 bp, Homo sapiens
tttaaatagcctcgggcgcagcctagcagcggaaagggcggagcttcactcctcctttccatcrgtcacccccaactttcccaggctacacctcgtaggaaactgttctcctgctttgatttcatgcgccacctttgggacaatctaagaacttacaggttttcttggccagatttattaggaattgtatgcactgaaacactgaaaaccaactagtggttctgtgcttcccacgttgtggttttgacaccagcagcatcctt

SEQ ID NO: 179037 - DNA, 253 bp, Homo sapiens
ggtgggtttaaatagcctcgggcgcagcctagcagcggaaagggcggagcttcactcctcctttccatcagtcacccccaactttcccaggctacacctcgtaggaaactgttctcctgctttgatttcatgcgccacctttgggacaatctaagaacttacargttttcttggccagatttattaggaattgtatgcactgaaacactgaaaaccaactagtggttctgtgcttcccacgttgtggttttga

SEQ ID NO: 179038 - DNA, 253 bp, Homo sapiens
ggtgggtttaaatagcctcgggcgcagcctagcagcggaaagggcggagcttcactcctcctttccatcagtcacccccaactttcccaggctacacctcgtaggaaactgttctcctgctttgatttcatgcgccacctttgggacaatctaagaacttacaggttttcttggccagawttattaggaattgtatgcactgaaacactgaaaaccaactagtggttctgtgcttcccacgttgtggttttga

SEQ ID NO: 179039 - DNA, 253 bp, Homo sapiens
ggtgggtttaaatagcctcgggcgcagcctagcagcggaaagggcggagcttcactcctcctttccatcagtcacccccaactttcccaggctacacctcgtaggaaactgttctcctgctttgatttcatgcgccacctttgggacaatctaagaacttacaggttttcttggccagatwtattaggaattgtatgcactgaaacactgaaaaccaactagtggttctgtgcttcccacgttgtggttttga

SEQ ID NO: 179040 - DNA, 253 bp, Homo sapiens
ggtgggtttaaatagcctcgggcgcagcctagcagcggaaagggcggagcttcactcctcctttccatcagtcacccccaactttcccaggctacacctcgtaggaaactgttctcctgctttgatttcatgcgccacctttgggacaatctaagaacttacaggttttcttggccagatttattaggaattgtatgcactgaaacactgaaaaccmactagtggttctgtgcttcccacgttgtggttttga

SEQ ID NO: 179041 - DNA, 249 bp, Homo sapiens
ttaaatagcctcgggcgcagcctagcagcggaaagggcggagcttcactcctcctttccatcagtcacccccaactttcccaggctacacctcgtaggaaactgttctcctgctttgatttcatgcgccacctttgggacaatctaagaacttacaggttttcttggccagatttattaggaattgtatgcactgaaacactgaaaaccaactagtggttctgtgsttcccacgttgtggttttgacac

SEQ ID NO: 179042 - DNA, 510 bp, Homo sapiens
aggctaggtttgctttctgctttatgtgttctaggatggctttttcttaaagaatctatcaccaaggagcagtcactaacagaaaaagttgtcttaattgtgaaacatcaacctggcaatgccaataactaaggcccagaatgyagaaaaccagctaacatttccctctgtcaggcaatgcaagtaactaacttctttgcttcttagaggatgtatctctatcaagattttagtccagtagacttagcctaatttaaatcgttggctctatttttaaaaagtgctaaaataatttctcaagtccaaaaattcatattactctctaggcaaaatttcagatgcattttagaatatatgactacagtaagttttggatatatataggtttagaaagagaagatataactaaaataacaaggctatttcttatgtcacaaataaaaatcaggtttcttacttaataatagcccctacacttccatctccatttatatatacattgtaatgctc

SEQ ID NO: 179043 - DNA, 551 bp, Homo sapiens
tatgggggaaaacatccccatgattcaattatctcccactgggcccctcccacatcacatgggatttatgggagctacaattcaagatgagatttgggtgggggcacaaatcctaaccatatcagtggggtcactaaggtatataggtatatagtgtagtaagatggtgtcacctgaatcacatttacactctgccccggcacagaaccctgggagctgaatattgaggagcagagaggaacagggatcagaggcacaaaatttggcttgctcttgtagatagcaatagagatgggcacaaggctgagtgaaatctcatcagagtagtgagtgcttagcacatataaggcactgtccttagtgccgtaagagatawcaagagaaggtaagatagattaaaatgtattgtgtttgttttatgttactcactttatacatactagcagtcaatcaataataataacaatgataagtgctttgaagtacctactatgggccaggcaatgtgcttaatacttcatatcttcttttcttttatttcatgcactcat

SEQ ID NO: 179044 - DNA, 575 bp, Homo sapiens
aatttgaccaacaaacattcatctcaatcagtggtasgctggagccagcatgtaccagtttgcaaaagcagaggatcaaatttacaggaattttgccagacagttatgaaacacagtcattattaaaattgaattacacaaacgtaaatgtattaaaaataaaggtaataaataatcccttatttctcatcccccccttctttctttttttctgactacattctggctttctttgcttcccagacaaggtggcagaaatcaccattcccagatcctgagtttatgagttctgtctattaaccagccacaccgaaactgtaatctctcagtcttgattccagattcccagggaaggagctcattggctcaggttgttctagatacccagctctagacttatcaaagatttttctataaaataaagatatgggagatatggaagccagaccaaaataaaaagcctacatctctaggtccatttttttcttagggcaaaagaatacatcatttgtgcccagaatgcactgggtattgaagagatgacaactgtcttctgccaccagccatccaaaact

SEQ ID NO: 179045 - DNA, 575 bp, Homo sapiens
aatttgaccaacaaacattcatctcaatcagtggtacgctggagccagcatgtaccagtttgcaaaagcagaggatcaaatttacaggaattttgccagacagttatgaaacacagtcattattaaaattgaattacacaaacgtaaatgtattaaaaataaaggtaataaataatcccttatttctcatcccccccttctttctttttttctgactacattctggctttctttgcttcccagacaaggtggcagaaatcaccattcccagatcctgagtttatgagttctgtctattaaccagccacacygaaactgtaatctctcagtcttgattccagattcccagggaaggagctcattggctcaggttgttctagatacccagctctagacttatcaaagatttttctataaaataaagatatgggagatatggaagccagaccaaaataaaaagcctacatctctaggtccatttttttcttagggcaaaagaatacatcatttgtgcccagaatgcactgggtattgaagagatgacaactgtcttctgccaccagccatccaaaact

SEQ ID NO: 179046 - DNA, 610 bp, Homo sapiens
acatcattagctattagggaaatgcaaactaaaaccaccatgaaggccagccacggtggctcacacctgtaatcctagcactttgggaggttgaggggagaagatcacttgactccaggagtttgagaccagcctggccaacatggtgaaaccctgtctctacagaaaatacaaagaattagccaggtgtggtggcgtgtgcctgtagtcctgactacctgggaggcttgagaggcgggaggatcacctgagccagggaggttgaggctgcagggaaccatgatcatgccactgccctccaccctgggtgacagagcgagaccttatctcaaaaaaaaaaaamaaaacaaaaacaacaacaaaacacaatgagatatcactatactcctatcaaaatggcaaaactaaaaaatagtgatagcatcaaatgctgacaaggatgcagaaacactggatcattcattcatggctgctaggaatgtaaaatgatacagtcagtctggaaaataattttgcagaccttttaaaactaaaactaaaactaccatacagcccagcaactgataacccttgggcatttaccagagatataaaaatttatttttgcaca

SEQ ID NO: 179047 - DNA, 484 bp, Homo sapiens
tttataattaaaaaactcaacaggaagggcatctatgaaagaatccacagctaacattatacttaatggtgaaagacaagatgcttttcttaaggaacaagaaaagaatatctacacttcaaattcaatagcatatgaaaasggttttacataatgatcaagtggggtttattcctggaatgcaaggatggttcagtgtatgaaattcaatataatacaccacattaacagaatgaaaaaaactacatgatcatctgaatggatgtagaaaagacatttgacaagtttcaacaacatttcatgataaaaaacactcaactaggaatggaaggaaactatctcaacataatgaagaccatatatgaaaaacccaccactaacatcacattcaatggtgaatgactgaaagcttttcctctaagatcaggaacaaggcaattcttgccacttctactcaacatagtactagaagtactagccagag

SEQ ID NO: 179048 - DNA, 593 bp, Homo sapiens
gatacttggctatttgtacctcacctgcccatgaaggctaaaaatggatggttaaacacctgtctctgtgctcatgatgaaaatgacctttgcaaaaaaaaaaaaaaaaaaaagaataaacaaaagaaacacaaacaaaaaaactttagaaaataacctttgcttctagaccttctaaatttttctgaatggagagttttgtggtttccaaaagtgaaatagtagaagcaggaagaaaatattctcttacctaggtgcaaaactggcccaggccaaattctaatagacacttgcctttggcagtctcccagttgtctctcttcatgtttcccccacctttgtctgcccsctccttagttgtgtgttgagctcctcactgtgccattttcctcaggtctgtagacatgcctcttcttatgccccacaaaatcccctccagtttcctcctaatattatctataaagcagaagaaaatagcctgatctgtagagtgaagggggattaggctctaacgtcagtgtattagccctactgctgaaaattcctgaaattcttaatcgattacaatagtgttccatacttaaatacagcac

SEQ ID NO: 179049 - DNA, 593 bp, Homo sapiens
gatacttggctatttgtacctcacctgcccatgaaggctaaaaatggatggttaaacacctgtctctgtgctcatgatgaaaatgacctttgcaaaaaaaaaaaaaaaaaaaagaataaacaaaagaaacacaaacaaaaaaactttagaaaataacctttgcttctagaccttctaaatttttctgaatggagagttttgtggtttccaaaagtgaaatagtagaagcaggaagaaaatattctcttacctaggtgcaaaactggcccaggccaaattctaatagacacttgcctttggcagtctcccagttgtctctcttcatgtttcccccacctttgtctgcccgctccttagttgtgtgttgagctcctcactgtgccattttcctcaggtctgtagacatgcctcttcttatrccccacaaaatcccctccagtttcctcctaatattatctataaagcagaagaaaatagcctgatctgtagagtgaagggggattaggctctaacgtcagtgtattagccctactgctgaaaattcctgaaattcttaatcgattacaatagtgttccatacttaaatacagcac

SEQ ID NO: 179050 - DNA, 572 bp, Homo sapiens
cgcttcttcactccccaacatcatcacctggttttacttattatgattcaattttcggccacttcctccatgaagrttttctgactttccttagaccaaatgagttacttgtgctgcatttttcccaaacaccagcattgcccatgccatagcacttatcagagtttattaaaatcacgtgttaatttctacaaggtctgggagggtcgtattattgctcctatttgctcactattgtatcttcaagacccagatcagtgccagtcacaaagtagtcattttgttattcttgtttttaagttatagaatgaatacaagaataaatgaataaatcagcctaaatttttctgtatctggaacattcaggaaatgtgatagttaagaaatatgttaatgttttatgtgtgtacacctcagatatgcctgagaaacagaaataaccaatggaaatatttttattttagttatctaaatctttacttatctgtcttggccctaattgactaaaactatatctgattttttaaaaattctcaaatgtttgattcagtatctgtgcagactgagacaca

SEQ ID NO: 179051 - DNA, 572 bp, Homo sapiens
cgcttcttcactccccaacatcatcacctggttttacttattatgattcaattttcggccacttcctccatgaagattttctgactttccttagaccaaatgagttacttgtgctgcatttttcccaaacaccagcattgcccatgccatagcacttatcagagtttattaaaatcacgtgttaatttctacaaggtctgggagggtcgtattattgctcctatttgctcactattgtatcttcaagacccagatcagtgccagtcacaaagtagtcrttttgttattcttgtttttaagttatagaatgaatacaagaataaatgaataaatcagcctaaatttttctgtatctggaacattcaggaaatgtgatagttaagaaatatgttaatgttttatgtgtgtacacctcagatatgcctgagaaacagaaataaccaatggaaatatttttattttagttatctaaatctttacttatctgtcttggccctaattgactaaaactatatctgattttttaaaaattctcaaatgtttgattcagtatctgtgcagactgagacaca

SEQ ID NO: 179052 - DNA, 584 bp, Homo sapiens
gcactggccactcccagccagggccactgkggggcgtggggagacccaggtgggggcaggcccccggcacatgtgtctgggagtgggagagggtcccagctaggggctgcactgtggagtcagcggcagtcacagcccaccctgccctgctacgttcacctcccaccgtacccccgctccagagaggggttcaaggctggtcagttgccttgaaaaccgagggaaggtgtcctgcctgtcatcgagctgtgatgtcctcagtggcccagagccgggaagggcaggctctggggacaggcccatgtctgtgtccccccaggagggcagcccaggcatcaccctcccttcttccctccacaggcccctccctgagctgcttccactggcccagaggtgtccaggcctgcgcccgcctgcagcagctcctggagtggatgcggagcgccggcttcggggcggctggagagcacttcttccagaagctctcctgcaccctcaacctgctggccacacccagggcccagctcatccaggtaggggtgcgcatgggaggcggcgagtgtggggaggggcggggccacatg

SEQ ID NO: 179053 - DNA, 578 bp, Homo sapiens
cttcttccaaacttttttaaacgttaatactttgacctcctcacatgaaacatgaatgttcttaagggtacttaaaatggttaatcctttccagtttcccaatgtactttgcccagatccatcagaggaattactatctatggaagctatagccttacaaaatatattgcttamataataagacttgaaagtcaaaaatatttcttgatccataggcaatggagccaaccaatgaatgatgtgttagcaggcatgaaaataacattaatctgagcttctctcagtaaacaaggatcaagtacatacccatccctgttggctgtagctcctcttacccaaaagcaccatctactggcctgtaggttacaccacacagcccaatataaaacctgctgacagaagcgcacatagctacagagcaaagtcaaaagactctacccaatattctgtacagtcacacccctgtaatgataaaggttagaaatagtttgtcttgaggccatgtcagagaccttcacggcagctcctcccatcataggcctagaggcccaggaggaaaaagtgatttttttggactg

SEQ ID NO: 179054 - DNA, 578 bp, Homo sapiens
cttcttccaaacttttttaaacgttaatactttgacctcctcacatgaaacatgaatgttcttaagggtacttaaaatggttaatcctttccagtttcccaatgtactttgcccagatccatcagaggaattactatctatggaagctatagccttacaaaatatattgcttacataataagacttgaaagtcaaaaatatttcttgatccataggcaatggagccaaccaatgaatgwtgtgttagcaggcatgaaaataacattaatctgagcttctctcagtaaacaaggatcaagtacatacccatccctgttggctgtagctcctcttacccaaaagcaccatctactggcctgtaggttacaccacacagcccaatataaaacctgctgacagaagcgcacatagctacagagcaaagtcaaaagactctacccaatattctgtacagtcacacccctgtaatgataaaggttagaaatagtttgtcttgaggccatgtcagagaccttcacggcagctcctcccatcataggcctagaggcccaggaggaaaaagtgatttttttggactg

SEQ ID NO: 179055 - DNA, 578 bp, Homo sapiens
cttcttccaaacttttttaaacgttaatactttgacctcctcacatgaaacatgaatgttcttaagggtacttaaaatggttaatcctttccagtttcccaatgtactttgcccagatccatcagaggaattactatctatggaagctatagccttacaaaatatattgcttacataataagacttgaaagtcaaaaatatttcttgatccataggcaatggagccaaccaatgaatgatgtgttagyaggcatgaaaataacattaatctgagcttctctcagtaaacaaggatcaagtacatacccatccctgttggctgtagctcctcttacccaaaagcaccatctactggcctgtaggttacaccacacagcccaatataaaacctgctgacagaagcgcacatagctacagagcaaagtcaaaagactctacccaatattctgtacagtcacacccctgtaatgataaaggttagaaatagtttgtcttgaggccatgtcagagaccttcacggcagctcctcccatcataggcctagaggcccaggaggaaaaagtgatttttttggactg

SEQ ID NO: 179056 - DNA, 571 bp, Homo sapiens
ggatataaaaaaaaagaacgctagaaactgaggactaagtgggggactactacagagggaatgggacaaaggctaaaaagctacatattgggtaatatgctcactacctgggtgatgggattgtttgtaatgcaaacctcagcatcacacaatgtactcatataacaagcctgcacatgtacctcatgaatctgaaatagaagttaaatttatttaaaaaacaatgagatactatttcacaccacctggatggttacattaaaaatgacaaataataatatgttagcaaaggtgttagaaatctsattctctcatacactagtgatgggaatgtaaaacggtgcacgttgtcattcctcaaaaagttaaatatagagttaggatataacccaaaattgcactcctaagtatatacccaagaaaaatgaaaacatatgcccatataaaaacttgtatatgaacgttcataacagcattagtcataatagcaaaaaagtcaacaccccaaatgtccatcaactcattaatagataaataaaatgtgctaaatccatacagtggaatattattc

SEQ ID NO: 179057 - DNA, 542 bp, Homo sapiens
gtagctttccctcaagttctgaattaatgaagtttacacatgagcttttctagtagtttttgaaaatttgattcaaaaaatatttagcagayacaggttttatgctattgttcatacgtttatatgcaatctaagtaagctgcaacatagattcatactacatatttataaactgataaaatctatttgagctttacaatctattgatataacctagtctaacccagggcttctcaacctcggtggtatggacatggtggtctggataatcttttctgttgatggggctgtcccgtgcattgcaggatgtttagcaacatctctgacctgtacacacaaattgctagtaccaactccacccgctctgtgacaaccgaaaatttctccagacaggaccaaatgtctcctggtggaaaaatatcccctagttaagagacatagggctattcaataaatggggctcacaaagcatttctttattttaaaaaaaattaactgtttagtctaactcattagctcagctgtttagagtgcagtactaa

SEQ ID NO: 179058 - DNA, 613 bp, Homo sapiens
gctgacaaaggaggaaaaggaccaagcttggttcagtgatgggttggcttsgtatgtggaataatgaaaatggattggtgctgaactcaaaacccattgaggggtgccactgagaatagtaatgaggttaattagcccaatgaacagagctttggtcaatgaacctggacatccactttgtattagaagagaagtggcctgaagtaaggaaatatatggacatgtaggaaagcaaatggaatagctggtgtgccgggggtctggaaggagaaagattggaatattagatcctaagttgtctggagaagaggcatgagaatggggactatgtcaggggggcaggatatgagattatcttttaattgcaggttattgcctatgacagcattcaccatggatgtggcatttaataaccaaatagacaaaaacgacttggccagttgacatcagcatgcttctgtcactgatattaaaagaaaagaaattgagaatactcttagcctctaaatcctgctagataagcaagttgtttctctgtttaagttgaactccttatagtgccttatatctccattgcattgtacaatttcctacactgctcctgttcatttct

SEQ ID NO: 179059 - DNA, 613 bp, Homo sapiens
gctgacaaaggaggaaaaggaccaagcttggttcagtgatgggttggcttcgtatgtggaataatgaaaatggattggtgctgaactcaaaacccattgaggggtgccactgagaatagtaatgaggttaattagcccaatgaacagagctttggtcaatgaayctggacatccactttgtattagaagagaagtggcctgaagtaaggaaatatatggacatgtaggaaagcaaatggaatagctggtgtgccgggggtctggaaggagaaagattggaatattagatcctaagttgtctggagaagaggcatgagaatggggactatgtcaggggggcaggatatgagattatcttttaattgcaggttattgcctatgacagcattcaccatggatgtggcatttaataaccaaatagacaaaaacgacttggccagttgacatcagcatgcttctgtcactgatattaaaagaaaagaaattgagaatactcttagcctctaaatcctgctagataagcaagttgtttctctgtttaagttgaactccttatagtgccttatatctccattgcattgtacaatttcctacactgctcctgttcatttct

SEQ ID NO: 179060 - DNA, 607 bp, Homo sapiens
aataaataacaaagatcagagcagaactaaataaaattcaaacaaaaaaccacaaaagatcaatgaaacaaaaagctgatactttgaaaatataagcaaaatagatagatcattagataggttaacaagaaaagaagaggaaagatccaaatgagaaattagattcaattagaaacgaaactggagacattacaaccaacaccataggaatataaaagtttatttgtgactactatgattatctttatgcacccaaggtagaaaacttagaggaaacagataaattcctggagacatataaccctcctagatgaaatcaggaagacatagaaaccccaaacagaccactaataagcagcaagattgagtcagtaattttaagattgccaacactaaaaagcccaggaccagatggattcacagctgaattatagcacacattcaaagaattggtaccaactttaatgaaattatttcaaragattgagaaagagggaatccccccctaaatcattgtgtgaggccattatcaccctgataccaaaaccaggaagggacacaacaacaaaaaagaaaattacagaccaatttccctgttgaacataga

SEQ ID NO: 179061 - DNA, 575 bp, Homo sapiens
taccaagctacaagttagagagtagggtccaggagtatgaaatgaagcaattgtaacagtgatggatcagggctgaagcagtscgcaaggttaactccaaagggtgtctcctgaggaaatcacactttacctaaggacaatatccatcagagttttaaaggattgctgagcctgccagttggcagtgtgtgtgcatgtgtgaagacacatgtgtgtctggggagagagtcatgtgacttgggatatgggcattgaagacaggcaagagttatatttaagccagatgaaaaagaaattgcctagagtgatttattaggcaataagttattagatcatcagtgggctcttatgtggcaaagaatctgtttgtttcttcattttacttatatacatgtttgcttttcatgtctttcttccaaaaatgttttgaagtcactaaaaagtattcaaaattgactctgtatggattcagaagtcagaactaggacaaatggtgaatattattagaaatccatcctgccagacactgtggctcatgcctgtaatcacaacattttgggaggctgaagcaggcc

SEQ ID NO: 179062 - DNA, 510 bp, Homo sapiens
gctataatcaatacagtcaaatttcagcactttcctaaaattaatactgaaagtccagaagggaaaataattgtacatttaaaaatacagagcaggtaataatgctttttgacagcttatggtactgatcactaaccaaaatggcttgataaatacaattttacttgaaatttcagatcattatctctcccgatgaagatgaaagatattgctacaagatattcccagcttctagcatccactaaagtgggtagccaatgtgtttacagttgcctgtaaaayataatcccatgtacataaccctgtgtttctactggtgtgctttgttttcttggtgattgtcatgaacttttcagactgcagtgaagactgaggctacaacccaaagatggacgatgctcaggaacaaaaacagccaagttgcaaatacaccaaacttcaaacagaaatctaatcacatctgtttatcaaagtataaatctcattgcaccaacatgttacacacagact

SEQ ID NO: 179063 - DNA, 510 bp, Homo sapiens
gctataatcaatacagtcaaatttcagcactttcctaaaattaatactgaaagtccagaagggaaaataattgtacatttaaaaatacagagcaggtaataatgctttttgacagcttatggtactgatcactaaccaaaatggcttgataaatacaattttacttgaaatttcagatcattatctctcccgatgaagatgaaagatattgctacaagatattcccagcttctagcatccactaaagtgggtagccaatgtgtttacagttgcctgtaaaatataatcccatgtacataaccctgtgtttctactggtgtgctttgttttcttggtgattgtcatgaacytttcagactgcagtgaagactgaggctacaacccaaagatggacgatgctcaggaacaaaaacagccaagttgcaaatacaccaaacttcaaacagaaatctaatcacatctgtttatcaaagtataaatctcattgcaccaacatgttacacacagact

SEQ ID NO: 179064 - DNA, 456 bp, Homo sapiens
tcatcaggtagctgctgcattttatcaccattatattaacattatcatgacaaggttgaaaactcagcacgggcaagatttgcaagttactgtgcaagtgtgactcttaattatargtaacaattcattttgaggtacattagtatgcctcaaaatagaatctaaaaccttatttctatgtaattataattaaataattataaggaatcattttaaaattttatagaaaacagaatctcttaagggttttatcttcaggttaattaaaaatggtttattttatttcttggttaattactgaaatttagaatccataaatagacatactgaaggaaatacttttgttgtctacgaagttctaaatcagtggtgaattcatgaaatgtttgcccatgtggtacacaatgaaagtcatcacatgaagagctttttacccaattaaagagaaaataagtc

SEQ ID NO: 179065 - DNA, 456 bp, Homo sapiens
tcatcaggtagctgctgcattttatcaccattatattaacattatcatgacaaggttgaaaactcagcacgggcaagatttgcaagttactgtgcaagtgtgactcttaattataagtaacaattcattttgaggtacattagtatgcytcaaaatagaatctaaaaccttatttctatgtaattataattaaataattataaggaatcattttaaaattttatagaaaacagaatctcttaagggttttatcttcaggttaattaaaaatggtttattttatttcttggttaattactgaaatttagaatccataaatagacatactgaaggaaatacttttgttgtctacgaagttctaaatcagtggtgaattcatgaaatgtttgcccatgtggtacacaatgaaagtcatcacatgaagagctttttacccaattaaagagaaaataagtc

SEQ ID NO: 179066 - DNA, 456 bp, Homo sapiens
tcatcaggtagctgctgcattttatcaccattatattaacattatcatgacaaggttgaaaactcagcacgggcaagatttgcaagttactgtgcaagtgtgactcttaattataagtaacaattcattttgaggtacattagtatgcctcaaaatagaatctaaaaccttatttctatgtaattataattaaataattataaggaatcattttaaaattttatagaaaamagaatctcttaagggttttatcttcaggttaattaaaaatggtttattttatttcttggttaattactgaaatttagaatccataaatagacatactgaaggaaatacttttgttgtctacgaagttctaaatcagtggtgaattcatgaaatgtttgcccatgtggtacacaatgaaagtcatcacatgaagagctttttacccaattaaagagaaaataagtc

SEQ ID NO: 179067 - DNA, 330 bp, Homo sapiens
tacttaagtcaacacttctcccacacctgctttagtaaagtaatttcatatatttgtaacacagttagattttgtcatcatagtattcattctattctgggatccactgatgttctaaattttttttttcaattgcatatattaatattcactttgtgcyttaaggtttatgtagattcaaaaaattttacagtatcaagtatccaccgctgcagtatcctaaaaaatagtttcataaataaatgagtagaaaagtatggacaaatttccagtgcagaaaattccaaataacttatgcatatattatacattcaggaagatggaatttaa

SEQ ID NO: 179068 - DNA, 633 bp, Homo sapiens
ctgtttaattttagtatagagttttcagaattgtttgccagtactcacatgaaaaacaactttaacaactagagtattatgctcatttacagttccttttggctttagtcttagtccctacttatttctaaagttacttaagtcaacacttctcccacacctgctttagtaaagtaatttcatatatttgtaacacagttagattttgtcatcatagtattcattctattctgggatccactgatgttctaaattttttttttcaattgcatatattaatattcactttgtgctttaaggtttatgtagattyaaaaaattttacagtatcaagtatccaccgctgcagtatcctaaaaaatagtttcataaataaatgagtagaaaagtatggacaaatttccagtgcagaaaattccaaataacttatgcatatattatacattcaggaagatggaatttaactccttgtttcttaagtatggattgcacatagtgacttcctttttacgagtatagtttggaaagaaggaaaaagagtaatttaattgtggagcaacctgacaaactacttcagcttggtgatcaagattaacatcaatagtaataagtcatgttattggcatgagacct

SEQ ID NO: 179069 - DNA, 410 bp, Homo sapiens
gaatgaaacaaaaaaatacaaaggaaagctttaacagtagattaggtcaagcaggaaaaaaagaatgtctgattgaagacaggtcttttgaaacagcacagkcaggtaacaaaaaaacaaaaataataaaaagaatgaagaatgtctatgtgacacaagggacacatgccatcaagtaaacaaatgttcaagttttgtatgttccagaaggagaagagatgagaaaaggcatagaaaatctatttaatgaaataatagctaaaacttcccaagtctttgaagatttatggacatccaaatccaagaagcttaaagatctccaagcagactcaatcccaaaggtattctctgatgcacattatagtcaaactatctaaagataaagacagaaagataatttttaaaacggc

SEQ ID NO: 179070 - DNA, 433 bp, Homo sapiens
gatttcacagttcaaactttatcccatcattctcacttcacaaaatgcttccatccaccagaaaccccatttctgtgaagaaatgagaaatatatttaccctctaactggcacactacgtattttaagtgctgaccacacaatcttcaaaccattttggtaagacatgcagtragagcatagttagagctgaagattttccttattaaaaattgctgattgcttttcctttcagcataagaatgtgcaccttatatacaaagccctgcaattcgaatgtaattaaaacacatccattacctcacacaaatccaatgacacacaaaagtagtttaaatgggcatatagaccctcaaaagcctttctaacatcaatgggaggtaatttcctgtaattatttgatagtgatcagggccaagaaaatttcatgaaat

SEQ ID NO: 179071 - DNA, 443 bp, Homo sapiens
atcaaccaggcagtgaacacttgatgtggagttctttggcactttatgctttctctttcatatgttttatgctactgggttttaataaagtccaacatggatttatccatccagtgctactcagcttgaagtcccaggtaattatcccaccttcctttacttcctgcctgccaaagtcagatataatgaaaacaaaggttataaaggattcatagctcaaatacctttgtactattttatctgatacttattcgggaacattgcatgcttataggcaccatctccatatttagctgascacactccctttttagttgcatctgatttatctttccccttctcttttaataatattggtttttaaattttcccataaaatgtatagttacaatcccattttaaaagaatcacataatgcttgcttaggaagagcagtttaacat

SEQ ID NO: 179072 - DNA, 600 bp, Homo sapiens
gcagattagacatctgaaatcagtttcattgagataaatcaaagtgacagcaaggctatgtttcttctacagactctaagaataatctgttttcttgctttttccagtttctagaggtcacctgcatgccttggcctgtagatccttcctccatctttaaagctagcagcacagtgccttccaaactctttctctstgaactctgcttcctgactttgcctctctctcataagaattctgtgattccactgggcccacctttataatccacgataatcacttcatctcaagatccttaacctaatccctcatgcaatgtaagataatgtattcttaggttccagagattagaatgtgacatttggtcagggagaattattctgtctaccatgatggcaaaggaaaggttgagttgtagattgaaattcacatatttgtctcagaagttggttacagtatttactgatacagataatgaagggaaagaagggtgaagtaaaagggaatgcatctttgtatggcattttgaatttgtgctaactcaatatgggatatcatatagctgaccaaaagaaaggtggccatatgtactaaaagctt

SEQ ID NO: 179073 - DNA, 600 bp, Homo sapiens
gcagattagacatctgaaatcagtttcattgagataaatcaaagtgacagcaaggctatgtttcttctacagactctaagaataatctgttttcttgctttttccagtttctagaggtcacctgcatgccttggcctgtagatccttcctccatctttaaagctagcagcacagtgccttccaaactctttctctctgaactctgcttcctgactttgcctctctctcataagaattctgtgattccactgggcccacctttataatccacgataatcacttcatctcaagatccttaacctaatccctcatgcaatgtaagataatgtattcttaggttccagagattagaatgtgacatttggtcagggagaattattctgtctaccatgatggyaaaggaaaggttgagttgtagattgaaattcacatatttgtctcagaagttggttacagtatttactgatacagataatgaagggaaagaagggtgaagtaaaagggaatgcatctttgtatggcattttgaatttgtgctaactcaatatgggatatcatatagctgaccaaaagaaaggtggccatatgtactaaaagctt

SEQ ID NO: 179074 - DNA, 600 bp, Homo sapiens
gcagattagacatctgaaatcagtttcattgagataaatcaaagtgacagcaaggctatgtttcttctacagactctaagaataatctgttttcttgctttttccagtttctagaggtcacctgcatgccttggcctgtagatccttcctccatctttaaagctagcagcacagtgccttccaaactctttctctctgaactctgcttcctgactttgcctctctctcataagaattctgtgattccactgggcccacctttataatccacgataatcacttcatctcaagatccttaacctaatccctcatgcaatgtaagataatgtattcttaggttccagagattagaatgtgacatttggtcagggagaattattctgtctaccatgatggcaaaggaaaggttgagttgtagattgaaattcacatatttgtctcagaagttggtwacagtatttactgatacagataatgaagggaaagaagggtgaagtaaaagggaatgcatctttgtatggcattttgaatttgtgctaactcaatatgggatatcatatagctgaccaaaagaaaggtggccatatgtactaaaagctt

SEQ ID NO: 179075 - DNA, 464 bp, Homo sapiens
tataattctttggcattggaaatcttacaagatttatccacagacaactttgctctttgcttggggactagctcctgaccagagtgcaaggagctctaacactaggtatgatgatcccattgaatgaagtggcagagatcagaattcagaaatgggcaccagagaggaggagactaaacagatacagtactcaggtatttatgggaggtttttttctaagtcgttgactgtaggcttgggtgcacaagtacagagtaagactggtaggcttaccagggagtagctgcttcacagttgagagctgaacagagatattaatagtggtgagagacattagagctccatttcagccaaagaggagagaattttcttaaagttgtggatatccatctgaagcaataaaatgcccacctaaggtgtaagaaaaaygtcttataaaagagtcagcaatttttcagggtatg

SEQ ID NO: 179076 - DNA, 597 bp, Homo sapiens
ttgcacactagtaataaccaattggtcttacacatttgaactgagcacatttattctctttgataatgattttctaatattaatttcctgggaatgaggaagaaagggtacaagaaaagatgtaccaaatctatatgtcagctttttcaaagactgtatgacagttgtgactcgaaaagaatccgcaaggtgacagtaatccctttcagaaaggaaaaacgagggcttgctaatttttgaacaagtcttaggatatgtgaaaagattacattctagcaagtagtcacatcacacttctggttggttataagataggcagagctcattctggagggagaggtcctggcaaccactgcagccaaatccttaaaatggccgccaaacttccatcttctagtgactaattcttacacagatttttgcttaaatatagcatcatgaatgcacagctgcagaggatgtgcaaaayagccaaattgtacacattgcaatctgtgaggagatttttctttctttttatgtctggggtgttgtttcaaacaaccatgtggatgctgtctttggcaatctgccatttctctagcacattcataaaac

SEQ ID NO: 179077 - DNA, 605 bp, Homo sapiens
tgtgttttagcatcttctttgttaccaggcaagcccaagccaccgaagtcgctcacctggactacctaattcatcccgacttgaaccctccccagctagacatttgtcgcacagcagcccacacaacagtgacttccagcagcactaagaataaaacttgaacttcctacctttcctaccaggcctacctctccagcctcatccaccctgctctcgccccctcactcagcatagtgcaatcacacctgtgcctcttccgtcctcctacatgtccagtgcattcccatgtggggcttttgcactttctgttctcagcactgaaaactcttccccacatcttcacacgactggctcctcttcatcatycaagtttctgctcatatgtcacctcttgtagagaggccttccccgaaggttttatccaaaacactttctctcaatattttatccaaaacagctctcttctaatcattcaccacgaaaagtactttttgactaccttaaattgccttatttgctcacttgtttatttcccttttccccaacagggaaccttatctgaaatgtccactatagatcccaatacttaaaacagagttgcttgc

SEQ ID NO: 179078 - DNA, 605 bp, Homo sapiens
tgtgttttagcatcttctttgttaccaggcaagcccaagccaccgaagtcgctcacctggactacctaattcatcccgacttgaaccctccccagctagacatttgtcgcacagcagcccacacaacagtgacttccagcagcactaagaataaaacttgaacttcctacctttcctaccaggcctacctctccagcctcatccaccctgctctcgccccctcactcagcatagtgcaatcacacctgtgcctcttccgtcctcctacatgtccagtgcattcccatgtggggcttttgcactttctgttctcagcactgaaaactcttccccacatcttcacacgactggctcctcttcatcatccaagtttctgctcatatgtcacctcttgtagagaggccttccccgaaggttttatccaaaacactttctctcaatattttatccaaaacagctctcttctaatcattcaycacgaaaagtactttttgactaccttaaattgccttatttgctcacttgtttatttcccttttccccaacagggaaccttatctgaaatgtccactatagatcccaatacttaaaacagagttgcttgc

SEQ ID NO: 179079 - DNA, 578 bp, Homo sapiens
tttatgtgacaccactctggataattctcccaatccaccttccacatggcaactggaatactccttctagaaagcataaatctattctttcctctgaatgataaccctttagtggcttcactattagtaaaattaacagttttataagttcttacagtattggctatatctgtgattcaaatgcagtgtaaatcttgaataccataattgttcattcatacctayagcgtacagaaccactttatcttgagcactaaaaagacagcatggtgtaataggaaaagcttggaaatggagagctgccctgccccttatatgtatgaccatagatgggccatttggtctagacctttatttacaaaatggggataagtcctactttctagttagtaatgctgtcaaaaattaagtgatctaacatttgatagtgatttgaaaaattgaacgtgttgtatgatggaggatttagcagtaaaacaatgaacaatggtgtacactccttccagaaaaagtgtaccatttagttattccaaaaaggtccatttgaaatcttccaaattctaattgtgaagcaagca

SEQ ID NO: 179080 - DNA, 578 bp, Homo sapiens
tttatgtgacaccactctggataattctcccaatccaccttccacatggcaactggaatactccttctagaaagcataaatctattctttcctctgaatgataaccctttagtggcttcactattagtaaaattaacagttttataagttcttacagtattggctatatctgtgattcaaatgcagtgtaaatcttgaataccataattgttcattcatacctatagcgtacagaaccactttatcttgagcactaaaaagacagcatggtgtaataggaaaagcttggaaatggagagctgccctgccccttatatgtatgaccatagatgggccatttggtctagacctttatttacaaaatggggataaktcctactttctagttagtaatgctgtcaaaaattaagtgatctaacatttgatagtgatttgaaaaattgaacgtgttgtatgatggaggatttagcagtaaaacaatgaacaatggtgtacactccttccagaaaaagtgtaccatttagttattccaaaaaggtccatttgaaatcttccaaattctaattgtgaagcaagca

SEQ ID NO: 179081 - DNA, 578 bp, Homo sapiens
tttatgtgacaccactctggataattctcccaatccaccttccacatggcaactggaatactccttctagaaagcataaatctattctttcctctgaatgataaccctttagtggcttcactattagtaaaattaacagttttataagttcttacagtattggctatatctgtgattcaaatgcagtgtaaatcttgaataccataattgttcattcatacctatagcgtacagaaccactttatcttgagcactaaaaagacagcatggtgtaataggaaaagcttggaaatggagagctgccctgccccttatatgtatgaccatagatgggccatttggtctagacctttatttacaaaatggggataagtcctactttctagttagtaatgctgtcaaaaattaagtgatctaacatttgawagtgatttgaaaaattgaacgtgttgtatgatggaggatttagcagtaaaacaatgaacaatggtgtacactccttccagaaaaagtgtaccatttagttattccaaaaaggtccatttgaaatcttccaaattctaattgtgaagcaagca

SEQ ID NO: 179082 - DNA, 578 bp, Homo sapiens
tttatgtgacaccactctggataattctcccaatccaccttccacatggcaactggaatactccttctagaaagcataaatctattctttcctctgaatgataaccctttagtggcttcactattagtaaaattaacagttttataagttcttacagtattggctatatctgtgattcaaatgcagtgtaaatcttgaataccataattgttcattcatacctatagcgtacagaaccactttatcttgagcactaaaaagacagcatggtgtaataggaaaagcttggaaatggagagctgccctgccccttatatgtatgaccatagatgggccatttggtctagacctttatttacaaaatggggataagtcctactttctagttagtaatgctgtcaaaaattaagtgatctaacatttgatagtgatttgaaaaattgaacgtgttgtatgatggaggatttagcagtaaaacaatgaacaatggtgtacactccttccagaaraagtgtaccatttagttattccaaaaaggtccatttgaaatcttccaaattctaattgtgaagcaagca

SEQ ID NO: 179083 - DNA, 527 bp, Homo sapiens
tgtcagggtcgcccaccttgtcacatgccagagtgccttcctctttcaaaacttcacttccctgcccctgccctgggaaggctgccctggccccacctggccgagcagcctctccacgccgttgcctctgctgcattctggctctgtgttctcggctcagcgtcaattcttccctgccagagggggaagccagccctggcctaagtggctgcccagtgaacggccacagcgggagccgggagggaaagcggcctcagcgtgtggcctgcaggggccagagcagcagtagccagtgggtcctgtcacagtgacaggaggagagcgggttacagactgtccatcacgggacactgcrtggcgggggaaccaaggatgccaggccctgtgtgtcaggagggatgaaggggaaaggcagctgcagaggagcagagggtctgaaatggatgtgaaatgggcgtgactcgggcacacacaggtgcacaaggaattgtggggatgggtcacgggcaggaaggccacactcagga

SEQ ID NO: 179084 - DNA, 426 bp, Homo sapiens
gaattcagtttgttgtggttataggattgtggttcccatttccttctggctgtcagctgggggccactctaggcttctagaggctgcatgcatttctcatcacacactcacctccaccttcaagccagcaacagctcatcagatcctccctgtatttcttttctttcttttatttatttatttattacttttttaaagagatagggtcttgttgcccaggctggagtgctgtggcatgatcatagtttactgtagccttgaactcctgggctcaagtgatcctcctaccttagcctcccaagtagctagaactacagatgtgaaccaccatgccccactaattttataatttkttgtagagatggagtctagccatgttgcccaggctggtctcaagctcctggcctcagccgtccttttgctttg

SEQ ID NO: 179085 - DNA, 426 bp, Homo sapiens
gaattcagtttgttgtggttataggattgtggttcccatttccttctggctgtcagctgggggccactctaggcttctagaggctgcatgcatttctcatcacacactcacctccaccttcaagccagcaacagctcatcagatcctccctgtatttcttttctttcttttatttatttatttattacttttttaaagagatagggtcttgttgcccaggctggagtgctgtggcatgatcatagtttactgtagccttgaactcctgggctcaagtgatcctcctaccttagcctcccaagtagctagaactacagatgtgaaccaccatgccccactaattttataattttttgtagagatggagtctrgccatgttgcccaggctggtctcaagctcctggcctcagccgtccttttgctttg

SEQ ID NO: 179086 - DNA, 515 bp, Homo sapiens
ctggtatatggacttgtactgggtgaactgagcaggtccaatctgctgcagctagatcactgctagctcctggcccatcctccaacaaggcgagctgcccaactgacagctacaaaaaaagaaagaaaaaggattgggttctgtcccccaaaatgtggttctgcatgtagcaggcactatggcttgatggactccttcagtacatccagtttccttggtaacccaactatgtactaaatggtttccatggcaaaacacgttccagagtccaaataaccaacctacacatacaatttggaatgcaacttattagtggggggctgcctgcacttgaaaaaatgcatragcttaataaacagtcctggttaccttattgtggcaccaaagcacatgcctctgaggagcccattcaaagggcatcacatcagggaaggggccagggagtgggagagccaaacctaaagtgtgccagactgagcaatgcgatactgtttctgcggtacacagtattccaa

SEQ ID NO: 179087 - DNA, 559 bp, Homo sapiens
agactaaacataagacctgaagctataaaactactagaagaaaacrtagagcaaatgctacaggacattggtttaggcaaagattttaagtctgtggcctcaaaagcacaggtagcaaaaacaaaaataggcacatgggactatattaaataaaaaagcttctgcacaacaaaggaaacaaatcaacagagtaaagagacaatctgttgaatggaagaaaacattgacaaactattcatctgccaaggactaatatccaaaatatgcgaggaactcaaacaacagcaaaaagaaaaaaaatcacattaaaaagtgggcaaagacatgaatgtacatttttcagaagaagatacgcaaattgtcaacaggtatacaaaaaatgctcaatgttactaatcatcagggaaaatgaaaatcaaaactacagtgagatagcattttatcccaggtaggatggcaattattaaaaagacaaaaacaacagatgtctagtgaagatgcagagaaaagggaacccttatgcactgtcagtaggaatgtaaattagtacagccattgt

SEQ ID NO: 179088 - DNA, 498 bp, Homo sapiens
gtcagagaatatacttggtatgattttaatttttaaaaaaattttttaaagacttattttgtggcctaacatatggtctgtcacatggtgaatgatccatgtgtggaggagaagaatgtatattctgcagttgttggattaaatactctgtaaatatctgttaagtacatttggtctataatgcagagtaagtctattgtttctttgttgattgtctgcattatctgttcaatgctgcaagtggggtagtcaagtcatcagctattactgtattgggatctgtttctgtatttagctctaataatatttgctttatatatctgagggtttcagtgtcrggtacatatatatttacagttgttctatcctcttgctcgattgacctctttatcattatgtaatgacctctttttttgtctctttgtagttttcatcttgaaatttattttgtctaagtataactactcctgctctttttttgctttccattggcatgat

SEQ ID NO: 179089 - DNA, 518 bp, Homo sapiens
attaattattgattcagtttctgtgctttctttttacaaagattattaattattgattcagtttctttaatagatacacactcatggaggttatctatttggtattatgtatctttcaaggatttggcccacttcatcttggttaccaaatttgtaagcatagaattgttcaaaatattcttttattactctttttaatgtccataagagaagtagtgatgttcctctatcatttctaatattattaatttatgtctttcttcttggttagcctggktaatgaaccagcttcttattttgttgattttcccttttttatgtatattttacttatttctgatctaattattattatttctttttttctgtgtgttttaggcctacattgctattctttcttcagttttctatggtgagagcttaagtagttgattttagatctttttatcttttctatatacgttcaacgctataaatctccctgtaagtactgatcttgctgaattccacaaatactg

SEQ ID NO: 179090 - DNA, 518 bp, Homo sapiens
attaattattgattcagtttctgtgctttctttttacaaagattattaattattgattcagtttctttaatagatacacactcatggaggttatctatttggtattatgtatctttcaaggatttggcccacttcatcttggttaccaaatttgtaagcatagaattgttcaaaatattcttttattactctttttaatgtccataagagaagtagtgatgttcctctatcatttctaatattattaatttatgtctttcttcttggttagcctgggtaatgaaccagcttcttattttgttgattttcccttttttatgtatattttacttatttctgatctaattattattatttctttttttctgtktgttttaggcctacattgctattctttcttcagttttctatggtgagagcttaagtagttgattttagatctttttatcttttctatatacgttcaacgctataaatctccctgtaagtactgatcttgctgaattccacaaatactg

SEQ ID NO: 179091 - DNA, 495 bp, Homo sapiens
  misc_feature (1)...(495): n = A,T,C or G
atcactgggcggggggctgacctatctactgtgataactgcttctaatacagctgctcaggaggagaaaaatttgcttttcttttgtcaagagaagtaacagcaccacataacagtttgaagaggtgtttttactgtccagaaagtcaatcatggcctatgtgaaggctgtaaatctagagaagttcagcaacagcacacgaagtggtatgtggaggacactgaaattgatggtccagggtcatttaataagggtggngtgttttattacctgaatgtcacagcaatggtgcccaacagagcaaagagttggttggaagagaagggactagagcacaaagaccggtgagcaacaggcagcagctcttattatatatgcaatggcccttccctaccacttcacacgaaaagaaactaaaaacagtattatctagaatcaatcaaaaggggaactgtatgggcatttggctaatgcrtataaatagcaataggaatt

SEQ ID NO: 179092 - DNA, 430 bp, Homo sapiens
atatggcaaaaataaatctttgagtgaataaacatacctagtacacggtagttgtttaacatttccttgctgaatacatgaatttagttatgwttttaagtgacagtgcattttactaagcacaattctaactaaatatattggaaaaacaatacatttccatgtgagaggcaattttaagttcagtccatagactctaattatagctcatgattttgatcattgattttgcaccttatatggagctgagcactgagtattagctcatttttcacaacaaaatcatggtgtattatttttcagagtaagaggctagccaaattaagtatttaaagatttcaaagttattaagagaaacaatctatagataaactggagggcttatcacatatactacactgctttgcatgacaaagctgggtgggtgctc

SEQ ID NO: 179093 - DNA, 595 bp, Homo sapiens
aatttcgtttcctgtctagtcagggtgtcattatttctgtaaagtctctgagctagtgagcacatagaaaaacacaatccaccacaacctgaaatatgcctttgccctcccaccttctccttttcatgtggcttaaattgctgtgtgacctactggaaacctaagaatattagctctcagttaccacttcttcaaccttaacctttcctctcccaaatgccaagaagatatagcaagtctaatcagcatattttattttgcccttttcaataagctgtttagtgatgttgatttactgttggaagaagtctaaaaaaaaccttcactatcttttgctcatgtctctgttccwtagggaaaatggcattttatgtcactgcttgtcagggcgttttcagtgttgctttctccattttggaggtcctttgggagagttcacttggacctttctcatgtccttcatttattaaaatacaaagtaagtgagagtaactaacacccaaatacttattattactcttggttatgaaccttctttcatgctaccgaataaccatctctgtcactatacagcaggacatggtcctatgcccaa

SEQ ID NO: 179094 - DNA, 570 bp, Homo sapiens
aaccaagtccaccaagaaccagggctaggtgcaggaccaatcacactctgctgttttttagaaggctaacactttttcctaaggaactgcaaaatatttacagacacttgacagttttctaggtagcacagttggaatacggacactcaagctctccagaacatcctgtgattgaagttttgtctatactgaacagcaggaggaactaatcagggaagctgctggtttgcctgaccacactggttaacgacagtctccacagagcctccttggagctagagatgaaatatcacactatttcatgcgaaacttcacttttaatcaaagcaagaggaaaaaatcttctagagtcccatagttgtgccacaataggaatttctaccaaagtctacaatcattcttcgtttttcactctttaaacatttatctatcgtaatttagtttttattttatcaaagttatgcatgatttacaagatattaatgagacttttgttagtytccttttagatctcaatgttgatagatgataaatgataggacaccaacattctaatgggaaaagataaac

SEQ ID NO: 179095 - DNA, 572 bp, Homo sapiens
caaatcctggtgtctgctatgtcttcttacaattttcagttaaaatattttgaaagatcaagagacaaaaattgcaatgacatgggaaactaaaaataagaatagaccatatgctactctatgaagggaatttccaatgactttgtatgcacattcagttgtagacacattccactcactgtaccagaattgtgcggacagctgcatctcctatatctgctcttttgtgacttaaggattacgttgaccagaaaatctggcagccgctctcatcctgatccacaagaacttccatggaagataatttactcagtatcctaactctaaaacatacaaaaaggacaattctactaaatgtcttcttaaaaaagtgaacatctacttgtaaaatcatatattttgataatggaagaacaaattggaattatggacaatggcaggctataggcatctgcaaatacacaatttgtgatgatacatagaagcccagtatatacatactaggygtatgttgttgttttcccctttttcatgtaaaaccagacaaaagatattgtaatatagctgcaatt

SEQ ID NO: 179096 - DNA, 493 bp, Homo sapiens
ggcacacatatttagaaatctgtgttcaggatttattgttgctgaaatgcaaagaaatgccatctcagctaagagctacttttaaattgttgttatttgacatatttttaatgatctaatttttctatctcagtgtatgttctttccctgctgtggttttctgwttagccctatctgttggaaagagacaagtaaagaactgtttatcctcaagatgaaatatttcgacaattaaggccaagatttctgaaaatacataaattgaaatttatgcttttttagagcacttaagaaagaatagcttactaatctatcacaaatatagaaatgcagatatagagtttgctatgttttcttattttattttattgtactgattgtgaaatgttacgaagcaagaaggattttgtttcccctagaatgaaaagagaacagtcataaagtccagtcattccattgagcttcatgtagcacattggaagagttgttataa

SEQ ID NO: 179097 - DNA, 493 bp, Homo sapiens
ggcacacatatttagaaatctgtgttcaggatttattgttgctgaaatgcaaagaaatgccatctcagctaagagctacttttaaattgttgttatttgacatatttttaatgatctaatttttctatctcagtgtatgttctttccctgctgtggttttctgtttagccctatctgttggaaagagacaagtaaagaactgtttatcctcaagatgaaatatttcgacaattaaggccaagatttctgaaaatacataaaytgaaatttatgcttttttagagcacttaagaaagaatagcttactaatctatcacaaatatagaaatgcagatatagagtttgctatgttttcttattttattttattgtactgattgtgaaatgttacgaagcaagaaggattttgtttcccctagaatgaaaagagaacagtcataaagtccagtcattccattgagcttcatgtagcacattggaagagttgttataa

SEQ ID NO: 179098 - DNA, 504 bp, Homo sapiens
gcactaactattgaaattgactggtgaacatagtaagaaaaatgacactgacaagacttcaatgtatacgaaactaaaacttttagttgatttctaaaatcaacacttccatttctmtagatgaggtattgtaatatatttgccccaataatttgctgttcacatgccctataactttggtagctctaagcataaagttaactttgtggcagtaactgccaatggaaaatttcatagcttcaccaaactaaggtttattaaaggtatatgatggcataagaaaaactttgttttcctttagaaaataagacatgagtaagcaggcattgaaactgttaccagttgagggtgcccaggttcttggcattttgaacaaagaattggacaaaacgcacaaagaaaagaaagaatgaagcgacaaaaacagatttattgaaatgaaagcacactccccagggtgggagtggcttgagcaagtggctcaagggcccagttacagaattc

SEQ ID NO: 179099 - DNA, 483 bp, Homo sapiens
cactaactattgaaattgactggtgaacatagtaagaaaaatgacactgacaagacttcaatgtatacgaaactaaaacttttagttgatttctaaaatcaacacttccatttctctagwtgaggtattgtaatatatttgccccaataatttgctgttcacatgccctataactttggtagctctaagcataaagttaactttgtggcagtaactgccaatggaaaatttcatagcttcaccaaactaaggtttattaaaggtatatgatggcataagaaaaactttgttttcctttagaaaataagacatgagtaagcaggcattgaaactgttaccagttgagggtgcccaggttcttggcattttgaacaaagaattggacaaaacgcacaaagaaaagaaagaatgaagcgacaaaaacagatttattgaaatgaaagcacactccccagggtgggagtggcttgagcaagtggctca

SEQ ID NO: 179100 - DNA, 504 bp, Homo sapiens
gcactaactattgaaattgactggtgaacatagtaagaaaaatgacactgacaagacttcaatgtatacgaaactaaaacttttagttgatttctaaaatcaacacttccatttctctagatgaggtattgtaatatatttgccccaataatttgctgttcacatgccctataactttggtagctctaagcataaagttaactttgtggcagtaactgccaatggaaaatttcatagyttcaccaaactaaggtttattaaaggtatatgatggcataagaaaaactttgttttcctttagaaaataagacatgagtaagcaggcattgaaactgttaccagttgagggtgcccaggttcttggcattttgaacaaagaattggacaaaacgcacaaagaaaagaaagaatgaagcgacaaaaacagatttattgaaatgaaagcacactccccagggtgggagtggcttgagcaagtggctcaagggcccagttacagaattc

SEQ ID NO: 179101 - DNA, 410 bp, Homo sapiens
tctaaaatcaacacttccatttctctagatgaggtattgtaatatatttgccccaataatttgctgttcacatgccctataactttggtagctctaagcataaagttaactttgtggcagtaactgccaatggaaaatttcatagcttcaccaaastaaggtttattaaaggtatatgatggcataagaaaaactttgttttcctttagaaaataagacatgagtaagcaggcattgaaactgttaccagttgagggtgcccaggttcttggcattttgaacaaagaattggacaaaacgcacaaagaaaagaaagaatgaagcgacaaaaacagatttattgaaatgaaagcacactccccagggtgggagtggcttgagcaagtggctcaagggcccagttacagaat

SEQ ID NO: 179102 - DNA, 503 bp, Homo sapiens
aaactactacaactatgtaagcactaactattgaaattgactggtgaacatagtaagaaaaatgacactgacaagacttcaatgtatacgaaactaaaacttttagttgatttctaaaatcaacacttccatttctctagatgaggtattgtaatatatttgccccaataatttgctgttcacatgccctataactttggtagctctaagcataaagttaactttgtggcagtaactgccaatggaaaatttcatagcttcaccaaactaaggtttattaaaggtatatgatggcataagaaaaactttgttttcctttagaaaataagacatgagtaagcaggcattgaaactgttaccagttgagggtgcccaggttcttggcattttgaacaaagaattggacaaaacrcacaaagaaaagaaagaatgaagcgacaaaaacagatttattgaaatgaaagcacactccccagggtgggagtggcttgagcaagtggctc

SEQ ID NO: 179103 - DNA, 588 bp, Homo sapiens
gctcactcattctggggtaagccaggggccatgtgaggttcacaggatgaggatctgaggtttattaacagccacacaagtgggcgtggaagtggatcttccaagacctgcaccacctgtgtgagtgaacttggaagctgatccttcctcaaactcgccttcaaatgaggtaatgaggtcatcctcattacctactagactacctgttagacaggactgcagccctgtctaacaccttgactgcagttctaaaccagaaccactcagctacatggctctcagaaacccaacccacagaaactgtgggttaataaatgatccttgttgtaagctgccaaatcttggagcaaacttgtccagcaatagaaaactaatatgggcgactccaatatccaactgcctcccaccattttccttcagacgtctaacagcatctygagcccacacgtccaacactgaactgctgatctcacaggtccagaacctgcttcactccaccctttctcatctcagtggacggcaacttcatcctttattatattataactctgtgacttgggcaagcatgcaaggtgcgatgaagaagtg

SEQ ID NO: 179104 - DNA, 586 bp, Homo sapiens
tggtcttctctttttgtgagcgggtggggcctcaacccttcttggaaagcacatcagaaagcgactctacttcataggaaacactgcacacacgtgccagccggttctaaactctgatcttgtagttattctttcaatccccaccccaatccatcctgtgaggaagatgctatttttatctctacagacgagaagacagagacacatagagcttagtcacagttggtaaatggcggagaggagattcaacccccgcctgggttccagagtctgcgctttgatccagtttcccggggccatgtcccccagcatggagaagggctggctcaggagcagggggcacagcctcccaggtggtcggagcagcgcgggcggaggcgcagaggcaagaaggagctggtctctttgagggcgaaggcggttcatagggtgtgtgcacatctaatccgtctccttcgagagtgccgccaccctcattcttagggaaggggcggggaagggttcctgggatcktcatcctacctaagcaccccagtgagtgttcagttcccggccgcagctagtgccctgtgcccagtgggaagcc

SEQ ID NO: 179105 - DNA, 458 bp, Homo sapiens
  misc_feature (1)...(458): n = A,T,C or G
tccgtgaccgagctggtctcggcacttgatatttgtgaacattttagctcctcatgagtgttgtacattttcctttgtcattttccaatgtcacaatctccaaagttatcagaaacctgtatttgagarcacctgttacaattctattgtatcttattataaatcatcttttgaaaaagattaaaacaagacaacaattgcctgtgaatagcaaaatgtccaagttagttacagttagaaacacacttgaccaagaagtttggttgtctccatggtttacaataacttaacataacacccttaattatgatcgatagcatatacttagacatcagagttttagaaatcccatacaattttggaacacatattagtattactcacaaaaaatataacctaaaaagactgaatatcattttggcaatcccatgtacctaatcatgtcaaataatcctnnn

SEQ ID NO: 179106 - DNA, 447 bp, Homo sapiens
ggtctccgtgaccgagctggtctcggcacttgatatttgtgaacattttagctcctcatgagtgttgtacattttcctttgtcattttccaatgtcacaatctccaaagttatcagaaacctgtatttgagaacacctgttacaattctattgtatcttattataaatcatcttttgaaaaagattaaaacaagacaacaattgcctgtgaatagcaaaatgtccaagttagttacagttagaaacacacttgaccaagaagtttggttgtctccatggtttacaataacttaacataacacccttaattatgatcgatagcatatacttagacatcagagttttagaaatcccatacaattttggaacacatatyagtattactcacaaaaaatataacctaaaaagactgaatatcattttggcaatcccatgtacctaatcatg

SEQ ID NO: 179107 - DNA, 575 bp, Homo sapiens
aaggtatagaagaaatgaaacagaaaaaaaaaaaacccaaccctagcaacacattataaccaccactaaaagaagcgtttgaaatgtagtaaaatgtaatgaatttgttatggtacttcaatacctaacagtaataacactaaccaaaattcatataagttgcgagaattcattgatcttgatttgaagttgaatatcctgaattcacagtcstgtttaatattaatttcctctggatccaccaaatgggtacttattcagtccacacctcagttaacccgagtctaaaataaagataggatgtgaacatcatcttcctttttattagctatctgtgtagtggagtttgctgaagaaaaagaaaagaaaaactactgcataaatttaagatgtatcattgttctaagtgccccatacctatttataaaactaagactactagaagtgaaaaccctcatctaaatatccagcaactatttaattataggatagtccgtaagttatacatctatgcacataatgtgttctttaaaaacgtgtcccacataactctaaggtaattctccaaagaggcg

SEQ ID NO: 179108 - DNA, 575 bp, Homo sapiens
aaggtatagaagaaatgaaacagaaaaaaaaaaaacccaaccctagcaacacattataaccaccactaaaagaagcgtttgaaatgtagtaaaatgtaatgaatttgttatggtacttcaatacctaacagtaataacactaaccaaaattcatataagttgcgagaattcattgatcttgatttgaagttgaatatcctgaattcacagtcgtgtttaatattaatttcctctggatccaccaaatgggtacttattcagtccacacctcagttaacccgagtctaaaataaagataggatgtgaacatcatcttcctttttattagctatctgtgtastggagtttgctgaagaaaaagaaaagaaaaactactgcataaatttaagatgtatcattgttctaagtgccccatacctatttataaaactaagactactagaagtgaaaaccctcatctaaatatccagcaactatttaattataggatagtccgtaagttatacatctatgcacataatgtgttctttaaaaacgtgtcccacataactctaaggtaattctccaaagaggcg

SEQ ID NO: 179109 - DNA, 577 bp, Homo sapiens
aggtatttaaacaacagtgttagtaaaaggtaataaaaaatataatgagtatgtgttaaaataccctgacacattaaatgctgaattttgtaaaatatcaaagtcatgttattgaaattttaagacaaattattgtaccaggcaatgtctgtgttttcaaagttaatcaggaaatagaagagtatatagcacttgaatgacagacaaattctctatgaaggctgccaattagagtcttgtatgggcgggctaaggctccaggagttttcattttgcttctgtttctctgttggagttcctttcaagctgtcagagcttgggaagaacctgggctttggttttttaaaaaaatacctttcattttcctacacgaagttaagttttgaaaatttaaacatgataaaactccatggsacatgacatgattcagctaacgatttgactgtgtaatgatccacacccaacaagagattaaagatagaaaagatggttattactagtaaaaaattacagtgttgaggtatggatagccaaagattgttatctctctcttaagactatgttgtattagggtttc

SEQ ID NO: 179110 - DNA, 447 bp, Homo sapiens
catatatgcagttcatcattgaccaaaatgtcattatgcagcacataactgtatatttttctctctcagttcctyactccacaactaaattttagtctttattcactactgtgctattcaatggtctatttttatctgataaattctttaactattttgacatattttagcagtgtttcagaggcagtcatctttatatcttacttattaaaaaatatttcatgtgctttgaaaaagatccttttctaatatgtaagttgatgtatgtaaggaataaataataggtggtcattggttattcatttcattaactgcctttactaaaaagaacacaattatttaacttgacttctattaaatattttccagaatgtgtggtctttgtacttcctgtatctgtaaaaatataagatgtaacatagcataacaaataccattaccaaaggt

SEQ ID NO: 179111 - DNA, 417 bp, Homo sapiens
ttggttgtaacacagacacacagatgctgtcttgggtagcttatcttgggatcctcccaccattcggagccattagagctaaatttctaaacttcttttacttggcagcaaccagactgtktgatttttccacttttaatggatgttgcctcagtgcactgactgaataatatgttcctggggtacccttatttcctaacatttaaaaatgttgtttaagtctcatgacacattacaaattccaagcccaggctcacaatgatcagattctttttttgcttgtttgtttgtttgtttgtttgttttggatagtttacggtgcactatcacttaggtcaattgaaaagcttttcctatgttttatttaatttcattttttttctctttatgcacaccaaatcccaactctaatatgct

SEQ ID NO: 179112 - DNA, 495 bp, Homo sapiens
aaaatctcagaaagaagagtaccacagatactgcatattaatccctctcaaatcgttggatgaccccttaaactgtacatgcacaaaacaagacatcaataagcccatttggggaaaacakctaaaactctagaagagttgtactgagtattagcagctgtccactactggagaaacaggattacagtgagaatttcaccattttgaggaaattggtaaatatctcaagatctctgttgaaacaatgtaagggttacatcttaggagtaaaagttgcatacaaagacaaaacactttgccgtaagactcaaagaaaaagcaaaattctccattctaagaaagcctaaagataatcttttaaaatatcaagtaaactgccagtaacttagctgatttcctgtaaaaaatacagcactcttcagaaggtaacagattcccaagtccctacaatacacaatgtaaacttaaaaatcagatatgtgattacagttcact

SEQ ID NO: 179113 - DNA, 414 bp, Homo sapiens
aaaactaaataccacatgttctcacatataagtggaagctgaatgagaacacctgaacacataaaggggaacaatgcacactggggcctattggagggcagagggttggagaagagagagaatcaggaaaaataactaatggatgctaggcgtaatacctgggtgataaaacaatctgtacaaaaaacccccatgacacacatttacatattaacaaacctacaaatcctgcacatgtacccctgaacttaacataaagttaaaatatatacatatatattaacttttaacttataggttccattgtattcctcattctggccagcattccagcaaagctttacttttgataatgaagggtacttggatagacagtgtacatgattcagcrtaatctgtttttcaatttcagta

SEQ ID NO: 179114 - DNA, 514 bp, Homo sapiens
aataaatatctcagtaaaaaatagcaaaagctttaaattggaagtttatataagaagttctataattggcaaaaatcatattaaaagatgttcattattactagttatcttcaatgtaaatttaaactacattgagataccgcttcacacccactggaatagctaaagtaaagcctgagtataccaactattgaagaggatttgaagcaagtagaacttgcctatattgtaaaatgttaatcattttgaaagtttagcattatcttgtaactttaaacatatgcctaacctttgacctggtaactacctaggtatttacccaagagaaaagatgggcagtatttttcttcacagtgtacaaatagcgaagtcaayctaaatatccagcaacaagagaacggataaacaaatgtgatgaatgaaactccatccagtatgaaaaagcacagactgtggtatctcaataatatgggtaattctcagaaacatttagctaagtgaaagaaaccagatc

SEQ ID NO: 179115 - DNA, 633 bp, Homo sapiens
ccctctgcactttctcctgactttgtcactttgtggtgattatccatttacatttctggctctctctctggattgtagactcttaacagccagaacacctctcatttatatctgtgttcataacattgagcatagggcttgacaaagagtagggactgagtggatatttgatggataaatgaataaaggcatgaatgattatttaataaatgaatgagtatataaatgtacsaagtagagtgaggactgctttaactcttgggaccactacaggtggtaacaaggaagagaccccttacatcccttagtctggactagtggagcctggaataggccttcaaagatcactgccaccttacagatgagaaattgagaccagacaagggaaagggcttaactagatggtcaaatgaccggcagatgatccttagcttttcccacactgccagaatagacagccccttctgagtgtgtaactctgtcatcctagcattatgggacccttttgtttcatttaactccactctcccaaacagtgtgcagcctggcatcattgtcttggaatctgatcactggtttggttgccttcttcctctgtctatttgatatgcctagccagggagacagtgctga

SEQ ID NO: 179116 - DNA, 633 bp, Homo sapiens
ccctctgcactttctcctgactttgtcactttgtggtgattatccatttacatttctggctctctctctggattgtagactcttaacagccagaacacctctcatttatatctgtgttcataacattgagcatagggcttgacaaagagtagggactgagtggatatttgatggataaatgaataaaggcatgaatgattatttaataaatgaatgagtatataaatgtaccaagtasagtgaggactgctttaactcttgggaccactacaggtggtaacaaggaagagaccccttacatcccttagtctggactagtggagcctggaataggccttcaaagatcactgccaccttacagatgagaaattgagaccagacaagggaaagggcttaactagatggtcaaatgaccggcagatgatccttagcttttcccacactgccagaatagacagccccttctgagtgtgtaactctgtcatcctagcattatgggacccttttgtttcatttaactccactctcccaaacagtgtgcagcctggcatcattgtcttggaatctgatcactggtttggttgccttcttcctctgtctatttgatatgcctagccagggagacagtgctga

SEQ ID NO: 179117 - DNA, 633 bp, Homo sapiens
ccctctgcactttctcctgactttgtcactttgtggtgattatccatttacatttctggctctctctctggattgtagactcttaacagccagaacacctctcatttatatctgtgttcataacattgagcatagggcttgacaaagagtagggactgagtggatatttgatggataaatgaataaaggcatgaatgattatttaataaatgaatgagtatataaatgtaccaagtagagtgaggactgctttaactcttgggaccactacaggtggtaacaaggaagagaccccttacatcccttagtctggactagtggagcctggaataggccttcaaagatcactgccaccttacagatgagaaattgagaccagacaagggaaagggcytaactagatggtcaaatgaccggcagatgatccttagcttttcccacactgccagaatagacagccccttctgagtgtgtaactctgtcatcctagcattatgggacccttttgtttcatttaactccactctcccaaacagtgtgcagcctggcatcattgtcttggaatctgatcactggtttggttgccttcttcctctgtctatttgatatgcctagccagggagacagtgctga

SEQ ID NO: 179118 - DNA, 633 bp, Homo sapiens
ccctctgcactttctcctgactttgtcactttgtggtgattatccatttacatttctggctctctctctggattgtagactcttaacagccagaacacctctcatttatatctgtgttcataacattgagcatagggcttgacaaagagtagggactgagtggatatttgatggataaatgaataaaggcatgaatgattatttaataaatgaatgagtatataaatgtaccaagtagagtgaggactgctttaactcttgggaccactacaggtggtaacaaggaagagaccccttacatcccttagtctggactagtggagcctggaataggccttcaaagatcactgccaccttacagatgagaaattgagaccagacaagggaaagggcttaactagatggtcaaatgaccggcagatgatccttagcttttcccacactgccagaatagacagccccttctgagtgtgtaactctgtcatcctascattatgggacccttttgtttcatttaactccactctcccaaacagtgtgcagcctggcatcattgtcttggaatctgatcactggtttggttgccttcttcctctgtctatttgatatgcctagccagggagacagtgctga

SEQ ID NO: 179119 - DNA, 623 bp, Homo sapiens
aagcagaatatagatattcatatagtagttcttacttagaaaaacatgttaaaatatgtttaaatagatgttaaaaattgaatgcataatataaaactagacagaggcatcacaagaaaactatagatcaatgttcctcacaaatatgaatgcaaaaattttcaaaaaatcccccaaaggatagcaaactgaatccagcaagacatataaagaattataaaccctgaccaagtggtgtttatcctaacaatgcaaggtgggtttatatccaaatatcaacttaatggaccacattaataaaacaatgaaaaaaattacatgacaaatcaatacatgcagaaaagcatttgacaaaatctaacaccctttcatgataaaaagcaccaaaaaatagaaagggatgttctcaatcagatcaagagtatctrtgaaaagccaacagctaacatcctacttaatagtgagagattcaattttttgtacctaagatcaggaacaagacaaaaacgtctgctcttgccacttgtgttcagtattgtacaggaggttctagccaggacaagtaggcaagcaaaagaaaaaatggcatatgattggaaagaaagaagtcagactatgtctat

SEQ ID NO: 179120 - DNA, 649 bp, Homo sapiens
caattttttgtacctaagatcaggaacaagacaaaaacgtctgctcttgccacttgtgttcagtattgtacaggaggttctagccaggacaagtaggcaagcaaaagaaaaaatggcatatgattggaaagaaagaagtcagactatgtctattatcaatgataagatcttgcatataaaaaaatcctgaggaatccactaaacaaaactattagaactgattagaattttgacaaagtggcaggatataagatcaacatmgaaacattatatttctataactagtaaactaagctgaaaataaaaataagaaaattatttcatttacaatagcataaataatacagtacttgggaataaatttaatactggacatgtaagacacagtggaaagctaaaaaaattattgaaagaaattaaagaaaatctacataaatagatacccaatttttatgaattggaaatattaatatcattaggatggcaatactttccaaattgatctacagattcaaaaccatccccttccaaatattagtgaactaagaaatcaggaagttgatcctaaagttcatatggaaatataaggaattcagaatagtgagaacaatcttggaaatgagcaaagttagaggactcacactttgtg

SEQ ID NO: 179121 - DNA, 586 bp, Homo sapiens
atctgttccaggcctctctccttggcctgtcaatggctgtcttctccctgtgttttcacgtagtcctccctttgtatgtgtctgtgtccaaatttcctcttcttataagggtatctgtcacattggatgagggccaactataatgaccgcattttaacttatctacctctgtaaagaccctgtctccaaatagagttactttcctaagtactatgggttacaactttaacataccaatttttcttttgcaggaggtattacaattcagctgataacaactccgtaaccattaagcagtttccctctatacccccttactctcggtccctggcagccaatagtctgtgtttagtctctatggatttacctattctggatatttcatacaaggaaatcatataacacatgaccttcgtgtctggcttctatcacttgaaaacatttccattttcrtgtgtttcacaggagtatcattagttttgtgtgctgtggtttaaaaaaaaatgaggactaggtaaagggctaccaagagcaattgcttcaaagttaaggaattctcttaaagaccacaaaactaaccagcatt

SEQ ID NO: 179122 - DNA, 561 bp, Homo sapiens
attgtacagacatgccataggctaccagaaagccccacatcatgattaagaagaatattttaatgacatggtaaagggagaagaggaaagaataataccattctaggtgcagtgtgatctcaattgtgaagaaaaaatttcaaagaaaaagtctggaaagcaatacaccaaarttgtaataataggttactgctgaatggtgagcttataatttatatatgtccttccttttaacattttcggaattattcaaaatagatgggattcaaaattcaacatattacatcaacaatcagatgttaaaaaaagaaaagaaagaaagaagaagaaggggggagggggaggggagagggggaaggagaaggagaaggaggaaagcctttgatatcaaaataccaatgtgctcatgtggaatttgaggcaagtaacttctaaactcagtctaaactcagcactttctttattccactgtattaatcatatgtaacttcagcttccccacttgacataagcctctttaggaacctgggtgctgtcttcctcatttgtagatttcgtctc

SEQ ID NO: 179123 - DNA, 550 bp, Homo sapiens
aactgctaactgaccaacttttaaactggttagctttggatctattatttgcaagaaaataattatcttaattcttcaagacatttttactctgaaagaagcttcactaacataagatccattgaaaggttccagtcaagtggtagatatcccaagttttgtgttttataaagattccaggttgaggtrtaaagtaaagtatgtttctgaataggaaagtgagagacagaaggcaggggaaccagtaaggaaacttttgtagtaatcgaggcaaaggtaataaagatctgcacacacattgaaaccttctatgtactacgccaatgaactgcaaatatcagtgtttcttttatgtaacttctttactaggtagtttactttcttcaaatgacttcctttttaaattaagtaataatgtgctagttattcttctaaatacacattaaataagtaaaaatttgtctccacttttggcaatggccaactagcatttagggacaaacaatcctgttgagaataactagtaacctgaatacaaatacttaaaagt

SEQ ID NO: 179124 - DNA, 550 bp, Homo sapiens
aactgctaactgaccaacttttaaactggttagctttggatctattatttgcaagaaaataattatcttaattcttcaagacatttttactctgaaagaagcttcactaacataagatccattgaaaggttccagtcaagtggtagatatcccaagttttgtgttttataaagattccaggttgaggtgtaaagtaaagtatgtttctgaataggaaagtgagagacagaaggcaggggraccagtaaggaaacttttgtagtaatcgaggcaaaggtaataaagatctgcacacacattgaaaccttctatgtactacgccaatgaactgcaaatatcagtgtttcttttatgtaacttctttactaggtagtttactttcttcaaatgacttcctttttaaattaagtaataatgtgctagttattcttctaaatacacattaaataagtaaaaatttgtctccacttttggcaatggccaactagcatttagggacaaacaatcctgttgagaataactagtaacctgaatacaaatacttaaaagt

SEQ ID NO: 179125 - DNA, 608 bp, Homo sapiens
ggttcccacatgcacttgggaaaaagaaaaaaccacattgaggtgccagatatcgggtgaacatgctcccaataattcaatgtatttcacataggttcttttctatttccctaagtataaaccagtctgagaaataaagggaaagagaacaaaaaagagaattttaaagcttggtatcagagtgaaacctcacatttcaacaggttccctgatgccacccaagccccaaaaccagcaagtttttagtagtgattttcaaagcggaaggagtgtaggaatagggtgtgagtcacagagatcacatgctccacaaggtaataaaatattgcaaggcaaatggaggcaggggaagctcacaggaccagggtgaaattaaaattgctaatgaagttttgtgcacacattgtcattaataacatcttatcaggagacatggtttgagagcaaacaaccgatctgacaaaaatttacaaggcaggaattttgttgtcctaataggcaggaaagygcttcaggagtctggggcttatttcatcccttatcagcaattgtaaaagacagacattcccagagcagccattttagagatgtaaccctgagaatgcatt

SEQ ID NO: 179126 - DNA, 585 bp, Homo sapiens
tacactatgaaatatagtttttttcaccaattttatgatttcattttctctaagctacaagatctaatgggtatatcatacttaccatgaaggaaaaaactgccaaaagttttatttaaacaagaaatctgagactgaatcattatttctttccagtcattctgttctgctgtcaagttttcttcacaaacaccacaacataaaccccaaatgaaatttgaaaatatattactgacctacagtacaaaacgttatacyggcatgaaaacgagggagtacagactcaattcgaacagtgtatccacagctttttccagtctcttctcctctttcaaatgcaactcgctctgccacagaaactgcactgattcttctgggctgagacagtaaaaaagaaaagtgacttaacaactacaaagttagatacaattgtttattagcatttttggattattgtagtaaatctgtcctactgccagctgaataattaacagaaacaataaatgtacaaaaaatactattggtttctatggcagacactttaaaaatgttgtttttaattttctacttaaaatgattctataa

SEQ ID NO: 179127 - DNA, 580 bp, Homo sapiens
tttgcccattctgagaatggacattagggagcccattgagaccaatggcaaaaaattgaatatcccaagataaaaactgtaaggaagttatttgagaaactgctttgtgatgtgtgcattcatctcacagtgttcaatctttcttttttatgccacaattaggaaacgctgtttttgtagaatctgcaaaggaatacttctgagcccattgaggcctatggtgaaaaaggaaaagtcttcagataaaaactagaaggaagctttccaagaaactgctttgtgatgtgtgcattcatctcacagagataaaagtttcytttgattcagctgtttggataaactgtttttgtagaatatgcaagggtatatttgggagctctttgaggaaaatggcaaaaaagagaatatccaggaataaaaactacaaggacgctatctgagaaactgcttggtgatgtgtgcattcaacaatcagagttcaagctttcttttcattcagcattttggaaacagtgttttgatagaatctgcaaggggatattagggagtgcattgaggtctatgtgaaaaggaattatct

SEQ ID NO: 179128 - DNA, 324 bp, Homo sapiens
ccataggcctcaaagtgctccaaaatatcccttcactgattctaaaaaaacattgttttgaaactgctgaatgaaaagaaaagtttcacgctgtgaaatgaatgcacacatcacagagtggtttctcagatagcttccttctagtatttaacctcagatattcgatttttcagctttrgcctcaatgaggtcccaaatatcccttctcagattctacaaaaacagtgtttcaaaactgctgaatacaaggatactttgattgttgtgagatgaatgctcacatcacaaagcagtttctcagaaagcttctttctagttgttatc

SEQ ID NO: 179129 - DNA, 534 bp, Homo sapiens
tgcattcatcttgcagagttaaacatttcctttcattgagctgtttgaaaacactgtttttgtagaatctgcaaagttatatttgggagtgcattgaagccaatggtaaaaaggaaacatattcagataaaaactagaaagaattttctgagaaactgctctgtggtgtgtgtattcatctcacagagttatacatttctttggattcagagtttggaaacactgttttgtccattctgcgaatggacatttgtgaggtrattgaggccaacagcgaaaaagcaaatatcccatgataaaaactagaagaaatctatccgagaaactgctttatgaagcccactgagacctacggagaaaaacgatgtatcttcaatgctagcaagcatctttctgagaaactactttgggatttgtgcattcacctcacagagttaaacctttctttggattcaatagtttggaaccactgttattgtcctttctgcaaatggacttttgggatatcccttattccaacttagaaaaggggaa

SEQ ID NO: 179130 - DNA, 534 bp, Homo sapiens
tgcattcatcttgcagagttaaacatttcctttcattgagctgtttgaaaacactgtttttgtagaatctgcaaagttatatttgggagtgcattgaagccaatggtaaaaaggaaacatattcagataaaaactagaaagaattttctgagaaactgctctgtggtgtgtgtattcatctcacagagttatacatttctttggattcagagtttggaaacactgttttgtccattctgcgaatggacatttgtgaggtaattgaggccaacagcgaaaaagcaaatatccyatgataaaaactagaagaaatctatccgagaaactgctttatgaagcccactgagacctacggagaaaaacgatgtatcttcaatgctagcaagcatctttctgagaaactactttgggatttgtgcattcacctcacagagttaaacctttctttggattcaatagtttggaaccactgttattgtcctttctgcaaatggacttttgggatatcccttattccaacttagaaaaggggaa

SEQ ID NO: 179131 - DNA, 488 bp, Homo sapiens
gtgaacccattttatagccactacaatgtagcaccctcaaaaatcgcaactactactgatagagatacaatattgggcttcatacctactctctgaatttgtttaatgtaattatctataaaaactcagaagatggtgcaattgactgaatgtccttgtctcctccaaattcatatgytgagactctaatctccatgagatggtattaggagatggagcctttgggaggtgatgaggtcatgagggtgggaacttcatgactgagatgagttccctcataaaagagaccccagggagatttttgaccctttttctgaaatagaggaatacaatgagaagttggcagtctgtaacccggaagagggccctcgctagaactcaatcatgctggtaccctgatcacaggcttccagcctccacagctgtgagaaatttctgtcatctataacttagagtacttagtcagtttaggctgctatgctaataaa

SEQ ID NO: 179132 - DNA, 575 bp, Homo sapiens
gtgaaggggaagcaaggaccttcttcacatggtggcaggaaagagaagagccagcaagagcagggaaaattgccttataaagctatcagatctcatgagaactcattatcatgagaacagcgtgggggaaactgaccccatgatccaatcaaccccctcccacgacgtggggattacagttccctccctcaacatgtggggattacaattcaagatgagatttgggtggggacacagccagacaatatcaagggtatttttaatataaactacaaacaaaactagcctacactgactgacacagaaccagacccaaaggagctttgtaaacctcccaagagacccagcaggtgttagaactctctacactcagaatcataaactcaagtgttacagggatcaggcaaggcaggtaactaaggaaagcagctgagcacatgatagcagaaagtgggagggactagatcaaactggtgagcacatgccaaggaaatgtgggatccrtgttgctaaatcttgcaatttttcagaagaatttggatatttgtgtgacttttcctaatggataaaaaact

SEQ ID NO: 179133 - DNA, 557 bp, Homo sapiens
tgtttggaaacactgtttttctccattctgtgaaaggacatttgggagctctttcaggccaatgatgaaaaagaaaatatcccaggataaaaactggaaggatgctatctgagaagctgctttgttatgtgggctttcatctcacagagttaacctctcttttcattcaacagtttgtaaacactgttttggttgtatctgttaagggctatttgggagcacattgaggcctayggtgaaaaaggaaatgtcttcatataaaaactggaaagaagctttctgagaaactgctttgtgatgtgtgccttcatctcacagagttaaaccattctctggaatcagcagtttggaaacacgtttttgtccattctgcaaatggaattttgggagttcattgagaacaatggtaaaaaagcaaatttcccaggataaaaactagaaagaagctatctgagacactgctttgttacatgtgcatacaacttggagagataaatgtatcttttcattcaacagtttggaaactctgtttttgtagaatctgcaaagggatattt

SEQ ID NO: 179134 - DNA, 406 bp, Homo sapiens
ggaagctactggttgccagtttcaggtttttcctatctattaagacattgcctttccctggcaccaactgcaaccaattattattttagagaggcagttaacaaccgcctgaccatcacctgatggtcacctgatattcctggtgygtgtggtggtggggacgaggggagccctctcctgctctgctcatgtctgtctagttacctactgtaacaagaccatagtattggggacagagctagcactcagcaaagacatgttgaataaataatccttcacaaatcatcatctcatggtctgaagttctggatttcaatctcttgattccaatctgtcttgaggtgaatggtgagtccccaaaagctgtgttcacctgaagtctgtgtgatctgctttgtaaaaaggg

SEQ ID NO: 179135 - DNA, 406 bp, Homo sapiens
ggaagctactggttgccagtttcaggtttttcctatctattaagacattgcctttccctggcaccaactgcaaccaattattattttagagaggcagttaacaaccgcctgaccatcacctgatggtcacctgatattcctggtgcgtgtggtggtggggacgaggggagccctctcctgctctgctcatgtctgtctagttacctactgtaacaagaccatagtattggggacagagctagcactsagcaaagacatgttgaataaataatccttcacaaatcatcatctcatggtctgaagttctggatttcaatctcttgattccaatctgtcttgaggtgaatggtgagtccccaaaagctgtgttcacctgaagtctgtgtgatctgctttgtaaaaaggg

SEQ ID NO: 179136 - DNA, 410 bp, Homo sapiens
actgggaagctactggttgccagtttcaggtttttcctatctattaagacattgcctttccctggcaccaactgcaaccaattattattttagagaggcagttaacaaccgcctgaccatcacctgatggtcacctgatattcctggtgcgtgtggtggtggggacgaggggagccctctcctgctctgctcatgtctgtctagttacctactgtaacaagaccatagtattggggacagagctagcactcagcaaagacatgttgaataaataatccttcacaaatcatcatctcatggtctgaagttctggatttcaatctcttgattccaatctgtcttgaggtgaatggtgagtccccaaaagctgtgttcacctgaagtckgtgtgatctgctttgtaaaaaggg

SEQ ID NO: 179137 - DNA, 540 bp, Homo sapiens
gcttgaacccaggagatgaaggttgcagtgagccgagatcatgccactgcactccagcctgggccacagggtgagactttgtctccaaaaaaaaaawatatatatatatatagagagagagagagagagagactgcatgtctacacatgttggtgcatcaatgaagcctcatctaatctttataataatcatgtagaagtggaaaaaactgctacctcctttttgtagataggagaacggaggctcagagaagtgagttaacttgtccaaggccgcacaagtttggggcaaattcaggcttggaagcaaggtctgtcacttggaaagaccttgcccttttccttgccccagtgaatgaatggataccttggtgctgcatctccaaacacacgtctcatgggaggcagagcaggaagataagatatgcattctgaggcctagggaaatcgttgagattatgcctcagtggaaaaaataaaggcttgcatatggtgggttggtaattggtgaaggaaatgaaggtaaatggaccactaggat

SEQ ID NO: 179138 - DNA, 610 bp, Homo sapiens
ctaatagatgtgctcatgaatgcttcacacgtcctcctcctgctctggcctttactttgggagcatgagttattgactttccccagaaccacagacaggagagcagcaattcatctgtcctgctggcagcttgcactgaaggcaatggctgcctccacattctctaggtgacaggctatcacacatggctttcatctgattcccctgcaagatttgggctgtggagaaatagaatcttttatccagatattttagtgcatagaattgtgtgtgattaaatcatttatccagagcttgtacctaaagcaggccctgatatgaacctaaacctgtattctaggcctccccacattcaccacatcggggtctgatactcccaccacagggggactactttcttttttatcatgcctgtgagttctttgaaaatcaaaagcggaatgttatccctggctggggctttagagatctagtgttacccccttttttttttattgcaacataatatttgtacatactgatggggyacctgtgatatggaaggggggcagggaagtgctgagtagagaaaggtgccctccctcgctagggctccacccccgggcctgtg

SEQ ID NO: 179139 - DNA, 550 bp, Homo sapiens
ttctttttatggcttcatagtattccatggcacatatgtaccacatttaatgattatcaaaataattaatacagtataaattacttatatttatatttttaaacattattacatttattatgacattacagtgttacaattgtcctaaaataagaaggacaattatcatacccatctacagattgagaaactgaagttcagatagaaagcaatttgcctgaggtctcwcagatacctgtggcaccagatcagaattttctggaacagaattttctgactcttcatcagatctatatatgccttatgcttttagtgatcatcttatttgaaaatgtaaaaacttagaatatctaaattgcttaagacaattttgtgacagacatcagtactgtcaagaatatcagcctagacatctcataaaaatgtatcaaagtacccagtatataggtcagtacacctacatccagatatttattaaaaatgatatgcataaatacttcttctcttcactttctcctacaagaatcagtgtgacacaatgtttacacac

SEQ ID NO: 179140 - DNA, 550 bp, Homo sapiens
ttctttttatggcttcatagtattccatggcacatatgtaccacatttaatgattatcaaaataattaatacagtataaattacttatatttatatttttaaacattattacatttattatgacattacagtgttacaattgtcctaaaataagaaggacaattatcatacccatctacagattgagaaactgaagttcagatagaaagcaatttgcctgaggtctcayagatacctgtggcaccagatcagaattttctggaacagaattttctgactcttcatcagatctatatatgccttatgcttttagtgatcatcttatttgaaaatgtaaaaacttagaatatctaaattgcttaagacaattttgtgacagacatcagtactgtcaagaatatcagcctagacatctcataaaaatgtatcaaagtacccagtatataggtcagtacacctacatccagatatttattaaaaatgatatgcataaatacttcttctcttcactttctcctacaagaatcagtgtgacacaatgtttacacac

SEQ ID NO: 179141 - DNA, 550 bp, Homo sapiens
ttctttttatggcttcatagtattccatggcacatatgtaccacatttaatgattatcaaaataattaatacagtataaattacttatatttatatttttaaacattattacatttattatgacattacagtgttacaattgtcctaaaataagaaggacaattatcatacccatctacagattgagaaactgaagttcagatagaaagcaatttgcctgaggtctcacagatacctgtggcaccagatcagaattttctggaacagaattttctgactcttcatcagatctatatatgccttatgcttttagtgatcatcttatttgaaaatgtaaaaacttagaatatctaaattgcttargacaattttgtgacagacatcagtactgtcaagaatatcagcctagacatctcataaaaatgtatcaaagtacccagtatataggtcagtacacctacatccagatatttattaaaaatgatatgcataaatacttcttctcttcactttctcctacaagaatcagtgtgacacaatgtttacacac

SEQ ID NO: 179142 - DNA, 550 bp, Homo sapiens
ttctttttatggcttcatagtattccatggcacatatgtaccacatttaatgattatcaaaataattaatacagtataaattacttatatttatatttttaaacattattacatttattatgacattacagtgttacaattgtcctaaaataagaaggacaattatcatacccatctacagattgagaaactgaagttcagatagaaagcaatttgcctgaggtctcacagatacctgtggcaccagatcagaattttctggaacagaattttctgactcttcatcagatctatatatgccttatgcttttagtgatcatcttatttgaaaatgtaaaaacttagaatatctaaattgcttaagacaattttgtgacagacatcagtactgtcaagaatatcagcctagacatctcataaaaatgtatcaaagtayccagtatataggtcagtacacctacatccagatatttattaaaaatgatatgcataaatacttcttctcttcactttctcctacaagaatcagtgtgacacaatgtttacacac

SEQ ID NO: 179143 - DNA, 494 bp, Homo sapiens
tgtgggcacagtgtacaacaactgtcctgggcgagccggcacctgtggtcaccctggaaagtagaaactttctttgcccagaatacttttctgcctctgctttggttawactttatgtcttctccaggacttggttccaccaatttatttcctcttattatttctcagtttgtccattagtttattcactgaatattcaaaaaagtgcctattatgtcaagattgtctctaacaatcctttttttttttttttttttggagatggggtttcattcattcttttgcccaagctggattcagtggcataatcatgcctcactgcagcctcgaactcccagactcaagtgatccttccatctcagcctcctgagtagctaggagtacaggcacatgccatcatgcccagctaattttttttttttttttttagagacagggtctcactatactgctcaggctggtctcaaactcttgggctccagtgatcctccctc

SEQ ID NO: 179144 - DNA, 447 bp, Homo sapiens
ctattaaaatgtatcctaacaactgccataagcacccttggaaaccttagaacaaataattgctttcattctacctcagtttgccagcttctgctgggatttgggaggtgaatcacatttaccagggaaacaggggccagagggatattccaagyaaggcaaaaacacatgcaaaagagtctaggaaatagcctggtgtgtgtcagaaaagagagacatgctatagaaggaggaggattgacccctcagtccgtggcttccaaacataagtgcacttagaaaaaaatctttcaaacctgcttaacattgccgctttctatgtcttacctactcccgttctcctgcaaaattcacattctgttgtcccagagcagagctcaggatgtgcactttggtaagcacagccttacaccaagtcactgacccctcactgatatggaagcaggt

SEQ ID NO: 179145 - DNA, 367 bp, Homo sapiens
agtcattcagatcatctaccaatctcatgtttatatcccttctacaaaacattcattaataatgatcatccaggccaggtgcagtggmgtgtacctgtagtcccacctactcaggatgctgaggtgggaggatccttgagcccaggagttcaagggtgtgctatgctgtgattatgcctgtgaatagccagtacactccagcctgggcaacataggaaaaccacatctcaaaaaaaaaaaaaaaaaaaaaagatccaaccttggattcaactcccatagggaagggaaactccctacttttcagaataacctattccctctcaaaatgactccactgttgagtttcttccttacactgagctgcagt

SEQ ID NO: 179146 - DNA, 538 bp, Homo sapiens
ttaatgatggttaatacatggtgaacgctcagtaaatgccaagcattgttgtaagtaccatccttgaattatttaattattacatttctactgcctcatagtatttttaagatggatcctagtattgttctaattcttaagatgtaaaaataaaagtacagataactaatttccccaataatattacaagtttggtaagtagcagagtcacaaatccaagtattctggttctgagttttgttagtaaaaggcttcattagcaatcaaagaaaattagttaacacagtgatatgctctgttgcctgtaatattagttatgttttaaagctagtattattgctactggtaaggtaaatgaatactctcacccacttctggcttgagtattagctggagaagccatcctaaagaaatttgacaatatctactaataacattagaaacatttatatttcaatytaacaattttattttggtcatttattttagtaatcaaatgataccataaagtgcttatgaataaataatttatagaaga

SEQ ID NO: 179147 - DNA, 602 bp, Homo sapiens
gtgcagagctagtaaggttccaaacagtaattgtgactttgttaaagtgaaaactttttttttttttttttttttttgagacaaagtctgggtctatcacccaggctgcagtgcaatggcacaatcttggttcactgcaacctctgcctctgaagkggggtttcctgatgatgcccagctgctcttgaacttgtgagctcaagcggtctgcccacctcggcctcccaaagggctggaattacaggcatgagccactgcactctgccttggagcgaaaatattgaatgtgatattgctttcaatgttgaccactgattaccaagatgcgtcttaagttttgaagcagtttctcttttcattcaaagattacatgcagggttttgattagtagtcaccacaatgatattttctcacattttatgtacctcatacaacccttaatgagggagaagaaaaggaaaaatcaattaggtagacagttaaacctggtcctcagagaagcatcctgcctgaaaaatcatggttacaggcaaaaatagagcagcctggggaaaactcacactgcacctgcacagataagcaggcagggtccagcacagaag

SEQ ID NO: 179148 - DNA, 602 bp, Homo sapiens
gtgcagagctagtaaggttccaaacagtaattgtgactttgttaaagtgaaaactttttttttttttttttttttttgagacaaagtctgggtctatcacccaggctgcagtgcaatggcacaatcttggttcactgcaacctctgcctctgaaggggggtttcctgatgatgcccagctgctcttgaacttgtgagctcaagcggtctgcccacctcggcctcccaaagkgctggaattacaggcatgagccactgcactctgccttggagcgaaaatattgaatgtgatattgctttcaatgttgaccactgattaccaagatgcgtcttaagttttgaagcagtttctcttttcattcaaagattacatgcagggttttgattagtagtcaccacaatgatattttctcacattttatgtacctcatacaacccttaatgagggagaagaaaaggaaaaatcaattaggtagacagttaaacctggtcctcagagaagcatcctgcctgaaaaatcatggttacaggcaaaaatagagcagcctggggaaaactcacactgcacctgcacagataagcaggcagggtccagcacagaag

SEQ ID NO: 179149 - DNA, 602 bp, Homo sapiens
gtgcagagctagtaaggttccaaacagtaattgtgactttgttaaagtgaaaactttttttttttttttttttttttgagacaaagtctgggtctatcacccaggctgcagtgcaatggcacaatcttggttcactgcaacctctgcctctgaaggggggtttcctgatgatgcccagctgctcttgaacttgtgagctcaagcggtctgcccacctcggcctcccaaagggctggaattacaggcatgagccactgcactctgccttggagcgaaaatattgaatgtgatattgctttcaatgttgaccactgattaccaagatgcgtcttaagttttgaagcagtttctcttttcattcaragattacatgcagggttttgattagtagtcaccacaatgatattttctcacattttatgtacctcatacaacccttaatgagggagaagaaaaggaaaaatcaattaggtagacagttaaacctggtcctcagagaagcatcctgcctgaaaaatcatggttacaggcaaaaatagagcagcctggggaaaactcacactgcacctgcacagataagcaggcagggtccagcacagaag

SEQ ID NO: 179150 - DNA, 510 bp, Homo sapiens
aggacacctggtcacaagtcagccacttagacattagtccatccaccaagataaagaagtatcccatgaaaggaacactatgaacatccacaaccaaaccctctggagtcccacagggcagggctggggtttataaccattcttctttttttttttcttttttttttttttgagacggagtttttctcttctgcccaggctacagtgaagtggcatgatctcggctcactgcaacctctgcctcccaggttcaagcaaagctcctgcctcagcctcctgagtagctgggattataggcgcctgccaccatgcctgggtaatttttttatttttagaagagatgagattttgccatgttggccaggctggtctggaactctagaactctggtgatccrcccccctcggcctcccaaattgctggaattacaggcatgagccaccactcccagcctatagccatctttgagagagactttgaccccacattagaaaaaataataaataaata

SEQ ID NO: 179151 - DNA, 510 bp, Homo sapiens
aggacacctggtcacaagtcagccacttagacattagtccatccaccaagataaagaagtatcccatgaaaggaacactatgaacatccacaaccaaaccctctggagtcccacagggcagggctggggtttataaccattcttctttttttttttcttttttttttttttgagacggagtttttctcttctgcccaggctacagtgaagtggcatgatctcggctcactgcaacctctgcctcccaggttcaagcaaagctcctgcctcagcctcctgagtagctgggattataggcgcctgccaccatgcctgggtaatttttttatttttagaagagatgagattttgccatgttggccaggctggtctggaactctagaactctggtgatccgcccccctcggcctcccaaaktgctggaattacaggcatgagccaccactcccagcctatagccatctttgagagagactttgaccccacattagaaaaaataataaataaata

SEQ ID NO: 179152 - DNA, 510 bp, Homo sapiens
aggacacctggtcacaagtcagccacttagacattagtccatccaccaagataaagaagtatcccatgaaaggaacactatgaacatccacaaccaaaccctctggagtcccacagggcagggctggggtttataaccattcttctttttttttttcttttttttttttttgagacggagtttttctcttctgcccaggctacagtgaagtggcatgatctcggctcactgcaacctctgcctcccaggttcaagcaaagctcctgcctcagcctcctgagtagctgggattataggcgcctgccaccatgcctgggtaatttttttatttttagaagagatgagattttgccatgttggccaggctggtctggaactctagaactctggtgatccgcccccctcggcctcccaaattgctggaattacaggcatgagccaccactcccagcctatagccatctttgagagagactttgacmccacattagaaaaaataataaataaata

SEQ ID NO: 179153 - DNA, 557 bp, Homo sapiens
atacacattcacaggcatactcacacagttccaacctggagtcctcttgctgcaacagcatgttagaataagaaaaggaaattaatctgtagactgtttttaaaattacattttttggaaagtcttcccatcgtgaatcttccaggtaaacaaaatatttatggtatagacaaacattactaaaaatgagaatattttcaactttcccctaaacattctttatttcactcctcccttaaaaatagcatttgtgtttaaagttttatcatatagtttgagctgaggagctgagagaagagattacaaagcaaagggatagagacaataatagcagcactaaaggtgaactcaactgttaagaaaatacacaagaaaaccaagttttctttcagctagaagtcataatgactattattttctttctattcctgacatcctccacagtgctaatctgaaaaagaaatagacaaggcggttattaaaaaagcacaaattgcttattttaktctgattcgaaattattttatgagaagaacactaaagcctattgtgtattt

SEQ ID NO: 179154 - DNA, 587 bp, Homo sapiens
acacatatcatagattaagtgagtttaaagagcatatttcagaaattgtgctaatgtgtttctcagcaaggagcctgtgctccttgatcacttctctccaggaagccaagtctcatgttatacattaccggagagggaagttgaagaagacaagtcatcaagacggagacaggaaacttattttgtaaactcttgaaatctgaatgtgtaatatatctctcaataaactataatatcctgagttatcacagtttattcagaggcatatttaacagaaaaaaggcaggaggtatattttctgcctcctgagtgtgacatttagggattatctttctggttaaagcaagaaactaggggtgccacctccctttccacattccagattccccagtcttttctagattccccagtctcaaccctcacctccaatgagaagagactgttcatttgagctttctagactaagacacctaaaagaggggcaataataggcacctgcagcaaatctgctgkcttatagtttggagaaagaggacatatactcctgttcatctgaagttaagttttgatttgatctgaccatcaca

SEQ ID NO: 179155 - DNA, 641 bp, Homo sapiens
tgtgtagtaaaacaggaattagggaggggtaaagaagaggagttggtcaacaggaagcaggtggtcagttaggcagtcatgatgggtgaggggtctgatgtctcattgtccagacgtggtgatttggtgagtttcagctccttgatactatctgggaggactgatggttggtttcctgagaaagagactcagataagacaaatgtaactttctcaaattttaggactgggaggatcaatttctattcaaaagaaaccaaaaacattagttctgtgagacamttgggccagtttcataatcaggatggtgcccatatggtgttttctccttacttttccccatcaccacgtgggtactcaagtgctcggctctcagaagatgctgaagtcttgaattgttttgatatcctatttgtgccttgataaaacttttgtgtgtttaatggtggttggtaaacaaaacagggatggattgatccacaaatcttaagagtgtactgccttggactcacctcttcacttctctgggaagtgaagtttactttacatctgtaaaatgggagagaaggggaagtgttagactatttcctaactaggattcctctaacattctcaaagaaagttgttaaagttggtcggtaa

SEQ ID NO: 179156 - DNA, 641 bp, Homo sapiens
tgtgtagtaaaacaggaattagggaggggtaaagaagaggagttggtcaacaggaagcaggtggtcagttaggcagtcatgatgggtgaggggtctgatgtctcattgtccagacgtggtgatttggtgagtttcagctccttgatactatctgggaggactgatggttggtttcctgagaaagagactcagataagacaaatgtaactttctcaaattttaggactgggaggatcaatttctattcaaaagaaaccaaaaacattagttctgtgagacaattgggccagtttcataatcaggatggtgcccatatggtgttttctccttacttttccccatcaccaygtgggtactcaagtgctcggctctcagaagatgctgaagtcttgaattgttttgatatcctatttgtgccttgataaaacttttgtgtgtttaatggtggttggtaaacaaaacagggatggattgatccacaaatcttaagagtgtactgccttggactcacctcttcacttctctgggaagtgaagtttactttacatctgtaaaatgggagagaaggggaagtgttagactatttcctaactaggattcctctaacattctcaaagaaagttgttaaagttggtcggtaa

SEQ ID NO: 179157 - DNA, 641 bp, Homo sapiens
tgtgtagtaaaacaggaattagggaggggtaaagaagaggagttggtcaacaggaagcaggtggtcagttaggcagtcatgatgggtgaggggtctgatgtctcattgtccagacgtggtgatttggtgagtttcagctccttgatactatctgggaggactgatggttggtttcctgagaaagagactcagataagacaaatgtaactttctcaaattttaggactgggaggatcaatttctattcaaaagaaaccaaaaacattagttctgtgagacaattgggccagtttcataatcaggatggtgcccatatggtgttttctccttacttttccccatcaccacgtgggtactcaagtgctcggctctcagaagatgctgaagtcttgaattgttttgatatcctatttgtgccttgataaaacttttgtgtgtttaatggtggttggtaaacaaaacagggatggattgatccasaaatcttaagagtgtactgccttggactcacctcttcacttctctgggaagtgaagtttactttacatctgtaaaatgggagagaaggggaagtgttagactatttcctaactaggattcctctaacattctcaaagaaagttgttaaagttggtcggtaa

SEQ ID NO: 179158 - DNA, 583 bp, Homo sapiens
agacagggtctcactctgtcacccgggctggagtgcaatggtgtgaacctagatcactgtagcctcaaactcctgggcttggacgatcctccttcctcagcttcctgagtaatttgaacaataggcatgtgccaccaggcctggctaattttttttttttttttggtacaaatgtgctctcgctatgttgtctaggctgctctcaaactcctggcatcaagcagtcctccctcttcggcctcccaaaatgctgggattacaggtgtaagccaccrtgtccagcctaaaactatttttaaattgccccattgtactcaccaaaaagtcaaaagaaaaattcaaatgaccatgtccagtggttaatcaaggaagcctagaagccatgatcaagtttcccgttcccattgtgtagcttgttaatacctgtgccctatctacacatgtccatgtagctttctcaatcatatgtgcactaaaatacttacacaatcttgcaacacacagggacatttgggtcaatgatggaccacatagataatggagatcataatagagctgaatagataaataagatcagaataca

SEQ ID NO: 179159 - DNA, 478 bp, Homo sapiens
atagataaataagatcagaatacagctgaaaaattcctattacagtggtaatgtcgaagagcaatgcagtgattctgttggaaacaaaactactgtgctaccagtcatataaaagtggagcacatacaattatgcatagtgcrtgatacttgataacgataataaatgattatatttactatactaaacttttagaatgtattcctacttataaagaagttaactgtaaaacagcctcaggcaggtctttctggaggtattctaaaagaaggcattgtttataattgatattctggttaaagttttaaagagtaatttaattccccttgctggcaagttcaagagtttaatgtgtggttcatttgtccatcttaaaaataattacagctaatcagtagtttcaatgtgtataacaactatcatttgtatttgggtatcagggcaaacgaatgaggtaaatgtgattgtgaaaagcaag

SEQ ID NO: 179160 - DNA, 492 bp, Homo sapiens
aaggtttaaagattagttgaacttccctcaactacacctaaagcaaaggggaattttagtaagtgtgtgtaccttgtttctttcagacrcatctagaatgtttttctttcaccgtacctccaaaagaggcaatttagaaagtattaagtagtgacttttgttcagttccattttgtgtgtgtgtgtgtgtgtgtgtgtgtgtgtgtgttaaccttgctttaaaacagtagcatatactatggtcattgaacttaatctctctggcgttagaaatttactttacaaaattgtgttaagacttttggaaaaagaaaatgaaactgctgtggtaaaaaccaagtttgtttcaaaaaagtaggcaattatttggctgttacattttctttgaaaactgcaataatttatatatttgtattgctctgcttgggaactgtatatatgcttgtctactatttttaattttacaacaataaaataagtattttgttatct

SEQ ID NO: 179161 - DNA, 466 bp, Homo sapiens
acttaattattggatttggtaaaagccttctgaaaactgagactttatagacccttataatttataattcaggtaaccatttcacagaatttgcccacattactagatcctatcgtctttctttgtgaattatttatgtacgagtttctgtcttctaagtccacacaaagttccatgtgaaaaatgtgaatgcagtaggatccctgtgcaggagccaacaggatgcttgacgtggtttaaaaataaattagggaaagtcaccaggaagcaagcaagtcttctccattgcaggaaggatttgagtgatctttcttaattagtaaatgtggagagaataggcctgatggcrtgggtgcagggctccagagcatgaaaaagagtttttgttattccagcaaaggtctagtgattcaaggaaacacaaggtaaccaagctgtctcttgggaggaaatggattggcttaca

SEQ ID NO: 179162 - DNA, 441 bp, Homo sapiens
tgtgggacctggctctactactttctctttagttatatgggatggtcctgaatactaattgacttaagataggttaattttgagttttgcaaaaaaatttagagaatatggatatggaagaaaataaaaactgcccrtaaaaacatagccacccatacatgtctttagtgtgtttttattctataggaatgctataatatgcttctatgtaaaatttcctatctttttaaaataaaattatgaacatgttcatattttgttaattccaatcttggtaaatctcgctcttagtttattaaggtctgtctctgtgtggctaaatgtgcctgggaaaaaatattaccttgctgactggttgaattttgaattcattgttattaatcacaagtggatgcctggcaccatactgcaatttcctagtcctccacttgcccatcgccc

SEQ ID NO: 179163 - DNA, 401 bp, Homo sapiens
tcagaaacaaatacaaaaagtaaatccatgaaaacttaacaggcatcagaaaaattctcctttagtattatgaacaaatgtagcccgggtgtggtggctcacacctgtaatcccagtactttgggaggccaaggcaggcagatcacctgaggtcaggagttcaagaccagcctagccaatatggtgaaaccctgtctctactaaaaatacaaaaattagccaggcgtggtggtacacgcctgtaatcccagctacacaggaagctgaggcatgacaattgcttgaacccaggaggcatakcttgcagtgagctgagattgcaccattgcactccagcctgcatgacagagcgagtctccatcttataaaataaaaaaaagaatcaagactaagaggaattc

SEQ ID NO: 179164 - DNA, 602 bp, Homo sapiens
ttacaaccatagcagaaggggaagcaaacacatccttcttcacatgatggcaggaaggcaaagtgcccagcaaaaggggcaaagccacttataaaaccatcagacctcatgagaactcaatcactatcatgagaacagcagcataggggcaaccaccccatgattcaattatctctcaggccctgctcacaacacatggggattatggaaactacaattcaagctgacatttgggtgaagatacagccacatcgtatcattcctcctctggcccctcccaaatttcacattctcacatttcaaaacacaatcttccctttccaaagatcccccaaagtctgagctcattccagcatcagcccaaaattccaagatttcatctaagacaaggcaggtatctttcacctacgagcctgtaaaatcaaaagcaagttagttacttcagagatacaatgtgggtacaggcactgggtaaatacaccagttccaaatgggagaaattggccaaaacaaaggggctacaggccccaggcaagtccaaaatccratagggcaatcattaaaacttcaagttccaaaatgatcccctgtgactccatgtc

SEQ ID NO: 179165 - DNA, 240 bp, Homo sapiens
aacaaatttatatccacaatcgttggtttctttgctaaaagagtagaattatcaccagaaaaaaatccaaggtatgatgactcctttatctattaggctatgtgatttaaaaggatattgtacatgtttgggatcartagaatttttgtgggtttagccagagacatgatcaggctctttctgttcttgtctttcccaactaatcgtttgcatctgaggtttccactgatatatgacctg

SEQ ID NO: 179166 - DNA, 522 bp, Homo sapiens
gcatcagacatacctcatttaagggacatactacaaaacgcataccaaaatatgtcacaaaactctcaaggtcatgaaaaataaggaaagatggaaaaactatcataagtcagaggaggctaaggaggcagtacaactaaatgcaatgtgggaactgggattggatcctgcaacagataaaggktattgttggggtgaacagacccaacaccaggtcgtgggggtgacaaagtccagcggagtcaaaggattgagaaaaagacagtttgagagagaaaggtgggacaccaggggcccactgcaatcatggaggctgtgaaggtcctgagctgtgggaccccacgctatttattggtaatccaacaaagaaacaggtggtgagaatgtggaggtcatcttgcattaagcacatgatttatagctgtcatggtttagcgtttgctctgctgcttgagaaaatggagagcaggttcttttaactcaagatacaattgatcctgggagagcaaggagcaaggagcc

SEQ ID NO: 179167 - DNA, 556 bp, Homo sapiens
aagtgggatccattgaaatgtaacatcaagaaagacagggactctgtttcccagtccctgtgggaggttaggagactaacttaggtagacagcaattaccaaacacagagcacytaatcacattaaccaccctccccctgaatatcgtcagtatttctctaccagcttatcttaacctttaaaaatcctcttactttctctttcagccacctatttttcaggtctgagttcaacctttctcgctactgcactagtcctgactgttaattgcaacggtcttgactgtaaagactaccttgtggttttcagcatgtgcccggtgaaattgttcttttaggagtatatatatatatatcaatagtttgtggtgggtaagttaatttaggtgggaaattgaagttaaaattttcttctggatgaagtagttcaggaaatgttacccaaaattatccagctttggtatgctgattatttcaaactgatggcatttgaagaaaagcaaattcagaaaggggctttctctgaacttcctttgtctgcctaggaacagatcctc

SEQ ID NO: 179168 - DNA, 528 bp, Homo sapiens
aagatgatttaaagtatatgggaggatatgtgtaagttacatgcaaatactacaccattttatattaggaacttgagcatccctggattaggtacccatagggatcctgaaaccaatcccctatggatatcaaaggatgactgtaatcacttaaatcaaataaatgactcggattttaattgtatttacctccaaagctttaatgaaatttttattttggrtagttaaacaatataaatatttttgaaaaaaatcctattggataaataattttcttcccaaaagaattgtatgccactatgtttcaaggacaatttgaagcatctgcttccagtgttattgattgtattctcattttaatattgaaaaatgctctttttctttctatgccattatttaagatctacaaaagtttaaaatacctcctacactactgttcaacatggaatactaaaagcatatatttatttacctcccttcttaaaatctaaggcatacaaaaataatcaaaagtagttcttagacttg

SEQ ID NO: 179169 - DNA, 542 bp, Homo sapiens
taataaacttgacttcattataatcaaaaatgttttctctgtaaaacatactgttaataaagtaaatagacaacctacaagctgggagaaaatatttgcagaatacattgtttgataaaacacagatatccaaaatatacaaagaacactttaaaaaaccttaatggacacctcaccaaagaaaatataaagatggaaaagtagatgaaaagttgctccaygaggaaaatgcaaattaaggcaacaatgaactaccattatgtacctattagaatgggcaatatccaaaacattttggtggctcttaaaatacatactgattttatgtattgacataaaattgacaactggcagcaccaaatgctggctggaactctcatttgtctctggtaggaatgcaaaattgccaagcaactttggaagacagatgagcagttcctgacaatattaaatatgtttttaccatatttagtaataacacatcttggtatttagcagcaatcacacaccttggtttttaccaaaatgagttgaaaacacag

SEQ ID NO: 179170 - DNA, 542 bp, Homo sapiens
taataaacttgacttcattataatcaaaaatgttttctctgtaaaacatactgttaataaagtaaatagacaacctacaagctgggagaaaatatttgcagaatacattgtttgataaaacacagatatccaaaatatacaaagaacactttaaaaaaccttaatggacacctcaccaaagaaaatataaagatggaaaagtagatgaaaagttgctccacgaggaaaatgcaaattaaggcaacaatgaactaccattatgtacctattagaatgggcaatatccaaaacattttggtggctcttaaaatacatactgattttatgtattgacataaaattgacaactgrcagcaccaaatgctggctggaactctcatttgtctctggtaggaatgcaaaattgccaagcaactttggaagacagatgagcagttcctgacaatattaaatatgtttttaccatatttagtaataacacatcttggtatttagcagcaatcacacaccttggtttttaccaaaatgagttgaaaacacag

SEQ ID NO: 179171 - DNA, 600 bp, Homo sapiens
ataaaaatattaatttaataataagtaatgtttatttagtttccactctgttgtagatactttttgatcatgatactctgcctttagggtagcttttttctggtgaattttatttccatcctataggagatgaaactaaggcaagtacagaatgagaagtctgtgcatytcacacaataagagtcaaatgcaatcgttaaattagtcaggattgaaataaaacacactcacatactaaagtttcatcgtaatcatccaacaggttcttctttactgcacagataaaaccaattcactgagacagcaagattgcagaagagaagaagtttaataattgcagggccagacgagtgacaggacaggagacatttctcaaatctgcttccccaaaagctcagagtttttggggaaggaggccacgaaaggagcaatgctgattggttgggccagggatgaaatcatagggggttgaagctttcttcttgtgcttagcctgggtgagggtcacaagaccagatgagccagtttcttggatggattactggtcgcggtggtgctacctggtccatcagaatgcagggtccgaaaaatacctcaaat

SEQ ID NO: 179172 - DNA, 600 bp, Homo sapiens
agggccagacgagtgacaggacaggagacatttctcaaatctgcttccccaaaagctcagagtttttggggaaggaggccacgaaaggagcaatgctgattggttgggccagggatgaaatcatagggggttgaagctttcttcttgtgcttagcctgggtgagggtcacaagaccagatgagccagtttcttggatggattactggtcgcggtggtgctacctggtccatcagaatgcagggtccgaaaaatacctcaaatactaatcttagrttttacaataatgatgttatttatgggagcaattggggaggttacaatccacgtgacctctggttacatgactcctgatacataatcttaaccttgtggctaatttgttagttttacaaaggcagttttggtctccaggcaaggagagggtcagtcttggacagaatcttttatcatctttgctttaaagttaacctataaactaaatttctcccatagctagcttggcctatgctcaggaatgaacaaggacagtttggaggttagaggcaagatggagccagctatgtcagacttctctcactgtcataatttttgcaaaggta

SEQ ID NO: 179173 - DNA, 521 bp, Homo sapiens
tccaggcaaggagagggtcagtcttggacagaatcttttatcatctttgctttaaagttaacctataaactaaatttctcccatagctagcttggcctatgctcaggaatgaacaaggacagyttggaggttagaggcaagatggagccagctatgtcagacttctctcactgtcataatttttgcaaaggtagtttcatgatgtcatcagggatagagagaattccccatatttttggctattctctgaacactgaaacagattcctttcaacagtttaccaaaatactctgtgtgctaggatggtattggagataattaatatttttattgagcactgaaacatttctgtatgtaagtctaggttgttccagtaaagagaacactcaagtaaggaaaggctgtgtaccctgataaatataacgatgttttaaaaggaacaaatcagatcacagtataatgtggattaaagttgcctatactctgtctatctatctatctatctatctatctatctatct

SEQ ID NO: 179174 - DNA, 560 bp, Homo sapiens
tctcaactccaatttcacccttctgccggctctttgtaaaaggatctgtgcccctttcactgtttttccttgccagcttccattaaagctttgccagtaaaagatggtggagaaatattgtaggagaaaacttttgctgcttggtcctggtgtaactgcttttgcggtgcacagggcatccaaggccacagctcccacagcacttccaaattttctagtacctaatttctgcagttcactgtggccagcaactttcagtggccaacagctttccccagcacttcctcagggcagatgatttctagcwgagtgctcccagcaagataattgtcagggaatagctgtccctggcatcctagatagtgaatttccagccagtttcatcagcacaacactataacaacttccttgccatgaccgtgccccctccacaaaagtctagatctcagccttgggttggtagtagggggtggaaattcttccttgggttctctatctcagcccaagtggtaatggctctttttatatctactatgcctacattccttaaattaatattt

SEQ ID NO: 179175 - DNA, 376 bp, Homo sapiens
ttgaacttgcattttctactacatgcagactaatgttttctgattgaaatgcctctcaagtatgacccagtgtgtstgtgtccacatttctatgaattcattctctactcctccattttttaaacaactgaaagtaaccagaaagaatgttattaaaaaaatcctgaaaaatatgtttttaaaatcagaaaaaatgatacatatttggcttcatgacatttttagacctaaaaataaatattgaacaaaatcatgttattaatatcaaataataaattttttccttaatgactcctcttttgacttcctcccaagctataaagaaagataccccatgccaaagttatataatctatgcatctttcagaagacttta

SEQ ID NO: 179176 - DNA, 640 bp, Homo sapiens
ttacaaaagtttatcagcaaatgccctttttttgtaggggacagggcagcaggagaatagggacaggatatcagacaactgatttttactgcaataagagcaacaaggaatctcaccgtcacatgccatctactttatgtaaaaaccaatccagcagaacgagcaacagtcaccctcaggaggtgatttagccccaagtacccagagaacagcctcaggccacgacttctgtgctgcttcactgtgcccagaaccatctgccaagaccaggaattcatctttggagtataacttgttttctctctttttttcacgtctcaaaaaataaaaaaagcttcataatacagccgaagggttaccatgtgtctaaaaggaggacaggttcccataaacaatgttgtcagcttgagtgggggtaaacacaggaaggaacaccataaattaaagcagaccctgactcttcagaggctctgcggtgatgtctgggggccagatctgccagtggctgcatttccagcactagcatagtgttgaggactatgaggaaatatatatatatttctagtagtcattctaaaccatgacaratttgattgtcataatgataagatgatgacagttggtacctgctaatggtatt

SEQ ID NO: 179177 - DNA, 409 bp, Homo sapiens
gaattcagcagaatacaaattagctcatatatatgagaaaattgccttaggtcatggaacaaactagcctaaatgattagaggaaaaggtagttcaacattcaaagagggcctagaaaagtttctgttctcatcattgcattagtcagcattctccaaaaaaataaaactgacaggatacatacatacatacatacatacatacatatatatatatatatatatatatatataaaggatacamacatatattcataatacgacatctgcaatctggagacccaagaaaactggtagtgtaattctagtctgagtcaccaggcctgagaaccagagaaggggccaatggtgtaaattccagtccaagagcagaaggagatggtatgacaaatctcagctcaagcaggcag

SEQ ID NO: 179178 - DNA, 649 bp, Homo sapiens
atcacaaccctgaccttggccccagatagtctcatctttccaaataacagccaaagatttgtagcagggctgcattcataatagatgcaaaattaaattctactaagtctcatgttttttttttgctttcgtatttttatcatgtaaacaacatggcatattccaaaggcttaaaggataaatcctagagaaacacacataagttgaaagaggtaaatctgcaggactggagaaggagaaactgtaaccattctgcaagygtagcaaggcaggagccaactcaagttttttatattctatcagagaacaagcaaatcactgaaagaaattctgaatgtgatgtgcatcccacccaagcaggggacataaggcaggttctccttctaggtcagaaaaccaggaggagagagagcctcatgcaacttagataccagagcccaagaatcagacagacagaaagacctccttacattaggatatggggtgtggcggtgtcacggtgggatcagttacagaacagttgcttcataatgctgccaagtgctgagaaaagttatgccagacaatgagtcatcaggcacagaaaattattggactatgtcaaaatgctttctcctaaacagcaaagtcttctgacaacttgggaaac

SEQ ID NO: 179179 - DNA, 561 bp, Homo sapiens
caaatcactgaaagaaattctgaatgtgatgtgcatcccacccaagcaggggacataaggcaggttctccttctaggtcagaaaaccaggaggagagagagcctcatgcaacttagataccagagcccaagaatcagacagacagaaagacctccttacattaggatatggggtgtggcggtgtcayggtgggatcagttacagaacagttgcttcataatgctgccaagtgctgagaaaagttatgccagacaatgagtcatcaggcacagaaaattattggactatgtcaaaatgctttctcctaaacagcaaagtcttctgacaacttgggaaacatgacttctgctcttgtctggtacagagaagagggctggggggagcttccagaaaactgaatagcacatacatctctgaaagacaagaaataacaacacaaataaaaaggcaagatgatatttttaaaagaaaagaattgaaacaaaaacatttgttgaatgtttattgattagtaattatgtagtgaaactcttctacacactggggatacatcaagttcca

SEQ ID NO: 179180 - DNA, 379 bp, Homo sapiens
ttgcttgataaataattattgcatgaataaataaatgaaaatttcaagaatgagtctttttttcagaattataattgccagatttaacaaacaaaaatataggactcccagttaaattygagtttcagtaaaacaatgaataatttatttagtataaatacatcctaaatatttcattgctaaaataaaatttttaaatctggaattcaaattgcactgggtgtctgtatttatctagcaactcttgtctgaaaaaattcttccaagactgacttgattgaatgaattgtgggaaaaatgttttaatgcttcatatagaagcatcaagaatgcttcatatacatttgtgccaactatgaaaatcaaaagactatgtttt

SEQ ID NO: 179181 - DNA, 462 bp, Homo sapiens
ataaacctctctctttagtgagatctcacagcttgtaaatgatagaattgggctcaygtccaatcagacccatagataaatgttgaagttgtgagaatatatagaatgaggggctccttctctcggctttggagccccctccctctgtctctgtacaagggagcttcttccttctcccttccttcatgccccttcttgcctattaaactctccacttcttaaaacaaaaaacaaaacggcaaaagaatatatagaatgatatagtacatttttggagaacatatcctttgtgatagaataacagattgtgaagagacatagaaaaagtttttttaattacttaaactaatttttaggacaatgcttcaagagaggccaaagagtataagatattcttcttaccattaaagaacttagacattgtattcaaggttcttttaagtcacatgaacaaaaacccat

SEQ ID NO: 179182 - DNA, 393 bp, Homo sapiens
ttcattttttaatatcactttttgagtcagagctcttcatgtmtatgtctttccacacagtatagttttctgtgccctcagtaatattggtgatgcaacaattcttgaaagagtgctttactcatgtctctaggatttactttcaagttgctgatactctttctacaagtatctgcaagttttgatgacaactctttcttgactttatggagaagttgtcaacaaaggattttcaaacaattaagactcataatacttctttgaatggctctcttaaagtttgttgacaatgagagtttgcagtttttcagtcatgcttccatgaataataaccagctttgagtatgtgcatgaaacaaccaccatgttataactgctgcctggctaccagtg

SEQ ID NO: 179183 - DNA, 493 bp, Homo sapiens
aagtctttaaggttttcaagataaacaatcatatcgtcagcaaacagtgaaaatttgacttcctctttaccagtttggatgccctttatttctttctcttgtctgattgctctggctgggacttccaatactatgttgaagaggagtggtgagagtgggcgtccttgtcttgttccagttctcagagggaatgctttcagcttttccccacttagtattatgttggctctgaatttgtcatagatggcttttattacattgaggtatatcccttgtatgctgattttgctgagagttttaatcataaatgaggctggattttgtcaaatgctttttctgtatctattgagatgatcatrtgatttttgttttcaattatgtttatgtagtgtatcacatttattgacttgcatatgttaaaccatccctgcatccttggttatagtgtcaaaaggattggtaccaattcttatttgagtgtctggtagaattc

SEQ ID NO: 179184 - DNA, 511 bp, Homo sapiens
cctgtttctaagtaacctctttaaactaatctcaatgttaggaaagatagtttaataataaattatttatctgcaagaccactttataactattctcctggtttctttctatgttgactagaaaaccttcctggggtctgtttctgtttccacctcttagaagctgagtattcataaattactttgtcattctgagcagcattgaccccatttgtagaaacaggagaaagtatttatcttcaccaattgttgtgccaattcactgattcattccataaacatgtattcagacctacttgatgccaacmacttttccaggagctggggccacagcagtgcacaaaacatcccagccctcttggaaaagacaatagaggcaagatagggttcaaggagacagacaacagcaaataaataaatggttgcctgatggtaagtgcggtagagcattgcattttttatagaaggtgattagcaatgacctctacctgttcatgcatatatttgatgg

SEQ ID NO: 179185 - DNA, 496 bp, Homo sapiens
aagaaaaccttcaaggtaacagatctgtttccttctcaggagttgaggaaagagatctttcatacttttcctgaagacagtgagggtttcttgagaatcagatgtctgaggcatctagaccagaacaaatttggtctttaagctcccagtcataatctaattttgtctattccatcttttattactgaaatgtttgatacagaattctggctattttctaaactggcaaaactaaccaaattctctggttgtgcattggtgacaaatggcttgcacttctacacattctcaattctagaacccatttagaactcaatgacattcagactgaaagaatcaatttgtttcttcttgcactttgccccartatgtgagaaaatgtggttaagagaaatcacttgtctaacctttgaatgaatgaaaactattttgtcacgggatgaactgaaagctgctttaaatttgagtatatttcagagagtagtggttagaaaaa

SEQ ID NO: 179186 - DNA, 533 bp, Homo sapiens
ggagggagaaaggaaatgaacagagtggaactatcaggttccacaggttcagcaagacctcttaaagaggataatgtgtattatttgcctttgattttaactttcattctttcctcaatttgctgaaaatgtaaagccattgttgacttataagttgtcaaagtcaatcattattttacttgatttctttgtagctttttgagcttgttgatcatacattcaccttttgaygaaatgcttttcccttggctcctttacatcctatttcttcattcataatatcatttccgggctatattaatgtacatattccttacatgttcccatttcccccaaaataagtcaataatataaaaccaactgtacatttaaaacacaaataaatctaaatatcaattgcagtaataaaagtggatgaaattcctgttaaaagacacagactcccaaagtaaaataaaacaaaaacattaaaagtacaaggaagggcagagttgtattaaggacatgctaacaaaaagtagaaattgttatgc

SEQ ID NO: 179187 - DNA, 534 bp, Homo sapiens
attattaccaaaaaccaggaaggttatatttctatattgattgaggattaaatttatgatgaaaatatcatactttccactaacaaatatatttttatatatttgcttgcttgttgtattgactgactacctgattagaacgtgagcttggcaaggcaaggaacattgttagaaattaaggagaagttgctgaacacaatgaaacccaactatagtggagattttaactgtctttgatggggtacctgaaagtcaaacaaaatgcagagagatagaggggctggataatataattaacaaaattggtttatcagatgtaygttgaatgatgtctcttgcaacatagaattaaataattatttaacaaatacttattataaacacctgctagttgaaataacaagacactcttgattcttaatatgccagggaatctggcctagtttggaggagattggaatctttttttctgaggaaatggcttttaatatgagacctggagcatgagttgacacttgagtgaatggtgagaga

SEQ ID NO: 179188 - DNA, 599 bp, Homo sapiens
cttggtattcatcactctgtaccctgcctggccgtgctgtgagcagaaggcagaggacatagagatcagctgaataactcactctttgcttcttaaatgtcagtttataacccactgcttcagtgratttactgtttggatagaaatttaacccaccatggcttcactgggaatatattagaaagattcatagactcaaccaattttgcctaatttttctctaggactattaaaatatcattatcaattatctatagccaatctctagagggagttatattgaaatgactttaataataaccaatgggtataagcagctacttttagaggatgggcagcttttataaagctgaatttaatattgtattttcccaggaacaaagtggttaagaattgaagaactgtgtaagagtcatctggagtcactggtttcttggaaagaaataatccaaagtcttaagataatatgaaaatgcaagaactttgaaggaaaagataaattcacatgcagaatcaaattctaagaaaagcaaaggttgagtgtgtgtgtgttgtgtgtatgtgtgtgtaagagagggagagagcaagtggaggaacaa

SEQ ID NO: 179189 - DNA, 599 bp, Homo sapiens
cttggtattcatcactctgtaccctgcctggccgtgctgtgagcagaaggcagaggacatagagatcagctgaataactcactctttgcttcttaaatgtcagtttataacccactgcttcagtggatttactgtttggatagaaatttaacccaccatggcttcactgggaatatattagaaagattcatagactcaaccaattttgccyaatttttctctaggactattaaaatatcattatcaattatctatagccaatctctagagggagttatattgaaatgactttaataataaccaatgggtataagcagctacttttagaggatgggcagcttttataaagctgaatttaatattgtattttcccaggaacaaagtggttaagaattgaagaactgtgtaagagtcatctggagtcactggtttcttggaaagaaataatccaaagtcttaagataatatgaaaatgcaagaactttgaaggaaaagataaattcacatgcagaatcaaattctaagaaaagcaaaggttgagtgtgtgtgtgttgtgtgtatgtgtgtgtaagagagggagagagcaagtggaggaacaa

SEQ ID NO: 179190 - DNA, 599 bp, Homo sapiens
cttggtattcatcactctgtaccctgcctggccgtgctgtgagcagaaggcagaggacatagagatcagctgaataactcactctttgcttcttaaatgtcagtttataacccactgcttcagtggatttactgtttggatagaaatttaacccaccatggcttcactgggaatatattagaaagattcatagactcaaccaattttgcctaatttttctctaggactattaaaatatcattatcaattatctatagccaatctctagagggagttatattgaaatgactttaataataaccaatgggtataagcagctacttttagaggatgggcagcttttataaagctgaatttaatattgtattttcccaggaacaaagtggttaagaattgaagaactgtgtaagagtcatctggagtcactggtttcttggaaagaaataatccaaartcttaagataatatgaaaatgcaagaactttgaaggaaaagataaattcacatgcagaatcaaattctaagaaaagcaaaggttgagtgtgtgtgtgttgtgtgtatgtgtgtgtaagagagggagagagcaagtggaggaacaa

SEQ ID NO: 179191 - DNA, 345 bp, Homo sapiens
tcagtaaaagaagaaaacagatggttagtcttctccaacattagctttacaaaaagaatgccactggtgtttgcaccagcagcaaagtaaactgaccctcagttatccattgtgaacttttaytgggctcagcaaagcacattgcacattaaggtggccatgtactaaaaagtaaactacacagatatttctgaaacaaaaaaaaaacaaataaacaaaccagcactgctagatgtaattggtaaattcaaataaaataaacatgtgcaatcaaagtgaaattaacattttaattttatcaaattttgtagaaacactcaatgctggaaaatatatatatttttc

SEQ ID NO: 179192 - DNA, 464 bp, Homo sapiens
gccctctttttcacttctctaatttgaattctcattttaaataacctaggtatgtaaacaaaattattgtcaagtttgtttcacaagagtgacacagtayaacattagcagtactaaaccataaagcaaattatgacgttctaaaattaagacacatttaatagctcatgcctattttagaatgaaacaaagtaacaatatgatttgggaagaactggttatccttttcatttcttaactgaaaaaaaaaaacctgaaggaggatttatagtcttctactcacatagaaatgaactctttcttgctttgttgtgctgtactccagtggtaagaagacccaaatcagaagaaacaagtcaggaaaaatatagatatattcctgctatctatttcattttcttatcgtgtgagagttaagatgactccagtctttattttttaccattgtaaataatgttatttat

SEQ ID NO: 179193 - DNA, 635 bp, Homo sapiens
ctaccttctctcttttcaaataggaccatttcttctattttctttttttttttttctcagttagtatggcacatctttttttttatggttacagattttattttattcttttattattattattatactttaagttttaggatacatgtgcacaacatgcaggtttgttacatatgtatacatgtgccatgttggtgtgctgcacccattaacttgtcatttagcatttcttctattttctgtgtctatcagcctatgaaattgttcttcctgaaagggccatataaaatggaaagagtaaatcattattgctcttcttgttttaaagagagtcaatattattctaattcaaagctaccaggatggtgtaccaacaaacagcaccaatgaaatccaccagttagtatccacaagcaattatagtgattaacctaaataaactggaatcgcaaattgccacatctaattatttcatattacttgttacctatttggataaaaaagtttaaaatgtactttgagttagttatttttcatcaaagaattaattatttatattcttgaatatttmaattgtttccattttacaagtaattattgttttattaaaataaattcctaagatttaaaatgct

SEQ ID NO: 179194 - DNA, 534 bp, Homo sapiens
tatcacctttttctttaatgattattgattttgggaattctctaaggaacctttgtgaaccacaaagttgcaaatatattctcctacattttattatataagacttagttttcactctyacatttagatttacggatgatcaaaactcacattaattgttgtgtataaagtaaggtagaggtccaatagacttcagttttgattttaacagatatccattgttattattactagaaatgtattgcttaactaaaataatacaatttctatgtccattttgttatcattaagtaaaaggaattatatttttatcagatctttttattgttaatctgtgtcttacttctccttctggatttaatgtaagaccagttatttctacatttaatatagctgataaaataggagaaggaatgagggtgaagtaatgagtttaattaataagttaattagtattactattgcagctaaatggaagctaaacaataccactggtccgagctcccagtaggttggagagggagatagttgaca

SEQ ID NO: 179195 - DNA, 408 bp, Homo sapiens
ggggactagactgcctttgtaggactaacaaagtagccacaggttagaaattatagtttaggaatcgtgtggtttgaggcaacaagattcggaccctccacaaactgctcctgaggataacatcactattgtaaaacttaagataggttttacagtgctggagatattttggagaccctgcactcgattgctcagctggcaccacctakattgataaactggctcatctggtcttgtgacccccacccaggaactgactcagtgcaagaggacagcttcaactccctataattttatctctgacccaaccaatcagcactcccaactcactggccccctatccaccaaattatccttaaaaatcccagtccctgaattctcagtgagattgatttgagtgataataaa

SEQ ID NO: 179196 - DNA, 596 bp, Homo sapiens
tagcaatagcagaagcatctgaaactgtatattcctcttgcatcacagatggggtattttccacaccttcacttaacataactactcccaagatagatcattaaattgtaaactccagctatgtaagtccaaatatgtcatctggaaacaccttaaagttgaggtcttcagctctccagattgcaggttggttcctatggacaacttgctgtttgcactatcattgcagaaactctgtgtataaagtggagatattcttaatctgcttgttgaggaaatataactttggactttatccatggctgtcayctacaagatttgttacaaattactttcagttacaagtgtaaagtcaaggctgtcaatatcatatcttctagagaaattactgtgtcctattaggaaagttataaatctggacttcctctgaaattattttcactgtactctgctaagagtagccataaacactctgtcatatatttataagggacaaagacaagaactgtgcaagtcatggcataggaaattgaggctaaaaaactacgtgagagaattaaaacataaaataaatgctaatgataatctgacgtcat

SEQ ID NO: 179197 - DNA, 390 bp, Homo sapiens
atccatgaggatccctggattgtcaggaagaggaaaagattaatattatggtaaaagttcctcaggtcttcatgttctgtctttagcaggccaaagagtagttaaacaggtgagaactaaattgtatccccacttaagccttcaagagcacaagggaacagaggagcagagagctgcctccagatgctttggaaggctgacaagttgatgctaatgtacactgcatacaagagaagatgccattgcaccatccattattgactgggcaagtggagcaaaagcccattgaatatatgaagaaatgtatatcatgtctaagtggggggaagataacamtgagagagagacagagaacacacaactaggaaagatgctctaatgaatagatct

SEQ ID NO: 179198 - DNA, 534 bp, Homo sapiens
gatcttaggatttcaatggaaagtttagaaccctgtgttgtgtacttgtgtacccagatatataccttgtatgtacccaggtaatataaggtaaatgtatataatacctatgcagtgtgcttcttttaaagaaccgtgtcatccaaatccacaagctgcatgtcattgatgaagggtttgctctttgtgtcatctgaagggagcaaaaataattcaaaatgatattcagtgcattaacacactgaaatacaagttactcttatttttgcatatatatgtktgtacttaatctcagcaatatacctgagggaatataatcacttgcaacttttgcagcttttataaaatttttatctctattatgggtcctcagagcaatcctttgcggagtgaagcatgagtaatgttagagattaaggttctaagaggtttagtaaacaattgcaaaacaagaaacaaatattttattccagaagaattctgaacaatgtatgtaaataactatcctctccagaaggtgaaatttagctcctg

SEQ ID NO: 179199 - DNA, 473 bp, Homo sapiens
tacaaaaattagccgaccggggtggtgcacgcctttagtcctagcacttcacagaggctgaagtgggacgatcccttgagccggggaggctgaggctgtagtgagccgagaccacgccactgcacgccagcctgggtgacagcgagaacctgacttgaggaaaaaaaaataatccagtacagaatgacacggtcatatcaaattggcatgtaatagagaccccatcttgaaacttgctactatattgtcttgtgcgttgatagcatattatattaatgccgaacacattagtgacgccgaagtagctggtgcctaaatggcttaaacrcggaaaaaccacatacagatgatggaacaaaaactggccaatcagattatagagcgggctttttaaaatataagaagcttctttgtagctaggcgtctgacaaaaagcttgacaccaacttaacaaaaaccaacggctggaattc

SEQ ID NO: 179200 - DNA, 399 bp, Homo sapiens
acatggaaaatctcaaatgaaagaaatacatcagcttggtagatatgctcaaatcagcttcttgtgggccaggaaagcccttacctcatccattcttgtattcagaatgctagatttctataacttcttctgtgagctctctagcattcttataagtattcaagattttccctggcaaattggcttgtgtatgtgtgttatcatctctgtctctccttagcttaacytgtgaaggatgtaagtggaaagatcatagtatttttacactgagttttaaaaagcagttttaattctctatcttgtttcagttggctatttatgtatcttcagttattagaattggttacattcttaatacacttttttggaaatttgatatcaagatcactactgcaacat

SEQ ID NO: 179201 - DNA, 631 bp, Homo sapiens
tatgacatatgtccttttcacatggcacaatgcaacccacgcattagtgtctattgactgtaaccactaattaaagggaaaaaacccttttatcaagatcacggttctgatcacaatcaacattcatttaattgttcatttgataaacatttattagtaaccaactatatgacaggtataaatatttattacattgatattcattcatttaaaagaaaaataaaaattaaacacagttaattttcattatttgaagtagttatgttctatagagtctctgtgaatactgaattagcacatactgaatcattgtcacggagaggaaatacagggttgggttcctgggagcctctkgtcacaacgttttaatcaaataatcaatacatagccttgttgcttgttgtatgttttatgtttctgtttaaagacaccatgcaaaacatatattgtctattcattaatattgaactcacagccaaccacacagaactcatgcctgaaaggagcttattaacatgagtgctttctctgtaaggcacgtcataggcttcctgtgcttgaggacactagatagcacttcagcactatgcctgagggccattttaagcaagaaaactatcaataataaaac

SEQ ID NO: 179202 - DNA, 507 bp, Homo sapiens
ctcatcttacacagacaggaactaaaagcgcatttgctgaagcttgtagagataattacttgtaggrtctgggtaaaatagaccagttttagatgataaattcacttggaagaagacacatgttcataggcaacagacaataaatgtttagtgtttgataaaagttgaattgctaaagaatatgtgtggcatatttaaatgtcaactgagtaaattttaaacagtgaatgtatttttcaaatgtgtaagtgctgattcgtttcttactaatagataatctggtactttctatccatacaccaaaggctgatgagaaagtgttaattcaagcaaagattcctttatctttctgagtgctataagccatgcaacttagaattgtgtcagaattcctcaaaatcaactttaagcataaaaccaataatataccattacattataaaaaaatctggaagaccgtctaaaaagtcctctatgttagctttattcttaataaaagtatctttt

SEQ ID NO: 179203 - DNA, 507 bp, Homo sapiens
ctcatcttacacagacaggaactaaaagcgcatttgctgaagcttgtagagataattacttgtaggatctgggtaaaatagaccagttttagatgataaattcacttggaagaagacacatgttcataggcaacagacaataratgtttagtgtttgataaaagttgaattgctaaagaatatgtgtggcatatttaaatgtcaactgagtaaattttaaacagtgaatgtatttttcaaatgtgtaagtgctgattcgtttcttactaatagataatctggtactttctatccatacaccaaaggctgatgagaaagtgttaattcaagcaaagattcctttatctttctgagtgctataagccatgcaacttagaattgtgtcagaattcctcaaaatcaactttaagcataaaaccaataatataccattacattataaaaaaatctggaagaccgtctaaaaagtcctctatgttagctttattcttaataaaagtatctttt

SEQ ID NO: 179204 - DNA, 507 bp, Homo sapiens
ctcatcttacacagacaggaactaaaagcgcatttgctgaagcttgtagagataattacttgtaggatctgggtaaaatagaccagttttagatgataaattcacttggaagaagacacatgttcataggcaacagacaataaatgtttrgtgtttgataaaagttgaattgctaaagaatatgtgtggcatatttaaatgtcaactgagtaaattttaaacagtgaatgtatttttcaaatgtgtaagtgctgattcgtttcttactaatagataatctggtactttctatccatacaccaaaggctgatgagaaagtgttaattcaagcaaagattcctttatctttctgagtgctataagccatgcaacttagaattgtgtcagaattcctcaaaatcaactttaagcataaaaccaataatataccattacattataaaaaaatctggaagaccgtctaaaaagtcctctatgttagctttattcttaataaaagtatctttt

SEQ ID NO: 179205 - DNA, 514 bp, Homo sapiens
tacaaataaggtcacatttacaagtaccggggcttgaatatatattttttcttttttctttttttttttttttgagacacagtcttgctctgttgaccaggctggcatgcagtggtgggatcgcagctcactgcaacctctgcctcccaggttcaagcgattctcctgcttcagcctcccaagtagctgggataacaggcatccgccaccatgcccagctaatttttttgtatttttactacaggatttcaccatgtaggccaggctggtcttgaactcctaacctcaggtgaaccacccgcctcagcctcccaaastgctgggattgcaggtggagccaccacaccctgccaaatatagcttttttttaaggactagaatatatcttttatgtctgtaaacaaagttcaaataacagtgaaggatagattgaagaaactgtggtatatcaacacaatagaaatctatgtacctatcatagaaaaggttaatatatctatatattactatagaa

SEQ ID NO: 179206 - DNA, 751 bp, Homo sapiens
ttcacatctgcaaagttccttttgccacgtaaggtaacatttacaggttgtggagattaggctgtgaacatcttgggaggctatattctgcctaccactgtttttgttcagaaacactttcctgaatttgaggaggaacttacttaatccattttgctttatgcttacctacttctacatttgcagcaattattaggctatgtcgtcatcttgagtcttccagagtgacctaccctcctcttttttgaaattcacagtcwtccctgcactacaggaggccaggtggccttgactccatttgtacacaggtgaacagaagagttatcccattatgtggtcttctccacccattaatgtccctgccaaactgcctgaagtcagtgcacctacttcccactgatgcaggagctggcaggacatcctgccttaacttactctcattgcatagtggtacatctaatagccagatggtgtacctaatgatcagattaccttggagtcccaattgtaagtgcttaatgtggtcagtctcactcaaggtgaagccttggtcatagatattccagaattattctcactatgagagttgcttccattctaagagagctccaagtcagaagaagtcagactctgaggcatttgataagtacaatagttcccctttatcctcaaggggtttatttcaagaccccagtggatgcccagaagtatggttagtactgagccctatatatactatgttttctcagtc

SEQ ID NO: 179207 - DNA, 751 bp, Homo sapiens
ttcacatctgcaaagttccttttgccacgtaaggtaacatttacaggttgtggagattaggctgtgaacatcttgggaggctatattctgcctaccactgtttttgttcagaaacactttcctgaatttgaggaggaacttacttaatccattttgctttatgcttacctacttctacatttgcagcaattattaggctatgtcgtcatcttgagtcttccagagtgacctaccctcctcttttttgaaattcacagtcatccctgcactacaggaggccaggtggccttgactccatttgtasacaggtgaacagaagagttatcccattatgtggtcttctccacccattaatgtccctgccaaactgcctgaagtcagtgcacctacttcccactgatgcaggagctggcaggacatcctgccttaacttactctcattgcatagtggtacatctaatagccagatggtgtacctaatgatcagattaccttggagtcccaattgtaagtgcttaatgtggtcagtctcactcaaggtgaagccttggtcatagatattccagaattattctcactatgagagttgcttccattctaagagagctccaagtcagaagaagtcagactctgaggcatttgataagtacaatagttcccctttatcctcaaggggtttatttcaagaccccagtggatgcccagaagtatggttagtactgagccctatatatactatgttttctcagtc

SEQ ID NO: 179208 - DNA, 562 bp, Homo sapiens
attgaattagattaatgacatttaatcgtagttttgaaaatattaaatattgtttatatgggtttaaaaacacaggaaaattttatataccttttagagatcatcacttttaacttttttgttaattacacacacatgcacacacacacaggtacatatatggtattcaaaatttctaaaaacaaccaacaatgttaaattccataaaaataataaagagcagactccacyggttgctaggaaaggagagtattagggaagatttttaatggaaatgaaaacctactgggcaaaatgaattttgcatgcattagcttgtttatttacacaaccctttgtgctaagtattattacccccatttacaaaaggggtcctggcattgagagaggttgaatcactcatgcaaagtctagtaagtggtggagctgtcattaaaaccagatggtagacattcttttctcactccagctcactcatcagctctttataggagggtagtaggtagacaggatcatcctggtgttgagtttaagagtctgcttttaaaggtctgaaaacttg

SEQ ID NO: 179209 - DNA, 619 bp, Homo sapiens
gtcagcttccctgtctttaaaatgtgtactagaaaatattgcaagaatgaggtaattagtggagaaggtaaaactagaagggcatgcagacacaagtttttgagaaatcccatttttactaacctattaaaacttttaaaaytctgctggaagttagtaggaaaatgataattattttatagatggtaaaaactaaggttcaaagaatttgttagttacccaaaagctatacctaatatgcgatactgtataaaaacagtcctgtctccaagcatttgtcaaagcatgcaccattggaagggcttcagaagatcagcagatgggcctgctctaaacaggaccctgatttaggcagtggggtaatcttagacaaactggttcttttcttcttgttctgttttggagtcagtcagcaacatttaacacatcaatgtgatagccacttatcttctccatggttaccatcccattttttcctgcttattaaccactttttgaaaagatttgaattagttccactctcccgtttccaatcgcagatgtgccgccctggagaaagactgattaaaaggctactaggttctcaatgttccaactaaaggactaacctaattcaaac

SEQ ID NO: 179210 - DNA, 331 bp, Homo sapiens
gtctctctttaaaatgctgcaaacagcaagctgtttaattattaatatgagctattagcaagcagaaacactttatttccaaggttattattactttgataaagcagaaccaacttccaagctgaaatattttattaagaaaatattttatttggcttacacttcacaatcctattttctggaagaacttagcaaagtaattgacagaaaactggcttcttccttaatyggtacctgacaacaaagatcttcttcacctgtgacgacatcttacctatgtggtaatagttcctttggtactatctcaaaatccagaaatcaggtttatctt

SEQ ID NO: 179211 - DNA, 560 bp, Homo sapiens
gaaaaagaattattaaagttacagaagacttaagaaatccaattaatgaactttatcttatgaatgtaatgcacctaacaattagataatacacaatatatttcaagtatatatcaaacagattctgagtacagtcttccttatcttgctaactgttcccaattgttgatattcctctaagctggtttacaatgaagtgaaatggtaggatatataatgactacagcttcagaatttcaatacaccaaaggataggaatcctggtaaggagctgggatagaggggccagtgggccagaaactagtcctgtgagattcttttgtacaagaaagrcatgtttttacttagattatatgtttctttgcatgagggaagattattaggagctaagtcaactctcttacccaacaaagtcatccctttgtgctttgactgttcattgaaaccttcttgggattgacctattcgtctgtttcttgttaaaggctgaaggtccctgatctatatttgacacaatatgatgtcttctactgcaagacttcataaacagaacaatgtaa

SEQ ID NO: 179212 - DNA, 497 bp, Homo sapiens
agcagtcccttgtctgtctcagaaaggagaaacactttcaacttctttacccatataaccgacactcaatacaagtttattccttgaaaacttcccaaattgaaattgaaattgtggcaaaacgggcaaaactgtagactacatgtctcccttacatgaaataaacttttgtagaattaaaatggaacaaagattttgtaaatcaaagaattagcagaaatataattctttcacagttatttggcattctccatgtttttgtttttagcaacaaaatcttggatacataarccaaacgcagaatggaaattagatgagattctgaaatattaatttgggtggaaccatttcctcgagaatgatgcttgtacacctgtacctgtgttcagtgtgtgaaaggagatgggtgggactttggggcattgatgtggtgagctgtataagcctcttccttccctattcctctatgctttttaagcttccttgactcacaatga

SEQ ID NO: 179213 - DNA, 581 bp, Homo sapiens
agagctgcttatgttgttaatgactcattagcatgactccacttgcaatgggaatgcaaaccaggtacttccaaaagtmactaatacccagttttgattctgtggagggcaacaaagcaggagtcaaaataaatggagaagaatgagaaagacattttttttccagaagaatgctagtttagacataacatagatgtaaaaattttcccaattttaatttttctagcatgcttactttgaaagattacattatggataacattcccttgaattgagtggttaagtttatagccacaaaatagccaaatttgcatagctttgctttcagatatttcatttactacatggaattattgcaagcaagtttacttggccatcccttagctctagtagaaagtaaatatgctttatgtattacgtatgttatatgtaactagcaatcattcagctttgtgtggattttatttctctttcccagctgtaaatttgaaatgttaaaacctcaaggtcacattcaaaagtgaatgaatgagaatcctaatgacaatgcaaactcaatatgcctaaatgtaatgatagtt

SEQ ID NO: 179214 - DNA, 514 bp, Homo sapiens
gaattctgaaaaaatacttttactgggcctcattacttttcatggtaataaatttatttgcataggttcaataaaaatctgttctcttacttaacaagatataaatagacaaatctgagataggaggccagacttgactcaggagacaggacttgactctggaggcagagctcagacactggaccaaattcaggactagctaaaacagggagaggtagaagcagctttccaccaacaacacccaccagtgtgccatgccagtttaccattgccatggcaacaccagggagttactgcctctttccatggcaatgacttgatgactcaaaagttactcccccttccctagaaatttctgcacaagctgctccttaatctacatataattaaaagtaggaataaatatgactgcaaaactgccctragctgctgctctctgcctgtggggtagccttgctctgcaggagcactcatggagctgtaacactgctacttcaatagagctatttttttt

SEQ ID NO: 179215 - DNA, 425 bp, Homo sapiens
ctacagatggtccttatttcccttcacctaaccccgttctcttcaaaatgttattcagctacatatcaaagatattcacatgttcatatgtaacgtaaaacttatgaatttcttctactgcactgttgatagcctgaccatttccatcaatatccctgcgcaggcatagaagtctgctaaacttcacaattacacatattttcagttaaatattgaatgatactaatgaggtcttaaaattaattttattctcatgaaaagctgttagagtctttccaactgtttctgttgttgttgtttacaccacagtcttatactcmacattactcctttttcttttggcacactgactttttcatggatttcagtgtagtgctgtgtcttcagtttatttgggctgttataacaaggcaccttagactggg

SEQ ID NO: 179216 - DNA, 425 bp, Homo sapiens
ctacagatggtccttatttcccttcacctaaccccgttctcttcaaaatgttattcagctacatatcaaagatattcacatgttcatatgtaacgtaaaacttatgaatttcttctactgcactgttgatagcctgaccatttccatcaatatccctgcgcaggcatagaagtctgctaaacttcacaattacacatattttcagttaaatattgaatgatactaatgaggtcttaaaattaattttattctcatgaaaagctgttagagtctttccaactgtttctgttgttgttgtttacaccacagtcttatactccacattaytcctttttcttttggcacactgactttttcatggatttcagtgtagtgctgtgtcttcagtttatttgggctgttataacaaggcaccttagactggg

SEQ ID NO: 179217 - DNA, 425 bp, Homo sapiens
ctacagatggtccttatttcccttcacctaaccccgttctcttcaaaatgttattcagctacatatcaaagatattcacatgttcatatgtaacgtaaaacttatgaatttcttctactgcactgttgatagcctgaccatttccatcaatatccctgcgcaggcatagaagtctgctaaacttcacaattacacatattttcagttaaatattgaatgatactaatgaggtcttaaaattaattttattctcatgaaaagctgttagagtctttccaactgtttctgttgttgttgtttacaccacagtcttatactccacattactcctttttcttttggcayactgactttttcatggatttcagtgtagtgctgtgtcttcagtttatttgggctgttataacaaggcaccttagactggg

SEQ ID NO: 179218 - DNA, 425 bp, Homo sapiens
ctacagatggtccttatttcccttcacctaaccccgttctcttcaaaatgttattcagctacatatcaaagatattcacatgttcatatgtaacgtaaaacttatgaatttcttctactgcactgttgatagcctgaccatttccatcaatatccctgcgcaggcatagaagtctgctaaacttcacaattacacatattttcagttaaatattgaatgatactaatgaggtcttaaaattaattttattctcatgaaaagctgttagagtctttccaactgtttctgttgttgttgtttacaccacagtcttatactccacattactcctttttcttttggcacactgactttttcatggatttcaktgtagtgctgtgtcttcagtttatttgggctgttataacaaggcaccttagactggg

SEQ ID NO: 179219 - DNA, 575 bp, Homo sapiens
gtaacttcctaatcctacagtgagaaatctgacttccatcatgagccatccatttacttagttatgcagttctaatatacatatatagcagtttcagaatttttaattcatactcccatgaaaaaaactttattaaataggtatagatttttgcctctagtcttatagatttctcccatttcaaactttttaggtcaacacatttttcccccgcctttcactaaggttgtttgacacatttacaatatacataagtactttttaaaaatattctgcattccatcttaggttcccttaaccacctaatttttttagtttcccaatacattaagattcactctttgtattatraagttctatgcgtgttgacatatacatagtgtcataaatctgccagtatggtatcatacagaatagttttactgcccccaacttagtggcttaatataacatagatttattatattatagttctgcaggtcagaagtctaagtcgggcctcattgggtaaagatgaggaagtcagcagggctgttttccttctggagtctctaagggagaatccgttttcttac

SEQ ID NO: 179220 - DNA, 589 bp, Homo sapiens
tcaatatacagatgctgatgggactgaatgagttcacctacagcgtaagcgtcgacagatatgagagaacattggaagacaaagctttgaaaagtctagcatttagagctcaggaagcagcaaagaagttagcaaaagagactgagaaggagcagggagccaggttaaaccagagagtgtggtgtgctggaattaagatgaaggagccagtgaccagctagttcaatagtggctcaaagtcctattaagataaagacagagaattgtccattggatttagtaacatggaggtccttrgtggccttgaaaagagcagctccacaattgtactgcatgccaccatttgtgaaatacttgctaccatttcagcatgcctgactttatattctgaagccacattctcaagttattcctgtaactcagtcagattaaccatgccacgcggaagttgggacaaagcaccagactggctattaggggaaccatgttctagttcagcctcctcctactaaccagctgtatggcacgggcaagtcattctgtctctcaaggccttggtttcctcacaagcaaaatgagggggctggaa

SEQ ID NO: 179221 - DNA, 611 bp, Homo sapiens
ctgtggactggttcatgagcttggacctgcaaccttgcrttcctttggcttatttatatgaaagaagagcgtaaaaacagtaacgtcataagattgttttgaagattatatcaattaatacatataaagttctagaacaatgccaggcacagaacaagcattcttaagtattagctcttaagtcactgtatcttcccaatctccactcacctctcttccagccttgcaccagttgagtcattagcgccgttactcaagtcacctttctcaccagttgactttgctataactttgttgttagagctctgccgtcccctcagcctcaaagcttttcagactctaggtggactctacataagagatgtatccctttgaaaggagacaaggcatgttcatgaattgttatattacttttaatgaaataattatagaagacttaacaaaagagaggagatttgagcagagatctgaatgtgatgcagcatattctacttttgagggcacttctacttactttcaaaagattaatattcattttcctgttaattcttcagacttttcatgggcagctgatgtgcaagcagtagatttatttaacatattattaagaa

SEQ ID NO: 179222 - DNA, 557 bp, Homo sapiens
aataatccttatgccaaagtgacatactttaaggtggcatattctggtcacctatagttcgttgtcctattgtaaagccatccactataataaaactgttttcagcatcagctgtaaaacatacctrtctctgttgtgctcatgcctcctgtttagctttgttttgatatatactttgcccactactgaacaattaaaatataggcatttttcttcctaaactgttttgtaaattcaatctagttattgtacttaacatttttttctactttgtatgtctgtcacttataatcactcccttctttatctctgtcatattcaatctgcttctaactttttaaacttatcaatgtatatgcactacatgggattcagagtcacattattcaatgatatttggaaaacaaaattttattggctaaattgcaggggggaaaattgtcctattgaagtggtttcgcccttttaaaatggtatgtggctaagggtgtgtgtgtgcatattcactgtgcatatattgaggactgttgcacggtcctgcaagcactcccagccca

SEQ ID NO: 179223 - DNA, 619 bp, Homo sapiens
ttttaaaatgggggcatcattaaaatttctggagttttcataaagacaatgataatgacaaagattatcctaatgatatgattgtcttgtgatacactggaaatagtagtaggtttgagatgaggaaactcaaattctagtcctgatattctccctagcttcatgcttgcataacccagtttataagttcccctgtaagacagagaccagactgtgttgatgtctttattarcacatcataaatagtgaatataaatagcggatgaaaagttcaacaccaagaaaaactcatacctactcaacaggccctggtgtcctcttctgggctggctccctgggttactacagcctgtcttcacttctcagcagcagttcacctgaaaggactggcaagagctctgggcctctccagacattagattccaagcataactgattctcagccacagaaagggaaatttttttttccctcatcttattttaagacctatcttcataatcttcaatttatgctccaggttttatctctttcccgaattattaacaatagcagcatccattcactataggagaaatcttagttctacccagagggatgtggaatgttcctacagatccg

SEQ ID NO: 179224 - DNA, 619 bp, Homo sapiens
ttttaaaatgggggcatcattaaaatttctggagttttcataaagacaatgataatgacaaagattatcctaatgatatgattgtcttgtgatacactggaaatagtagtaggtttgagatgaggaaactcaaattctagtcctgatattctccctagcttcatgcttgcataacccagtttataagttcccctgtaagacagagaccagactgtgttgatgtctttattaacacatcataaatagtgaatataaatagcggatgaaaagttcaacaccaagaaaaactcatacctactcaacaggccctggtgtcctcttctgggctggctccctgggttactacagcctgtcttcacttctcagcagcagttcacctgaaaggactggcaagagctctgggcctctccagacattagattccaagcataactgattctcagccacagaaagggaaatttttttttccctcatcttattttaagacctatcttcataatcttcaatttatgctccaggttttatctctttcccgaattattaacaatagcagcatccattcactataggagaaatctyagttctacccagagggatgtggaatgttcctacagatccg

SEQ ID NO: 179225 - DNA, 608 bp, Homo sapiens
ttgggttcttttggagactttattttatatatgtatatatatataaaagatcagttcctatgacaataaaataacaaaacaggaaaaatacaaatgagccataaataagataaagaatgcagaagacaattaagaagtgaaaaaatggaagaaaaaagagaagggaagtaaagaaacaaaacagcatggaagtgtaaaagcagaagaaacagatggcaggaataagtagcatatcagtttgtataataaatacaaatgattttaaacttatctttgaaaagataaagaccactgatctgtagaaaacaaaagtcaagctatttattctctatagaaagtaaatcacagtgacacccaaggatataattaatgacatgggcaaatayacatacagggagaaagtaggggtagcaatattgaaattagacaaagtagatcacaacaaataacagaaaagtaagtaatttcatattgattgaaagggagactcttcaagtaaagatataatcatcacaaacctcatataggatatgaacattgaaatttataaagtgaaaactatttgaaatatctataaggagaggtaaatagaaatgcaatattagttg

SEQ ID NO: 179226 - DNA, 418 bp, Homo sapiens
tcaagttcagtgcagaacccttctacatattaagcaaaaaggaatttaacacagggaataaagtgattacaaaatcactggaaagcctaggggagcatacttccaggacagactactaaaacataagaactgacttttcaggatttactacttctgccccaatcaggactaaaggataacaccattggaaatactgagttcaacaacccatcatggtggctctgatgccagagttcactgggtgggatcaggaggccaccattatcactgcctcataatacctataaaactggtaaccagataagtcctgttggaaaaaaaagtcatgtgttcaygatcttccttgacagcagaaatagctaaaatgacagaaagctggtcactttcactttttccatccaaatcccaaatgagtgta

SEQ ID NO: 179227 - DNA, 638 bp, Homo sapiens
ttgtaaaaaattgagcagtatgaattaatctagtttagtttagctctcaattgtataacttgttcaggaaatggttaatatttagcatattcttttttgattaggtaactggagatgcaacttttgcctatacaaaatatgaacgaattaactgggtaagggattggcctggacagactgttctctgtgtatcccaaatcttttggacaaaagaagtacaaacagctattccaatggggataaaggtaaggttttattaaccctcgggtttttttaagcattttttcaatagtattattgccagaatacacttattttaaaaactaaaataaatacagttcacttaaaaatctactttatgctgcaagccaaattacagattttttaaataaaaattgcacataacaaatatgtaggaaaaatttataccaataatttcaaaatttatgtttaaatcatgtttattcacrgtatataaaagtcaatgatacttgaacctcaatcttgttattatatacattttatgcctttaaaaatagagtgataataggactaagaaactcataaagattagcaggaaataaagtaacagtattctcttttataccttgagtaaaactaccctatatagataaggc

SEQ ID NO: 179228 - DNA, 562 bp, Homo sapiens
acatagatgaagctggaagccatcattctcagcaaactaacacaggaacagaaaaccaaacactgcatgttctcactcataaacgggagttgaacaatgagaacacatggacacagggagggaaatatcacacactggggcctgtcgggggttggggggcaagaggagggagagcattaggacaaacacctaatgcatgcagggcttaaaacctagaacctagatgacaaaaaaaaaaaaaaaaaaacctagatgacaggttgataggtgcagcaaaccaccatgacatatgtatacgaaggtaacaaacctgcrtgttctgcacatgtatccccaaacttaaagtaaaataaaaaataataaaaaataaaaaaagagataatgcagttttgtatacttaatggaattaagctcaagcctgcctggtaaatttctgggagcataaatttcctaatgcaaaatccctggacaacagaaaattgataagatcctcattaaaccttttgcacttcaagaaaggaaatgtaggttgacagagtagaacttaaaacctcttacaatt

SEQ ID NO: 179229 - DNA, 588 bp, Homo sapiens
atacgaaaccgcaaaaaccccagaatagccaaagctatccggagcaaaaagaacaaaactggaggaatcacattacctgattagaaattatactatagagctacagtaaccaaaatagcatggtgcttgcagaaaaactgacacacagactattggaacagaatggagaacacagaaaccaattcataaatctacagtgaactcatttwcgagaaaaatgccaagaacataccttgggataaggacagtctcttcaataaatggtactgggcaaactggatattcatatgcagaagaatgatactagacctctgtctctcaacatatacaaaaatcaaatcaaaatggattaaagacttaaatctaagacctcaaactatgaaactgccacaaggaaacattggagaaactttccaggaacttggactggtcaaatatttcttgagtaacacaccacgagtacaggcaaacaaagcaaaattggacaaatgggatcacatccagttaaaaagctgctacatggcaaaggaaacgatcaacaacatgaagagacaacccagagcacgggagaaaatatttgcaaactac

SEQ ID NO: 179230 - DNA, 464 bp, Homo sapiens
atacaattttcagactgatgtgaatttaacaccccraaaaaaaaattctctgctgtacgcacagccttgtacctgaagatacaagaatgaataaagcacagtgctagcctcagtgagttcataacctcttcagatgacagtcatgtgccgttctggcccaaggagtgccatgcatcaaagctcgggcccagggaagcggggtggggggaccagcatgtgcatcagtgaggcctggttgtgaaggaaggatgggtccgaattctgatgtactttgaatgaccaagaatttagattttattctgcaagaagggtggtggtgtttttctaagaagacagagttatcatgatgttgttgaatgtttttgttataaacactgtcatagcaaattaaaattttagttctcaagctaattggatgcaaagatatggcacaatgttaactcataataataatctcatattaa

SEQ ID NO: 179231 - DNA, 525 bp, Homo sapiens
tcctttggggttagatctcaatctttctgatttgtttccatcttttccctacttcccctacaacatccacctttttctttgggaaagaacctggagcaacatttatttttcatcagtgtggtatagtgatctsttacaaaagcacttaaaaatatagcaggtgccttattctggatattctatatatgccctctgagcagaaggcagacaggagtactgtacagtaagaaaaggacatcttaagtttaaatttggcagaactctaataactaaggactcggcttgaatatgctgagagcagagggcagagacaaagtatgatccagaaaatgaagtattagattggccggcgagggtgagagaagcaagtaaatcaagagatggaatagcggcaagtgagacttttggaaccaaagtagtgagagcggcttgggtgagagggagattattagtgagagagtcagatgagtaaggattggccaggagcaaagttggttcagtacctgtctgtggccctgatcactg

SEQ ID NO: 179232 - DNA, 544 bp, Homo sapiens
gatctataaaaaataatcagtcttgacaacgtggtcagttccttctgaaaggctgaaaaatgctacaagacctagttagattgcacacagacacaaaactttggattccctggaccgaattaagaagccatgggctagaaatgtcatctataaataaaaggaactagcatttgaatcatgtattttctttgggmccctaagttaagaaccagtgctctagagtacacatccacggacaggtatgaatttaaaatgcctcatttcatggttttggcattaagaaaaatcccagaaaattgattattaaatgtaaaccagaaattttcttgaccgatgttagaaaggtagaaacatccttttcccttccctgagattctctggccctaagcaagtaacttttttttttttttttttaattctcttgctctcttctaccataaaatataaatcatgtaatgaagattccataatcaaaaaagtgttagtttatggcctcacagtccagaggattctgaggagacaatgaaatttctaaaagtgcaaa

SEQ ID NO: 179233 - DNA, 534 bp, Homo sapiens
tcagtactatatcacaattggtaacagtggcagtcaaagcaacaaggcccattttgcctacacgatactgtagcttccatcagtgacacayttttttggtttaaggcaatttaaaggttgaccttgaaatgcaattagagcaaaatctgtacactttctgggccaattctgggcctctctgtgcctcagtcacataactgagagttggttttgtccctgactctcttcttcattacataacggatctcttactgtttctgctgactagacttttgcatctttcatgatttgatttctctcatttcatcttctcatttttttctgtggtgggagatatacaagcaaggtttccaaaatttgatatttcacacaaaatgcattagcgagccatggcaaaaatctgttttgtgggcagacacatcatcaaagctctcctctacatggactagttttctagtcaaataaaaatttcaggaaataagatattttcatctcaaaaaataaaagctaaaaagagtatgtctgagagactca

SEQ ID NO: 179234 - DNA, 647 bp, Homo sapiens
atttacaaataagcagcctattcttctttaaggagagaatgttctcattagaaatgtatgaccatttcaaatggctgatctacctgtttgtgaagtgtgaggcctacctgcaggggcacacacccttccaaaagttttaaaacactcagtgaatgtcgctggtgaggttttaggagtaataatagtaattgttccaaggtatattcctattgttgaaaatatatgaagtgattttataattttttaatttaattgattttaaatctatcttttttatgtttatatatttaggaggtacaaatgcacatttcttacatgcatatattgcatcatggtcaagtctgggcttttagtgtacccatcacccaaatcacagacattgtacccaataggtaatttttcaaccctcacccccctgccaccytcccaccttttgtattctccagtgtctgttattctactctgtatgtccatgtatatccattgtgtagctcccacttataggtgagaacatgctgtatttgactgttgctgcgttatttcagtgaggataatggcctccagttccatctatgttgctgcaaaaagacatgattttattctttttctaaagccagtaaatagtattccatggtgtgtgtatatat

SEQ ID NO: 179235 - DNA, 601 bp, Homo sapiens
tactcagcaaactaacacagaaaaagaaaacaaaacactgtatgttctcactcataactgggagttgaacaataagaacacatgggcacagggaagtgarcaacacacactgaggccagtcagaaggtgggagctaagggaagggagagtattaggacaaatagctaatgcatgaagggcttaaaacctagacgaaaggttgataggtgcagcaaaccaccatggcacatgcatacctacgtaacaaacctacgctttctgcacttgtatcccagaactcaaagtataatttaaaataaattaattaaaaattttaaaagttttgtaaaaggctgaaaattcgtgcagtaaaaagtcaaagacttgcttagctttgtataactcatctttagccaaatatattttattataaattagttttaggaataatattgaatcttctaaattatcttcagaaacaactatttttaaatgttgtcaatgtattctacaatgtagtctgatgtacacagcaataaaagtctttacgcgtcattcttatggtttgccaaacagatttatttttagaaatttcctgcaataagtctcacttcttgatcta

SEQ ID NO: 179236 - DNA, 584 bp, Homo sapiens
tttagttgccaaaaaaatgaatgtgatcatagagaagaatctttaaaacaacaggaaatttacagagctatattgaattaacaaatgacaatttaaccaaataaacagactacagtcccaactgtgcctaaaattattaaatttakatgtatgattgataaatagaaagatataaataaaaattcaacagaggttatctctggatagtgtggttattatacataattttaaattttatattgtgctcgtttaaatgttctcagatggactacattaattttgtgtagcaaaaagacagtaatgctaatatcaaaagtcaaagtttacttagcttaatttggatgccaattgttcagatatttttcatgcattttctttagttagattccactaacaagtgactgacaaaggaaaataaagagaaactcctttttcaaagaaaaagaaaataaggcagcccttttttggttgtcagtatgatcacgtcagactataagacccagggagaaagacatttcatttagactgtgctgtgtacagagctattgctgctatgcacacaattatgatcattgacagtcact

SEQ ID NO: 179237 - DNA, 584 bp, Homo sapiens
tttagttgccaaaaaaatgaatgtgatcatagagaagaatctttaaaacaacaggaaatttacagagctatattgaattaacaaatgacaatttaaccaaataaacagactacagtcccaactgtgcctaaaattattaaatttagatgtatgattgataaatagaaagatataaataaaaattcaacagaggttatctctggatagtgtggttattatacataattttaaattttatattgtgctcgtttaaatgttctcagatggactacattaattttgtgtagcaaaaagacagtaatgctaatatcaaaagtcaaagtttacttagcttaatttggatgccaattgttcagatatttttcatgcattttctttagttagattccactaacaagtgactgacaaaggaaaataaagagaaactcctttttcaaagaaaaagaaaataaggcagcccttttttggttgtcagtatgatcacgtcagactataagacccagggagaragacatttcatttagactgtgctgtgtacagagctattgctgctatgcacacaattatgatcattgacagtcact

SEQ ID NO: 179238 - DNA, 553 bp, Homo sapiens
ggctgggcatggtggctccctcctataatccaagagatttgggaggctaagactgcaggactgcttgaggccaggagttccagacatcttggacaaygttgcagcactgtaccccagcctgggcaacagagtgagactctgtgtctaaaagtgaaaataaaatagagtaaaataagagcttaacaaattttgtatccacttcttgtggtgtgatttagtgcatttaagacagatgtgtttatttgtacttctgtttcatttacatttcttttcatattataagaacatatgtaaagaaaagtcaataaatatgtagttttagtagaggaattaaagtaaatattcagacattaactaattaacttatgtaatcaagtaattggtcatctcaattattaatgtcttatgaaacatgcaagatcttcctttatgctttttaaagttgtgagcagacaagtttatgatagatgaacatgctatgagagcaagattctaagaaggctgacatacacattctagtccagcaatatttatacaaattaatttaaaacat

SEQ ID NO: 179239 - DNA, 553 bp, Homo sapiens
ggctgggcatggtggctccctcctataatccaagagatttgggaggctaagactgcaggactgcttgaggccaggagttccagacatcttggacaacgttgcagcactgtaccccagcctgggcaacagagtgagactctgtgtctaaaagtgaaaataaaatagagtaaaataagagcttaacaaattttgtatccacttcttgtggtgtgatttagtgcatttaagacagatgtgtttatttgtacttctgtttcatttacatttcttttcatattataagaacatatgtaaagaaaagtcaataaatatgtagttttagtagaggaattaaartaaatattcagacattaactaattaacttatgtaatcaagtaattggtcatctcaattattaatgtcttatgaaacatgcaagatcttcctttatgctttttaaagttgtgagcagacaagtttatgatagatgaacatgctatgagagcaagattctaagaaggctgacatacacattctagtccagcaatatttatacaaattaatttaaaacat

SEQ ID NO: 179240 - DNA, 493 bp, Homo sapiens
agtaaaatttaagttctactttcagaagtaaaccttgtgattatccccaaatggtggtgtttagacatggtaattaaaatgcagtcattcattttccagagacttccaatgattcgtaaattcaatctaaacataatcctgtcaggattgctttagctacattaccgattcagactctcatctcaatttacgtaactgtttatgaagttagtatgttctattttttaggctacayttccttttatttgcagtagtaattattgtaaccaatcttgacagcaagttgcaaatgaatctctccactgctaaagacagtttgttcttagtataaacaaaatctatatatctgccccaaattcattcatctgcactaaaattttgaattaccaaaaaacagataaaatagataaaataaataaaataaaagcaaattaatgtgatccaggtaatatatgaaacaaactactttttaaaaaaaatttaaatgtagggt

SEQ ID NO: 179241 - DNA, 437 bp, Homo sapiens
aaatcagaaactagtcaggacagggttggattgtagtgttgcttgtgtgctagaaattccttcactggtttagtacactcaacacaagtatgactacattttcagtgtttgtctgttttttcttttttagagattggttcttactttgtctcccaggctagagttcagtggtgtgatcacagctctctgtagcctcaaactcctgggctcaagcaatcttcctgcctcagcctctcaagttgttaggactacagacaagtgccactrtgcccagctatattttttcttttcttttcttctctttttttttttttttttgagacaaggtcttgctattttgcccatgctggtgtcaaactactgtctcaagagattctcccaccttggcctcccaaagtgcaggaattgagggcacaagccactgtgccttgcttctg

SEQ ID NO: 179242 - DNA, 588 bp, Homo sapiens
ctgcttggagagaaggctaatgatcagagaggaccaccagccaaggcattgtacctacctttgattactcaagacccaacaggggcccacaagaatgataaagatagaatatttcaccagggaggatggtcaaatcaaatcactttataaagaatggaatgcaacattttgtacctcacgaatctattttgaaggccttagaaataaaattttctacagcttaaagactatggcctatttactgaaactcctagatggatgatggattatgaatgtttgaatagtcctaayggtcaggaagtctgaattctagtcttgtctgtgcttgaaatatgatgtgtagctttgagcaaatatcttcctcaaattttccatatgtgaaaattagacatcttaaaatatgccttataaataaacctgaatttttgaagttctattacaaactaccaaaatattgtgatataaccaaaacacagaataaatactaaataataaaatgcagagtaaaaatacaaagaactcatccagatagcattatatagcaacttcctctctcaaatcattgcaaagaccttgtaagagcaagaa

SEQ ID NO: 179243 - DNA, 381 bp, Homo sapiens
actttagctaccaatattagtcctgaaaaggagaacaaattaaattcaaagtaagcaaaaataagtaaaaaaaaatattggaactgaaatcaatagaacataaaaaggaattggatgtttgaaagaccaataaaattaatacatctataaaaaactgatatarataaaagacacaaattacaaatatcataaatgagaaaagtgatatctgtactgaatttacaggtataaagaaaattaagaacatattgtgaattaatttatgacaaaaattcaacaacttagcatgtacacattcacttaatatacaaactacttagttcaatcaagaagaaataaattatttaaatagtctcatgtctgttaaaaaaaaaattgagt

SEQ ID NO: 179244 - DNA, 381 bp, Homo sapiens
actttagctaccaatattagtcctgaaaaggagaacaaattaaattcaaagtaagcaaaaataagtaaaaaaaaatattggaactgaaatcaatagaacataaaaaggaattggatgtttgaaagaccaataaaattaatacatctataaaaaactgatataaataaaagacacaaattacaaatatcataaatgagaaaagtgatatctgtactgaatttacaggtataaagaaaattaagaacatattgtgaattaatttatgacaaaaattcaacaacttagcatgtacacattcrcttaatatacaaactacttagttcaatcaagaagaaataaattatttaaatagtctcatgtctgttaaaaaaaaaattgagt

SEQ ID NO: 179245 - DNA, 609 bp, Homo sapiens
ctgctagcctgaagagctggccacacaactctcctcagaacagctgccaaatttgccagtggtgctatttcctaggctgaggcaagcagggtagcatttctcgcttttaggaaccagaattgctcctttgttttttaagcttgaggtaaaaggctttcctcacatttatatgagcactaaaaccaaatccctccagccagaatgctatcacatttgcaagacctgccatttccctggcagttccatttatcagaatcagggaggtaaaccggaagctgtctgtgtgggtgcccagtgaggtcactgacacgccaaacattggatgaggtcacaatttaatctcttgctttttgatgctccgttttcaggtgccaggcacttgggagctttggcctacaaattgtgccttaaccgttcttaaagagtattgtttgttttactttgagtctttcatcaactctgaatgaactacagatagtaatgattggaggagttcccaagaaacacgcgacaatggtgaaggccttcccaaacatttctaatgatctgtgccctctgacatactggkactgggcaaaattgcaatgttcacctccctgtgatagacat

SEQ ID NO: 179246 - DNA, 435 bp, Homo sapiens
tctagaactaaattgcaggacaggtttaaaggtgatgaatattctgtcatttaaaaggtcatttgtggaacacagagatagaatcaaggatacagcctctccaaggctgggaatctatcttgagartggaatttgccacttattcaataaaattgcttacatgagatttgtcttcggtctcctcaattaattttgtctgcagaaaaagtgattttactcactttatctctactctttgaatcttattgttaaagcttaaatatttttatatttaaattgcacaatttgatttttatgcccacacatacatataaaactttcaaaaccctcaacatacacatattatagtaattaacatatccactattccccatacttcccttgtgccactttgtaatctgtaatgactctatatcccaccctattctgaagcaa

SEQ ID NO: 179247 - DNA, 419 bp, Homo sapiens
aggacaggtttaaaggtgatgaatattctgtcatttaaaaggtcatttgtggaacacagagatagaatcaaggatacagcctctccaaggctgggaatctatcttgagagtggaatttgccacttattcaataaaattgcttacatgagatttgtcttcggtctcctcaattaattttgtctgcagaaaaagtgattttactcactttatctctactctttgaatcttattgttaaagcttaaatatttttatatttaaattgcacaatttgatttttatgcccacacatacatataaaactttcaaaaccctcaacatacacatattatagtaattaacatatccactattccccatacttyccttgtgccactttgtaatctgtaatgactctatatcccaccctattctgaagcaa

SEQ ID NO: 179248 - DNA, 412 bp, Homo sapiens
  misc_feature (1)...(412): n = A,T,C or G
nnnnnnnnnnnnnnnnnnnnnnnnnnnnnnnnnnnnnnnnnnnngggtagtacagtgggactaagaaatttaggattgagaagggagaacatggggttttttctgcctctatataaacgttctgatccctgtcttattctctgacaactaaggattgtccaattgtccaagcctccaccaaagagtgatttctgccatatttgagtcagtgctgtagcagcatcggtsagaacatagccattagcaggaactgtcacaaatgtgggggcagcaacatggtaagagagagtctcccttcagcagcagtagttccttggggtctccataaacatagcctcctatcaggttggcttacagattgccatagtgtttacagattgtcctgaaagtgaaatgtcatgtgagtgggatc

SEQ ID NO: 179249 - DNA, 573 bp, Homo sapiens
ggaatacctcagccaaccctatgaataactcaatttggaataacttttcaaaaatctttacaaaatgtgttttatttatgttatttacaagaaatgtgtcagacacaatttatattccttctaagattcaatcagccccattcacctgaaatgcccaaagccaactgcaaatgcttcatttcctggtatcatcagtttattcttcctcttacrctgagaagaggcatcagaaaaccattcattgtaatagattcctttttttctcaggcccttaaatctttattagcggtcagtaattttatgaatgggaaaaccaaatttcacggtttaaaaggtttttccaaaatagaatttctatggaactttatctgtttgacttcagtaacttgttatctccttgatatattcttcactgttatcataagttattactaatgttatatgacagacatttttttttgtattaaactccagaggcctacaaggaatgatgccacttctaaaaagatcatcaaataaattaactcgagatagagtattttcatttacagagggaaaaatttttctctttta

SEQ ID NO: 179250 - DNA, 573 bp, Homo sapiens
ggaatacctcagccaaccctatgaataactcaatttggaataacttttcaaaaatctttacaaaatgtgttttatttatgttatttacaagaaatgtgtcagacacaatttatattccttctaagattcaatcagccccattcacctgaaatgcccaaagccaactgcaaatgcttcatttcctggtatcatcagtttattcttcctcttacgctgagaagaggcatcagaaaaccattcattgtaatagattcctttttttctcaggcccttaaatctttattagcggtcagtaattttatgaatgggaaaaccaaatttcasggtttaaaaggtttttccaaaatagaatttctatggaactttatctgtttgacttcagtaacttgttatctccttgatatattcttcactgttatcataagttattactaatgttatatgacagacatttttttttgtattaaactccagaggcctacaaggaatgatgccacttctaaaaagatcatcaaataaattaactcgagatagagtattttcatttacagagggaaaaatttttctctttta

SEQ ID NO: 179251 - DNA, 516 bp, Homo sapiens
ccattcttactggtttaagaagacactcttctaaacatttgctctcctttcctaaatattttcctctttaatttagccttcccaaattatacaaatatctgacatttaatatttaaaaaaattctctattgatttcacatttccctgacagcaggtgctctggtttcctatgatgctttagaattaaaatactcaaataaatctctgtattcactgtgttcacatcctattctgacattttatcttgacagtctaagcagtctaagcaggattctctctccactattcagtggaaatsgctctcatcaaggcttccagtgacttagatttctcaaaacagtggtcaactctcaggcattatcttactcatttgatgtctcctattttgaaatactttgttaccaagactcccaggtgagcattctcttgaaatttgtttatgtcattggccagttcttccgtcttctttgttggttcttcctactgctagaaaaacaaacaaacaaaccaaaaaaa

SEQ ID NO: 179252 - DNA, 606 bp, Homo sapiens
aactcataggttcaagtgatcctccttttatggcctcccaaagtgctgggattataggtatgaaccaccacgttcaccctcatttttttttgttttttacaactacttggtactctatttttgcatttatcagaatttaattcctaggtataggcacataagttgtttccagtattctgcagttctgcctatacattttcacagtgtcaaaagtgtagctttaaagtaaattcttagaagttgsaaacatgtattgtactttctcttctttttagacagaggtcttgcttttactttgagcagaagtggtgtcaacttttcttttacttaatcagtgcagtattgagcatgtaataagagtacagtgtatatttgctgaatgaataaaattgtcccaggtatagaaaatttgatgagaaataaatctacctagacacacaatcttggaaaggagaactgctttgtgagaaaagctcctgaaagagaaatatgacacaagcatcacagacaaagaccaaaggaagcaaagctcttgaggcaactaagctcaactaccaatagcaagagagcctgtaaacaacatctgagcagaattaggaaacaagg

SEQ ID NO: 179253 - DNA, 467 bp, Homo sapiens
attttggaactctgatttctccaggtcatatttgtgactttgttcttacacatgcagtttagaaacctacaaggtggtaamtaggttattcttcctctgtcccgttttttttgttgttgttgttttttgtttttttttgtttttgctgttaataactctgtccttcctttcctctccctcactgacttccccctccccagcattctgtcaagcaataggctgtaaaatagttatccagaccagcagccaggcaagtgccgtttgagagtaatttctgccccaagcatttagcccagggcaaagcaagcgtgctctctaactgatcaacctggatatttcattattcattaatttactgtttaaccaaatcccactcattatcagaggcaacgcttggcagagcccagcgaacagtagcagttggtgtcaggcgtggagaattggcccatttgatcctgggctgtttt

SEQ ID NO: 179254 - DNA, 418 bp, Homo sapiens
tttcaccattgactcaaaattctttgctatataatgtctatccctattatgctcttgcaattttgaacaatctccactgagattcctgatgaagattatggtcacttttagtttgcattttgctaaccttttcttaggttagcaaaattttawtttaatatggtagattaatgtcataatctaccatattatttgaaaatatggtagattgattccactgatcgtccgaattaatgacttccctatgttgtgtcctatccaatgcgactgagactgctcccatcaagagccgaagtccattttcccatcccttaaatctaggctggccttgtgactcactctgactaacaaaaggtggcagaagtgacagtgtgccaattctgagtcaaagccttaagaagctttgaacccttatgct

SEQ ID NO: 179255 - DNA, 418 bp, Homo sapiens
tttcaccattgactcaaaattctttgctatataatgtctatccctattatgctcttgcaattttgaacaatctccactgagattcctgatgaagattatggtcacttttagtttgcattttgctaaccttttcttaggttagcaaaattttattttaatatggtagattaatrtcataatctaccatattatttgaaaatatggtagattgattccactgatcgtccgaattaatgacttccctatgttgtgtcctatccaatgcgactgagactgctcccatcaagagccgaagtccattttcccatcccttaaatctaggctggccttgtgactcactctgactaacaaaaggtggcagaagtgacagtgtgccaattctgagtcaaagccttaagaagctttgaacccttatgct

SEQ ID NO: 179256 - DNA, 418 bp, Homo sapiens
tttcaccattgactcaaaattctttgctatataatgtctatccctattatgctcttgcaattttgaacaatctccactgagattcctgatgaagattatggtcacttttagtttgcattttgctaaccttttcttaggttagcaaaattttattttaatatggtagattaatgtcataatctaccatattatttgaaaatatggtagattgattccactgatcrtccgaattaatgacttccctatgttgtgtcctatccaatgcgactgagactgctcccatcaagagccgaagtccattttcccatcccttaaatctaggctggccttgtgactcactctgactaacaaaaggtggcagaagtgacagtgtgccaattctgagtcaaagccttaagaagctttgaacccttatgct

SEQ ID NO: 179257 - DNA, 555 bp, Homo sapiens
atgttaggcatttttcatgataaaaagaatacaactatgttacctcaaatgaccttccatgttgtcatcatgcacagaaatagaaggttcaattgtgccaaaaaagtatttagcttttttggaagtgtgtatttattatatttgtttgatttaaacatagaagtattctcaatacamtgatctcaaaggaactgttcatatcctatgcaaccattaaattttcattatattaaatgtgtttgaaatctttgtagtatgcagacattttggcagtgacaggatttaacctgtaattttctccttcaaaaaagttgaaaatggaaaataatgaactccttcctagattactcaattagtaaattccttcagtaatataaataaaatccaaattatttttctagttattaaaaataattgagtatctgtttacatgaagaacttgtacttgtaatatcttaattttaaattatttaaaacttggtttttctactttgcacccattaaaataaacccaaaacaactttatggactggtgaatttacaactgttttaaaa

SEQ ID NO: 179258 - DNA, 504 bp, Homo sapiens
tcttcggttctttaagtggggatggaggaaagctatgggtgtggaggccagaaggaaggaaagaaaatgcaaggtaattgggggtgtaggagtgaaggtggtggggaaaagggggagaaagttaccttcccactttgggggagaagttaaagatctttttaggtgacggaatcctcacccaaacaggacatttcttgctccccagagacctgcaatacgtgcaggaggcggcagggtttggcagagaatggtctggagatctttggaacctttaaaagaacttgcgaagtggaaagtgtgaaggcagcactgccacatcctgactcctcctgtctttcgctattttgttttgggactgagcgtttaggagtgggcagggaccaaatgtctgaagagtgcasgggccggggggagagctgcaactcacctgtttggtttgaaaacaaagctcaaaggggcttgccttaaacgtctcccttgacttaaaaggcaaactattgcgtt

SEQ ID NO: 179259 - DNA, 608 bp, Homo sapiens
gatttcatgtcttttccctttataaaaaatcatcatttgagatttgttcataacttccatttatgaaagttaaaaaatgtatttatgtaaatttgatttacattctgatatcactaagaccttgagacaatatgatgctattaagactataactagactcttcttagaagcatctagtaattaaaccttgctaaagtttgaagttgggcatgtttgaactccatccaaaacatttgcagagaacatacagtataatcgctcatgctattgtcttgagtaccactgccagaaatagagtccaaagtgtattccacaatttcctctgcctrcaattatctttcttcttttatctggtgatggaagttttcttcttccttcaaatttagttcaagtatcaccaactccagaaatcctcccaacagggcctcaatccacttactctgaagtccagcacgcctactgcctttttgacctcttgaagtattttatcttatgcttggtatctgtattcctggcatcctggtgcctactaaaaggaaatctattattttgatacttaggattgctttcaattcttttcttaggatattttataatccgagaagtgt

SEQ ID NO: 179260 - DNA, 561 bp, Homo sapiens
gctgtgtagatcccctctccaaaacatatacccaagttactgggagtgttgctaagaatagctctcagctgagttccacttcaacttttgacttgggctcaaaaatgtcagaatgtcatccaaagtcacacttatctgggaatagctcacatcaaatgaatggtcaatgttggatcttttactcttattcaagaaaaatctcaagggtcctccatatttatagcttcctggaggatcatctgtggcctctatttcmtatatcacaacttggcttttcctctgcccagtgctgtttccttttcccaccaatcatctcaattcccttttattttttaatcttgaggacactcttcaatttatctcttgcagacaaatctccatatcagagtctgctttccagagacccatatttaattatatatattattgggtttaaaaatacaaaaagattttttgcagttatctcttaaaattactataagggtcaaattaagctataggtatggtatactatatttttgaaaattttagagttaatgaaaataatgacaacaatatagc

SEQ ID NO: 179261 - DNA, 465 bp, Homo sapiens
actaccattgtaacatgattctttatattaaccttgaaaatggctgtggaaataatggagctgtagattcagaagaaatattattatcatgtcatagccaattaactgatcaattttattatttaatggaggtagaaaagtaagctgtaaacagatgtgctttcaaagcaaattactcaactattgtgtgtcatgcaatctttacttcttctcatctctgaagacatatcaacatggacaaacaaaccattaccagaattttttttattaggaagtaaatatgtractgaatctatcatttattcttacttttcatgtcccctcagtgtctgttttattataaccactggtccagcttcaagtgatacaacactgggaatagccttcttatcttgttacttacacagcagctgcctttgatacagaattgaccaaaccaatagtccactagtggttgaagctctt

SEQ ID NO: 179262 - DNA, 513 bp, Homo sapiens
acaactctcctcagaacagctgccaaatttgccagtggtgctatttcctaggctgaggcaagcagggtagcatttctcgcttttaggaaccagaattgctcctttgttttttaagcttgaggtaaaaggctttcctcacatttatatgagcactaaaaccaaatccctccagccagaatgctatcacatttgcaagacctgccatttccctggcagttccatttatcagaatcagggaggtaaaccggaagctgtctgtgtgggtgcccagtgaggtcactgacacgccaaacattggatgaggtcacaatttaatctcttgctttttgatgctccgctttcaggtgccacgcacttgggagctctggcctacaaattgtgccttaaccgcgcttaaagagtattgtgtgttttactctgagwctttcatcaactctgaatgaactacacatagtaatgattggaggagttcccaagaaacacgcaacactggtgaaggccttcccaaacatt

SEQ ID NO: 179263 - DNA, 443 bp, Homo sapiens
cccggtctgcacagttcttcagaggacccctgggattgaatctcagttgcccactggtaaccagctgcttaatgcactcagttggagctttctcccttccccaggccacagtccccattcgcctgtacttcctggaatcacctctaagatgaactacccgcccccaagtgcttgtctcagcatctgcattaggggaatgcaaacttggcatataccctccaaagacagagcatttacaattctacaatgaatgcattaactcacatgtcytaccataggggtttgctatttattcacctattaaaattggtgaaaaaaaaaaaagtttgtgaccaagcgcagtggctcacacctgtaatcccagcactttgggaggccgaggtaggtgaatcacaaggtcaggagttcgagaccagcctgaccaacatggcgaaaccccgtct

SEQ ID NO: 179264 - DNA, 380 bp, Homo sapiens
gaattctttcttgcatgagatccaagaaccctctcttggggtctggattgggatccctttccagtaacagcaccttcattaaaatattcctgatgtgagcacatccgttctttgccaggcagagtgggaggccctggggatagaatggagacaggsagggataaacagacattcaattgcaacctgtcttgaggtgtgggtgccatgaggttatttgaaagggggatatttctagtctaggggatggatgcaggctgctctgagaaggtgatgctgggctgagagacctgaaggaggaaaaaggtgacagagagaggcagaagaagaggtgtgagcgagagagagcccaaaccacaatcatagaaaccagacagttgcca

SEQ ID NO: 179265 - DNA, 594 bp, Homo sapiens
aaatgttataaaatatatttaatgtcatggaaggtaattgttatattaaaatataggctttataatgtgcatttcagaagattatgttaataatgacaaaaccctcctrgacccattagcaggaaaagaagacataaaggcttggaattaaagagattattattattatttttactaaagtgtccagtgattatctctgggtagagggaattgttgaaaatcagagattatagtgctagtagattatatttgatcaagtaatactgtatgcctgtcccatatgtcagcctttcttctacccaagtcctccaagaaacaaacaaacaaaatgttattaggctgtgtgtctgaaatcctagtaggctcgtgccctaggatacagatgtaaaggatctcttctaaactcactgctcactgagcccctcacttcctccactcccagactgcatcttgggccctcctatattctggtggcagaagataggagggaacaggttgggcctcttagaaggcctggatccaattacaacttcagccacttatgtggaagtgagaagaaaaccacctccaggttctcaccttttaaaatgcagt

SEQ ID NO: 179266 - DNA, 612 bp, Homo sapiens
ttgggaaacattacataaattgattgaatataggataatagggaaagcatgtctttagagagagaaaaatgttgaaagagtaatttagtatatttttaagtaaataaaatttgaggtggcactgagattcaagtggtatccataaatttagatatctgtataataaaaatccctaaaagatgtgaaataatggcaagtaaaggcattcagataaaattgtgggtaaatcataaaaacagcaatcctaagtaatgactaactaataagtcaaaaaataaatggatgtttgttttcatgcccaagggtattgaattacatgaattatagctttaaacaatgtcctacaatgcagcatatgataaaacatggcaataaaatatataaaaaacaaaattaatcagaaaagcagtaagactgtaagaccccaagagagcaaaatagtctaataggcaaaaagktgaagcaaataatccatacaaaaggaaatatagccaatgaacatttgaaacattccattttactaaaaataaaagaaattcaaagaattaagatttctatacctaatactcttaagcttaacaaattagcaaagatgtttaaaatattgtgatt

SEQ ID NO: 179267 - DNA, 533 bp, Homo sapiens
caataaccattaacccatgtacaattttgcccttcccacatcccatccatattgccatctacattccaccactatacctctcctactatcatttgtaagcaaaatccttaagtatttgagtatatgtttctagaagataagkattttttttcaaacaaaagcacaatattattgttgtacgtaaacatttagtaaaaatatttcatatcataagtattcaaatatttagccgccacaaatttctaattgctgattaaatgacataatttttttatgttgtttgaaacaagctctaatttaggttcatactttgtgattgattaatgtcttttaaatcttttttttattattattattgtcatgaactcttaacagctgacttctcagcttagcatgactgccatgctctacttggaccctggctcactgtgctgtggtcagaatattatttccaggaagatagctggtccggtaatggagcttaccttccgttttccagctctcaaagattgcactcttctactgcctgctgt

SEQ ID NO: 179268 - DNA, 533 bp, Homo sapiens
caataaccattaacccatgtacaattttgcccttcccacatcccatccatattgccatctacattccaccactatacctctcctactatcatttgtaagcaaaatccttaagtatttgagtatatgtttctagaagataagtattttttttcaaacaaaagcacaatattattgttgtacgtaaacatttagtaaaaatatttcatatcataagtattcaaatatttagccgccacaaatttctaattgctgattaaatgacataatttttttatgttgtttgaaacaagmtctaatttaggttcatactttgtgattgattaatgtcttttaaatcttttttttattattattattgtcatgaactcttaacagctgacttctcagcttagcatgactgccatgctctacttggaccctggctcactgtgctgtggtcagaatattatttccaggaagatagctggtccggtaatggagcttaccttccgttttccagctctcaaagattgcactcttctactgcctgctgt

SEQ ID NO: 179269 - DNA, 378 bp, Homo sapiens
atgtttctcttccctaattccctaatatacaaaatataagagagttgrggtttttaactcatgcactgggagactcagtaatctatctatggcttctttggcaaggttgtaattgtgatgcagtacaggatgcaaaagctcttaggctagataagtactagaaacctctcatctcttgttatctgggtttccaaggtgatgagagtgtaggaagaaactagaagatcaggtgtaatatcatggctaatcatctttctaaaagatttttttttccaggatattacctgactctcacagtgccagggattttccaggcaagactagcatctttcttaagttacaacaatgtgtgaacaaatataagaagctacaaatact

SEQ ID NO: 179270 - DNA, 656 bp, Homo sapiens
aacaggactcattttgtagtggggagttttggatgcaaaagagaataactatgtggaagtctaaaacagatgttaaagttactacatattgcaaggcatttattgaagaaagacttgagattgtgaccttgagtagtggctttgcccagaataggcactaaggccaggtggtacctgctactaaaaattggaatcttgttattgctccttttgctcagatctaaatgcctgagccagcaccgttatgctacacatttacttctcagtttcctaaacaaggatgacaagtctaattttattatccttactctagcaaaatacccagtgtcatctgtaaggacaatatgatcaagtcctttggctgaagaatgtatttcctcagccataatgtccccaaggcttctaaataaaacagatattcaaactttacttttagaaaaaaaatcactatgctgcatttctaaaaataagttttgttcagaaagagcttctgtaatgctagaaggaagcattctagctgaagtttatagagagtggctgtggaatctcctaaytgatgtatggtcaacagcctgacattaactctagtcatgggtaaaatgaagctaaagggtaaatgatctgaagcctagtgaggaaagaccaagagcagcagt

SEQ ID NO: 179271 - DNA, 656 bp, Homo sapiens
aacaggactcattttgtagtggggagttttggatgcaaaagagaataactatgtggaagtctaaaacagatgttaaagttactacatattgcaaggcatttattgaagaaagacttgagattgtgaccttgagtagtggctttgcccagaataggcactaaggccaggtggtacctgctactaaaaattggaatcttgttattgctccttttgctcagatctaaatgcctgagccagcaccgttatgctacacatttacttctcagtttcctaaacaaggatgacaagtctaattttattatccttactctagcaaaatacccagtgtcatctgtaaggacaatatgatcaagtcctttggctgaagaatgtatttcctcagccataatgtccccaaggcttctaaataaaacagatattcaaactttacttttagaaaaaaaatcactatgctgcatttctaaaaataagttttgttcagaaagagcttctgtaatgctagaaggaagcattctagctgaagtttatagagagtggctgtggaatctcctaactgatgtatggtcaacagmctgacattaactctagtcatgggtaaaatgaagctaaagggtaaatgatctgaagcctagtgaggaaagaccaagagcagcagt

SEQ ID NO: 179272 - DNA, 513 bp, Homo sapiens
cattaaaatatgagcaaaggatctgagcaaataattctcaaaagaagctatataaatagccaacatatatatgaaaaaatgctcaatatctccaatcaggaaaatgtacattaaaaccacaatgaaatatcatgtcacacttgttagaatcactcttattaaaaagatgagtgaatcacaagtattggcaaggatgtgggaaaaaaggaacccttgtgcactgttggagggaatgtaaactagtacacccattttggagaatagtattaaatttcctcaataaactaaatatagaactactatatgatccaggaatcccacttttgggtatatatccaaaggaattattgtgattattagcattattcacaataaccaagacatagaagcaactaagtatccctcagtggagtaatggatraagaaaatgtagtcttatatacacaatgaaataatattcagccttaggacattctatcattagtgacaacatagatggaccttatgttaagt

SEQ ID NO: 179273 - DNA, 580 bp, Homo sapiens
acttttatttataattattctcagtgcatatatatcacacaataaacagtaacttagtagagtaatacctkttgagtttctacattatactgaatacttgaatttatgatcaaataaaaatagtttttatctaatgcatcattggatcagtaatttgggaaaggtacatttgtaattttccaggaaaatggaatctttcaattgataatgacattatctccttgtgcttgtggacaagatttctattcattgctttatttctttgatgtaaggacatgcacttcccgactccaaaagatacatcaagcaacttttttaaagcttctttcataagtaatacattaacaagctttcagaagttcatagtcatctcctcaactgaagagtgagaaaagaggaaagataaattgttttgtaggaggcagaatttcttgttttatactaactcactttatgaatacaaccttctgagcatctctttgggtatacaaaataatggcatatgctgtatatattagtatagattgcaaagcaaaaatttggtttaagtgatgtttctgtattcagggaaacctaaatc

SEQ ID NO: 179274 - DNA, 592 bp, Homo sapiens
tttatatacagaacttttatttataattattctcagtgcatatatatcacacaataaacagtaacttagtagagtaataccttttgagtttctacattatactgaatacttgaatttatgatcaaataaaaatagtttttatctaatgcatcattggatcagtaatttgggaaaggtacatttgtaattttccaggaaaatggaatctttcaattgataatgacattatctccttgtgcttgtggasaagatttctattcattgctttatttctttgatgtaaggacatgcacttcccgactccaaaagatacatcaagcaacttttttaaagcttctttcataagtaatacattaacaagctttcagaagttcatagtcatctcctcaactgaagagtgagaaaagaggaaagataaattgttttgtaggaggcagaatttcttgttttatactaactcactttatgaatacaaccttctgagcatctctttgggtatacaaaataatggcatatgctgtatatattagtatagattgcaaagcaaaaatttggtttaagtgatgtttctgtattcagggaaacctaaatc

SEQ ID NO: 179275 - DNA, 585 bp, Homo sapiens
tttataattattctcagtgcatatatatcacacaataaacagtaacttagtagagtaataccttttgagtttctacattatactgaatacttgaatttatgatcaaataaaaatagtttttatctaatgcatcattggatcagtaatttgggaaaggtacatttgtaattttccaggaaaatggaatctttcaattgataatgacattatctccttgtgcttgtggacaagatttctattcattgctttatttctttgatgtaaggacatgcacttcccgactccaaaagatacatcaagcaacttttttaaagcttctttcataagtaatacattaacaagctttcagaagttcatagtcatctcctcaactgaagagtgagaaaagaggaaagataaattgttttgtaggaggcagaatttcttgttttatactaactcactttatgaatacaaccttctgagcatctctttgggtatacaamataatggcatatgctgtatatattagtatagattgcaaagcaaaaatttggtttaagtgatgtttctgtattcagggaaacctaaatctgttgctgacag

SEQ ID NO: 179276 - DNA, 410 bp, Homo sapiens
ctataaagggctggagttgaatgcttcccttccccccgggctagttagrctttggtaaaataccagctggctaggctctggcaaaataatttccttttccgggtggtcttatttaaaaataacagaaagttccagctgtgtttcaaactggttactttttccttcctcctgctggttcctggaagtaaaactcacagaagtgtggacatcccattaagctgtatccccttgaaatttttaacttaagctagtctacactgagcctctagcaattcataatttaaagtaatccttctgatgctggctccaggcgaaggcttttgcttcctgcacactgtgattctctgtatctacctgtctgtctctctggttttcaaggcagcagtttgccctttgacctcagtactccg

SEQ ID NO: 179277 - DNA, 402 bp, Homo sapiens
actataaagggctggagttgaatgcttcccttccccccgggctagttaggctttggtaaaataccagctggctaggctctggcaaaataatttccttttcygggtggtcttatttaaaaataacagaaagttccagctgtgtttcaaactggttactttttccttcctcctgctggttcctggaagtaaaactcacagaagtgtggacatcccattaagctgtatccccttgaaatttttaacttaagctagtctacactgagcctctagcaattcataatttaaagtaatccttctgatgctggctccaggcgaaggcttttgcttcctgcacactgtgattctctgtatctacctgtctgtctctctggttttcaaggcagcagtttgccctttgacctc

SEQ ID NO: 179278 - DNA, 436 bp, Homo sapiens
tttagtgagcccgagttagatatttcccttcctccacatcaaagactataaagggctggagttgaatgcttcccttccccccgggctagttaggctttggtaaaataccagctggctaggctctggcaaaataatttccttttccgggtggtcttatttaaaaataacagaaagttccagctgtrtttcaaactggttactttttccttcctcctgctggttcctggaagtaaaactcacagaagtgtggacatcccattaagctgtatccccttgaaatttttaacttaagctagtctacactgagcctctagcaattcataatttaaagtaatccttctgatgctggctccaggcgaaggcttttgcttcctgcacactgtgattctctgtatctacctgtctgtctctctggttttcaaggcagcagtttgcc

SEQ ID NO: 179279 - DNA, 482 bp, Homo sapiens
cagtaattttataactgaaacagatgtaaaaaaccgagtgcataacctgagaaagagaaaatggaaggacatcccagagaaaaggtgtttttttttttaaggaaataaggacagaaaaataagaagtaaaatgtctacagcagagtcttgtgtctgtaactctccctcaagctgtggttggaaaaraactttcttaaaaaggttttcacagctctgtaatgaacttgctcactctgacagcacttttggttgacctgagaatacacacagctgtgaggctgaccttgtttggccagtgtcctgacctcaggagcccttactgctcaggcaggaatggactcagcagatggcacctggcagaggcacctcccaggtgacgcagcaactttcttcatagaacctgctgtagaacgaaacctctggctgctgccctgcaccttataggccagctctctcaccccttatcactgagcataaagatc

SEQ ID NO: 179280 - DNA, 531 bp, Homo sapiens
caccacttcagggccacagagaatcgttccacaaccctgaaaaatcccttatatggactccatgtagtcacccccttcccttctcccaacccttggcaaccactgatstgtgttctgttcctaaagcttcgcctttcctatcatatcgtatacatagaatcatatgatatgaatgctatgaagtattttggttctggacttctttcaattgacaaaatacatttaagatgtatctatgttgctgttgaatcagcagcttgttaattttttttttttagagctgagtagtgttctattgtatggatgtgccacagtttgttgatccatttagaactttgcatattttttcctgcccgataaaaacatttctgtcattattattgtaaagacctcatgaacatcctgtttttgccttgccctaaccttgaagtgggactcagtacctctttataatcactcctggaaagaatcctcttttcaaagtattagtgagcaatgaaaattttgctcaagattttgtagagggaattc

SEQ ID NO: 179281 - DNA, 550 bp, Homo sapiens
tggtttcttgaggttttctatttcttcatggtttagcctttgtaggttgtatgtgcccaggaatttatccaatatgttggcatatagttgtttatttaatagtctctaataattctttgtatttctgtggtctcagttatgtctcattttcatttatgatttttatatttggttcttttcttagtctagccaaaggtttgccaatttatctttaaaaaaatttgtttcattgatctgtattttttagtctcaattttatttctcctgtgatctgtttctttcctattactaaytttgtttttgctttgtttttctagttctttgacgtgtaatatcagattgtttatttgaagtctcccatttttttgatgtaggcatttattgctacaaacctccctcctagcactgcttgtgctgcatcccatagattttggtatactgtattttcatgttcatttgttttaacatatgtttcaattttattcttaatttcttcactgacccattggttgtttggaaacaggttgtttaattttcatgtgtttgtgta

SEQ ID NO: 179282 - DNA, 589 bp, Homo sapiens
aaaacaggtttaattggctcagagttctacaggctgtacaggaagcatggcaccagcatctgcttctggggaggcctcaggaagctttttctcagagcagaaggcaaagcaggagccrgtacttcacatggtgaaagcaggagcaagagagagggtgggaggaggtgccacacacttttaaatgaccagatctcatgagaactcactatcacaaagacagcaccaagcttgtcatgagcttatgatcttatgaaccaacctcccaccaggccccacctccagcatgggaattacaatttaacatgagatttgggcagggataaatatccaaactctatcaaggtgctaccctgttcattgtaggatgttgagatgtacttagctaattcaccatcacatacccaaagaagtgcttctattgtctccattttagaaatgaggaaaatgagtcacagaaaagttagatcacttgcccaaagtcataggtcggaattcacttccaggaagcctagctccagattccctcttctgaatccataatgcctcttagaataagcaggtactttgaaataagaaagactgatattta

SEQ ID NO: 179283 - DNA, 589 bp, Homo sapiens
aaaacaggtttaattggctcagagttctacaggctgtacaggaagcatggcaccagcatctgcttctggggaggcctcaggaagctttttctcagagcagaaggcaaagcaggagccagtacttcacatggtgaaagcaggagcaagagagagggtgggaggaggtgccacacacttttaaatgaccagatctcatgagaactcactatcacaaagacagcaccaagcttgtcatgagcttatgatcttatgaaccaacctcccaccaggccccacctccagcatgggaattacaatttaacawgagatttgggcagggataaatatccaaactctatcaaggtgctaccctgttcattgtaggatgttgagatgtacttagctaattcaccatcacatacccaaagaagtgcttctattgtctccattttagaaatgaggaaaatgagtcacagaaaagttagatcacttgcccaaagtcataggtcggaattcacttccaggaagcctagctccagattccctcttctgaatccataatgcctcttagaataagcaggtactttgaaataagaaagactgatattta

SEQ ID NO: 179284 - DNA, 589 bp, Homo sapiens
aaaacaggtttaattggctcagagttctacaggctgtacaggaagcatggcaccagcatctgcttctggggaggcctcaggaagctttttctcagagcagaaggcaaagcaggagccagtacttcacatggtgaaagcaggagcaagagagagggtgggaggaggtgccacacacttttaaatgaccagatctcatgagaactcactatcacaaagacagcaccaagcttgtcatgagcttatgatcttatgaaccaacctcccaccaggccccacctccagcatgggaattacaatttaacatgagatttgggcagggataaawatccaaactctatcaaggtgctaccctgttcattgtaggatgttgagatgtacttagctaattcaccatcacatacccaaagaagtgcttctattgtctccattttagaaatgaggaaaatgagtcacagaaaagttagatcacttgcccaaagtcataggtcggaattcacttccaggaagcctagctccagattccctcttctgaatccataatgcctcttagaataagcaggtactttgaaataagaaagactgatattta

SEQ ID NO: 179285 - DNA, 589 bp, Homo sapiens
aaaacaggtttaattggctcagagttctacaggctgtacaggaagcatggcaccagcatctgcttctggggaggcctcaggaagctttttctcagagcagaaggcaaagcaggagccagtacttcacatggtgaaagcaggagcaagagagagggtgggaggaggtgccacacacttttaaatgaccagatctcatgagaactcactatcacaaagacagcaccaagcttgtcatgagcttatgatcttatgaaccaacctcccaccaggccccacctccagcatgggaattacaatttaacatgagatttgggcagggataaatatccaaactctatcaaggtgctaccctgttcattgtaggatgttgagatgtacttagctaattcaccatcacatacccaaagaagtgcttctattgtctccattttagaratgaggaaaatgagtcacagaaaagttagatcacttgcccaaagtcataggtcggaattcacttccaggaagcctagctccagattccctcttctgaatccataatgcctcttagaataagcaggtactttgaaataagaaagactgatattta

SEQ ID NO: 179286 - DNA, 652 bp, Homo sapiens
ataaaggagcaaacttttatttttatggaggaaaggcatgataaaaatatagtatgaatggctgggcacagtggctcatgcctgtaatcccagcatgttgggaggccaaggcaggaggatcacctgaggtcaggagttcgagaccagactggccaacaaagtggaaacccgtttctactaaaaatacaaaaattagccagctgtggtggcacacacctgtaatcccagctactcaggaggctcagatgggagaattgcttgaacctggaaggtggaggttgcagtgagccaagattgtgccactgtactccaatctgagtgacagagcgagactccttctcaaaaataaaaaaaaattaaaaatatcgtatgaatggaacatgtaacaagtcttaaaattttcatattagaaaatggatacttgattccaatggctttatgttacctttctgataaggtggttaatagatcacagatatttagagttgtattagggagttttcactcccatttcaaaatgggtagatcttctggactggctggactcagtgcctctcaggtaggyttgcttgtgtgtttgtgttctgttctaaggttgttgagcacgggtagcttggctggacagtagctagtgtcagctgccctcattcac

SEQ ID NO: 179287 - DNA, 603 bp, Homo sapiens
gattcctaaaaatattaacataaaattaccatatggttcggcacatttctgaaagcaagaactcaaacagatatttgtacacccatcttcatagcagcattattcacaatagccaaaaggttgaagtaacccaagtgtccaaggataaacaaaatatggtttatttatacaatgcawtattattcagccttgaaaagggaagaaattccacatgttacaacatggatgagccctgaggacattatgctaagtaaaataagccagtcacaaacattgtataattccatttcatgaggcagcaagagccaaattcatagaggcagagagtagattggcagtttccaggggctggggggacaggaaatggggacttgtttaatgggtacagagttgcagttcaagatgaagaacttctggagatgtacggtggtgactgttgcacaacactgtaactgtacttaatgccaccgtattgtacactcaaaaaatagttaaatggtaaattttaggttatgcatattttaccacaataaaaaatggaaaacataactgcctcatagagtctctgtaagaaataaatgagttaatatatgcaagccatta

SEQ ID NO: 179288 - DNA, 603 bp, Homo sapiens
gattcctaaaaatattaacataaaattaccatatggttcggcacatttctgaaagcaagaactcaaacagatatttgtacacccatcttcatagcagcattattcacaatagccaaaaggttgaagtaacccaagtgtccaaggataaacaaaatatggtttatttatacaatgcattattattcagccttgaaaagggaagaaattccacatgttacaacatggatgagccctgaggacattatgctaagtaaaataagccagtcacaaacattgtataattccatttcatgaggcascaagagccaaattcatagaggcagagagtagattggcagtttccaggggctggggggacaggaaatggggacttgtttaatgggtacagagttgcagttcaagatgaagaacttctggagatgtacggtggtgactgttgcacaacactgtaactgtacttaatgccaccgtattgtacactcaaaaaatagttaaatggtaaattttaggttatgcatattttaccacaataaaaaatggaaaacataactgcctcatagagtctctgtaagaaataaatgagttaatatatgcaagccatta

SEQ ID NO: 179289 - DNA, 528 bp, Homo sapiens
tttccatgaagtttccatgaaacttctttacaaattttctgaaaaatgccaggtagaagaggaaataggttaacaaacgtgttatttggattctggagtcagagagccctggttttgaattctgactttactgcttcataaccatgaaagcttcctcaagtcagctggcctcagattacctacatctgtcgcacataatccagtatgaataatgatgcccttgtccacctgactccagagtccatgtgactgcactgaggattaaaatgagctaaatcccaatccaaggttctttccacctcaatgtkcaaagaccttacaaggccctagtcaatttccgaagtaggaggtgggattacaaagaatttccaaagccctaaattgtgtgattatatgtgccacttcaatagactcagatatagacatcatctatgtcacgtctgtaatatttgaggggggaattatgtcatttaatgtgtatcagcatctgtaaatgatacacgtgcatttaattatgtgggttctccg

SEQ ID NO: 179290 - DNA, 463 bp, Homo sapiens
ctgagaatttttcaagtcttcaagttctgacttggttttgcttaacaatctcttatttaatccatccttcttctttcacaatttactataagcattcagaagaaaccaagcctctccttcaacacttagcttaggaaactcctcagactgagtcctacagaaatgaatcccatgttgttgcccaaaagttccaccttctgcaaaacactagaacacatttcagtgaagttctttgccatattayaacaaggattatttttttccatttacaataacaaattccttatttccacctgagaccttaccagtacctcccttaacatccacacttttatagtatgcatctcagaactcttccagcctgtacgtctgagttccaaagccactttcacattttttaggcatttattacagcagcaccacagttcttaataccaaaatatgtattagactgcttgggctg

SEQ ID NO: 179291 - DNA, 323 bp, Homo sapiens
aatatttttcccagatgcaagctctaggtataaaaaatattgcattgtaatttgagtatatcaagttaaacttaatttttaaatttcaaggtatgcaaacaaaaacatgaggaatctggggagaaaattattttaaaacaacaaaatatattaagtaaatgaargagggagggagaggtggaaagaggagggaggagaaagagggagggggataccctataaaataagttatctaaagttacataatgacgtcgtaacacagatggggttcaaattcacgcagcctgactctataggctcgatgcactacatctatctaaata

SEQ ID NO: 179292 - DNA, 323 bp, Homo sapiens
aatatttttcccagatgcaagctctaggtataaaaaatattgcattgtaatttgagtatatcaagttaaacttaatttttaaatttcaaggtatgcaaacaaaaacatgaggaatctggggagaaaattattttaaaacaacaaaatatattaagtaaatgaaagagggagggagaggtggaargaggagggaggagaaagagggagggggataccctataaaataagttatctaaagttacataatgacgtcgtaacacagatggggttcaaattcacgcagcctgactctataggctcgatgcactacatctatctaaata

SEQ ID NO: 179293 - DNA, 323 bp, Homo sapiens
aatatttttcccagatgcaagctctaggtataaaaaatattgcattgtaatttgagtatatcaagttaaacttaatttttaaatttcaaggtatgcaaacaaaaacatgaggaatctggggagaaaattattttaaaacaacaaaatatattaagtaaatgaaagagggagggagaggtggaaagaggagggaggagaargagggagggggataccctataaaataagttatctaaagttacataatgacgtcgtaacacagatggggttcaaattcacgcagcctgactctataggctcgatgcactacatctatctaaata

SEQ ID NO: 179294 - DNA, 296 bp, Homo sapiens
taatatataaaattagcagcatttatatacaccaataatgtttgagagccaaatcaagaacagaatcatatttacaatagtcacaaaaagagtaaaatacttaggaatactgctaatcaagagatgaatggtctctattaggagaattgcaaaaccactwctgaaagaaatcagagatgacataaataaatggaaaaaatcttgtgctcatggattggaagaatcaacatcattaaaatggccataatgcccaaagaaatatacagattcagtgctatgcctatcagactaccaac

SEQ ID NO: 179295 - DNA, 406 bp, Homo sapiens
agatggttctcaagtcttccccctatgccacttcgcctttgcagttttccatctcctccacccagcaacagaagcagatgcaggaatcctgagatacaaaaggaggctgaaaactcgataattgctagggaataatgatagtctaataaagaaggagagtaggagggaagggggcttggtgagaaaratgggagtctgctccacattcttccctggctgggagattgtctgcaagggcacctggaggctggcagctggtactatgagctgctattaaagccctgttatccacaatgattagaaacagctagttgaaaagatggggagagaaatcttttaaaaatgaaatatacataccctaaagcttttgtttcaacctaaaacatatgactgcgtatttatttgc

SEQ ID NO: 179296 - DNA, 406 bp, Homo sapiens
agatggttctcaagtcttccccctatgccacttcgcctttgcagttttccatctcctccacccagcaacagaagcagatgcaggaatcctgagatacaaaaggaggctgaaaactcgataattgctagggaataatgatagtctaataaagaaggagagtaggagggaagggggcttggtgagaaaaatgggagtctgctccacattcttccctggctgggagattgtctgcaagggcacctggaggctggcagctggtactatgagctgctattaaagccctgttatccasaatgattagaaacagctagttgaaaagatggggagagaaatcttttaaaaatgaaatatacataccctaaagcttttgtttcaacctaaaacatatgactgcgtatttatttgc

SEQ ID NO: 179297 - DNA, 458 bp, Homo sapiens
aggaaactgagcctcagggagagtaaggaacttttccaggcttatgtggttgatgggtggtggcgcatccaggctgggatgcttacaaggggctcagtacaagtttgtcgaatctatttgaggagcctgttcagtctttgtcctttctggtgaccaatgcagacttccaattgccttggttgctggagccagagttcagccccaggggagttggtccagtttttctgccctgcagccttccatgttgttcaggttctgagcctgactgcatatgggttgggtttgtttgtttttgactccattgagaagatgtctcccggcccattcccaggtcagtacacaaactcattccatctgccttacaattaagattcaaaagcagacggcaagtaaatctctccctgtgcaccgattccaatcagcaattatrctcttaatgaccagctaaaaaggaattc

SEQ ID NO: 179298 - DNA, 562 bp, Homo sapiens
gcttttttctggataaagtagattaagacctcccaaagaatttctacccacaagcccagctgcacataagtttgggttcagaattcacatgtgaatataatccaaaaaaaattccaaaccaaaaatgtagttgaaagtagtccagtgttttagtaatgcagaatataagtaaaatcctcttttgaggagtgtactttaactcaggtctgtgaggaataacattccatgaaatatgtactcacagtaacaaattacataatgtatagaagcaagtcaccatgattaagactaaaaacaagaataacaacaaaacccagattgcagaactgactcataaagatgatcagtcttggaattaacataggcaagaaaaaaaattaggatagataacatatttaaagaaataagcattgaaagtatgaaaaaagatatcctctttcttcccaaaagaaactatcaaaattcgtcagaaaaaaatggaaaaaaatcaaatggaacttttagaaataataaatgaataaatgagawttacaaactatgaacaaattagagggcatgttat

SEQ ID NO: 179299 - DNA, 574 bp, Homo sapiens
  misc_feature (1)...(574): n = A,T,C or G
ccaatcagcactctgtaaaatggaccaatcagcaggacatgggcggggacaaataagggaataaaagctggccaccccaaccagcagcggcaaccctctcgggtttgctgttcaaaataaatcatgctgctgctcactttttgggtctgtgccatctttaagagctgtaacactcaccgcaaaggtccacractccattcttgaagtcagtgaggtcacgaacccaccagcaggagccaacttcgtacaaaatatgacattccttccagtgagtggacattgtgggaatccctcaatcattctccagaaataaccaaatatcttgcaacattcatcactagacaaaaacctggctcaggaagagatccctcttagaaatctacaatgtgcacatatttntctgccttttaaaatagagcttattgagtattttcctgatgaccaagtccatgatttagaacatcacagactacaaaatattgtattgtgatgatgtgctcaggaattcctgatatgtgcagagcagcttgaccttaagtctagggattaagtttcaacaaacaaatgatgatag

SEQ ID NO: 179300 - DNA, 425 bp, Homo sapiens
cacctattatgctagaaagtggctaagtagttgcctgagaatgagggttcacagaagagtgaraaaaagggattacagagaagtatgagaaaattattgggtggaaaagtttatgttcagtatcttgactgtggtgctggtttaatgggttgcatatatattaaactatcaaaccgtacatttcaaatgagttcattgtgtaaattatacctccctaaaactgttaacaaaaaaaaagcttcagactataggggatcaaaattatacctccaaatatggtgttttgacatactgatctaaacatgcagcctcaagatctctctgaccttccccacctcacaaagaggaacacaaatgcctttgatcccatccctaaaatttcattaaccagagaagattaaatttcataccacagagaacaagac

SEQ ID NO: 179301 - DNA, 430 bp, Homo sapiens
cattactgtttcatttttgggggtaaagaaattgattcagagaaattaggtcgtttgcctgcagttgcacagctgatgtgcacccaattataygttttatttgattgtaagtttaattttcccagacaagggttataatatagtattggaagacccttaattagtagatatacagttcataaaaggattctgccattattgagaacattcttgatatttgcagaaaggtaagccaagcctcaaagaatggatgcctcataaatttatttaatttcattgacatcaccactttaatccctcatcttctccaattttcccttcttttctcaagtctatgatcataaatatttccataactataaacagctcattatttaagtagctttagtctaagataattctggaaatttagctgaattttcaagggaaa

SEQ ID NO: 179302 - DNA, 596 bp, Homo sapiens
ttaccagccacaacatagcaataactggatgtgagcatctatactgattctcctaattttgtagtttgttgctgtgcttaattgcctgggagtgcgtttgttattcatggtggacccctcttaccacacctaatagttgatgctaacaaggtgactcatggcgtgctcctcttgccacatggtatcagctagacctcttcaataccggcagaatgtggctggagactgagttcaatcatgtgggcaaccagtcaatcaattaagcttatataatgaagccccaacaaaaactctggacaccaaagctagggtgaggttcccaggttggcaattctctttgcatattgtcatatatctatgctgagaggatagaacatcttgagaaatcaggagcttcatctttrgaaacctcctatactctggcttatacacgttttattttcactggttctaatttatatcctttccctgtagtaaaccataactgtgaaataacagctttttgtgagctctgtaagtccttctagtgaattatccagcctgagggtggttttaaaacccctccaacacaaacttgcagttgttattagaagtga

SEQ ID NO: 179303 - DNA, 409 bp, Homo sapiens
atggcacatattttgacactgataacgtaaattctattgacttgagagtttcaggaggggaaatgagaacatgaggtattttgccaaatgatttctctttttatttcacagtaagctgttggcccaactacctctgcccctcttctattttagaggtgttgagattaaagagtgggagcttatttccccctgaactctgaaataagtatgaatttcagttcacaaatataattgttgaagttataaaatttggtttattttctgtaattcaacttaatttcttacacagagcccttacrccaccactgatgggaaccttgatcacataagctttgaggacttctttcctgtggttcaactccagcttcccttccagaatcttacacaaggcatggtggttggggaattc

SEQ ID NO: 179304 - DNA, 591 bp, Homo sapiens
actagaccatctttagaagatttcttttgtccctctgaattctacatttctgaaaagaaaaaagtaaaggtatatagggactcttaaccaagcatctcaaatatccaacaacagtatttggttaagtataaactctgacctacccataccgtgaaatactgaatatccccattaaaatgcatgtcttagaacacctggtaacttaggaaatatctcataatatattaagttaaacaataaaactttaaatcatatatataatatattcaggttttataaattacatacaaatattaacatagcacatgtgaaaaatattctacatatatgcatggtacatatattaccctattatatccattaatgtaaaatatataagtaaatctgtagatatgtaaaatatatccattctattcatagaaaacatgggcaaacatctaccaaaatgttaacgtggctgtatttggatgataagattayaggtggttgttaattttcatacattcatttatttatttcatacattcatttatttatcaaacttctaaataagcatatgttacttttatttggatttattttattttaact

SEQ ID NO: 179305 - DNA, 361 bp, Homo sapiens
tagggggaatctctcatgcccaggattgcaaaggagcatgggggaagtgtgggtcccgggggaatcttgctcactcaccctttccccttggtggggagtctccccagctccacacccatcccaggcggtcagcgacsctgctttactcttctctgttctccgtgggtcctgttgcttccttgatgaatctcagcgtggcctcctggataatccacttgaagagctaggatttactctccactctcctctctgtgagagccgtgtgcatcagctgcttccagtcagccatcttgaattctcccctacaacgtttttaatcagtcagagttcaaccagaagagtagaaactgctttcaaaact

SEQ ID NO: 179306 - DNA, 404 bp, Homo sapiens
ataatttagatgagttctgttatagattatgatataaaagagtgtggtagaccatagctctcactgtaacaagtagtgggggtgaggggagatggataaactaaaaaaaaaaaaaaaagaaaaargaaaaagtttaaggatgtgaagaagtctgaaagtctggaagacttaaattccagatacggaagagccttttcctctctggtgacatttgccgagtttgggatgggtaaacgagagggtttcttcttccaagacaaaggaaaatccagcagagtttctaatagccaaattagcatgactgatatattggaatccagaggatcccccaaaagcatatccagtcctccacaccagtcagcctttacccagaagacttttgatgaatgccgggctgtaggtaa

SEQ ID NO: 179307 - DNA, 548 bp, Homo sapiens
gaacaaccctacatctaataaacagcagtaccttgggaaacaactgacataaatagtacattattttagctttgaactaaaactaatgaaaggcattttaatgtacatcaytgatttatagattctcattctctcctttattgtaaaaaaaattaagaatttgctttttgatgctgctttttttttttttaagttttttaatttaaaaaacaagagagatatggtctcactatgttgcccaggctagtcttgaattcctggcctcaagcgatcctcctgtgtcagcctcccaaagtgctaggattacaggtgtgagccaccacacctagtctctttgatgattctttttaaactttttgtttagaaataattttagacttattgaaaagttgcaaatctaaaatagagagttcctgcatactgtttacctggcttcccctaatgttaataacttatataagcataatacaatgatcaaaaccaggaagctatcattgttacaacactattaactaaacttattcatttcaccagttttctccgtaaag

SEQ ID NO: 179308 - DNA, 589 bp, Homo sapiens
ttctcactatctctcatttttaaaataccacgtataaatgaatatatttaatttttacagagacaaatggcatatgcaagcttttgtaatttgagaaaaaaattcttatagtacaaaaattccaaattataattatagtaagggttttattttgccacgctaattagataaacttaatttgataaatacacaccatgtgaacacaatgttatgtttttaacaacccttcctgataktgtgtgcttctataaaatcctttattaaaaatcatgatctttaaaattttctgcatatttttatgaggatacacacttatttatgatgtgtgtatgtgactacatgtgactttctcactctttgatacttataaagtcaggtcagggtgaccaagaggtttgggaagaaaaatccccatcaagatcttaaccaattattttacaaagtgaaagcctgttaccgtgttaaactctaatctctcatcatgaacatctattaacaacttctctatacttccaagtgctcttccgccctcttccttgtgtcccccaaatgatatagagcagcatttatacataggcacacatgtatc

SEQ ID NO: 179309 - DNA, 589 bp, Homo sapiens
ttctcactatctctcatttttaaaataccacgtataaatgaatatatttaatttttacagagacaaatggcatatgcaagcttttgtaatttgagaaaaaaattcttatagtacaaaaattccaaattataattatagtaagggttttattttgccacgctaattagataaacttaatttgataaatacacaccatgtgaacacaatgttatgtttttaacaacccttcctgatagtgtgtgcttctataaaatcctttattaaaaatcatgatctttaaaattttctgcatatttttatgaggatacacacttatttatgatgtgtgtatgtgactacatgtgactttctcactctttgatacttataaagtcaggtcagggtgaccaagaggtttgggaagaaaaatccccatcaagatcttaaccaattattttacaaagtgraagcctgttaccgtgttaaactctaatctctcatcatgaacatctattaacaacttctctatacttccaagtgctcttccgccctcttccttgtgtcccccaaatgatatagagcagcatttatacataggcacacatgtatc

SEQ ID NO: 179310 - DNA, 596 bp, Homo sapiens
ggtggatcaaaggagattagccatgttgccagagtgaggaaagaaaccacgaaagcagagcacatcacttacgtgtaattataatgattacaatgggagcccttggacttaakaaaaaacatgtagtgcaaggagttgctattttaaagaaagtaatctaagcattaccaaaattgctaagaaaagtgggggagaagttttaggatacagccacaaataactcaagtagtaaaaaaacaactgccataataatttgatggtgagaaagcaatatttgactaaaaattatatggtttttgtccacttgtgacttgaggaattgacttttattccccttgttattttccttacttattaagtgttttaaaaatattcattagctaaatgaaaagatattttaatgctccctttcaaatcctttgtgtagaactgggacttgggaactttaagggatatgatttttcttttcctaaacacttaccatctcctcttgtgtgacagtagcaataatttactgtgcgtaataccttgcgttagccaagaagctacagaaatatttcatagcttcaaccttgacatagtgaaagcacaaccct

SEQ ID NO: 179311 - DNA, 440 bp, Homo sapiens
ttatctcaaacaggctcagtcactgctaagagtgtagaaaggtactttctttccttgaatctgtacattttcactataggaagggctatttagtgcacttctccagcaatgtagccaaaaagggctaatgcattttaaacatttaaccatgaccaaaatttggagctgaaaactagtgatgtgataaaaatattttcaacatatttacagtatttttaaccccatatgaatctttgtcccgagggggagcaaatctgctctccaagggaaggcactttttaaattatctatcttattttcagaaacacagatagccttcaagtaacttaccaagaccaccayggcaccttttggcctcacctatatcgcctatgcacaaaagataaaactttcctttatttcctggcaacatgacccatatagggttaaaagagaatttt

SEQ ID NO: 179312 - DNA, 567 bp, Homo sapiens
cttatgaagacattaagtagtcatacggayccacatttatgttaaaagtcaaacatatttggtattgccaagtcgactgagatgataatcaaatagactgacactttctactcttaggatcacacagtctcaggtattcataactattatcagcatcacctgggaatttgttagaaatgcaaattatgtagccccacctccaggtgactttgatacatgctcaaattcatgagctactgagatagtattcaaaacatctagtgcatagtaataatcatagctaccaatttctaaatatgtaacaagtgaaaggtattatgctagttgttttacatgcctagtattacttaactatcaccataccccaatcaggtatcactacacccattttataaatgaggaaactgaggctcaaagaagctaaagagcttaggtttattccgtagtccggtttctcattttgaaacatcagtgtaataaatcacaagttcaattacttggtcagtcacatgcttatcagtctcaattagtttatcccctcattttatacatttttttttttaaaag

SEQ ID NO: 179313 - DNA, 577 bp, Homo sapiens
atctatattttctgtttctgtatttacatatattctattattaataaaataatggatctggataccgtttagagagattttgaaataataagttttggggattaagctttctgaaatgcagaacttaaccaatatacttattcataagatactctatttaatcaggaccttaaaattgctttggcaatttagcaagttttggcacaccattttagaagttgtcaaagctttcagaacaaagaccaacaggaacacaccttgcagacacagtccatcatccctaattgtgttgttttcagaaatcttgaagtttgcttaatatgttcgtggtttgacagattctgtgaaatggtcaaaaacaacagcaaagctgaaaccatgttcataaaaccaaataactatttgaagcattagaggttgtttataagctgggatattttggtctcatatctatataacaggactctatgacatcaaacagatagtggagaataattattattgaaaaatgcttmaaaggagatcaatacacttaataaaaagataagaaatagcctgttttcagagtgaataagtg

SEQ ID NO: 179314 - DNA, 548 bp, Homo sapiens
catgcttctgggtcccacctattatgacatacacacagtcatatcttcctagtgctaggtttctagttctgcctggaaaatgtggtcacaaccagccctttggttcagatgccctcatccttagggaaaattccctttcacaactttctgagatgttctcttgacagttgatctctgtcagggccatcttcatgtaagacaaatgatcaacctcataacagtgtatcaaaatcttaatccttctccttcaaaaggatcccttatactcatgcaaatatcccctgttctcttctcatcaaagttttattttcacaaccaaggagaatggaaaaacagggcctctgtcaggacaacaaatgtgtagttattcccttcccaagaaagcaacacttgctttatatatccagagctaagagggaccactgaaaggattccttcagcagagaagatctctgcgccacggtgacactaagaaacaattgrctaaacaacaaaactctcttagttgtaagcattgatggatttagaactggaaattcccactggat

SEQ ID NO: 179315 - DNA, 550 bp, Homo sapiens
tgggtctcctttgtttcttcctgttttgttttagtccccccaaatgaaaaaccactttcaataataaataaacaacattaaaaataaaataagaaaaatgaacataacaaaaaatatcactttcctgttaatataaaacctcctgttaatactttgctgaaggtccttaaaagccgttctgtacctctatctctgtgtgtgtctctctctgcacatacacacacacacttgtctaatctcatttcttccctcaaaaatatgcaatatgccataaatatcttttcacaccaaagaaaaacttcattatatttaaatgagtatatcacatttgattgcatacacatataacaatttaataaactctttagtgggcgttttagttgtttccagtttttttctattaggaaaaaagtgctatagtgctacagtgagcatccttgtacattcattttggcccacttacatgattatggttatccccttaagaaaaataactagaaatagaatagaggamccaaaagcacatttacaattttggtatttagaacca

SEQ ID NO: 179316 - DNA, 455 bp, Homo sapiens
aattagaaagatgtgaaacaacaggaattcaaaagctgataaaagtgtgaaaatgtacacttaagagcaatttggcaatatctagcaaaactgcagatgttcccatcttacaacccagcagtgccacttcctgggtacacatcctgaagaaactagcacatgtacttagggaggtacggcactctctggtctgctcctggttacctccctgatgccgttgtctgccatttttcctcctcgtctgttttagccacactggcctccttgtttctaggacacacctggcacatttctacctctgggcatttgcactggctgtttattctgcctggaatgctcttccttaaggtgcaccctagacatcttcttattcctttccagtttttacttgaatgtcaactgtcattgaggtcttccttgctcctttattstgtattcccttcccaatttcactt

SEQ ID NO: 179317 - DNA, 563 bp, Homo sapiens
tgactcatggcactgatccaatgacaacccttctgtcctccccagtagttgtcctttctcaggaacaggtgaccacgcctgcctaaccacatacatccctctcctgagaaaagtccactctccaggacctcactctakctgctgagggcactccctggaggatgtgtttaactacatctcccaaaagacaaactgcaagcccaggagggcgatctcagcaggcaaagtattcaggacacaagagtggcctctgagcttcttttcttctttggctcctggaaactaagaacacgggaagaagtggactcagcatgggcaatttttaaaagttacacagttagttcagcctcacaacagatgaactgacttttcttttttttttttttaaaggagttaatgggttgggctggttgtaatagctccttgtaatagatagtaaagagttttctggattgaagccaaacttaccttcagtgaaaaacacatgaaggtgattgcttatagaacttgcacactgaagagaagaacagttcatgacattttaacacactaaatgatgggga

SEQ ID NO: 179318 - DNA, 449 bp, Homo sapiens
tattgaatatgagacaatattttagcataggaagagtgaaaacacttctaaattaagtagaccaattcgttgaacttgaagacttgaactctctttgatagagataagtctgattttgccaataagaaagatgtacagtttactattgagaaactgattctttcagctcactggaagagagatctcccctctccttctctcccctctctttccttyctcttctcttccctctcttctctctctttttctttccttttctttctcttctctttcttccctctttcttctctttttcttcccttctttctttcttccttcatgcgccaagctcacttaatttatcatttcccttccacacacaacaatttatttttcacactcggaaattgaagttcaacctgtgtatagaagatcaagctaagatatccatttctagtttgagattaatc

SEQ ID NO: 179319 - DNA, 563 bp, Homo sapiens
tgactcatggcactgatccaatgacaacccttctgtcctccccagtagttgtcctttctcaggaacaggtgaccacgcctgcctaaccacatacatccctctcctgagaaaagtccactctccaggacctcactctatctgctgagggcactccctggaggatgtgtttaactacatctcccaaaagacaaactgcaagcccaggagggcgatctcagcaggcaaagtattcaggacacaagagtggcctctgagcttcttttcttctttggctcctggaaactaagaacacgggaagaagtggactcagcatgggcaatttttaaaagttacacagttagttcagcctcacaacagatgaactgacttttcttttttttttttttaaaggagttaatggkttgggctggttgtaatagctccttgtaatagatagtaaagagttttctggattgaagccaaacttaccttcagtgaaaaacacatgaaggtgattgcttatagaacttgcacactgaagagaagaacagttcatgacattttaacacactaaatgatgggga

SEQ ID NO: 179320 - DNA, 393 bp, Homo sapiens
ttaccccaaaactgcttctttagtgatcttcaccctagtagtaatgacagccttaacctttcattgcttaggccaaacttcagagctaccctagactccttttttccctcacatcacagccacgtatccttatatccagtgtatcaggaaatcctctcatatctattttcaaaacacatcaagaaaatgatcacatctcagcacattcaacactgtgaccctgttttaatccaccataacccctggctgggattattttagwctcaaaacttctgtctctccttctgtcttgctcccctttagtttgttctcaacacagcaaagtgggtattaaaaaaaaaaaaaactaagacagatccagaactcctctgctcacaatcctttaataatttt

SEQ ID NO: 179321 - DNA, 393 bp, Homo sapiens
ttaccccaaaactgcttctttagtgatcttcaccctagtagtaatgacagccttaacctttcattgcttaggccaaacttcagagctaccctagactccttttttccctcacatcacagccacgtatccttatatccagtgtatcaggaaatcctctcatatctattttcaaaacacatcaagaaaatgatcacatctcagcacattcaacactgtgaccctgttttaatccaccataacccctggctgggattattttagactcaaaacttckgtctctccttctgtcttgctcccctttagtttgttctcaacacagcaaagtgggtattaaaaaaaaaaaaaactaagacagatccagaactcctctgctcacaatcctttaataatttt

SEQ ID NO: 179322 - DNA, 501 bp, Homo sapiens
aatatagggaagggagagagaaaatgaactttaatattcccatcctacacgtcaacattatgccatgacttacatgcatgacctctaagcctcacagggagttgacccggtaagcattattgtyttctgctgtaagataaggaaactagggatggaagaggccaagtaattgcacattattaagtagatgttatttgagtccgaagccacactctttccaggtgctctcctttttgggataccctaacatgtttaatccagtttagaaattccaaatttaattatatattcacaatttttactgttggctgttcatatgtaaccttgtagtattgctatattatcaacaacatatagaagtgctcctgatcactgcataaatatgcagcaccatgcccagtacgtatagatgctcaaatatactaactattctcctagaatcagtgttccccaacctttctgtcaccagggaccggttttatggaagacaatggaatggta

SEQ ID NO: 179323 - DNA, 501 bp, Homo sapiens
aatatagggaagggagagagaaaatgaactttaatattcccatcctacacgtcaacattatgccatgacttacatgcatgacctctaagcctcacagggagttgacccggtaagcattattgtcttytgctgtaagataaggaaactagggatggaagaggccaagtaattgcacattattaagtagatgttatttgagtccgaagccacactctttccaggtgctctcctttttgggataccctaacatgtttaatccagtttagaaattccaaatttaattatatattcacaatttttactgttggctgttcatatgtaaccttgtagtattgctatattatcaacaacatatagaagtgctcctgatcactgcataaatatgcagcaccatgcccagtacgtatagatgctcaaatatactaactattctcctagaatcagtgttccccaacctttctgtcaccagggaccggttttatggaagacaatggaatggta

SEQ ID NO: 179324 - DNA, 633 bp, Homo sapiens
tggagccaatcacttttctcaaccctggaaacagcagtaatttcaaggtgaagtcattgtggtaaaactctggcctccatcccagccagccctgatggttccagtgaacttattccctttttttttgagacggagtcttgctctgtcaccaggctggagtacagtggtgccatctcggcttactgcaacctctgcctccggggttcaagcgattctcctgcctcagtctcccaagtagctgggactacaggcacacaccaccatgcccagctaatttttctatttttagtagagacagggtttcaccatgttggccaggatggtcttgatctcttgacctcgtgatctgcccgcctcggcctcccaaagtgctggaattataggcatgagccatcgcacccagcctacagtgaacttattctaacaacactgatgcctttttttggattctctgtatgagttccactttgaagaatctgcttgagaggatgaggccagtttctgtatctatgaattaggggcaccagtttccatagtgtaattccagacaccasttaggaaaggggtgcttttgactaccacaagactgtggggaaagagtagaactgggcttagtttgtgtcccctaactaa

SEQ ID NO: 179325 - DNA, 446 bp, Homo sapiens
cgctgaagtgtacatcactgagcaccacagctgtgagcaaggggagcgcamtcccatggaggaccctcagggagactgtgtgggacatactttagaattgtcccactgtgaggagaggaagcatttaaccaccaacttctcatctgaaggtgactttaaggggggggctacatctccagtactcccagactactctccacccaaacacatgcgaggcatggacctgcagttagagaatgcccccaagaagccatttgtatacacaagaaccatctgcaggcaacctccaggattgtccctggagaaatgggagcacacagtcagcagctgatacacaatgagtgggaaaaaattaattgctgcaccttaaaaaaaaagtcacaagtatcttaaagaacttgccatgatgttaaaagtgggtaattgaatttctctgagggacccat

SEQ ID NO: 179326 - DNA, 446 bp, Homo sapiens
cgctgaagtgtacatcactgagcaccacagctgtgagcaaggggagcgcactcccatggaggaccctcagggagactgtgtgggacatactttagaattgtcccactgtgaggagaggaagcatttaaccaccaacttctcatctgaaggtsactttaaggggggggctacatctccagtactcccagactactctccacccaaacacatgcgaggcatggacctgcagttagagaatgcccccaagaagccatttgtatacacaagaaccatctgcaggcaacctccaggattgtccctggagaaatgggagcacacagtcagcagctgatacacaatgagtgggaaaaaattaattgctgcaccttaaaaaaaaagtcacaagtatcttaaagaacttgccatgatgttaaaagtgggtaattgaatttctctgagggacccat

SEQ ID NO: 179327 - DNA, 446 bp, Homo sapiens
cgctgaagtgtacatcactgagcaccacagctgtgagcaaggggagcgcactcccatggaggaccctcagggagactgtgtgggacatactttagaattgtcccactgtgaggagaggaagcatttaaccaccaacttctcatctgaaggtgactttaaggggggggctacatctccagtactcccagactactctccacccaaacacatgcgaggcatggacctgcagttagagaatgcccccaagaagccatttgtatacacaagaaccatctgcaggcaacctccaggattgtccctggagaaatgggagcacacagtcagcagctgatacacaatgartgggaaaaaattaattgctgcaccttaaaaaaaaagtcacaagtatcttaaagaacttgccatgatgttaaaagtgggtaattgaatttctctgagggacccat

SEQ ID NO: 179328 - DNA, 580 bp, Homo sapiens
aacattgattttgtgtgtgtgtgtgtggctgccttaaagtgactccctcaacaagttgtctggactgcaaggaccttcccctggagaaatcctaatcaccttccaggccaagctcacaggtcatctcctctgcrgtgcttttatctcccagaaacagtattcattcccatgtcaggactcttgaaactctttcttcagccttgattatagcatttggcacattgtgttgcacttatctgcacctatattgatttttctatgagtctacctgttcctccaacccagagccaagtgtgtcttgttttgaagcctctttatctgctagcacctagcacaatgccctagcgtacacaggtagtgtttgttgaataaattaatagacaaattcggaaatgaaagaaacagcaaaccaaccgtggaaactgttatgataaggcaaaataataggactataaaaatatgtgcaagtcagaaatgttttaccagttttatggggaaagagctatgtgatgtaaagaaggaaatcataccttactggcttttggtcctggttttatgatgtttgaaactgacgtcccaa

SEQ ID NO: 179329 - DNA, 450 bp, Homo sapiens
ccctattatatgtctttgtattagcttctttgttaggtgtgctttgtttccctgcaatcatttgttcccattcttttgcagctatgtttaactgctgtactgtattttatacatcattggacacagctttaggatgttcttcggaggcaacaggrtgtaattaactaaccagttaattagtgaacaccctctacttgtttggctcttcattgtgctcaaagcccctttagattcatagtctcagtggtcataagtccgtgaatgaggcattattaccccaaacgtacagatgaggtcacagactcagtcctggctctggctttgtgatcacacagctggagagtggtgaaatgcagagggttttccactatggcagccttcagggtgggtttatacccttccgttttcattcacactcagctcaggagattgaaccagttggaatgcagt

SEQ ID NO: 179330 - DNA, 545 bp, Homo sapiens
cactcttttttctctgttttattcatttagttccttaattatccacctcatcctactccatttttcatggagattttgaagacctacttttcctttctcattctgaaattagaattcatttaagcaagttagaataattaggaactagttccagccaactattgtatatattttatgtgacattcatcccttaacacccaaaagatggatttgagtatcatccaggtaactccaccaaacacaccttccattttcacataagaggcctaccagttgtcagcagtagggacagtcccccagaggtccagcccatcttcagtgagagtgccagtctgagtaaaaattaaaagcaatattagcataagatttaaagcttttaattatatagtaatttaaacaaaacccaagyttctaagatattatagtagatccagtagtctaaataccttgtttataagtaccaaattttaaatcagagaggagtacccacaagaaaaattaagcaggtgatacatgatccccaaaagaccatgtcgataattagg

SEQ ID NO: 179331 - DNA, 554 bp, Homo sapiens
taacaacatatacacttaatatatgttaaacagaaaagaatcaagttgtttaacaaaaaatagagaaaatcctaaaggcacttgctatggagaagagaacaatcacagaataaataaragctgcttccaaattctttcaaatagaattttctattcgaaataaatttcaaacagaaggactgttctggagaaaaaattaaactcttctgtgacacctcaaatggcaaaactgggatggatgaaagttacacatttagagataaatttggcttcgtgtgaaggggaactctgctgacaaagttaacaaagcctgtacgaggttgttctttcaatagatttaacaaatatttaacaagctcctttaatatgtcagaagtattgggattacagcatggatcaatacagactaaatgttgttctcatgaaacacacattctgggtgaggagaagcaggcaaaaagctaatgaaaacaaagataaatatagtaacttcagattgtggaaagtactgtgaaaacataaagcagggttgtgtgatagagaactggcttctt

SEQ ID NO: 179332 - DNA, 554 bp, Homo sapiens
taacaacatatacacttaatatatgttaaacagaaaagaatcaagttgtttaacaaaaaatagagaaaatcctaaaggcacttgctatggagaagagaacaatcacagaataaataaaagctgyttccaaattctttcaaatagaattttctattcgaaataaatttcaaacagaaggactgttctggagaaaaaattaaactcttctgtgacacctcaaatggcaaaactgggatggatgaaagttacacatttagagataaatttggcttcgtgtgaaggggaactctgctgacaaagttaacaaagcctgtacgaggttgttctttcaatagatttaacaaatatttaacaagctcctttaatatgtcagaagtattgggattacagcatggatcaatacagactaaatgttgttctcatgaaacacacattctgggtgaggagaagcaggcaaaaagctaatgaaaacaaagataaatatagtaacttcagattgtggaaagtactgtgaaaacataaagcagggttgtgtgatagagaactggcttctt

SEQ ID NO: 179333 - DNA, 540 bp, Homo sapiens
gggtgttatttggccctgaatctaaaatgaagttaaccttgtcggttcttgactggtggtgatcgagaactttctttgccaaacaaaatacaaacagaaagagaactgacataacctaagagatatacccctttcacctggggaccaagcctggtcgagtctactcattggagtcactcccatttgccttctactctccatycttgtcctttttgtctgggacaagcaatgatctcttctgttgtccccagatggcctctttcttcagtcttgtctcccttccatcccatctccccagttgcccctggtgggatagaaaacacctaaagaaatgtcaccagtcttcttaaaaagtaaaggctcctattctgcttcaagacaaggacccactccttagcgtggcatatgaggcccttaacaattgccctcaacccagcttcattctctacctaccagcccatattctagccacaccccatggtcctctgttccccacatgcagtgggccccttgtacccctgtgcttgtcagctgctcagc

SEQ ID NO: 179334 - DNA, 540 bp, Homo sapiens
gggtgttatttggccctgaatctaaaatgaagttaaccttgtcggttcttgactggtggtgatcgagaactttctttgccaaacaaaatacaaacagaaagagaactgacataacctaagagatatacccctttcacctggggaccaagcctggtcgagtctactcattggagtcactcccatttgccttctactctccatccttgtcctttttgtctgggacaagcaatgatstcttctgttgtccccagatggcctctttcttcagtcttgtctcccttccatcccatctccccagttgcccctggtgggatagaaaacacctaaagaaatgtcaccagtcttcttaaaaagtaaaggctcctattctgcttcaagacaaggacccactccttagcgtggcatatgaggcccttaacaattgccctcaacccagcttcattctctacctaccagcccatattctagccacaccccatggtcctctgttccccacatgcagtgggccccttgtacccctgtgcttgtcagctgctcagc

SEQ ID NO: 179335 - DNA, 540 bp, Homo sapiens
gggtgttatttggccctgaatctaaaatgaagttaaccttgtcggttcttgactggtggtgatcgagaactttctttgccaaacaaaatacaaacagaaagagaactgacataacctaagagatatacccctttcacctggggaccaagcctggtcgagtctactcattggagtcactcccatttgccttctactctccatccttgtcctttttgtctgggacaagcaatgatctcttctgttgtccccagatggcctctttcttcagtcttgtctcccttccatcccatctccccagttgcccctggtgggatagaaaacacctaaagaaatgtcaccagycttcttaaaaagtaaaggctcctattctgcttcaagacaaggacccactccttagcgtggcatatgaggcccttaacaattgccctcaacccagcttcattctctacctaccagcccatattctagccacaccccatggtcctctgttccccacatgcagtgggccccttgtacccctgtgcttgtcagctgctcagc

SEQ ID NO: 179336 - DNA, 543 bp, Homo sapiens
tctttcagaattctataggaaacaaaaatgtaaaggaacaccactgcttagacagaatacaaatcaagcctgtgtgaagatggrcacaatttctgtgctattcaactcaactaacaggtggcagatctgggttcctggcctcatggaacacaggctgtttctattaccggtcttgatccagtatattgcaactaaaagctgaaatagtcacctctttcctcctgtgactgaacctactataaaatcacctgttatcattgactgagctgctttttctctcaacaccttacacctctctttaagccgcattgtttttccaggtgtatgctattaatattcccctaagtacagagatggaaactgagattagagaagttaaatcctcagctcacaggtaataggtggcaaaactcactttactacaaggaaccatgtataacgggtttgagattcagacactttcatcccatttccagtatctttacattaacaccacctctggatactattaattttccttttatggtacaaacatgttcctgg

SEQ ID NO: 179337 - DNA, 429 bp, Homo sapiens
tttaaatctaaaaggtaaaaaataaataaatcgagggaagccagaaatctgactttttatgtgatgtagcctgatgataaattttgaaaacaaattcatcttttgaaaacaatcagtaggtcaaagtaaacctgggcatggtttagtcccagccttgggggctgtcgctctctgatgttgacagcctcgccccacttgctcttccttccccgaagattccctgtggcccggtctaacttctactcgcattcattatttcaagtgaacaatccgttgtgatcgtgagagtcactgtggtaaaaattagagacagtcraggcaaataatgaactccttcaatcaaacacccatgaagagcctaagtggatggaggggcgatgctgtgagattatgcaagctcagtcttgcgtgattctgctgagctcagca

SEQ ID NO: 179338 - DNA, 541 bp, Homo sapiens
aacaaaggtccttagttgcactttcacttgcaggaggactatatgttagcactcttgttatggtagtgccagctgaaattatgggaatacctgtagccaagagtgggatatgttcatctcttttgtattgggtttcgaatcacactgctagatagtgaaaagtttttcttactccagactgaatgatttagtatttattttgaacatacatttccaagactgtttttgttctacaaataatttataaatgttaatacttattttagtaaataataatgcctatttcatagggttgtggtgagaattaaataacacctaataagtactcagaaggatyttatcatcaaatacactcaattagttcttattgtcaaatatagataaaagtaaaagggattcaagatatcatatcttattagtttctaacaataaccctagacaatagtgactgttattattctcatctgtggaggaggaaattaaggcatcagaagtaaagtgggttgccaaagtcttatatatggttacgtggtagaggtat

SEQ ID NO: 179339 - DNA, 541 bp, Homo sapiens
aacaaaggtccttagttgcactttcacttgcaggaggactatatgttagcactcttgttatggtagtgccagctgaaattatgggaatacctgtagccaagagtgggatatgttcatctcttttgtattgggtttcgaatcacactgctagatagtgaaaagtttttcttactccagactgaatgatttagtatttattttgaacatacatttccaagactgtttttgttctacaaataatttataaatgttaatacttattttagtaaataataatgcctatttcatagggttgtggtgagaattaaataacacctaataagtactcagaaggattttatcatcaaatacactcaattagttcttattgtcaaatatagataaaagtaaaagggattcaagayatcatatcttattagtttctaacaataaccctagacaatagtgactgttattattctcatctgtggaggaggaaattaaggcatcagaagtaaagtgggttgccaaagtcttatatatggttacgtggtagaggtat

SEQ ID NO: 179340 - DNA, 437 bp, Homo sapiens
tgcaggctgggatgaaatatttaggagcccacatcccttggaagtggaaactgaaaagcaaaatgaaatgctgagatgtaattacccaggcaggccaagcatgtctccctgccagcggcaggctckgtgccccctcccacccaccccaccgccacaagtaggcgttgggtaatgaagtccccctggacccttctcctgagctagcccttgcccctcctcttcaggccaggccagaaggaaggggtggcaaagagcccggctctggctcccgcaggccactccttttggtggcagaacagcaagaaatacagaaaaccggggggctgggtcaagccccagcactggatataaccagacgatcccttcactccaccaagcttcctcagctggaaaatggggctgctggcccacaccggggaggagggaccaagaagatg

SEQ ID NO: 179341 - DNA, 437 bp, Homo sapiens
tgcaggctgggatgaaatatttaggagcccacatcccttggaagtggaaactgaaaagcaaaatgaaatgctgagatgtaattacccaggcaggccaagcatgtctccctgccagcggcaggctctgtgccccctcccacccaccccaccgccacaagtaggcgttgggtaatgaagtccccctggacccttctcctgagctagcccttgcccctcctcttcaggccaggcyagaaggaaggggtggcaaagagcccggctctggctcccgcaggccactccttttggtggcagaacagcaagaaatacagaaaaccggggggctgggtcaagccccagcactggatataaccagacgatcccttcactccaccaagcttcctcagctggaaaatggggctgctggcccacaccggggaggagggaccaagaagatg

SEQ ID NO: 179342 - DNA, 437 bp, Homo sapiens
tgcaggctgggatgaaatatttaggagcccacatcccttggaagtggaaactgaaaagcaaaatgaaatgctgagatgtaattacccaggcaggccaagcatgtctccctgccagcggcaggctctgtgccccctcccacccaccccaccgccacaagtaggcgttgggtaatgaagtccccctggacccttctcctgagctagcccttgcccctcctcttcaggccaggccagaagsaaggggtggcaaagagcccggctctggctcccgcaggccactccttttggtggcagaacagcaagaaatacagaaaaccggggggctgggtcaagccccagcactggatataaccagacgatcccttcactccaccaagcttcctcagctggaaaatggggctgctggcccacaccggggaggagggaccaagaagatg

SEQ ID NO: 179343 - DNA, 391 bp, Homo sapiens
ccttcagttaactttcagtatcagaaattctaactgtttagcaaaagaaaccataaaaaccatttatgtggatcagtgagcctttactgctgtctgcccaggaggaactcaataaatgcctcttgactgatggaaaattgctttggtaatactaagcagagaaaatatgaagagtacgtaacacattgcttgatgcatggttcttggctgtactgcactgacatgtaactaakgacagaagttcatgcaaagtctatgactgtcagacttttagaatatagactggtatcatccaaatgacggatgtatgtttgcaccagtgttggctcagacagtttcttagagctttggggtttcctctaaaatatagttccaccccaggctctctcct

SEQ ID NO: 179344 - DNA, 384 bp, Homo sapiens
atggtaacaaccccactgtcactagccccaggatattgtattgtccctacacactgcccaaactttgtgtactgtccctttattaaaacctcctaatttgaatatgtgatatttgagtatgctgctgagcccctgatagatactggttcctgatatagtaaacatatatgtctactattgtcatcatttatgttatttcaccatttgctttccattttcawatgttgtggtccaaggataaacagatctttggaatcatcaaagatgggttttgtgtttctattttttgttatcgtgatggattgttttctgggaagataaatgaaagcgtatttcaaaaacaaaggcaaaatactttttcaggcatatgaaagctaaaagaat

SEQ ID NO: 179345 - DNA, 590 bp, Homo sapiens
gatcttcccacttcggcctccctattcttgttttttaattattagtattttgttgttttgagacggagtctcgctctsttgtccagtctggagtgtggtggtgtgatcttggctcactgcaacctctgccccccaggttcaaatgattctcctgcctcagcctcccaagtagctgggattataggcacctgccacctcacctagctaattttttgtattttttttagtagagatggggtttcaccatgttggccaggctggtctcaaactcctgacctcaggtgatcctgtctgcctcagcctcccaaagtgttgggattacaactgtgagccaccacacccggcacctgttctttttaacattaaaaaaaatgtctataaccaaatagactgcttgtgaaaagtagtaatgttaacttccctggaaatgttctttctttaatttttgctttatttatgtaaaataaaattttaagaactattgttgtgggcttttagcaaaaattatattcaccaaagtcatttgggactgactcatttgattaccctctggacagtagcaatattggtaggtgtgaagtatacatgta

SEQ ID NO: 179346 - DNA, 527 bp, Homo sapiens
tacctttagggtgcccaacgtttgtatcttatataaacaagctgtcgtttagaatcagaagtaaaatccatggcctatggcactggttaaaagcagacactcttgctctaacagctccaacctgggctggttggagattggcaggaactcagcgggaaacatccagagcgggctcacggtccagcagcgctcccaggagggcgatggcagaatagcagcctgttaggcggcgggaggaaggcgaggcaccagttactgatacgtatgtctgagagcgagtctgaaggagaggaaagactgcagaaggcrtggaggtgacaggttagacagcaagagaaatggcataatgcagagccggttaatgactctggcagctttccacctctgagaatgttacaattggtgagggaggatggcacatgtgaattatctcttggtaagagggaaatccttgacttgaaagacctgaatgttcttgtctatcaggacacaatgaaatatttagattctgggataacaatgtacta

SEQ ID NO: 179347 - DNA, 550 bp, Homo sapiens
atgctggtcttcagaatggaactacgctatcagctctccaggtccacagcttgctaactcaccctgcagagcttgggactggtcaaccccacaatcacataagccaattccttataakgaattcctatcatctatctatctatctatctatctatctatctatctatctatctatctattgtcttcacacatccttttgattctgtttctctggagaaagctgagtaatatacatcctatgctgtggcagctttatcagaactgtaactcccaatctcatctaccatccatgaccagatccaggtatctgtgcaagtgcattcatcttttacacctctcagatactgggacaaatcatctacctttgtttagacatcttcatatatttgctagggatattcctagaataggactgacactgtactggcactaaggatctaaactgagcaaccactgattgaaccataaagtcctctgacccagcggcaaattataggaagtaaggattaaagatgaaatcacatgcttccctggcagtgcagaagaccat

SEQ ID NO: 179348 - DNA, 633 bp, Homo sapiens
cataaaatcttgttgaatgaataagccctctcatgaagaaacattctatgtagattgacaatgacagtcaaatgacagggtgaaagaaagggatttttattaatgtacaaagtggaggaaatactgaggccaaagtatttacttaaggggaattctgcctccttttatcttcaataagtggcagcaaagagttcattcagcctttacgaaagatgaagtggagatgccaaacactccgttccatcctacaaattgagcaaaagatccatatgctttcgtgtagaatgaatcttgtaataaaagtaaccatctcatatttttaaaaatccattctcagcatgcgtgatgtctakagacacagcccgcttagtgggaggcttgacaggaaacagcagatctcaattgtagttctgattctggctaatttgctgtgctttctaagagaagttcgttaactttcttagaattcagtttcattacttgtgaaaacattggatttgattatttcgaaggtctctttgagctctaaatttctatgctagtctgatgagatttaaatttttaaaaaccttacttgttactcattctttaaaaatgtaaaaattaccatacagcactttttcttgccaaaaa

SEQ ID NO: 179349 - DNA, 558 bp, Homo sapiens
aaatccaactatgaactctgaagcagacctgtaactcagctccatttctgctctagcataaactgggagcagtcttgctcacttaattaaggggcccagtaagggacatacctttccatgcctccagtagcaggcctgtccacctaagaccagattgcagatactgaagcagctctgtgattaaattccagcaccactctactgcagtstgggggacattccatcaacccaaaaacccagcaagagaaggcctttactttctgaacacagtctgtaaagactggaagaggcatttacccctccagatgcatacacacatggatcatgaagaaacaggcaaacatgacaccaccaaaggaaatgaccctttaaaaaaatgtagattcattaactgctcgacaaagaattttaagtaagcattttaaagaagctcaattagctacaagagaacaaaaatggacacataaacaaaatcagaaaaaacaatacatgcacagaatgaaaagtttaattaaaaaatagaaaccattagaaagaattaaatgacaatccagagct

SEQ ID NO: 179350 - DNA, 558 bp, Homo sapiens
aaatccaactatgaactctgaagcagacctgtaactcagctccatttctgctctagcataaactgggagcagtcttgctcacttaattaaggggcccagtaagggacatacctttccatgcctccagtagcaggcctgtccacctaagaccagattgcagatactgaagcagctctgtgattaaattccagcaccactctactgcagtgtgggggacattccatcaacccaaaaacccagcaagagaaggcctttactttctgaamacagtctgtaaagactggaagaggcatttacccctccagatgcatacacacatggatcatgaagaaacaggcaaacatgacaccaccaaaggaaatgaccctttaaaaaaatgtagattcattaactgctcgacaaagaattttaagtaagcattttaaagaagctcaattagctacaagagaacaaaaatggacacataaacaaaatcagaaaaaacaatacatgcacagaatgaaaagtttaattaaaaaatagaaaccattagaaagaattaaatgacaatccagagct

SEQ ID NO: 179351 - DNA, 529 bp, Homo sapiens
aaataaaaataaaatatatatacatatatatacacacagcacatataacttttaaaatacattttaagtattagaagcctaattcattaatagcactatagagagaggagtgaaatttttcaagtactgtttataggtgcaagctatgtaattaatgtaatctaaaagctataaaatgggaggatgaatgggaactattcaaaatgtacccttgtttggcctgtaacttcatttctctcccttcatgcatttgagctcacagaaggtggaggttatacaggcttggagtgaagaactgtgatgaggaaatccctactgattccctttaacactcatttacaaccaaaagtctctgaatagttatttttttttcttcacagaatgagagtttcataatacataaaagcccttttttctttccttttttttttaattgagtaaaagtgctagcccatgatgttagccagtaattcagttggtatgtktgaaaaaaatcctctgacttcacaaacttgtaagccggtgttta

SEQ ID NO: 179352 - DNA, 565 bp, Homo sapiens
aaaaaaatttaaaatatcaaacatgatatccatttagcttttaggtacgctaggtaaatgtccttacagaagtagtttaaaaacttttcttccataaaatagaaactatatttacaccaaatatcacagctcagaatcatactcttgctttttacacatgaccagtgctcagccactgtagacactacctgatttttcstgatattcgggctggtagcttttatctcaccttctttctctctactttcttctttcttttctatttcttccccatcacttactcaagagttaaatcttttccattcttaatccatgtgataaataataaattagcataaaaatctttaaaatgcagatttgatataataggggaaatgaaaggcaaattctaatgaaaacttcccagagaaaaataattagaaaatattatagttaaagtaaataagaggtgtacaggggacaaagaacaacagggtacagaatgacaaaggacaagcccctgatccagccaatgatggaaacccaagaaggttggtacagctggaaacctgaagctggcctagag

SEQ ID NO: 179353 - DNA, 565 bp, Homo sapiens
aaaaaaatttaaaatatcaaacatgatatccatttagcttttaggtacgctaggtaaatgtccttacagaagtagtttaaaaacttttcttccataaaatagaaactatatttacaccaaatatcacagctcagaatcatactcttgctttttacacatgaccagtgctcagccactgtagacactacctgatttttcgtgatattcrggctggtagcttttatctcaccttctttctctctactttcttctttcttttctatttcttccccatcacttactcaagagttaaatcttttccattcttaatccatgtgataaataataaattagcataaaaatctttaaaatgcagatttgatataataggggaaatgaaaggcaaattctaatgaaaacttcccagagaaaaataattagaaaatattatagttaaagtaaataagaggtgtacaggggacaaagaacaacagggtacagaatgacaaaggacaagcccctgatccagccaatgatggaaacccaagaaggttggtacagctggaaacctgaagctggcctagag

SEQ ID NO: 179354 - DNA, 260 bp, Homo sapiens
gctgctggtgtcgcaaccacaacgtgggaaccacagaaccactrgttggttttcagtgtttcagtgcatacaattcctaatatatctggccaagaaaacttggaagttcttagattgtcccaaaggtggcgcatgaaatcaaagcaggagaatagtttcctacgaggtgtagcctgggaaagttgggggtgactgatggaaaggaggagtgaagctccgccctttccgctgctaggctgcgcccgaggctatttaaaccc

SEQ ID NO: 179355 - DNA, 286 bp, Homo sapiens
tctccgggatttgattgtggcaaggatgctgctggtgtcgcaaccacaacgtgggaaccacagaaccactggttggttttcagtgtttcagtgcatacaattcctaatawatctggccaagaaaacttggaagttcttagattgtcccaaaggtggcgcatgaaatcaaagcaggagaatagtttcctacgaggtgtagcctgggaaagttgggggtgactgatggaaaggaggagtgaagctccgccctttccgctgctaggctgcgcccgaggctatttaaacc

SEQ ID NO: 179356 - DNA, 286 bp, Homo sapiens
tctccgggatttgattgtggcaaggatgctgctggtgtcgcaaccacaacgtgggaaccacagaaccactggttggttttcagtgtttcagtgcatacaattcctaatatatctggccaagaaaacytggaagttcttagattgtcccaaaggtggcgcatgaaatcaaagcaggagaatagtttcctacgaggtgtagcctgggaaagttgggggtgactgatggaaaggaggagtgaagctccgccctttccgctgctaggctgcgcccgaggctatttaaacc

SEQ ID NO: 179357 - DNA, 234 bp, Homo sapiens
ggaaccacagaaccactggttggttttcagtgtttcagtgcatacaattcctaatatatctggccaagaaaacttgkaagttcttagattgtcccaaaggtggcgcatgaaatcaaagcaggagaatagtttcctacgaggtgtagcctgggaaagttgggggtgactgatggaaaggaggagtgaagctccgccctttccgctgctaggctgcgcccgaggctatttaaaccc

SEQ ID NO: 179358 - DNA, 286 bp, Homo sapiens
tctccgggatttgattgtggcaaggatgctgctggtgtcgcaaccacaacgtgggaaccacagaaccactggttggttttcagtgtttcagtgcatacaattcctaatatatctggccaagaaaacttggaagttcttagattgtcccaaaggtggcgcatgaaatcaaagcaggagaayagtttcctacgaggtgtagcctgggaaagttgggggtgactgatggaaaggaggagtgaagctccgccctttccgctgctaggctgcgcccgaggctatttaaacc

SEQ ID NO: 179359 - DNA, 386 bp, Homo sapiens
ctcagatcttcgcggagcggatcagcggccggagcgtttggcggactctgcgtggacttggagctcacrgcgtcttgcgacttggaagcggattcagaggacaggacagaacacttgggcaagtgaatctctgtctgtctgtctgtctgtctgtgtgtctgtctgtgtgtctgtctctttggttggttgatttccattttcttaaggggcacatacctcacaccgcacacgcacacactcacacacacgcacacacactccttcgttctgcgagttagaaaattagtaggggcccctgggagctgtaggtttcctaatcatgtctgcacctaagaacagtagggtcttgtctggctcttcttctgaacggtcccccagcccggact

SEQ ID NO: 179360 - DNA, 472 bp, Homo sapiens
gagcgtttggcggactctgcgtggacttggagctcacggcgtcttgcgacttggaagcggrttcagaggacaggacagaacacttgggcaagtgaatctctgtctgtctgtctgtctgtctgtgtgtctgtctgtgtgtctgtctctttggttggttgatttccattttcttaaggggcacatacctcacaccgcacacgcacacactcacacacacgcacacacactccttcgttctgcgagttagaaaattagtaggggcccctgggagctgtaggtttcctaatcatgtctgcacctaagaacagtagggtcttgtctggctcttcttctgaacggtcccccagcccggactccccaaggtccatgcgagcctcagccagcttctccctctcccctctcagaaactcaggcttaaggggaagctcctcaccagggatccggagctaccattcaccatcccctagggctt

SEQ ID NO: 179361 - DNA, 386 bp, Homo sapiens
ctcagatcttcgcggagcggatcagcggccggagcgtttggcggactctgcgtggacttggagctcacggcgtcttgcgacttggaagcggattcagaggacaggacagaacacttgggcaagtgaatctctgtctgtctgtctgtctgtctgtgtgtctgtctgtgtgtctgtctcwttggttggttgatttccattttcttaaggggcacatacctcacaccgcacacgcacacactcacacacacgcacacacactccttcgttctgcgagttagaaaattagtaggggcccctgggagctgtaggtttcctaatcatgtctgcacctaagaacagtagggtcttgtctggctcttcttctgaacggtcccccagcccggact

SEQ ID NO: 179362 - DNA, 570 bp, Homo sapiens
atttagaccaaaaatacagatagacacacaaaagccagaaccagaccagaatgagtagctcagtagctacagcctttattccctttattctttagggttcgaactcaaaccagattcaggattctgaccaaaccaggacccccctggggtgaaactgaaaccccacagtctagacaaggttgggggtctttttatattttttatttttttgagatggagtttcactcttgttgcccaggctggagtgcaatggtgcaatattgcctcacagcaacctccrcctctcaggtttaagcacttatcctgcctcagcctccaaagctgagattacaagcttgtgccaccatgcccagcacattttgcatttttagtagagacggggtttctccatgttggtcaggctggtctcaaactcccaacctcgggtgatccgcacacctaagcctcccaaagtgttgacattacaggcatgagccaccgcacctggcctgcttgttcttttcatttcatcctgatctccgaatacaggagagtagctgatttggtgttcactaacaagcacagaagctt

SEQ ID NO: 179363 - DNA, 570 bp, Homo sapiens
atttagaccaaaaatacagatagacacacaaaagccagaaccagaccagaatgagtagctcagtagctacagcctttattccctttattctttagggttcgaactcaaaccagattcaggattctgaccaaaccaggacccccctggggtgaaactgaaaccccacagtctagacaaggttgggggtctttttatattttttatttttttgagatggagtttcactcttgttgcccaggctggagtgcaatggtgcaatattgcctcacagcaacctccacctctcaggtttaagcacttatcctgcctcagcctccaaagctgagattacargcttgtgccaccatgcccagcacattttgcatttttagtagagacggggtttctccatgttggtcaggctggtctcaaactcccaacctcgggtgatccgcacacctaagcctcccaaagtgttgacattacaggcatgagccaccgcacctggcctgcttgttcttttcatttcatcctgatctccgaatacaggagagtagctgatttggtgttcactaacaagcacagaagctt

SEQ ID NO: 179364 - DNA, 570 bp, Homo sapiens
atttagaccaaaaatacagatagacacacaaaagccagaaccagaccagaatgagtagctcagtagctacagcctttattccctttattctttagggttcgaactcaaaccagattcaggattctgaccaaaccaggacccccctggggtgaaactgaaaccccacagtctagacaaggttgggggtctttttatattttttatttttttgagatggagtttcactcttgttgcccaggctggagtgcaatggtgcaatattgcctcacagcaacctccacctctcaggtttaagcacttatcctgcctcagcctccaaagctgagattacaagcttgtgccaccatgcccagcacattttgcatttttagtagagacggggtttctccatgttggtcaggctggtctcaaactcccaacctcgggtgatcygcacacctaagcctcccaaagtgttgacattacaggcatgagccaccgcacctggcctgcttgttcttttcatttcatcctgatctccgaatacaggagagtagctgatttggtgttcactaacaagcacagaagctt

SEQ ID NO: 179365 - DNA, 570 bp, Homo sapiens
atttagaccaaaaatacagatagacacacaaaagccagaaccagaccagaatgagtagctcagtagctacagcctttattccctttattctttagggttcgaactcaaaccagattcaggattctgaccaaaccaggacccccctggggtgaaactgaaaccccacagtctagacaaggttgggggtctttttatattttttatttttttgagatggagtttcactcttgttgcccaggctggagtgcaatggtgcaatattgcctcacagcaacctccacctctcaggtttaagcacttatcctgcctcagcctccaaagctgagattacaagcttgtgccaccatgcccagcacattttgcatttttagtagagacggggtttctccatgttggtcaggctggtctcaaactcccaacctcgggtgatccgcacacctaagcctcccaaagtgttgacattacaggcatgagccaccgcaccyggcctgcttgttcttttcatttcatcctgatctccgaatacaggagagtagctgatttggtgttcactaacaagcacagaagctt

SEQ ID NO: 179366 - DNA, 574 bp, Homo sapiens
aattgtaagaactgagcaggagttagacaagctagagtaagagtgtcccagtcagtaggaatcatcygactggaaacagcaacattctttaacagtcccatttcaaaaggagaacctggtccatactgatttatagcttgtttaattttttgagtaatttaaaaggaaaaggctcaaatgtagctataatatttccctgttgatctgggggggtgtattcaaacagggaactgccaagcctctaaatcccacttttgtctagcttgctgaattcctgcctgaatagaactaagcagtcgctcaagtcaccagggcaactacttttcacccagtgtcctccagaaaagaaagatctggagggtcgttttcttcaaaataataatgagggggtgcagaagggtagggatgaacctctccctccttttctgctttagctttaggtggcaaataaacctggtctgtaacctctactgttactttgttatactctccttcctcctcattatcagtgtgaaaaagttccaaggtagaacgaaccacagcccacacttgtcccattgttaccctgatgctt

SEQ ID NO: 179367 - DNA, 577 bp, Homo sapiens
gcagcctgaatggaagcttcatctgcccactaagttttaaattgtaagaactgagcaggagttagacaagctagagtaagagtgtcccagtcagtaggaatcatccgactggaaacagcaacattctttaacagtcccatttcaaaaggagaacctggtccatactgatttatagcttgtttaattttttgagtaatttaaaaggaaaaggctcaaatgtagctataatatttccctgttgatctgggggggtgtattcaaacagggaactgccaagcctctaaatcccacttttgtctagcttgctgwattcctgcctgaatagaactaagcagtcgctcaagtcaccagggcaactacttttcacccagtgtcctccagaaaagaaagatctggagggtcgttttcttcaaaataataatgagggggtgcagaagggtagggatgaacctctccctccttttctgctttagctttaggtggcaaataaacctggtctgtaacctctactgttactttgttatactctccttcctcctcattatcagtgtgaaaaagttccaaggtagaacgaacc

SEQ ID NO: 179368 - DNA, 322 bp, Homo sapiens
gagcagtaagtttttcagctaatttattttctcacccatttaggggagagagaggaggtggccattcacttaattcagcaggtggagccaacgggctagtaaaacayactttttaaagtttttctttcttttctttaatctcctccggtagctgctcctcacactcagaatttgaagttagttttttacactcatcctcctcttcctcatctgaatctgcctcatcatctgtttgaaatggctcaagggctgcctttattagtgcccacactgaccatatataaactggaatttctgctccatctttatatgccttttaaaa

SEQ ID NO: 179369 - DNA, 559 bp, Homo sapiens
ccttcatggctagagctgccagtaccccagaacaccaatatcagctagggaaattttgtagaagtcccagatgtactaaatgttctgtgaatacacagagatataattataactgttaccwgcatgtagagtaaagatgagaaggcattggtcatggtggcagctacctcaggagttacaaagcagacgtggttccaggacagtatatgtcagggcaaagctgtcctcggaggctattaggagctggttatggcacagacattgtaagccagatggtctcattactttcaatgacaaaaccaaaattacttttgcatcagccaatacaacggcctggcaagagcacagaaaaacgccctgtgctgatgcagcacaattccttcattcccttctccaaaaccccctcttccaattccactgaagagagaatctgatggaagtcctgtgtaagcaggctcagatatatctaccactatagatagtagaggtgattcacaaatccaagcctatcaaatacatcataaataagttacacgtttaattttttttgaaattaggg

SEQ ID NO: 179370 - DNA, 559 bp, Homo sapiens
ccttcatggctagagctgccagtaccccagaacaccaatatcagctagggaaattttgtagaagtcccagatgtactaaatgttctgtgaatacacagagatataattataactgttaccagcatgtagagtaaagatgagaaggcattggtcatggtggcagctacctcaggagttacaaagcagacgtggtyccaggacagtatatgtcagggcaaagctgtcctcggaggctattaggagctggttatggcacagacattgtaagccagatggtctcattactttcaatgacaaaaccaaaattacttttgcatcagccaatacaacggcctggcaagagcacagaaaaacgccctgtgctgatgcagcacaattccttcattcccttctccaaaaccccctcttccaattccactgaagagagaatctgatggaagtcctgtgtaagcaggctcagatatatctaccactatagatagtagaggtgattcacaaatccaagcctatcaaatacatcataaataagttacacgtttaattttttttgaaattaggg

SEQ ID NO: 179371 - DNA, 559 bp, Homo sapiens
ccttcatggctagagctgccagtaccccagaacaccaatatcagctagggaaattttgtagaagtcccagatgtactaaatgttctgtgaatacacagagatataattataactgttaccagcatgtagagtaaagatgagaaggcattggtcatggtggcagctacctcaggagttacaaagcagacgtggttccaggacagtatatgtcagggcaaagctgtcctcggaggctattaggagctggttatggcacagacattgtaagycagatggtctcattactttcaatgacaaaaccaaaattacttttgcatcagccaatacaacggcctggcaagagcacagaaaaacgccctgtgctgatgcagcacaattccttcattcccttctccaaaaccccctcttccaattccactgaagagagaatctgatggaagtcctgtgtaagcaggctcagatatatctaccactatagatagtagaggtgattcacaaatccaagcctatcaaatacatcataaataagttacacgtttaattttttttgaaattaggg

SEQ ID NO: 179372 - DNA, 634 bp, Homo sapiens
gccctgtgctgatgcagcacaattccttcattcccttctccaaaaccccctcttccaattccactgaagagagaatctgatggaagtcctgtgtaagcaggctcagatatatctaccactatagatagtagaggtgattcacaaatscaagcctatcaaatacatcataaataagttacacgtttaattttttttgaaattagggatcatgatatgaaagttatcagaaacaaaactgtcactaatgtttaaaaagagaagaaaaaacctgaacaaatagattcagagaaggccttgaagagagggttctcatgcttctaggcctgataaaaactattacaaaataccacaaaaaccacaaccttgcacaaaggccatagcaaccttacacaaaatacacttctgtgaggacatctatccagcaactgcctgcccaaacttcaactgacattgaccttgttgttgatctttatattcaaaggtaactatatcaaaacaattatagaagcctcttcacttttcccttatttatttttttctactcccccatacttccaggttgatcatttttcttttaaagaccttctcttcctttaccatttgaatctatatagtttgctttgtcatgcatatt

SEQ ID NO: 179373 - DNA, 634 bp, Homo sapiens
gccctgtgctgatgcagcacaattccttcattcccttctccaaaaccccctcttccaattccactgaagagagaatctgatggaagtcctgtgtaagcaggctcagatatatctaccactatagatagtagaggtgattcacaaatccaagcctatcaaatacatcataaataagttacacgtttaattttttttgaaattagggatcatgatatgaaagttatcagaaacaaaactgtcactaatgtttaaaaagagaagaaaaaacctgaacaaatagattcagagaaggccttgaagagagggttctcatgcttctaggcctgataaaaactattacaaaataccacaaaaaccacaaccttgcacaaaggccatagcaaccttacacaaaatacacttctgtgaggacatctatccagcaacygcctgcccaaacttcaactgacattgaccttgttgttgatctttatattcaaaggtaactatatcaaaacaattatagaagcctcttcacttttcccttatttatttttttctactcccccatacttccaggttgatcatttttcttttaaagaccttctcttcctttaccatttgaatctatatagtttgctttgtcatgcatatt

SEQ ID NO: 179374 - DNA, 508 bp, Homo sapiens
ctttgggttttaactttcaaacatcaagatagtaggtcaatgtctaaatgagtgtatcaaagttctcacactagcacatgtaaatccacctcttatctacccaaaactctaaccaagcaaaggcaagttggaagaatcagacaaatgtaagtgcctaggatacataaatgccactggattttatgtttttaactttcaacctcccaagtttcagtaagagacatgttatttggagaagttgctaaagtgtagttgtatgatgtctctgtgtacrgttagtctggacctctttctgtccggtggttgccctcaactgattagagtcacctctctaaagatcatgcttatgtccctggagcagtccacagcactatcaatgtctgatctccacctttttccaattaatatttctgtacttactgaattggaaaacatacaggtgattttttcctggtcacttgtggttttacaacacttccccccacttccccaccactgccccaggtta

SEQ ID NO: 179375 - DNA, 508 bp, Homo sapiens
ctttgggttttaactttcaaacatcaagatagtaggtcaatgtctaaatgagtgtatcaaagttctcacactagcacatgtaaatccacctcttatctacccaaaactctaaccaagcaaaggcaagttggaagaatcagacaaatgtaagtgcctaggatacataaatgccactggattttatgtttttaactttcaacctcccaagtttcagtaagagacatgttatttggagaagttgctaaagtgtagttgtatgatgtctctgtgtacggttagtctggacctctttctgtccrgtggttgccctcaactgattagagtcacctctctaaagatcatgcttatgtccctggagcagtccacagcactatcaatgtctgatctccacctttttccaattaatatttctgtacttactgaattggaaaacatacaggtgattttttcctggtcacttgtggttttacaacacttccccccacttccccaccactgccccaggtta

SEQ ID NO: 179376 - DNA, 508 bp, Homo sapiens
ctttgggttttaactttcaaacatcaagatagtaggtcaatgtctaaatgagtgtatcaaagttctcacactagcacatgtaaatccacctcttatctacccaaaactctaaccaagcaaaggcaagttggaagaatcagacaaatgtaagtgcctaggatacataaatgccactggattttatgtttttaactttcaacctcccaagtttcagtaagagacatgttatttggagaagttgctaaagtgtagttgtatgatgtctctgtgtacggttagtctggacctctttctgtccggtggttgccctcaactgattrgagtcacctctctaaagatcatgcttatgtccctggagcagtccacagcactatcaatgtctgatctccacctttttccaattaatatttctgtacttactgaattggaaaacatacaggtgattttttcctggtcacttgtggttttacaacacttccccccacttccccaccactgccccaggtta

SEQ ID NO: 179377 - DNA, 461 bp, Homo sapiens
ttggggattggcttagtaatccaggtactgytactgccttgaaagcggagactgcatccttctgtctggatttcttgagtttctggattgtaaaccttattagggcccatttttcctagaattggagcctctactttgttcttgctaccttagttcacccagaaagcacgatctctgcctgaatttcaaagggttggctagtttaaatatccttttttaagacttttgtcttcctgtggggtgattttttcatcttacataccattgctaatctttttatcttgaatgtaattgaaatagttttaatctgtgttaccagcaacaagaaccccttttatgagatggagaggccaggtcagtctcataacatgtgtcccccttcgtgtgttgaatttatgtcagagccaggttctttcctatttgatgtctctcaccaaattccagtgtttatgccctaggag

SEQ ID NO: 179378 - DNA, 461 bp, Homo sapiens
ttggggattggcttagtaatccaggtactgttactgccttgaaagcggagactgcatccttctgtctggatttcttgagtttctggattgtaaaccttattagggcccatttttcctagaattggagcctctactttgttcttgctaccttagttcacccagaaagcacgatctctgcctgaatttcaaagggttggctagtttaaatatccttttktaagacttttgtcttcctgtggggtgattttttcatcttacataccattgctaatctttttatcttgaatgtaattgaaatagttttaatctgtgttaccagcaacaagaaccccttttatgagatggagaggccaggtcagtctcataacatgtgtcccccttcgtgtgttgaatttatgtcagagccaggttctttcctatttgatgtctctcaccaaattccagtgtttatgccctaggag

SEQ ID NO: 179379 - DNA, 461 bp, Homo sapiens
ttggggattggcttagtaatccaggtactgttactgccttgaaagcggagactgcatccttctgtctggatttcttgagtttctggattgtaaaccttattagggcccatttttcctagaattggagcctctactttgttcttgctaccttagttcacccagaaagcacgatctctgcctgaatttcaaagggttggctagtttaaatatccttttttragacttttgtcttcctgtggggtgattttttcatcttacataccattgctaatctttttatcttgaatgtaattgaaatagttttaatctgtgttaccagcaacaagaaccccttttatgagatggagaggccaggtcagtctcataacatgtgtcccccttcgtgtgttgaatttatgtcagagccaggttctttcctatttgatgtctctcaccaaattccagtgtttatgccctaggag

SEQ ID NO: 179380 - DNA, 461 bp, Homo sapiens
ttggggattggcttagtaatccaggtactgttactgccttgaaagcggagactgcatccttctgtctggatttcttgagtttctggattgtaaaccttattagggcccatttttcctagaattggagcctctactttgttcttgctaccttagttcacccagaaagcacgatctctgcctgaatttcaaagggttggctagtttaaatatccttttttaagacttttgtcttcctgyggggtgattttttcatcttacataccattgctaatctttttatcttgaatgtaattgaaatagttttaatctgtgttaccagcaacaagaaccccttttatgagatggagaggccaggtcagtctcataacatgtgtcccccttcgtgtgttgaatttatgtcagagccaggttctttcctatttgatgtctctcaccaaattccagtgtttatgccctaggag

SEQ ID NO: 179381 - DNA, 372 bp, Homo sapiens
aaagtgaactaagtatggcctgagaaggactccataattctatatatgagtcattgtggatgaactgtaacctaccttaataggtatagaagaatgaaaaactaacttaagagtatgcacctggaaaaacagctacatcttggccaatcccaatggccaaacttcaaccactcaggcactgccaaatgttcaaaatgtgttcaaacaaggcaaacactgagttgtttctgtacctcacttccgatttcggtatgccatttcccttttgtctataaatcttcttccaccacatgaatgcgctggagtctctgtgaatctgctgtgattctggggactgtctgattygtgaatcgtttattgctctattaaact

SEQ ID NO: 179382 - DNA, 516 bp, Homo sapiens
tttataattatgtaaacgcgtgtgtaatgttatatataagttcaataaagtcatgcttatacatggtttcaattcatgcttctaaaaaccactcaatgtagtcattatcatatgttaataaataatctctgaaaatgtgcttctagtagttgcacaatatcccatcataaagattgtcatgctgtttttaagtcatacttttgggtatataagttatatctgatatttttctgctacatatatactattataaatctattagtagctgattttttgtcaacacatatgattgtttcctcacaatagtacaagagttggttgtaactttatttccttccaacatttattttaggttcagcgggtacatgtgcaggtttattatatgggtaaaatgtgtgtcaatgggatttggtatacacattacgtagtcatccaggtagygaacgtagtatctaatagggagttttttgatcctcactctccccccaccctcctcccacagtagaccttgtgtct

SEQ ID NO: 179383 - DNA, 516 bp, Homo sapiens
tttataattatgtaaacgcgtgtgtaatgttatatataagttcaataaagtcatgcttatacatggtttcaattcatgcttctaaaaaccactcaatgtagtcattatcatatgttaataaataatctctgaaaatgtgcttctagtagttgcacaatatcccatcataaagattgtcatgctgtttttaagtcatacttttgggtatataagttatatctgatatttttctgctacatatatactattataaatctattagtagctgattttttgtcaacacatatgattgtttcctcacaatagtacaagagttggttgtaactttatttccttccaacatttattttaggttcagcgggtacatgtgcaggtttattatatgggtaaaatgtgtgtcaatgggatttggtatacacattacgtagtcatccaggtagcgaacgtagtatctaatagggagttttttgatcctcactctccccccaccctccwcccacagtagaccttgtgtct

SEQ ID NO: 179384 - DNA, 576 bp, Homo sapiens
tttttattttgattaaatctaattttcgtgtattttcttttgttatctgtgcttttctgtcatatttcaaaatacacttaaaactcaaaggtcataaaggtttaccgtgtgttttcttctaagagttacatatttttagtccttacatttaagtcttttattaatttagaattaatttttgtatatactgcaaggtaggggtctaacttctctcttgtacactgacatccagctgttgaagagagtgttctttcctcccttgactagacttggccaccttgttgaacagtcattgaccatatatstgaggactaacttgtaggatctcaaatctgttctgttgtattggtctgaaagtctattggtcttattccagtaccacactctcttgattactgtagatttgtagtaggctgtgaaactgaaaaatgtgagttttccaatgttctttttcaagactgttttgtctgtcagatcctttgaatttttgtatgattttagaatgagtttctttgtttctgcaaaaatgcctttgggattttgacggtattgcattgaatctgtagagtacttcag

SEQ ID NO: 179385 - DNA, 534 bp, Homo sapiens
atgggttgtcttttcactcccttgatagtatcctttgatgcataaagggttttttattttgattaaatctaattttcgtgtattttcttttgttatctgtgcttttctgtcatatttcaaaatacacttaaaactcaaaggtcataaaggtttaccgtgtgttttcttctaagagttacatatttttagtccttacatttaagtcttttattaatttagaattaatttttgtatatactgcaaggtaggggtctaacttctctcttgtacactgacatccagctgttgaagagagtgttctttcctcccttgactagacttggccaccttgttgaacagtcattgaccatatatgtgaggactaacttgtaggatctcaaatctgttctgttgtattkgtctgaaagtctattggtcttattccagtaccacactctcttgattactgtagatttgtagtaggctgtgaaactgaaaaatgtgagttttccaatgttctttttcaagactgttttgtctgtcagatcctttgaa

SEQ ID NO: 179386 - DNA, 576 bp, Homo sapiens
tttttattttgattaaatctaattttcgtgtattttcttttgttatctgtgcttttctgtcatatttcaaaatacacttaaaactcaaaggtcataaaggtttaccgtgtgttttcttctaagagttacatatttttagtccttacatttaagtcttttattaatttagaattaatttttgtatatactgcaaggtaggggtctaacttctctcttgtacactgacatccagctgttgaagagagtgttctttcctcccttgactagacttggccaccttgttgaacagtcattgaccatatatgtgaggactaacttgtaggatctcaaatctgttctgttgtattggtctgaaagtctattggtcttattccagtaccacactctcttgattactgtagatttgtagtaggctgtgaaactgaaaaatgtgagttttccaatgttctttttcaagactgttttgtctgtcagatcctttgaatttttgtatgattttagaatgagtttctttgtttctgcaaaaatgcctttgggattttgayggtattgcattgaatctgtagagtacttcag

SEQ ID NO: 179387 - DNA, 508 bp, Homo sapiens
gtattaattcttctttaaatgttaggttgactcaccagttaatgcagctatttggtcataaatgtttctttgttaatcgctttcgattactaattcaatctcctaggttataggtctattcagattttctctttcttcttgagtcactttggtagtttgtgtctttctagcgattcatccatttcatccagggcacctaatttgttgctagacagttgttcacagtatactcctrtaatccttttgtatttctgtaaagttggtagtaatggctctgctttcatttattattttaataattagtcttccatcttttgctcagtcaatatagtgaaaggcttgatctttcaaagaatctacattttttcattctactgctctccaaccttctattttattgatttatgctctaattatgctctttattatttctttccttctgctagctttggatttagtcttccacctggatttattttgggagtgatattgatgtaacttcctggaa

SEQ ID NO: 179388 - DNA, 508 bp, Homo sapiens
gtattaattcttctttaaatgttaggttgactcaccagttaatgcagctatttggtcataaatgtttctttgttaatcgctttcgattactaattcaatctcctaggttataggtctattcagattttctctttcttcttgagtcactttggtagtttgtgtctttctagcgattcatccatttcatccagggcacctaatttgttgctagacagttgttcacagtatactcctgtaatccttttgtatttctgtaaagttggtagtaatggctctgctttcatttattattttaataattagtcttccatcttttgctcaktcaatatagtgaaaggcttgatctttcaaagaatctacattttttcattctactgctctccaaccttctattttattgatttatgctctaattatgctctttattatttctttccttctgctagctttggatttagtcttccacctggatttattttgggagtgatattgatgtaacttcctggaa

SEQ ID NO: 179389 - DNA, 548 bp, Homo sapiens
gtgagatccaatctctactaagaataagataaaaaattgccaggcatggtggtgcatgcctattgtcccagctactagagaggatgaggcaggaggattgcttgagcctgggaggttgagataacagtgagctatgatcccactactgcactccagtctggggaacagagtaagaccttagagtaagaccttgtctcaaaaagagaaaaaaataaaaaawtgtttcattcttttgtttttcttcagccaagtaaccttgaattggtaacaccacagacagtaagtcttatctcaacaccagtagacaaatcagcagattcaaagtaggcagggaaagaaaaagataggcaaaagaactgagactttttcattttagggtttttaaaaatagtaactatttgagttttgaattttctttcatgtaatttggccgtcaggtttaaagtgtgcactagagaccaggtgcagtggctcattcatgtaatcccaacactatgggaggctgaggcaggtggatcacttgaggccaggagtttgagaccagcctg

SEQ ID NO: 179390 - DNA, 548 bp, Homo sapiens
gtgagatccaatctctactaagaataagataaaaaattgccaggcatggtggtgcatgcctattgtcccagctactagagaggatgaggcaggaggattgcttgagcctgggaggttgagataacagtgagctatgatcccactactgcactccagtctggggaacagagtaagaccttagagtaagaccttgtctcaaaaagagaaaaaaataaaaaaatgtttcattcttttgtttttcttcagccaagtaaccttgaattggtaacaccacagacagtaagtcttatctcaacaccagtagacaaatcagcagattcaaagtaggcagggaaagaaaaagataggcaaaagaactgagactttttcattttagggtttttaaaaatagtaactatttgagttytgaattttctttcatgtaatttggccgtcaggtttaaagtgtgcactagagaccaggtgcagtggctcattcatgtaatcccaacactatgggaggctgaggcaggtggatcacttgaggccaggagtttgagaccagcctg

SEQ ID NO: 179391 - DNA, 574 bp, Homo sapiens
gagtaagaccgtgtgtcaaaaaagatcattttttataaataatttataatttcgaattttggtaacaaacacataccttaaaatttaccatcataaccagttgtaagtatacagttttgtagagttaagaatatttacattgttgtgcagcagatttctagattttttttttatcttggaaaactctatacccattcaacaactattaatttccccttccttcyacctcctggcaagtactattctactttgtgtttctaaaaatttggcttatatacctagggttatataatatttgttttttaagtaggttccatgttatgtgcagaagtgtcaggattttcttcatttctatgactgaataatacttcttcatacatatatattttctatatatatatatatatatatatatgtatatccttttgtttatccatctattcctggatggacgttttggtttcttccacctagtggctgtgtaatgctcctgtgaatataggtgtgcacatatctgtttgaggtcctgctactagttattctgtctctgtagaagttggatggctggatcata

SEQ ID NO: 179392 - DNA, 574 bp, Homo sapiens
gagtaagaccgtgtgtcaaaaaagatcattttttataaataatttataatttcgaattttggtaacaaacacataccttaaaatttaccatcataaccagttgtaagtatacagttttgtagagttaagaatatttacattgttgtgcagcagatttctagattttttttttatcttggaaaactctatacccattcaacaactattaatttccccttccttccacctcctggcaagtactattctactttgtgtttctaaaaatttggcttatatacctagggttatataatatttgttttttaagtaggttccatgttatgtgcagaagtgtcaggattttcttcatttctatgrctgaataatacttcttcatacatatatattttctatatatatatatatatatatatatgtatatccttttgtttatccatctattcctggatggacgttttggtttcttccacctagtggctgtgtaatgctcctgtgaatataggtgtgcacatatctgtttgaggtcctgctactagttattctgtctctgtagaagttggatggctggatcata

SEQ ID NO: 179393 - DNA, 574 bp, Homo sapiens
gagtaagaccgtgtgtcaaaaaagatcattttttataaataatttataatttcgaattttggtaacaaacacataccttaaaatttaccatcataaccagttgtaagtatacagttttgtagagttaagaatatttacattgttgtgcagcagatttctagattttttttttatcttggaaaactctatacccattcaacaactattaatttccccttccttccacctcctggcaagtactattctactttgtgtttctaaaaatttggcttatatacctagggttatataatatttgttttttaagtaggttccatgttatgtgcagaagtgtcaggattttcttcatttctatgactgaataatacttcttcatayatatatattttctatatatatatatatatatatatatgtatatccttttgtttatccatctattcctggatggacgttttggtttcttccacctagtggctgtgtaatgctcctgtgaatataggtgtgcacatatctgtttgaggtcctgctactagttattctgtctctgtagaagttggatggctggatcata

SEQ ID NO: 179394 - DNA, 367 bp, Homo sapiens
tttcagctatctttattgcagcctggcaatgtagaagaaaaagaagtccattttcagggggaaacttcaaaaggcttcagatatttgcattaaaaagaagtccagtgctaatagccaagacgatggggaaatgtcattgmagatatttcatagctccacttcacagtactttattttctgtatgatcataatgaaaaggggtttaattggctcatggttctgcaggctgtaaagaaagcatagtggcttctgcttctgggaggactcaggaagcctcccaatcataccagtaggaaaacagcaatgaaatgtttcatacggcaggagtaagagcaaggctgagagaggaaagaagtgccacaccgtt

SEQ ID NO: 179395 - DNA, 367 bp, Homo sapiens
tttcagctatctttattgcagcctggcaatgtagaagaaaaagaagtccattttcagggggaaacttcaaaaggcttcagatatttgcattaaaaagaagtccagtgctaatagccaagacgatggggaaatgtcattgcagatatttcatagctccacttcacagtactttattttctgtatgatcataatgaaaaggggtttaattggctcatggttctgcaggctgtaaagaaagcatagtggcttctgcttctgggaggactcaggaagmctcccaatcataccagtaggaaaacagcaatgaaatgtttcatacggcaggagtaagagcaaggctgagagaggaaagaagtgccacaccgtt

SEQ ID NO: 179396 - DNA, 367 bp, Homo sapiens
tttcagctatctttattgcagcctggcaatgtagaagaaaaagaagtccattttcagggggaaacttcaaaaggcttcagatatttgcattaaaaagaagtccagtgctaatagccaagacgatggggaaatgtcattgcagatatttcatagctccacttcacagtactttattttctgtatgatcataatgaaaaggggtttaattggctcatggttctgcaggctgtaaagaaagcatagtggcttctgcttctgggaggactcaggaagcctcccaatcataccartaggaaaacagcaatgaaatgtttcatacggcaggagtaagagcaaggctgagagaggaaagaagtgccacaccgtt

SEQ ID NO: 179397 - DNA, 367 bp, Homo sapiens
tttcagctatctttattgcagcctggcaatgtagaagaaaaagaagtccattttcagggggaaacttcaaaaggcttcagatatttgcattaaaaagaagtccagtgctaatagccaagacgatggggaaatgtcattgcagatatttcatagctccacttcacagtactttattttctgtatgatcataatgaaaaggggtttaattggctcatggttctgcaggctgtaaagaaagcatagtggcttctgcttctgggaggactcaggaagcctcccaatcataccagtaggaaaacagcaatgaaatrtttcatacggcaggagtaagagcaaggctgagagaggaaagaagtgccacaccgtt

SEQ ID NO: 179398 - DNA, 481 bp, Homo sapiens
agggtccccgtgcagccagcttctttgctaaggccaatcaaatgtaatcttggcttctattaataggaaattcctcattttcatctgagaccttttaagtctggacttcagtgtttaaacttttgtcagccttctratcacaagtatttaacaattctctatagtggtccaatattttcctcatcttgctgtcttctaagctttcccaattcttctgacctctgtcttttactcacttctgaacctggttctacattgtcagctatctttatcagagcctggcaatgtggtaaaacagaaaagtccattttcgggggaaaattcacgaaggcttcagatatttgcatgaaaagaagctgagtgctggttgccaagacaaaggggaaagggccttgaaggcatttcatggctccacttcatagcactgattttctgtatgatcataaagaaaagaggtttaattggctcactatacagcagg

SEQ ID NO: 179399 - DNA, 556 bp, Homo sapiens
caatgcatgttctccattgcacttagataacatgcctccwtgtctctggagaattcctcagtctttctaaaatacttttgatgaatactggcagttattttgtagaatgtccctcctcaatttcagttagtctgatgttttctcacggttaggactaaagttatacattttgtctaagaataccatagaattgatgttttgtcctactcagtgcatcatataagaaattacatgaagttcatttatcttattattagtaatgttaactttgatcacttggctaagttgacatctccactttgaagttactattctataattatcttgtgggaagatactttcatattatgcaaatatgttctttcccaacatatattcaccactaatcttagcattcctccaaggttctttcttgcaacaattattactatgatatttgcaaagtgatgattcttatattttatgtctcctacatttaatgaaatcttactgtaataaaatactacccactctcaatctttggtttattatttatgtcaatatggaattttttttg

SEQ ID NO: 179400 - DNA, 556 bp, Homo sapiens
caatgcatgttctccattgcacttagataacatgcctccttgtctctggagaattcctcagtctttctaaaatrcttttgatgaatactggcagttattttgtagaatgtccctcctcaatttcagttagtctgatgttttctcacggttaggactaaagttatacattttgtctaagaataccatagaattgatgttttgtcctactcagtgcatcatataagaaattacatgaagttcatttatcttattattagtaatgttaactttgatcacttggctaagttgacatctccactttgaagttactattctataattatcttgtgggaagatactttcatattatgcaaatatgttctttcccaacatatattcaccactaatcttagcattcctccaaggttctttcttgcaacaattattactatgatatttgcaaagtgatgattcttatattttatgtctcctacatttaatgaaatcttactgtaataaaatactacccactctcaatctttggtttattatttatgtcaatatggaattttttttg

SEQ ID NO: 179401 - DNA, 412 bp, Homo sapiens
actatttttgtgtgtgtgaaactttttttggccaatgggtttttctgaagtattttgtttaatgttcaaatgttggggtgttattgtacatatactactgttgtccatctctggttcatgatacaatgcatgttctccattgcacttagataacatgcctccttgtctctggagaattcctcagtctttctaaaatacttttgatgaatactggcagttattttgtagaatgtccctcctcaatttcagttagtctgatgttttctcacggttaggactaaagttatacattttgtctaagaataccatagaattgatgttttgtcctactcagtgcatcatataagaarttacatgaagttcatttatcttattattagtaatgttaactttgatcacttggctaagttga

SEQ ID NO: 179402 - DNA, 556 bp, Homo sapiens
caatgcatgttctccattgcacttagataacatgcctccttgtctctggagaattcctcagtctttctaaaatacttttgatgaatactggcagttattttgtagaatgtccctcctcaatttcagttagtctgatgttttctcacggttaggactaaagttatacattttgtctaagaataccatagaattgatgttttgtcctactcagtgcatcatataagaaattacatgaagttcatttatcttattattagtaatgttaactttgatcacttggctaagttgacatctccactttgaagttactattctataattatcttgtgggaagatactttcatattatgcaaatatgttctttcccaacatatattcaccactaatcttagcattcctccaaggttctttcttgcaacaattattactatgatatttgcaaagtgatgattcttatattttatgtctcctacatttaatgaaatyttactgtaataaaatactacccactctcaatctttggtttattatttatgtcaatatggaattttttttg

SEQ ID NO: 179403 - DNA, 556 bp, Homo sapiens
caatgcatgttctccattgcacttagataacatgcctccttgtctctggagaattcctcagtctttctaaaatacttttgatgaatactggcagttattttgtagaatgtccctcctcaatttcagttagtctgatgttttctcacggttaggactaaagttatacattttgtctaagaataccatagaattgatgttttgtcctactcagtgcatcatataagaaattacatgaagttcatttatcttattattagtaatgttaactttgatcacttggctaagttgacatctccactttgaagttactattctataattatcttgtgggaagatactttcatattatgcaaatatgttctttcccaacatatattcaccactaatcttagcattcctccaaggttctttcttgcaacaattattactatgatatttgcaaagtgatgattcttatattttatgtctcctacatttaatgaaatcttactgtaataaaatactacccaytctcaatctttggtttattatttatgtcaatatggaattttttttg

SEQ ID NO: 179404 - DNA, 509 bp, Homo sapiens
taagtgcctaaaatagcaagtggtctgaaatgatggcagcagtttattaaagactgaaaaaagaggccaggcacggtggctcacacctgtaatcccagcactttaggagtccaaggccagtggatcacaaggtcaggagttcaagaccagcctgtccaacatgctgaaaccccgtaactacagaaaatacaaagcttagctgggcatggtgacacatccctgtagtcccagctacttcagaggctgaggcaaaagaaatgcttgaaccctgaactgggaggcagaagttgctgtgaattgagattgtgccactgcactcgagcctggtgacagaggaagatgctgtctcaaaaaaaaaaaaaaaaagaaaaagaaatggcatcttcaagaaccacaagagagttccrcgctgaagaagctctgattctgcatttgctgaactactgatttgagttagccaatataacattatcttagataaagtgtacaaacaactcaatttcatctcc

SEQ ID NO: 179405 - DNA, 509 bp, Homo sapiens
taagtgcctaaaatagcaagtggtctgaaatgatggcagcagtttattaaagactgaaaaaagaggccaggcacggtggctcacacctgtaatcccagcactttaggagtccaaggccagtggatcacaaggtcaggagttcaagaccagcctgtccaacatgctgaaaccccgtaactacagaaaatacaaagcttagctgggcatggtgacacatccctgtagtcccagctacttcagaggctgaggcaaaagaaatgcttgaaccctgaactgggaggcagaagttgctgtgaattgagattgtgccactgcactcgagcctggtgacagaggaagatgctgtctcaaaaaaaaaaaaaaaaagaaaaagaaatggcatcttcaagaaccacaagagagttccgcgctgaagaagctctgattctgcatttgctgaactactgatttgagttagccaatataacaytatcttagataaagtgtacaaacaactcaatttcatctcc

SEQ ID NO: 179406 - DNA, 600 bp, Homo sapiens
ctccctctgtgacctgtgcttccatcatcaaatctccttcaattcggactctcttacctccctctttcacttataaagacctcttgtgwttgctggacacagaggccgtggctcacaaccataatcccaacagtttaggaggtcaaagcaggagaaacgcttgaggccaaaacttcaagaccagcctgggaaacacggcgagaccccctcaattaaacaacaaaaagaaataagaaaaaattagctgggcatggtagtatgcatctgtagtttcagctacttgagaggttgtggtgaaaggatcgctttagccccagagttcaagaccagcctcggcaatataacaagatcccatctctacaaaaaaaaaaaatacaaaaattagctgggcatggatggtgtgcacctgtagtcccagatgcttggaaggctgaggtgggagaattgcttgagcacaggtggttgaggctgcagttagctacaacaccatcactgcactccagattgggtgaaacagactctgtgttcaaaagaaaaagaaaagaaatacacatttggtttctgcccctcatcctggcacagagcttctcaagctcttat

SEQ ID NO: 179407 - DNA, 616 bp, Homo sapiens
ctgcatcccttctggaggttctggagagaatatgttcccttgcctttcccagttgctaaagccactgctattctttggctcatggctcctaactgcatcttcaaagccagaagcaaagcatattcgaatctccctctgtgacctgtgcttccatcatcaaatctccttcaattcggactctcttacctccctctttcacttataaagacctcttgtgtttgctggacacagaggccgtggctcacaaccataatcccaacagtttaggaggtcaaagcaggagaaacgcttgaggccaaaacttcargaccagcctgggaaacacggcgagaccccctcaattaaacaacaaaaagaaataagaaaaaattagctgggcatggtagtatgcatctgtagtttcagctacttgagaggttgtggtgaaaggatcgctttagccccagagttcaagaccagcctcggcaatataacaagatcccatctctacaaaaaaaaaaaatacaaaaattagctgggcatggatggtgtgcacctgtagtcccagatgcttggaaggctgaggtgggagaattgcttgagcacaggtggttgaggctgcagttagctacaacac

SEQ ID NO: 179408 - DNA, 365 bp, Homo sapiens
tcaccctactgacttcttcagacactaggcttttgctttagaccattcatggtttcttcctcttcaaatcagtaatcaataaatcgtcttcaagtcaataaatttccactcctttaggaaaccctgatcttctggtcacaccaaggtttaattaactggtttgattgtttttctgttttcttggattttttttccttcttcctgggggtttctagtaattctagtttgatgtctcactttctccattttttatttcttagttttcttctgtgattattttcactgcagctgcagggcctaatcctgggttrgcagagaactagcacttactctgccctaattggaatccaggagagataggaggt

SEQ ID NO: 179409 - DNA, 392 bp, Homo sapiens
ggagcatctcagactcaggtgtttgaatttgagatcctcaaccagtaagaataatscaaatattacaaaatctgaaacacatcccaagcatttcaaataagggacactcaactggtattttttttaattttacagtttgccttttaccctgttggttgtgacctttgaggtacagaagtttttaggtttgatatatttttgcttttactgcctgagcttttaatgtcatatcctaaaaattattgacaaattcatcgtcataaagcattttccaaatttgttttccctaggagtttgatagttctagttttacatttaggtttataattcactttcaattgattttaacgtggtgtaaggtaagagtccaacttcattgttttgcatgtagt

SEQ ID NO: 179410 - DNA, 392 bp, Homo sapiens
ggagcatctcagactcaggtgtttgaatttgagatcctcaaccagtaagaataatccaaatattacaaaatctgaaacacatcccaagcatttcaaataagggacactcaactggtattttttttaattttacagtttgccttttaccctgttggttgtgacctttgaggtacagaagtttttaggtttgatatatttttgcttttactgcctgagcttttaatgtcatatcctaaaaattattgacaaattcatcgtcataaagcattttccaaatttgttttccctaggagtttgatagttctagttttacatttaggtttataattcactttsaattgattttaacgtggtgtaaggtaagagtccaacttcattgttttgcatgtagt

SEQ ID NO: 179411 - DNA, 499 bp, Homo sapiens
tcaagcaattctcctgcctcagcctcccaagtagctgggactacaggtgtctgccactatgcccagctaatttttgtatttttaacagagatagagttttactatttatattagagatggggttgacccagctggtcacgaactcctgacctcagatkgtccacccgccttggcctcccaaagtgctgggattacaactgtgagccactgcacctggcctctttttaaaattttatttgcagattgttcattgttagtttatagaaatgcaactgacttgtgtgtgttactgtatcctgaaactttgttgaatttcattattctaccagtattttgtggaatttcaggatttttacacattacatcatgttgtctgtgaacaaaattttgtactttttcctttccaatttgcatgctttttattactttctcttgcctaattattctgagtagaaattccagtactgtggtgaatagaagtggcaggaagagatgttgc

SEQ ID NO: 179412 - DNA, 499 bp, Homo sapiens
tcaagcaattctcctgcctcagcctcccaagtagctgggactacaggtgtctgccactatgcccagctaatttttgtatttttaacagagatagagttttactatttatattagagatggggttgacccagctggtcacgaactcctgacctcagattgtccacccgccttggcctcccaaagtgctgggattacaactgtgagccactgcacctggcctctttttaaaattttatttgcagattgttcattgttagtttatagaaatgcaactgacttgtgtgtgttactgtatcytgaaactttgttgaatttcattattctaccagtattttgtggaatttcaggatttttacacattacatcatgttgtctgtgaacaaaattttgtactttttcctttccaatttgcatgctttttattactttctcttgcctaattattctgagtagaaattccagtactgtggtgaatagaagtggcaggaagagatgttgc

SEQ ID NO: 179413 - DNA, 379 bp, Homo sapiens
tgagggacaaacattcagaccccaagagcagtgttctgaaatcctatgttaagggaaacattgagaccccagcatgaatgttctggaatcctatgtgagggacaaacattcagaccacagcaggagtgttctggaatcctataagaggtataarcattcagaccctcatagcagtgttctggaatcctatgtgagggagaagcattcagagcacagcaggagtgctctgaaatcctatgttagggacaaacattcagaacctcgtaacattgtgctgggaacctatgtgagggacagacatttagaccctcgcagcagtgttctggaatcccatgtgagggtcaaacattcagatcctcgcagtagtgttctggaattc

SEQ ID NO: 179414 - DNA, 379 bp, Homo sapiens
tgagggacaaacattcagaccccaagagcagtgttctgaaatcctatgttaagggaaacattgagaccccagcatgaatgttctggaatcctatgtgagggacaaacattcagaccacagcaggagtgttctggaatcctataagaggtataaacattcagaccctcatagcagtgttctggaatcctatgtgagggagaagcattcagagcacagcaggagtgctctgaaatcctatgttagggacaaacattcagaacctcgtaacattgtgctgggaacctatgtragggacagacatttagaccctcgcagcagtgttctggaatcccatgtgagggtcaaacattcagatcctcgcagtagtgttctggaattc

SEQ ID NO: 179415 - DNA, 510 bp, Homo sapiens
ggctacattctcttttgcctacaagtctctgaaataaaaagcaagttcactgcgtctaaggtacaatgatggtacaggcattgtgtaagctttccatatccaaaagagagacattttccagaaagcttcttatttttatctgaggccccctcagcctggccttcactgtccatgtttttgtcagcattcttgtcacagccatttaaccagtctctaagatgatccaaaaatgttctcatctgtctgtcttctttggagccctccaaactcttccaacctctacccattacccagttccgaagttgcttccacattttcaggtatctttatagcartgctccagtcctcatttgccatttttggtaagatatatattgaaaaaaaggggtaattggctcatgggtctgcacagaggacacgaaactcagtgctcctgcttctgggggggctcacaaatctctcaatcattgtgcacggtgatgaaagagtgaattgtctcacatggcaaga

SEQ ID NO: 179416 - DNA, 510 bp, Homo sapiens
ggctacattctcttttgcctacaagtctctgaaataaaaagcaagttcactgcgtctaaggtacaatgatggtacaggcattgtgtaagctttccatatccaaaagagagacattttccagaaagcttcttatttttatctgaggccccctcagcctggccttcactgtccatgtttttgtcagcattcttgtcacagccatttaaccagtctctaagatgatccaaaaatgttctcatctgtctgtcttctttggagccctccaaactcttccaacctctacccattacccagttccgaagttgcttccacattttcaggtatctttatagcaatgctccagtcctcatttgmcatttttggtaagatatatattgaaaaaaaggggtaattggctcatgggtctgcacagaggacacgaaactcagtgctcctgcttctgggggggctcacaaatctctcaatcattgtgcacggtgatgaaagagtgaattgtctcacatggcaaga

SEQ ID NO: 179417 - DNA, 465 bp, Homo sapiens
tttatgttctaagtattatataacaatattgcctacattcttgtttttgatttatttaaatactcttaaagtgtgtgacttatgagagagaragatttcacactgttttgtaggaacaatcttttagctcacttccttgcttgatgttgctaaagccatttggtgaccatgaagggagttgcttgaatggcaaagacagtttgaacgtggtaacaaaaggagtctttagtgaagtaatttatttactgaaataaccaatggtataattgaactgcctaaagattttttatgtgagaaaataaaaatatctttattgttgaatctggcttttcattccttacaggcaagaatactctcaccccaaaccacatcatttctaacaccatacctcagaattctatttggcaatttgactgagagagaagaggtttaaagttcagagagacatggccatgacaacattca

SEQ ID NO: 179418 - DNA, 360 bp, Homo sapiens
gtgattggttaaggaagtgaagcatcatctaaaatcttagggtcagcagggataaatgttaagatctggcctgtgggtgtggctgtctccaagaccctcaggaagaaatttagaacaaagaatggaagtcagaattagttcttttctggggtctgccagcagatgrcatttttcagttggtgagagtctgggtttctgaaaagcaatcacggacatatgttgagatgttatttttagtttctataggaaaccaacaatcttgtggctctaatttccttggctattgctttaatctattattacctttttgcttatcaggtcgttcatttggttctcaagactatcaggtgtctggaattt

SEQ ID NO: 179419 - DNA, 281 bp, Homo sapiens
gaattcaaaattttattttcatgcttggagtgtgggctggcaggcccctaaaaggggtgtctattctatctcagtcccctctgtcttttgtcatttctcaatactgaagaatacaggratgcatatcgctttggttacttactgtagaatttggaagattggggactgggatataaaaagagaaagctcctagcatggagcttgaaatatgagtcctgggcatgacatcatggtgttgaactatcattatattggttgctttagttactactttattacaa

SEQ ID NO: 179420 - DNA, 497 bp, Homo sapiens
ggctggcaggcccctaaaaggggtgtctattctatctcagtcccctctgtcttttgtcatttctcaatactgaagaatacaggaatgcatatcgctttggttacttactgtagaatttggaagattggggactgggatataaraagagaaagctcctagcatggagcttgaaatatgagtcctgggcatgacatcatggtgttgaactatcattatattggttgctttagttactactttattacaacattttaatacacatttagctacagtataaagtataagcaaaatcccaaaaaatattattaacagaaatagaaatcttaaaatttagatggaaccatggaagactcagaataagcaaagctatccaaagcaaaaagaacaaacccagaataattacattacctgactcagattaaactatatagcgatggtaatcaaaacaagatgttactggcataaatacaaaaacatagattaataaaacagaattc

SEQ ID NO: 179421 - DNA, 514 bp, Homo sapiens
gaaataccatttgacccagcaatcccattactgggtgtatgtccaaaggaatagaaatcattctattataaagatgcatgcatatgtatatttattgcagcactattcacaatagcaaagacatggagtcaactcaaatgtccatcaacgatagactggataaagaaaatgttgtgcatatacagcatggaatataatgcagccrtaaaaaggatgaagatcatgttctttacagggaaatagataggccttgaagctgttatcctcagcaaactaacacaggaacagaaaaccaaacactgcatgttctcacttataagtggaagctggatgatgagaacacatggacacatggcgggggaacaagacacactggggcctgcttgggggatttgaggggatggagagcatcagaaagaatagctaatggatattgagcttaataactaggtgatgaaatgatgcagtaaaccaccatggcacacgtttacatatgtaacaaacctgcacatcc

SEQ ID NO: 179422 - DNA, 571 bp, Homo sapiens
tttcagcgtttttatgctttttttttttctcatctttgtrcatttatctacctttgatctttgaggctgatgacctttggatgggggttttatctgggttctttatgttgatgttggtgttgttgctttctgtttgttaatttttcttctaacaatcagggccctcttctgcaggtctgctgcagtttgctagaggtccactttagaccctgtttgcctgggtatcaccagtggaggctgcagaacagcaaagtttgctggctgctccttcctctggcagcttcatcccagaggggcctggcctgatgacagccagagctctcctgtatgaggtgtctgttgacccctgttgagaggtttcttccagtcaggaggcatgggtgtcagagacgcacttgaggaggcaagctgtctcttagcagagcttgtgcactgtgctggggaatccctgttgtcaggatcagctgctgtcttcagagctggcaggcagtagcagttaaatctgctgaaactgcacccacagctgcccctttccccaggtgctctgtcccagggagatgagggttttgtc

SEQ ID NO: 179423 - DNA, 518 bp, Homo sapiens
ccctgacttgaaaaaaatggtaactgtggaattccaaaaagtaaattttctttattttataaatagcatttatgtgaactcaagtacaaatatatttaaagttaaaacacaaaattcatttctaataaaagcaagagcaagagaaacatgtttccttttcactctattagccaacagtattctgaaagctgtaagtaatacaatacaaaaagggaaaataaagagagataaattcaatcaatgaacatcaacatttctacatactagcaataaccaagtaggaaatgtaataaggagaaaagttgccattatcaayaacagctataaaatatctagaaataatcctgagaatctctaacaacataaaggtacaaaaaatacataaagaacactatgaaacttaagtgaaggacataaaataaagacaaatgtagaaacttatcatatcccttgatgagaaaatgtaattctgccagaatcttaatttttcctatataattctacgtatttaacacaac

SEQ ID NO: 179424 - DNA, 411 bp, Homo sapiens
gacattataaagcaaccacataaacaagtgtgcataataaccagcaaacatcatgatgacaggaaaaaatccacacamatcaatactaaccttgaatgtaaatggtctaaatacatcaattaaaaggcacagagtggcaagctggataaagaaccaagtcccattggtatgttgtctttaagagacctatctcacatgcaatagcacccacaggctcaaaatgaaggaatggagaaaaatctaccaaacaaatggaaaacagcaaagcaggggttgccattctaaaacagacattaaacccacaaagatcaaaaaaggcaaagaagggcattacataatggaaaacagttcaattaaaaacgacctaactatcctagatacatatgcaccaaatacaggatcacccagatt

SEQ ID NO: 179425 - DNA, 489 bp, Homo sapiens
actgcacctttttcaactactctagtcttgtggagaaaacaccccttctaaattttttcttcattgaatactctccctcagctccagggtaccatatagagttttcttgtattttagagttactgttttatcaaagtgtaccagtcttttgtattacatttctcctgtctaaatcaactgtgtggtttctactcattatggatatagattgayacaaactcaataaatatttttgaatgaataactccacagtccaagttattttaatcactatacaaaatctccagagtttcttccatatttctgaacatggtaactatgtatcaagagacaaaccacaaatttaaagaaggtgtggtcaaattttataagtgtttataacatttgtaaatgtttggcatctagaatacatgtataattccaacaaataaataagaaaaaaataaataatccagtgggatattgggcaaaatattgaaaccaaagtgt

SEQ ID NO: 179426 - DNA, 572 bp, Homo sapiens
ggacagcagtgtacgtgtgaaacatcttacagaagaatatggtggtagaataactgtcatatatacccatggagaaacacaaggatagactgctgaagatctgtgctgaaagtgatgagcagaagatattgaaaaatacgaaacactgcataaagctaaaaataaatatgtaagttgtgtaaccaaagtggatatgttagcatccctgaagaaacacatatatacacctgaagaaacttaagggtaaactgctgaagatctgtgctgaaagtgatcagcagaagataatgaaaaatacaaaaacgctgaataaagctaaaaataaatatgctttatttataaagcatgccacttaatggtgtgtggatcatgacattagcaaagatctattacaatgaactagaaaattgaagagaactctgaatattaaacagattggttgcaaaaatttaagaaaagtcatggcattacatttttaaagatttatggggataaagcatctgctgaccatcaggctgtagataaatttaytaatgagtataccaagattatcgctgatgaagacctgatgc

SEQ ID NO: 179427 - DNA, 538 bp, Homo sapiens
ttacctttatttgcattcattcacttattcattaaaaatactttttatgagaagctacaatatgctacagactgttgtaaattctaaagatatagcagtaagcaaaacacaaaaaagctgtgtgttggaaattatatttctagtaggagatacaaaatacatagcattagtttcctattgatactataaaaactaacaccaattattttagaacaaaacttttattaatttacagttttggagcttataattccaactgaggtctcattgagttcaaataaaaacactggctgtaaggcattgtttttcagaatcccagggcaaaatcaattatcttgccatttccagcttctaacaggaaagctgttcacattcactggattatgtccccctttcatcttcaaacccagcaacattcaatttaatcttttacacgttgcatcactctgacatcttaacacttgygccttccctttttgcttgtaaaagacccttgtgattgtattcggcccacccacaaaattcagggtacactctt

SEQ ID NO: 179428 - DNA, 498 bp, Homo sapiens
tttgagataattattatcttttgctacaagggcgatcccagctcaaggctgggcaggaagttgctgggcagatgtccttgtagaagcatttttaaaatttttggatgtagaagtttattttttgcagtctttccttatagtttttgttatcaggcatgtatgcataagwattctctcttcatagctttccctagctgtatttatcagggtgtggatttttttcagcacgagttactccattttgattctaaaatttttcacaggggatataatgaaaagaaaagttttgatgttaaagatcaagaattcgtttgggaacacggttacattgaaataactaatggactttcaagtagaaatatgtagtaaatagttgaatatatcggtctatgatacaaagaaaagattatagcgacacatacaaattgaggattatttgcatacagacaatatttaaaaccatgaaagtgaattacttatatatcacatatgaaatat

SEQ ID NO: 179429 - DNA, 479 bp, Homo sapiens
tccatacgtgccatatgcctcaacgaacacatctttgttacacagctacagttgactgaaaaatgccttagaggaaggggatagggaattagaattttgttactcactckatactatataccacaacacacaagatttcaagtcaatacagtttcagaagtggtagtatcattaggaggaatagggaggaatattatttgtttttatgaaaatggcaacactttggcttttaattttttttattgaatcagtttgatataaaggaaaaacatcttaaagaaaatttcccatgaaatactgaacatatgaaaatgtagagctctgggaggataaaatatatacaatagtaaagctgagaatcacaagaattaagttatgatgaaacaatattacaagataaaaaatatatagaaatatagaaaaatatagaagaaaattttccaacacttagggaatattttacacatggggtttacaca

SEQ ID NO: 179430 - DNA, 596 bp, Homo sapiens
tgtaaccatgtttagtgatgatgatgaataaggtggtgggtttgaaggattcyacatatcaagtgagggaaaaaaaacgatgtctgatctccttacatatgcaaaaaataccttcagagtccctcagtaagccggaagaagtggaatttaggaagtttttaacagtgataatgagaatgcagattttcattcattgactgatgatcaaatagccaaaatggttccgaatcaacgtgatcatgaaaatagtgatcttgaagatgatttatacgttgcagaaaaagagcccacgacaacatggtgaaaataagtgatgagcttattgaaggcctaaagcagtgtgcactcataacagaaacagaaatcttctcagttcataaaatcagaaagtgacttctaagacaaagaatgttgttaatgagacagatgattctggaggaagcatttaaaaaagccatccagctgaatgtctcctcatccctacaggatccacttcctggttggcgactgtttctagtgtttttttctcacctataaaagataaaatactgtctacagtaaccttttaatcaaaacacagcttcttaggtggagac

SEQ ID NO: 179431 - DNA, 452 bp, Homo sapiens
taaattttgtgaaggatgtaaggtctgtgtctagatttcattattttgcatgtggatacacagaagctccagcaccatttgttggaaatactgtctttcctgcattgtatgacctttactcctttgtctaagttaagttgatttaagatcaattgtatttatttgggtttattcctgggctttctattctagtctttctctttcttttctattttgttgatctatttgtttattctttcactaacatttatcatattttagcctctataacattttctaactgattgtacttttttggttataatcyatctctcctatccagaatataaaacacacaaagatggagaccttcatatattttgttttttcttttatctttttcctatttttgttttctatttactctagtgtaccccaaatgatgacttcagttcctgtatataatagtttct

SEQ ID NO: 179432 - DNA, 378 bp, Homo sapiens
aaggctacagagatagtttcggcttaattgaagtggagctaacattgttarttttactaacaatggaagtgatatgcatgatattagaattatataattgttctgcaggttttgattgcatgctctatgtcaccaatttttaatattacaaaagtataagagtgggaaaagtacaaatgggcattattttttgtgtgtgcttaatgtgttgccaaaatgtaagggctggtgattggtaattctatcaaaaagaacacacacactgcatacatacatatcctggaaagagaagatttaaaagaaaagtgaaattaagatcaatagagtctgtgctaaataacagttgacataacagacattgtatactatttcaaataa

SEQ ID NO: 179433 - DNA, 590 bp, Homo sapiens
gattggtccatgggcaggaggaagtggttctgagttggtccatgggtgagtgtggaaaaagcrccaactgactggctgaaaggcatcaaggaagttcccactctgggttgcagaccctacccggaactggaagcccagcccccaggctttaggttatccttgacttgatggttgggccccaccagggacctgccctgcctaggaacctgtctgcctcccgccaccaccgatagcatcttttattaatgtaagttcacaaatactacatcttagattgtaaccatttagtgctagcattgaataattatatactataagaggaaatattttaagacagaattagtgactatagttataaagttataagttgagctattatctatttatttttggatagtggggtgtctttatagttgctaaaattttaattccggtttaatacaatacacttaaaaattgtttagttaaaatgtatattccatcaacttaattcagtttttatgtctcctcatgcaaggagcaagaggttggtagacagtttaattcaaatgagagttcagaaattagaaacttggcaaaattgccaaata

SEQ ID NO: 179434 - DNA, 409 bp, Homo sapiens
taaataacagttgacataacagacattgtatactatttcaaataataatttccataatagctataagataggttaccattattattcaaattttagagataaggaaactgaattatggttttatttagcactggagaaagcacagacagtaagtagtagatatttatgtaaaacaatattcatatgttatctagagcccrcagtttgaacataatatcataaaggattaagttggaaaaattaagaactattagaaggtgatgacagtcataggtttacatcatattcttataatttattaatttttcttccatatttatgtgtattttctgaacccgtttccttatcttaaaaatggaagtgttaatactagtcttgtaagagttattctatctttcccacaatttta

SEQ ID NO: 179435 - DNA, 361 bp, Homo sapiens
ttaatctcagttcataactgactgaaattcaagggtaattttacagttttaaaatatccgcaggtgaaagaaatattgtattccttttttttttcctgagcaaaataaatctgtccygctccccttactctctccagagttaatctttaattgtttatgaagattgccagttgaaagcatttgagcatcctgagtgtcctgaagtttatacacttcagggaaatgggaagaacttcctgttgttgccatggctgacatgcacctttcctgggccaacttggcacctttcttgtgcccacatggccccttcaaagttcaatagtaaactcccctagaatgatctttcctcccaaaggcaaca

SEQ ID NO: 179436 - DNA, 486 bp, Homo sapiens
attaagaactattagaaggtgatgacagtcataggtttacatcatattcttataatttattaatttttcttccatatttatgtgtattttctgaacccgtttccttatcttaaaaatggaagtgttaatactagtcttgtaagagttattctatctttcccacaattttatcatggacaggaaaaaaaaactgatagctacatataaacgcatgaaaaatgaaatgatattcattgttcaaatattttatcacatatgtgtacacctcttgttaaactttattttttcacagaaaatgatacaagttattattaaatttgttgcttaatcaatgtcttataagcttaacgtataagtttgtagttggccattttattctctattttattgagaattattcactaaccatgcagtagtattgttagtacctttctttttgatcatatgaatgatyttttaaaaagtgaagatagagttttgtggatt

SEQ ID NO: 179437 - DNA, 486 bp, Homo sapiens
caaaatattatgtatgcagttgacatcttacacgaagaatttggagtatggacattacatgattgtctctcagccaccctatggaaaacagaattgtctggctctacctacctggaatttcaacccatraatttaactcaattatttgtagcagaggttcttaaataaagcagcattatttagaattatctttgaatctttaaagatatactgatgtccagaacccatcctccatgattttgaggtgaggccaaagcatgtattcttaaaattctctccaaataattgaaatatgcagccaggtttgggaaccacttacttggaagaaagtttgtatgctccagtgacaagagtagcacaccttggtcttctgaattaacctcactggctaatagcaatgagtcataattaataagaacttttaaaatagaactttgttttggatgagttaatcaagtaaggttatagagtagagctttctatcac

SEQ ID NO: 179438 - DNA, 617 bp, Homo sapiens
ccatggaaaactcctgcaattcctgccatgggagtgccccttgactcttctggtccctgagacttaacataggaaggtgcatgggaaccatgcaatgacattgcttcagagaggaagctcacactgggtcccacatatctccatagtcataagcagctacagcaaggcaccattttgagaaataagcccccaccatacttcattttgccctggggactaaaaatttctgcatcttcacatcctgggagccccattgacattagttacctgcagccaccattgtggttggctgctgctgccagggctgaatcgtgagccacttgcagtgacccctgcagcaacagagccattgtgcataaacaagggacctgkgaacaggttacctcacctgtagtcaccaactggggtcttagtacgtgctccctagtcacctacctatggttgctgccattggaaggaacgttgctcaccttcctcaatagcagagccatagcacagccactgtcaccccaacctgagtattccactgagggaatggggataaccctgcacctgtctaccacagccagtacctacacccgccaacgtgggacctgaggacaggtgcacctggccca

SEQ ID NO: 179439 - DNA, 608 bp, Homo sapiens
cactcagttcaaaatctgcatacttaatataagattcccagaactttttctcgtgtcctttcaaatcactaaaatctccctcctttccaggttaatcaatatttaaaattctaaaattgcagtttagatttgcctttatttaaaaataataataatgaatttattcaccaactttatttcatatcttacttattttgcccagtactgtatttgtgaaatacatcaatgtttttgtactttctacatttttatttgtgcatgctgctctattttatgaatgaacacataacaaattatttcttcattctactgaaacyggacttttttttctggacatttaaatataactatgaactttcacaaataagttttttcattcacaaatgtatatattaatataaattatatagagagtatatctcaaccaaaagtatactttataacttcagtcatagaacatgcagatttttaattttgcaaaataactatatttttcaaagggtgtgccaagttacatttccaacagcagtatttgacagttatgtttgtttcactcttttgctcaacatttagattgtcaatatttttaactttggttgttctgctgg

SEQ ID NO: 179440 - DNA, 617 bp, Homo sapiens
taattctatgaatcaatcattatttatagcagagtatatgagaatttgtttctcacagtttaactcttattaagaaacaagagtttctaaatttcctaatgttccaggtttaactttaataattatgtttatagttaaaaattaaacaackaattttaagctttatggatacacgtataaagattatctaaaataatattcaaaaaatttacagaattattgcttttagcactcaactttcaattaaacataattatagtctcagatctgcaagaaattttgacctcataaaaatacacattatactcagtgtaaaaacggtaaaaaaggataccaatagtttctttttacatcccctctcaaacatacacactgcctggtatcttatttacaatcattacttcttattccacaactgaaagttaattttgtaaagaatggcaaaatggctttaccaatgaagattaatgtaacattaatataagcagaaaactaaccacctgagaggattttgatagtatactacaaaaattatttgtgtaattgaaaaatatccttttgaatgttgatttcttatacatggaacatatcagttgttattttatataaaaagtgaa

SEQ ID NO: 179441 - DNA, 617 bp, Homo sapiens
taattctatgaatcaatcattatttatagcagagtatatgagaatttgtttctcacagtttaactcttattaagaaacaagagtttctaaatttcctaatgttccaggtttaactttaataattatgtttatagttaaaaattaaacaacgaattttaagctttatggatacaygtataaagattatctaaaataatattcaaaaaatttacagaattattgcttttagcactcaactttcaattaaacataattatagtctcagatctgcaagaaattttgacctcataaaaatacacattatactcagtgtaaaaacggtaaaaaaggataccaatagtttctttttacatcccctctcaaacatacacactgcctggtatcttatttacaatcattacttcttattccacaactgaaagttaattttgtaaagaatggcaaaatggctttaccaatgaagattaatgtaacattaatataagcagaaaactaaccacctgagaggattttgatagtatactacaaaaattatttgtgtaattgaaaaatatccttttgaatgttgatttcttatacatggaacatatcagttgttattttatataaaaagtgaa

SEQ ID NO: 179442 - DNA, 617 bp, Homo sapiens
taattctatgaatcaatcattatttatagcagagtatatgagaatttgtttctcacagtttaactcttattaagaaacaagagtttctaaatttcctaatgttccaggtttaactttaataattatgtttatagttaaaaattaaacaacgaattttaagctttatggatacacgtataaagattatctaaaataatattcaaaaaatttacagaattattgcttttagcactcaactttyaattaaacataattatagtctcagatctgcaagaaattttgacctcataaaaatacacattatactcagtgtaaaaacggtaaaaaaggataccaatagtttctttttacatcccctctcaaacatacacactgcctggtatcttatttacaatcattacttcttattccacaactgaaagttaattttgtaaagaatggcaaaatggctttaccaatgaagattaatgtaacattaatataagcagaaaactaaccacctgagaggattttgatagtatactacaaaaattatttgtgtaattgaaaaatatccttttgaatgttgatttcttatacatggaacatatcagttgttattttatataaaaagtgaa

SEQ ID NO: 179443 - DNA, 556 bp, Homo sapiens
gttttattgatgtctagattcaatcaaagcttatggttagatcaaaataaatgatttaatttgacacacagataggtataggctgaaacacacaatctgtgccatgttaagraagatccctaatcccatgctggtattcttgagcaccaactaccaaaattttcaaataatgccagttaaatatgaagcagaaccttgacagaagtaacatatgtggcactaagaagtaaagctcaaagcacatggaagtcagctggcaacagctcaaagtacatactgtccagcagagagcagagccaatcagtgaaccaggatgtaaagagccacaggtggtggttattacctaggctatcctgttcacataccaattgttttctggttcactatgggatccatccctccaacccaaaactgatatggatgtggagattgattataccacaaatacaccaaggtataaaaagatttattactcacataatgggattttttgattgagtgtttaaggtggaggagcagagagagggtttctgcatgggagcttgagtttgtgttg

SEQ ID NO: 179444 - DNA, 202 bp, Homo sapiens
aactgtaagaaaattaatttctgacatttaagccaggctgtggtattttrttatggcagcccaagtaggctaatacattccataacacaatagtggcttaaacaacaattaattacttctcatgattctgtgcattggcaaacttggtggttcttctctttgtttacctagagtcaattatacggcagcagtagtctggtat

SEQ ID NO: 179445 - DNA, 478 bp, Homo sapiens
gccaggctgtggtattttattatggcagcccaagtaggctaatacattccataacacaatagtggcttaaacaacaattaattacttctcatgattctgtgcattggcaaacttggtggttcttctctttgtttacctagagtcaattatacggcagcagtagtctggtatctaggctggagctagagattstcttagagaccctcagcctagtagtgcctcaccatacacctgcctccagtgcttcatcacgctagtactggacagtgatcatgaggtctggcacctcatcaaatgccgaccgcacattttctctcatttcagatgtccacatttttcttgggtggagggtgttcctatggcacagtcattcatatttcattcacgtgagtggtggatacattttttaaaaagcagaaaaccaggaatcacacaagcacagggccctctcaggcactcactagcacctaaacattgt

SEQ ID NO: 179446 - DNA, 478 bp, Homo sapiens
gccaggctgtggtattttattatggcagcccaagtaggctaatacattccataacacaatagtggcttaaacaacaattaattacttctcatgattctgtgcattggcaaacttggtggttcttctctttgtttacctagagtcaattatacggcagcagtagtctggtatctaggctggagctagagattctcttagagaccctcagcctagtagtgcctcaccatacacctgcctccagtgcttcatcacgctagtactggacagtgatcatgaggtctggcacctcatcaaatgccgaccgcacattttctctcatttcagatgtccacatttttcttgggtggagggtgttcctatggcacagtcattcatatttcattcacgtgagtggtggatamattttttaaaaagcagaaaaccaggaatcacacaagcacagggccctctcaggcactcactagcacctaaacattgt

SEQ ID NO: 179447 - DNA, 422 bp, Homo sapiens
tcttcactacttctaaactcttgccctgtgctaggctggtttttctactttatttcccaccagttgtttatagtgtaaatcttaagattgccttaaagcttactgttttaaaactctaatggcactttcaatgttaaaaaaaatgcttgcttgaaaaatgtaaaatatttactctcaacactgctcttctgatayaagtttctggatcatgttttgggccactatagctatcattctttctttatgtaatcttgccatcaaattttcagtgcttctaactaaaaaagagggttgttaaatctgtcggattaggtcatgccatgtagctgtagaaaacattctaaaaatcatagaaacttattaaaacagaccttatttcattttcccattttattttaattatgggtcagtggttgctctgc

SEQ ID NO: 179448 - DNA, 422 bp, Homo sapiens
tcttcactacttctaaactcttgccctgtgctaggctggtttttctactttatttcccaccagttgtttatagtgtaaatcttaagattgccttaaagcttactgttttaaaactctaatggcactttcaatgttaaaaaaaatgcttgcttgaaaaatgtaaaatatttactctcaacactgctcttctgatacaagtttctggatcatgttttgggccactatagcwatcattctttctttatgtaatcttgccatcaaattttcagtgcttctaactaaaaaagagggttgttaaatctgtcggattaggtcatgccatgtagctgtagaaaacattctaaaaatcatagaaacttattaaaacagaccttatttcattttcccattttattttaattatgggtcagtggttgctctgc

SEQ ID NO: 179449 - DNA, 388 bp, Homo sapiens
cagttgtttatagtgtaaatcttaagattgccttaaagcttactgttttaaaactctaatggcactttcaatgttaaaaaaaatgcttgcttgaaaaatgtaaaatatttactctcaacactgctcttctgatacaagtttctggatcatgttttgggccactatagctatcattctttctttatgtaatcttgccatcaaattttcagtgcttctaactaaaaaagagggttgttaaatctgtcggattaggtcatgycatgtagctgtagaaaacattctaaaaatcatagaaacttattaaaacagaccttatttcattttcccattttattttaattatgggtcagtggttgctctgctcaatgtcatctcatttgcaggactc

SEQ ID NO: 179450 - DNA, 388 bp, Homo sapiens
cagttgtttatagtgtaaatcttaagattgccttaaagcttactgttttaaaactctaatggcactttcaatgttaaaaaaaatgcttgcttgaaaaatgtaaaatatttactctcaacactgctcttctgatacaagtttctggatcatgttttgggccactatagctatcattctttctttatgtaatcttgccatcaaattttcagtgcttctaactaaaaaagagggttgttaaatctgtcggattaggtcatgccatgyagctgtagaaaacattctaaaaatcatagaaacttattaaaacagaccttatttcattttcccattttattttaattatgggtcagtggttgctctgctcaatgtcatctcatttgcaggactc

SEQ ID NO: 179451 - DNA, 593 bp, Homo sapiens
gaattcttaggggctgtgggattttgtagactgtgcatcccaaactttgcagtattagccaagactttgtatgagatcgcaaagtgggcggggaccgggaacctatggaatcgggatcccaacaacagcaagtctttcttgagttaaaggaaaaacttctggcagccccagccctggggctacctgatctgacaaagccttttccattgaatgcatcagatagagaaaacatggcagccggacttttaactcaaactgtggggccctggatgaggccagtggcctacgtctctaaacacctagacagggtwtctaaaggatggcccccctgtttgagggccatggcagcaactgccctgatagtagaagaagcaaataagctgactcttgggcaaaacctgaacataaaggccacccattttggggtgggtgagagccagcccctcttccccccctgccttaggacccccattgcagatactaagatctttaggacacacctggaggactgtgggtattaggtgtccaagaagaaagctcaaatctgcctagggcaggtaacttacttgggatttccgatccgacaggggtcc

SEQ ID NO: 179452 - DNA, 592 bp, Homo sapiens
  misc_feature (1)...(592): n = A,T,C or G
cagatgtgactgagattgatagagtttttttttttttttttttgagagagaatctcactctgtcactgagattggagtgcagtggcacgatctcagctcattgcaacctctacctcctggattcaagcgattttcctgcctcagcctcccgagtaactgggattacaggtgtgtgccaccatgcccaggtaattnttatatttttagtagagacagggtttcacaatgttggccaaactggtctcgaactcctgacctcaagtgatctgcctgcctcagcctcccaaagtgctgggattataggtgtgagccaccgtcactggccaactggttgattttaagagaggsagtgtagcctggattatccaggtcaggccattcagggctcaaatgagccctgaaaagcagacagatgaagagctccaggtgccattgctggcttgaagatggaggggccacatgtcaaggaaatggagatctcagtcctacaacctcaagaactgccaataaccagagtgagcctggatgctgattcttccccagagcctccccataaaggaatgcagtctgctgctaccttgaatttaaccca

SEQ ID NO: 179453 - DNA, 617 bp, Homo sapiens
cttgtattttaccaagtagagcctaaaatggcatctccacctcagcaagtcatgggacatagctcagtttcccactgacaacatctttttcaatktgatgacagtgtttgtgtgattccatacagtctttttagaaatttgtgtattggtgacagtggacaactgatgtggtttgactgtgtccccacccaaatctcatcttgaatcgaagctcccacgattcccacgtgtcatgggagggacctgatgggaggtaattgactcatgggcacatgtctttcccatgctgttcttgtgatagtgaataagtctcatgagatctgatggttttataaaggggagttcccctgcacacactcttgcctgctgccacgttaagacgtgactttgctcctccttcgccttctgccatgattgtgaggcctccccagccttgtggaactgtgagtccattaaacctcttttcctttataaattacctagtttccttcataaattaccatgtctttattagcagcataaaaatgaacaaatacaactatgatctttgaataaggatatatttttatttctttgtaatttcctggcacaggaggtaggtactcggcaacaggtac

SEQ ID NO: 179454 - DNA, 479 bp, Homo sapiens
tttttagcaacccagtgcagtccagtggtgatggccacaggggtgcttgtgtcaccccacccctagctccaagcagctcagcacagagagagactccgtttatttgggagaaagtaagggaagaaaacaatagtctctgcttggtaatccagagaattcttccagctcttctccaagaccaccaacgtggtactttacaagtgtgcaagaatcayggtgttactgggcttggggtgccccataatgcagatatggcttagatcacaacacccacatctgtttgaatacctggaatgtcttcccaaaagaggacaggtacaaacaaactcagacagcaaagactacattaaataactaacccttcaatgctcagacaccaacgaacatccgcaagcaccaacaccatccaggaaaacatggcctcaccaaatgggcttgagcttcaaacagtagctcgaggattcagtttttctttatct

SEQ ID NO: 179455 - DNA, 536 bp, Homo sapiens
atccattagtaggccattacatattgaaagtcctctgaattttctgacagtctcagagtttttttttagaatctaaatctctgccttagggtacaggagtatgcctgagagcagggattataaactggtggcctgtgggccaggtttggcccactgtgctgtgttttagattctggaaataccacatcaaggttctaatttctagtttctaacaaaagtttcrcatatctagagctgaaaagctgctgctcctctgggacagggctcccttttgcttctgtgtcctactaggtaacatagctgcctttcttatttaccttgtagtctttgaagtttgagatctctgcttcatgacaagagagtgaggcacagtatggtttatttcttgggcttcctgacagaaacaaagtcatttattttcttattttctttgtctttaagtgatgatacgttataaagagaaatatagtcctctgctgcattagcttcctaaggatgccataacaaagtgctacagctgggtggcttaagacaat

SEQ ID NO: 179456 - DNA, 644 bp, Homo sapiens
gtgtgtaaatgatttacatttaagataatttttgatatgggtaaattgaaatctacagtcatgtgttgcttaacaatggagatgctttctaagaaagatattgttaggtaatgttgtcattgtgcacatatcatatagttacataaacctagatgttattgactactacacacctaggttatatggtatgggctattgcttctaagttacaaacctggacagcatgttatggtactgattactgtaggcagttgtacacaatggtaagtatttgtatgtctaaacatagaaaagatacagtattataacctcatacttccaccattgtctatgtcgtctgtcatcgacagatacattattatgtagcacatgactgttgcatattactatttgttytctacttttatatattcttaatttgttttactgcctttttttgaattgagtagtttttatgattctattttcccaccattattactaattatctatacctcctaattgtactttctttaaaaatggttattcttgggctttactatccaataaggcaggcactatccctatgtagctgcttaaatttaaatttttaattaatttacagttaaatgcttgaaatttcatatccttaggtaatctaatga

SEQ ID NO: 179457 - DNA, 550 bp, Homo sapiens
atttcaagactggcagagctctgaaccttagtgagattagaggcaaatctgggcttmaggcaccatctagtgccaaaaaggaagcagcaatctaggattaagggaactcaacaggcaactgcaaagaacctctaagcaaacataccccagaaagaccaaaacaagccagggagcaaagacagaaataaataattaactcttccatacaaagcaatagacatatattcacgagaaataacagcaaacaaggaatcatgaactccctaagcagacaaaacaagcagccagggatgaaccctaatgagatggtgatgtgtgagctctcagatcaaggattcaaaatagcagttctaaaaaaaaaaaaaaaaaaaaaaaaaacctctgcaaactcacaaaaaaaaaaactcaaaattgtttcaaatgaacaacaccaccaacaaaaaacaaatcctggaactgaaaaattcatgtgttggaccacaaaatgcattaaaagttctcaatagcaaaatgaataaaaccaaaaaaaagtctgtgagctcaaaagcag

SEQ ID NO: 179458 - DNA, 550 bp, Homo sapiens
atttcaagactggcagagctctgaaccttagtgagattagaggcaaatctgggcttcaggcaccatctagtgccaaaaaggaagcagcaatctaggattaagggaactcaacaggcaactgcaaagaacctctaagcaaacataccccagaaagaccaaaacaagccagggagcaaagacagaaataaataattaactcttccatacaaagcaatagacatatattcacgagaaataacagcaaacaaggaatcatgaactccctaagcagacaaaacaagcagccagggatgaaccctaatgagatggtgatgtgtgagctctcagatcaaggattcaaaatagcagttctaaaaaaaaaaaaaaaaaaaaaaaaaacctctgcaaactcacaaaaaaaaaaactcaaaattgtttcaaatgaacaacaccamcaacaaaaaacaaatcctggaactgaaaaattcatgtgttggaccacaaaatgcattaaaagttctcaatagcaaaatgaataaaaccaaaaaaaagtctgtgagctcaaaagcag

SEQ ID NO: 179459 - DNA, 550 bp, Homo sapiens
atttcaagactggcagagctctgaaccttagtgagattagaggcaaatctgggcttcaggcaccatctagtgccaaaaaggaagcagcaatctaggattaagggaactcaacaggcaactgcaaagaacctctaagcaaacataccccagaaagaccaaaacaagccagggagcaaagacagaaataaataattaactcttccatacaaagcaatagacatatattcacgagaaataacagcaaacaaggaatcatgaactccctaagcagacaaaacaagcagccagggatgaaccctaatgagatggtgatgtgtgagctctcagatcaaggattcaaaatagcagttctaaaaaaaaaaaaaaaaaaaaaaaaaacctctgcaaactcacaaaaaaaaaaactcaaaattgtttcaaatgaacaacaccaccaacaaaaaacaaatcctggaactgaaaaattcatgtgttggaccacaaaatgcattaaaagttctcaatagcaraatgaataaaaccaaaaaaaagtctgtgagctcaaaagcag

SEQ ID NO: 179460 - DNA, 538 bp, Homo sapiens
aatgagctatgattgcacccctgcactttagcctgggtgacaaagtgtgactttatctcagagagagagagaaaaaaagaattttagcaatgttgcctcttggaggtaattttggataaaaaagagtggataagtcaaatttcttgtccaggagtgaataagaaaaaaggccaagtagattgtgctggccattgtcactcagcaggacacacaactgagcttcaatcagagttcayaatagagtagcttattggagagcatatcaaatagctcatttggtgaaatttaggcttatatctggcttatggcattgcacatagtaggcatccaaatgctcgttaaattgttttgactcaataacagtttatatcccattcactgtttgggttacattttttttaaaaaagtcaatatttgttttcactggataattcagaaagacagctgtggcagccacaagtaaacaagtagctcttcacagctgtccacacctgccatataaaaagagcaagcataatacatttttattttgttaaca

SEQ ID NO: 179461 - DNA, 538 bp, Homo sapiens
aatgagctatgattgcacccctgcactttagcctgggtgacaaagtgtgactttatctcagagagagagagaaaaaaagaattttagcaatgttgcctcttggaggtaattttggataaaaaagagtggataagtcaaatttcttgtccaggagtgaataagaaaaaaggccaagtagattgtgctggccattgtcactcagcaggacacacaactgagcttcaatcagagttcataatagagtagcttattggagagcatatcaaatagctcatttggtgaaatttaggcttatatctggcttatggcattgcacatagtaggcatccaaatgctcgttaaattgttttkactcaataacagtttatatcccattcactgtttgggttacattttttttaaaaaagtcaatatttgttttcactggataattcagaaagacagctgtggcagccacaagtaaacaagtagctcttcacagctgtccacacctgccatataaaaagagcaagcataatacatttttattttgttaaca

SEQ ID NO: 179462 - DNA, 490 bp, Homo sapiens
attcagcaaggcattctgactaggtttttcatataactgactccaatgcaaaaatattttaaaatgtaggctggacgtaatgaaaataggtagactaaataacsctctaaaagtactgattaaccatatctacatcaatttagaatgtccctcttagagactccctaagagacacagaggttaacattttgggaaaggttacaaagctgataagtagggaagctgggatttaaacctgtgagggtctgcctccagagtccttctcttaacaacagctctagggctttgttaaatcagccctaatctctagtgggaagccacgaggctctatccagagcctgtcctattcacgttcttatcaacaactcagatggcgatattgccatcattccactaaatttgggaatgacctgaagctaagaagggaaacagccactctaaaaaatcagaagcaaaagtgaaaaaaaaaaaaatatccatcaaggtgccc

SEQ ID NO: 179463 - DNA, 619 bp, Homo sapiens
ctgggtgcctctgctgatctgtgtagtcttagggcctctcacagagtctctccagcagggtgactgtacttcttgttagtggctcaagattcaagaacaagcattccagagccaggaattggaacctgttatctcatgaagcctgggcgataaatgggcacagtgtcatgtctgccatattctattaatgaaaactttcacagagcccattcagattcaaaggaagggggtataaacctcatgtcttcatcagagaagcatagaagaatttgtgtcgatcttaaatatggcacaatgaattaccaccttttacatcaatctactggacaaaaagagtttaagagatctgagaagaaggaaatatgtgttattaggcaaggatcttactgctagaagagacaaagaaaaatatatcatggaaaactctatatttatcattgtatttttatcaggaagaattttttttattccattctagaaggatagctyatgctaggtgtaggaaatctatttattttagggagaaatttcagaggagtgtgtttatttttctcgctaggtacatttttttttttaaagttagcattctccttggtgaagtattccaaagaatgaagtt

SEQ ID NO: 179464 - DNA, 659 bp, Homo sapiens
cttaaacaggatcatggcaatttgagttgcttgtaggtagatattatataaatataaggagttatttctctgttgattatggctgctgattcagccaaggggaaatggagttctggacaggcttgtacctccagcagtgactgcaggtgctgtcaaaaggaggtgcaggctgctgtctgacattctcaaaaggcccctgctctcctgagaatggcttgatgcttattgctaataacaagsctggcagccagctgcagctttcactcaaaattctctggctttcagtaatcaaagccaggcctgggttgttccttggccctagactgcaaaaggaatttcctttatttttgaacatggagagaataaaaagaagtacaagttgttttataagacaagtagggcagcaatttgaaatagatatttaggcatctcttagggattaacatcgggactcatttaagggcttggagtgttaataaggatgagatgtatttatttttccctgggttcttttttaggaatccctgggcagtgttctggaattgatctatactggctcaaatttcacatgtccccccattttccatgcagactctcccacccctccttttgactgagttgtgcctcctattaacttggagaaaatgccccaaccaggg

SEQ ID NO: 179465 - DNA, 557 bp, Homo sapiens
aagtctttgatataggcaatgggggcttgatatgactctgaactcatacagatgggtccatctccactggggtagatatcaaagttgctccaagatgcaacttggggccccaaagcatctgctatcatgtgtaaagtacctgaccctttataaccatcaaaatggccaaaactaaaaaggtgaacataccaagcgttgatgaagatgtggggaggggagtaytcgtgcatggctgtggggtgtgtaatgagtgcaggctttttaaaaaacaatctggcttgtctcagtgaaatttagttggtacatgcgctatgatctggtgacctcccacatcccaggcatacagcttagaggaactgactcatgtacaggtttataaggacatctttattcagatgttcactgagcttgttggtgacaacctggaggaaagttagatacaaactgagtgtccatttttaaaggaatggataaggaaactaaggtggatgcaccttatgaaataccatgcagcagcaaaaagcaacatacaaaatggacatacaacaatggcaata

SEQ ID NO: 179466 - DNA, 557 bp, Homo sapiens
aagtctttgatataggcaatgggggcttgatatgactctgaactcatacagatgggtccatctccactggggtagatatcaaagttgctccaagatgcaacttggggccccaaagcatctgctatcatgtgtaaagtacctgaccctttataaccatcaaaatggccaaaactaaaaaggtgaacataccaagcgttgatgaagatgtggggaggggagtattcgtgcatggctgtggggtgtgtaatgagtgcaggctttttaaaaaacaatctggcttgtctcagtgaaatttarttggtacatgcgctatgatctggtgacctcccacatcccaggcatacagcttagaggaactgactcatgtacaggtttataaggacatctttattcagatgttcactgagcttgttggtgacaacctggaggaaagttagatacaaactgagtgtccatttttaaaggaatggataaggaaactaaggtggatgcaccttatgaaataccatgcagcagcaaaaagcaacatacaaaatggacatacaacaatggcaata

SEQ ID NO: 179467 - DNA, 453 bp, Homo sapiens
gaatggtagtttcagtctcttttagggtagtaggggtgtgacatgaagaaataagtaggagggaaagggctgatggagaggcaaccaacagtgtctgccacagccacttyttcaagtagtaatgaaaagggttcaacagtttctgatggttatgtttccctgccttcctgaacagagatactcaaccatctcacttattacataatgatgtaggctcagcatagagcagagaagagaacactcagggcatgaatttgtgctccacagagttctttgatgagtcacaactttactctcctttgagacctttccaggctttagcatgacatcctccattacagtgctgaggttttacagctgcatgcctgcctttttgaggttttttttttttttgtcccacctcttgatatccacatgtcaactatcactttttctgttgttattatacttgac

SEQ ID NO: 179468 - DNA, 495 bp, Homo sapiens
ccacgcagccagcactgtctggctccaaagcccaagctcctcactgctgctgcctctgcctgggcatgatgcaagtgtcacacattgttttcaattgtcaggacctctgaagataaaggtcaaccccagtgcaggtctttactgcacacttcctctgaagagggcttcactttcacccaagtgcagaacgccaggcatgatggccttgtcttcagtgtcaccgcacttgatcctcaagcctctccagacccacagcccccagccgtgtggcagctccagcaggcagccttcctaacacacctcaagtggctaggcagccccagatgcctcctacaccctccaaccagtcaccgcaggccacatyggggctgacagaggaggcccacagaggtacacaggtgtggtccctgggtgctcatccaccaccactcacacctttcccaagtccagctttgcattctgcttcagtgataatgtaaacccatcaagagagaa

SEQ ID NO: 179469 - DNA, 413 bp, Homo sapiens
gaggcaggagaatggttttaacccgggaggcggagcttgcagtgagccgagatcgcaccactgcactccagcctgggcgacagtgcgagactccgtctcaaaaaaaaaragagaaatctctgcagataggaacataggaataaaagtttgattcactaaagaaatgatcatgatcaaatgttccaacgggcttgtatttaggtattttccagagtaaaggcacagagcactgaggcaccattttgtttctgttgttgttataactcttaaaatcaattttaaaccaacagtatctaaattcatgatataatagatatcacaatacagtaatataaatattgattctaaaggaaagaaataaaatcctaggaatatgcttaaaagtgcagagagacaattatgtgtatttgtgc

SEQ ID NO: 179470 - DNA, 505 bp, Homo sapiens
ttcatgaataacaaaggtttgtgcagatcagtcaagagacaggtgtttattgggccctggtgctggaagcatttctctttcttggtgtgtggtttctaatatttttttctgtttccttccagctgccccccagcacccacctgtatagtggttattatattaataatatagtcagggatggacaattccttcatagccaaatcttccttaggaagacattgtgtaaacaggggataacaacaacaaacacaaaccaacagtaacaatagcttggccctaaggcttattgkaacttttctcttatttaggtatcttttatgaatttttctactggggggtgtggcactggggagtgaacttagaattttaagagtctgtgagtttgacaaaaagattaactaaaactcttatttaagcttacctctatcatggaaaaaaatattgtgcacaatttatactaagaaaatacagagtgattttgaaatcaaccactaataccaccatc

SEQ ID NO: 179471 - DNA, 647 bp, Homo sapiens
cagatttaaaggagtgatcttaaaacggatcactaatatgacaagttcaaacagattcaagctagtaagctacattagaaagattattagttctcagaaataattagcagaactcaggaggaatacctttcttttttggacatcttagcaacaaagatcagatacagagacagtaaaattggttttttttttttaagtttaatccaaacttcagtgtttttcaaatcccctgctcaacataatttgttattcttttataatgtaaacatttgcttgatatttactaatattacttccttctccctcaaaagaagtcccataacatgttgcttagtttctaaaactcagaactcctctgttgaattaataatgacatcatcaaagcaaatatttttgtaatttattacgtgccagacatattcttaagtccttgcatggattacttctctctcacacacacacacatacacacacacacacacaaacacacacacacacaaacacacacacactccccttgagaaaataattcatatcatatctacttttcaaataagaaayagagaaagattagagttagtgagcaggtagactgagttatgattacagaccatagtctagcctgtgctattgacaaagcctatgtt

SEQ ID NO: 179472 - DNA, 491 bp, Homo sapiens
caacttagtgattataccaatagtggaatatatgactaataaaaagttattcttctgtataagttttttaattttttcttaagttttgctattttagattaatatttctcttaattttttatgatcttgaattgttatttattctaaaacacakgagtaaaaatgcacaattttaaaaagattaaggaacaccttaaattttgaaatgttaactcattaaaatattactatttttacattattgattgaaataaattattttaattttctggttccctttaattaatagtcacttttatactgtagagatttcatttttgatatcttttctatagaaaatgtaatcttggagagcagtgaatcctgatttaagtctgcaactagcagcagaatgttaactacttcagtttccaatatctagtggctaatgtgtaatccctgattatatctctaggtttttaatattcctcactccaaaagaccttgatcat

SEQ ID NO: 179473 - DNA, 628 bp, Homo sapiens
tatagaatcacatacatggctgctcatgcaaacatgcacacacacatgcaaacaaggcatcacacacctagagtcacagaaccaatatattctatatattctctcactttcctggaactacaaccatgggaacaaattcttttacgtagggctccagcatcataggagaactgggggaacttggcatgggttattgtccctctgtggattccatactatggaacatcaagatggtgatataggtctcccttgcccttccttattatgggtrttgtctgttggagtttatcactacttcatttgtaaatactaagcattcctgttttctatcccccttaaaccttgaaagctcagtttggatatcacttcttttgggtagcttttctgcttgttgcataacaaaactgtcgttctaagatttcaatagcttctctgatactatagcaaaattcaaagtccctttttatgctcacaagactctttaagatcttttatcaacaattctgtctctctccactccccagcttgcatgctgtttcatccttgtgaaggcagtatggcttaatggtcaagactgcacaatctgaaactaaactgctcggctcacctcaggtatttagtagcccag

SEQ ID NO: 179474 - DNA, 628 bp, Homo sapiens
tatagaatcacatacatggctgctcatgcaaacatgcacacacacatgcaaacaaggcatcacacacctagagtcacagaaccaatatattctatatattctctcactttcctggaactacaaccatgggaacaaattcttttacgtagggctccagcatcataggagaactgggggaacttggcatgggttattgtccctctgtggattccatactatggaacatcaagatggtgatataggtctcccttgcccttccttattatgggtgttgtctgttggagtttatcactacttcatttgtaaatactaagcattcctgttttctatcccccttaaaccttgaaagctcagtttggatatcacttcttttgggtagcttttctgcttgttgcataacaaaactgtcgttctaagatttcaatagcttctctgatactatrgcaaaattcaaagtccctttttatgctcacaagactctttaagatcttttatcaacaattctgtctctctccactccccagcttgcatgctgtttcatccttgtgaaggcagtatggcttaatggtcaagactgcacaatctgaaactaaactgctcggctcacctcaggtatttagtagcccag

SEQ ID NO: 179475 - DNA, 628 bp, Homo sapiens
tatagaatcacatacatggctgctcatgcaaacatgcacacacacatgcaaacaaggcatcacacacctagagtcacagaaccaatatattctatatattctctcactttcctggaactacaaccatgggaacaaattcttttacgtagggctccagcatcataggagaactgggggaacttggcatgggttattgtccctctgtggattccatactatggaacatcaagatggtgatataggtctcccttgcccttccttattatgggtgttgtctgttggagtttatcactacttcatttgtaaatactaagcattcctgttttctatcccccttaaaccttgaaagctcagtttggatatcacttcttttgggtagcttttctgcttgttgcataacaaaactgtcgttctaagatttcaatagcttctctgatactatagcaaaattcaaagtccctttttatgctcacaagactcttyaagatcttttatcaacaattctgtctctctccactccccagcttgcatgctgtttcatccttgtgaaggcagtatggcttaatggtcaagactgcacaatctgaaactaaactgctcggctcacctcaggtatttagtagcccag

SEQ ID NO: 179476 - DNA, 300 bp, Homo sapiens
gaaacttggcatattcccagctgtggtggctatgagcaaaaaccgttgcctgagacaatagatagaaaaggaagggaactttgtcttgcgccttaggtaccagattgtccacagtgggatgaagcaccaaggaggctcttgggatttccaaagccaggacttggattttggaagacatttctggaccttctctgggtcagagaggagayctcagcctgaaggatgaatcccaggccaggcagcattcaccacaagctgactgaggagcccttggaccctaagggaacattggcggtaggc

SEQ ID NO: 179477 - DNA, 537 bp, Homo sapiens
taggaacaggtggtataagaggctcaacattgtcatcaggacgggttcctcagctctaactttctttaggctggctttattcacaggtaggctttcttcttagtgtcaagttggctacctgaaaatccagggttgaattcatcccttcagcarctccagaaaagacacagaacgagagagagaaagaaagagagggaagagaaaaaaaacaaggaggacgaggaagacaaggagaaggtgaacaaaggagggaatgaggaaaagaaggaggaggaagaggaaagaggagaggagcaagagaaattgtctttttttgcaacaattctaacaaatgttttattactcacactgtgaatacacacccttcaaaagctaagttaatttttgtctacttaattctgataaattccatagtaaccaaagccctacatgtggttgattcataatcctcaatacagaccccaatctaggggttttcctcatttagcaacaggcttcagagatatccccatatcctacattcaaagcattatttcc

SEQ ID NO: 179478 - DNA, 543 bp, Homo sapiens
gaacaggtggtataagaggctcaacattgtcatcaggacgggttcctcagctctaactttctttaggctggctttattcacaggtaggctttcttcttagtgtcaagttggctacctgaaaatccagggttgaattcatcccttcagcaactccagaaaagacacagaacragagagagaaagaaagagagggaagagaaaaaaaacaaggaggacgaggaagacaaggagaaggtgaacaaaggagggaatgaggaaaagaaggaggaggaagaggaaagaggagaggagcaagagaaattgtctttttttgcaacaattctaacaaatgttttattactcacactgtgaatacacacccttcaaaagctaagttaatttttgtctacttaattctgataaattccatagtaaccaaagccctacatgtggttgattcataatcctcaatacagaccccaatctaggggttttcctcatttagcaacaggcttcagagatatccccatatcctacattcaaagcattatttccaacaaggtg

SEQ ID NO: 179479 - DNA, 537 bp, Homo sapiens
taggaacaggtggtataagaggctcaacattgtcatcaggacgggttcctcagctctaactttctttaggctggctttattcacaggtaggctttcttcttagtgtcaagttggctacctgaaaatccagggttgaattcatcccttcagcaactccagaaaagacacagaacgwgagagagaaagaaagagagggaagagaaaaaaaacaaggaggacgaggaagacaaggagaaggtgaacaaaggagggaatgaggaaaagaaggaggaggaagaggaaagaggagaggagcaagagaaattgtctttttttgcaacaattctaacaaatgttttattactcacactgtgaatacacacccttcaaaagctaagttaatttttgtctacttaattctgataaattccatagtaaccaaagccctacatgtggttgattcataatcctcaatacagaccccaatctaggggttttcctcatttagcaacaggcttcagagatatccccatatcctacattcaaagcattatttcc

SEQ ID NO: 179480 - DNA, 378 bp, Homo sapiens
aaaagacacagaacgagagagagaaagaaagagagggaagagaaaaaaaacaaggaggacgaggaagacaaggagaaggtgaacaaaggagggaatgaggaaaagaaggaggaggaagaggaaagaggagaggagcaagagaaattgtctttttttgcaacaattctaacaaatgttttattactcacactgtgaatacacacccttcaaaagctaagttaatttttgtctacttaattctgataaattccatagtaaccaaagccctacatgtggttgattcataatcctcaatacagaccccaatctaggggttttcytcatttagcaacaggcttcagagatatccccatatcctacattcaaagcattatttcc

SEQ ID NO: 179481 - DNA, 568 bp, Homo sapiens
tgttatctgcctaaataatttatttttaactcctatattataagcatgtttctggaaattggtaaaatgaatttcagactattgtctgaagtataagaagaacttcaactaataattccataggttgcttcagtttcttttttttaatttttagtcaaacatggaaagaggggtgctatattactaccaatttcactgaatctttsagtagaaaactcctaaagggcaaaattcctgaaatcatgttttgtaataagaccctaaagtatggataagaacataaccagtgtatctagacaacagcagtgttcaatatttgtattttctaattttctttacattcacagaattcacttttttccttaaagacagaatgagtgtataaaaaaggttataagcattcctctaatagtagcttcataatgatgccaaattatctttcctatttccaaaataattcatttatttttgttttcaactgaagaaatacatatttgataagaaaaaaaagaatttggaggagaaacaggggaaggatggaaggagagaaaataaagaagggtaatca

SEQ ID NO: 179482 - DNA, 588 bp, Homo sapiens
cccaatgaaattaactagaaaaatataaccacacacataagaatatactcatttatgtgtttaatgtgtacacatatttaaatgaaatataagaaattaaataaagtatggattcttcttaggaatggmagataatttaacaatgcagagaaattagccatttttttagaattgtaaagagcaacaaaatataaaattatatgtgacacttgtggttaaaaatactttacttttattagtttattttttattcagaaacataaaaggaaaataacactataatacatagttatgctagtaataataatatcatcattaaatggggttgtgtggtcattgtatttgggttgtatgtttagtctgcaaactgttatgtggactcatacacacttctttgaaccctatgttgtatcagctttgcaccaaacagaattataaaccaaagacattggaacagttaaaaactggaaattatatacatgactcaaagactgactcaagcttcttgaatttccatcataaagggacagggaaatacagtctatttttacctgttcttccatagttaccttcacatatctccatcac

SEQ ID NO: 179483 - DNA, 588 bp, Homo sapiens
cccaatgaaattaactagaaaaatataaccacacacataagaatatactcatttatgtgtttaatgtgtacacatatttaaatgaaatataagaaattaaataaagtatggattcttcttaggaatggaagataatttaacaatgcagagaaattagccatttttttagaattgtaaagagcaacaaaatataaaattatatgtgacacttgtggttaaaaatactttacttttattagtttattttttattcagaaacataaaaggaaaataacactataatacatagttatgctagtaataataatatcatcattaaatggggttgtgtggtcattgtatttgggttgtatgtttagtctgcaaactgttatgtggactcatacacacttctttgaaccctatgttgtatcagctttgcaccaaacagaattataaaccaaagacaytggaacagttaaaaactggaaattatatacatgactcaaagactgactcaagcttcttgaatttccatcataaagggacagggaaatacagtctatttttacctgttcttccatagttaccttcacatatctccatcac

SEQ ID NO: 179484 - DNA, 569 bp, Homo sapiens
tgatcatctacacttccaggtaaactttgggagccttccaaggacttyctacctacactcagtgcaggagggaaaggctgtgaaatttggtaggtcaacaaatatcaagtactttctaaagacagagtccttagtgagtgtttcacaacacttgctttcctcccattcgctctgggggaaggaaggaagaaaatacaaagaacttacttttgatattactaatattactaacattttcacattagtttctatttctaatttcttatgtgtatgttaaaagtggtcatgcataattggtaatcattccaggcatgtttgacaatattttaaacagtattaagataatgtagctggtagtgccctttaaaaatgtgtgggtacttagcaatctgttgtcttcagccttgaggtttcacagaactcagaggatagaaaagttcatctaatgttagttccatatttttagtttgtatatgccatgtatagatgcacaatgatatacatgtgtctaattgtgaggaagaatatatgtgtgggtgtttgaagagtatagaggagtttagaaatgt

SEQ ID NO: 179485 - DNA, 510 bp, Homo sapiens
tgaattcctttattaattccttcaacaaatatctgttgaactcctattttatgcttatcaactttgtagacacatggtgaccatgaataaacmagagagagaaaaaaaatcgctgacatcatgagagttgtattttagggaaatacagataatatatataatagatagaaatcaataatacatttgaaaataataagcaatacaggcacaaaagcaaagaacaagtaaataacattaaggttaaaagttttgggaggagaagagtttgtctcacgaaatatggacaattctttcaaaagaatttattgtaatggggagaaaagtaatggagtgggacctttaaaaaggaactgcagttaagagaatgccttttctctggtaaaatatgagtaagaatacaattttttgtgcatatggaaaagataaagtggttaataaaaaaattaagatgcaagggagtgagaaggaaaaactgttgaagcaatgtctttgaatcagtaagagaggatg

SEQ ID NO: 179486 - DNA, 585 bp, Homo sapiens
taatcttattatgcaatgggctttccagttgatcagtgccatcttgtctgcttcttactgtacacgtggctgacaaagagaagggaagatggagctgccatcttgaacatgatttgttgaacatgattggcacaactgccgrtatctatgtctgcagctcaattttacaggctgctctttgttagaaagaaaaataatttgggactgcttttcattaaaaagaaaagccttaccaaggattcccatgcccttgctatttgcctaagttattccttcttaactcctatatcattgttatgatctgtttcaaaggagaagggtgagagaaagtcagagaatgaccttctcacattttattatctgcttcaggagagaaaggataaacagaaggtgagagccaccttctggcttctgcagctttctcacatgccaatgtgccatattttggggtagtgtgtcctgaactccatcaccgattaaactaaacttaacatgcatatttagtttctagtaatgaaaataattttcatttgtattggcattatttgatgctcaaaaaaccatgtgaaataaaaacaaaatact

SEQ ID NO: 179487 - DNA, 565 bp, Homo sapiens
tttttttctttttggtatcatttcacagtttactcactaagtctcacccagtgagtctcatctttcttcagtggtcttaacaattttggccttgagttaattaattcaaagtctccaggaatgaaagaaagaacaaactaggttcagccacctcattttccattgatggtaaaagaactttagcaatgcaaggttctaatcataaggcttaaaacaaaactgggttgctgcattatcttccaataacttaaacatactaaatatgcaatatgtttcctgaaaaaaaaaattcaagtcacatttacatctaagtgtgtttcattttataagcacagattgattattattctgatatcttttcatccagttaaatgtttaaaaattaaggaccatgccttatcaatcaatgcatcttttaagtcacggtcacagcctgaagtttttatttccagtttctcagctaaaggwatagagttcagcagtgcatttaattggaatttagacatcctaacattttatttcccatcagaatggtttcaatttctaacaaatggtctgctgtatt

SEQ ID NO: 179488 - DNA, 390 bp, Homo sapiens
gaattctaaatttgtaatatttcaaacctgtaaatttaacattttaatttcatagctaatagacttttctttcctggaatgtccaaagtgaacttgtggcccctgacactttcagaatgtttctgatgtcaggaaatgatatcaacaaactacccagcatctcaagcccaaaacacctaagttattttttatttctaatcattttcactacacacatactcctcccagtaattctggtcaatatatcacaaatcttttactcttcaccatctccagtgctgatcaactgcataaaagttgcaggtatttatggttcaggacaccagtcactgcagtacatgctgaactgctctgygggctctgctcttgtccacctccctctttccacta

SEQ ID NO: 179489 - DNA, 586 bp, Homo sapiens
ggagcaggctcaataagagtttttgctgatggatctggagggcctgtatagtaccaggcacataactaacacgtaaccagtgcttaataatcatcagctaaatgaatgactgaatgtgctctaagcaatcctgcctgggagtctgcctttccagcgaagcttctgtcagcataattctgcttatwtctaatttatatgttgagcataaaggaaggtgttcattaaaaaaagtaaagaatgattttatggttgaaaccaagtctgaaatatctattgataattctgtgttactatttctggttattatttaaaaacaacaacaacaaattacaacacctcttactctcattttcttctatgtattactaaattctatgagaaagctgtgtctatactgtattcatggtagaaagaaggataatctgtgctttgacagataaatcagtgatgactagacagagaaagggaagatgggacatgccagtaaaaaggaaaagcatgtgtgaaggcaaagagtaatgggagaacatggcaagcttaggtggtgagaaaggtgatgttattggaaggcatggttggaggacgg

SEQ ID NO: 179490 - DNA, 541 bp, Homo sapiens
attccaccataaagagccctgtatgcttggttaggactttggctgtagttggtggggaagcaagccatcagatattttaagaaaacagagatgacatgataatatatgtgtttcactaagagttctgtagtcaaaatgtggaggttacatctttggagcttgagaatatttgctaagatacctcttgactttgggtttagtgaatatcataaagaatttgaaaaaggttttctttttcagaccatgacattcatttttttttccccagggttgttttgcagaattctgaaaaatggtttcttacatactgtcattgttacaggaccccaacacttacccaaagatagccgttgggtcagggtttctgcactacagtcccttctgtggtcaccagaaatatgttacaggaaagcggtcctgattcagaccccaagagagggttcttggatctcmtgcaagaaagaattcagggcgagtccacattacaaactgtgacttattaagcaagtttattaagaaagtaaaggagtgaaagaatggc

SEQ ID NO: 179491 - DNA, 438 bp, Homo sapiens
ccttctaaagaggattaaaacaaggcaacagttgactgtggwtgataaaaagttttaggacagccacaattaaagccacaattgataaggaactttggttacttctgtggcatacacagttttacataacaattataattattaataacatacactaagtcatattagaattacaggagtttcccataactttggaacatataccagtaacatatttatgcaaatacagtccaaagaaagcaaaacaccatttcacatttgataatgcttcctgtatgatttttataccaaataagccaaacttcacctttataataatgtactattaatgttaaactgaatttttcataaaactttatagacatattaactcaattttaatgtttaaccataaggttagattcttataaaccttttataaccctttacatttttttg

SEQ ID NO: 179492 - DNA, 559 bp, Homo sapiens
aacaataaactctgtaggaagacagatgttccgtagtgatrataagagctagtatttcctctgcccttgctatgtgccaggctaaactaggctcaactcatgccctttcatttaatttctgcaataagcctaagatataagcactatcattatccccatttcacagatgaggtttagaggaattaaataaggtgctccaggttacaaaggttgtgatagttttgaacccagacttacgtcctcttgagcctgaccttttttgctgcctctaagtaaagactcacaggcagcacatgcttttatgtcactctggccatgctcccatcataccacttttttcattgtattgcaattgtccctttacacgcccacctcccacactttctggttagctaacctgaggcaaacacagtgtcttatccttctagttctgaggatttagcacagtgatgtgacccattgtggaagctcagtaagtgcctatagaatgactaatatattgtccaaagtcagtaaaggtttatatattaaataaaacattgccttatagaaaataact

SEQ ID NO: 179493 - DNA, 492 bp, Homo sapiens
taagtcttcaagatatgaacattctttagaaccagacagacccagacacaggaacgcagatactattttcctatttcagcccctttttgaaaaagtactcactttgattctatgggtggacatgagaggcctaatatgaatgattttccacatcccccttcccactcaccacttaccctttttatttttttaaggtggttgtttagcctaggatagacatagtgttggctcgatgtggtaactgagagcagccttcacatttgggaaaatggaaccgtttcaaagtcagtggagtgtgacaagtggtaggmacacaggaaggtcaggtaaaatgcaggtcccctgtgcaatatttgggacatactaaaaacatcagacattataaatctgaattggacatatgtatcctttaacaaatattctttgtttattcaaattttaattttacctgggagtcctgtatttttgtttgctaaatttggcaaccctatt

SEQ ID NO: 179494 - DNA, 492 bp, Homo sapiens
taagtcttcaagatatgaacattctttagaaccagacagacccagacacaggaacgcagatactattttcctatttcagcccctttttgaaaaagtactcactttgattctatgggtggacatgagaggcctaatatgaatgattttccacatcccccttcccactcaccacttaccctttttatttttttaaggtggttgtttagcctaggatagacatagtgttggctcgatgtggtaactgagagcagccttcacatttgggaaaatggaaccgtttcaaagtcagtggagtgtgacaagtggtaggcacacaggaaggtcaggtaaaatgcaggtcccctgtgcaatatttgggacatactaaaaacatcagacattataaatctgaattggacatatgtatyctttaacaaatattctttgtttattcaaattttaattttacctgggagtcctgtatttttgtttgctaaatttggcaaccctatt

SEQ ID NO: 179495 - DNA, 541 bp, Homo sapiens
tcaatgtagtattaaaagaaatcagcttttaaaaacctaatatttggttttattctcagtattaaaaacctagaccctttttacttcatgtacattgtgtccatcttttgtccaatgrcaaatcagattgctgctgaacactataaaaattaaggacaaaatttaaaaaccagaaatcaggctacggttccagctacacatttattggtagaatgcacaataacctgtactgtttctatcagcaaagaggtttatttcatttaagctttttttcctctgtgcttcattatgttctgcagaatccatgctggaaggtttaatttatttaagtgataaaagcttcttaaacttaacagggaacatggccaactgagctttccatttcaaaagtaggacatttgatcataaaagtgatatcaaaattgaataatttgaatgtgtactgaactttgaaatccaataaaggcaagaaaaaaaaggttagaatcatttgtttaatgtcatggattcagtgttacataatttgaggaaaagagagagg

SEQ ID NO: 179496 - DNA, 541 bp, Homo sapiens
tcaatgtagtattaaaagaaatcagcttttaaaaacctaatatttggttttattctcagtattaaaaacctagaccctttttacttcatgtacattgtgtccatcttttgtccaatggcaaatcagattgctgctgaacactataaaaattaaggacaaaatttaaaaaccagaaatcaggctacggttccagctacacatttattggtagaatgcacaataacctgtactgtttctatcagcaaagaggtttatttcatttaagctttttttcctctgtgcttcattatgttctgcagaatccatgctggaaggtttaatttatttaagtgataaaagcttcttaaacttaacagggaacatggccaactgagctttccatttcaaaagtaggacatttgmtcataaaagtgatatcaaaattgaataatttgaatgtgtactgaactttgaaatccaataaaggcaagaaaaaaaaggttagaatcatttgtttaatgtcatggattcagtgttacataatttgaggaaaagagagagg

SEQ ID NO: 179497 - DNA, 504 bp, Homo sapiens
tccttagtagcaattataaatctaggatacatgagctgcttttrtttgtgttttaattctgcttattctggtggcatgctcacatactgtgctgagagaagatgaaatttgctgctaattaccaaggtttgtgcttctaaacattgctggccagtaattgacctgtagtgtctagagtcaagtactagctaataactttgttgctgtagtgttgaactttaattatttaagtcaaaggacaagtattagaagccacactgcctgtttctgtagtgttgcaattgccaagaattgaaacttagaatttgaaacaaaaaagagcctgtttaagtgactgacatctgccagtgcatttgcccaccagcatgcaaacacacagcaaagccggcagaggccctacgaagtacaccttgagctgtcatcattggaaagtctggttaaagagatttgagctctgtgcattattgaggcatgaaaaataatattctaacacattagaatata

SEQ ID NO: 179498 - DNA, 542 bp, Homo sapiens
ggtaactagacaaagtggggtataactgtgtattgaaatactcagcaataaaaatgaactgctgacacattcaacaacatggatttacttccaaagcatggtttaagagaaagaagtttggcaccaaagcctgtgtattgtatgattctatttaagtgaaaggtctgttaayggcaaatctaaggaaagagaaagcacaagaggactgcctgaggcttgggagggtagcgaggactgacaatgggcatgagggaccagcttggggtaacagaaacattctagaactggatcatggtgatggttgcacacctatatgaatttactaaacccatagtattatagatttatagtgaataaatgtatgctagttaaactataataaagttattaattaagaagcaataaagtttcacaatgaaacttctccaatagatctcactggtgccaatgtacaaataccagacataattcatttgtaaacaaagtgtggctcactgtcaggactaagggaagcaagattcctagagtctagaaatatcacc

SEQ ID NO: 179499 - DNA, 519 bp, Homo sapiens
cctaacaggtgtgaggtgatatctcataatgactttaatttgcactcccctgatgattagtgatttgagcaccttttcatayacctgatggttatttttatgttttatttggagaaatttctgctcaggtttcttgctcactttttaatagggttatttattttctgctattgagttgtaagagttcttacatatatgtggtttgcaaatatatttcccagtctacaggctgccttttcattttgttgattgtttcccttgctgtacagaaacgttttagtgtgatgtaaccctatttatttatttttgcttttatggctcaagcttttggtgttatatccaaaaagtcattgccaaggccaatatcaaggtgttttttcctgtatgttctcatcaacgtgttttatggtttcaggtctcacaggcattttatccattttgagttgacttttttttttgtatgggtggaaaataaggtcctaattttatccttttgcatgtggaaatccagttttctca

SEQ ID NO: 179500 - DNA, 391 bp, Homo sapiens
ggtgacttcatcaagagtcacatcactttttcatattcagcatctaataaaaatttaacaggcaaactaagacaggaccaagagaaaaaataggcaatacaaacacatccataggtgattaacatattgaacttgtcagattattgctttttaaaatatagtctatatatttccagatggaaaggtttctctttctttcttcattcattcattcttcctttcttttttctttctgtctctttgttcctttctttctttctctcttactttgtctctcttgcttttatccttcrttctcttgctccttcccttacttcctccctcctgccttcctgtttcccttttttctactataatgagagaacatgctttcatttgttctgcctaattg

SEQ ID NO: 179501 - DNA, 565 bp, Homo sapiens
aaaggaactttatattctatattatcagagtgcaaatttaggtatctatcaataagctgtagcttactgactttaatgtttaagttacctacatccattcttatttttgtgtacctgactgaaagtgatgtcttaaagtattatattatatggacttaaagtggactgaaaatgctgtgttaaagtgtcgtattatttttgtgctatttaaactcttctttcatctatattttctattttatgaaattacagctatgttatttgtcacatatatattaactcctatagcttcattgtgaatcatgttctttatgcagccaaatgcattttgccaaatttccttatttatttcatttgcctggtatacctttacccatctctttatgtttggcttttattattgttgagattttgtgtgtgtgtgtgtgcgtgcrtgcatgtgtgtgtgtgtgtgtgtgtgtgtgtgtgtgtgtgtcaacattttcaaggattttcctttgtaagccaatctaaaaatatttttcttctaataggtgagttaagcataactggtaggttagggcta

SEQ ID NO: 179502 - DNA, 587 bp, Homo sapiens
ggtacacatttcaaggctttgatatatattctaatgcttaagaaacttattcaacttggtagccatggctaccccccccacaaaataaatgaatgagtaaataaatataaaaataaataagaatacagggagcatgctccaagagttgtacatcttcttgacagaaaatcaatatacagtagttgtggagatggagatcgttgagctaaatttttgtttaccttctagataattccagtttctgctgtcatygggatggtaaaaagagagctttcccatctcagaaaaccttttgtgggtcatgacaagctatttgcaaattatgttcattcaaattctaaattctgcccaaatgcagttgacagactgtagacagctaagttatggggatggtacaaataaattctgtgtatgataattacttattgatctgcaaagtgccttctatttggatctgtattagaataaaggcatgaatgtgttgaaagctcataacaatcatattgagagcaacagggacaagaacatctccttagcatgtatcagggtttaaatattcttgctagaagaaaaagactttcttctct

SEQ ID NO: 179503 - DNA, 587 bp, Homo sapiens
ggtacacatttcaaggctttgatatatattctaatgcttaagaaacttattcaacttggtagccatggctaccccccccacaaaataaatgaatgagtaaataaatataaaaataaataagaatacagggagcatgctccaagagttgtacatcttcttgacagaaaatcaatatacagtagttgtggagatggagatcgttgagctaaatttttgtttaccttctagataattccagtttctgctgtcattgggatggtaaaaagagagctttcccatctcagaaaaccttttgtgggtcatgacaagctatttgcaaattatgttcattcaaattctaaattctgcccaaatgcagttgacagactgtagacarctaagttatggggatggtacaaataaattctgtgtatgataattacttattgatctgcaaagtgccttctatttggatctgtattagaataaaggcatgaatgtgttgaaagctcataacaatcatattgagagcaacagggacaagaacatctccttagcatgtatcagggtttaaatattcttgctagaagaaaaagactttcttctct

SEQ ID NO: 179504 - DNA, 373 bp, Homo sapiens
aataaatctgaaacatgtttcattttttagaaattagttaggatggcagaaaataaaccaagcacaggcartgaagaaatgtgatactatctttcaacaaatatgatcaaattccattaggatgaattgaagaaaggagccaaacattagcggaaagtgtgaattacagaattttgtttacaaaagcagtattttggcattgggtatgaaggggtaactagaactaagacagctggaaatagtcctaagcagcactgttgttttgtttcagggaacagataggaatagtaagaaattagcacatggttccatggtgaagtaatgataattttttttttttttttggtaatttagagatcacacaaaaagtttc

SEQ ID NO: 179505 - DNA, 596 bp, Homo sapiens
aaaaaattaaaattgtcagtgttaacacccaggaaaacatttttcctatagtgattatagcatttttaggaagtgaggattataaaattatacagtttaggaatctggtatttaataacatgaatgtttagaccaagattttgtttgtttaaattaattgcatgtctagattagtaataatatattcttggtatagctagtataaagtagcaaaacgtcctttaaaaatgtttttggtatgtttgtaatgattcagtagctttctgattaaacatagcttaaacacatgcttctcatttstgctcctcccaaaacctcattaaaatgaaagtaaacaataaaaaaaataaaaatagtaaatacacacaaagaatgcaagaggagacaatagtagactgaaatggcactattaagaggatggaggagttagcagagcacagaaagatgcataacaacactggatgggcagaaaggcaaggatacctgtacttgattccttctccagaccctgtacaggctctggaattgagtatcacaaaaagcaggggaaggggtggggctacaatcaagaaggtgttggttaagtttctttagag

SEQ ID NO: 179506 - DNA, 595 bp, Homo sapiens
tatccccattttgttgttgagaaaaccggacttgaagaggttraatgacaaaggtcacacatctaaatactcaccagtgaacccaggcctctgactctaatgtctatatttggattcgttgtctggtgagagcctgttcctcatggatggtaccttctctgcatccttgcatggcagaagaggtgaacaagctcccacagtccttttataagggtactgattccattcatgagggtacctcttaattaatactaccacctgtggattaaatttcagcacatgaatttgggggagggggagacacaaaattttagacctataatattttcctgatactgtgtgatgctatatatttacttattaattgactacctgtctctctaccacataagttgcgggggggaaagttttggaccattttgttcagctcagtattcccagcacctggagtaatattgagaacatccaagaaattcagaacgtatttgttgaataaatacattaatatagaaatgtatcctaaaatctggtgatctcagggttaccaaatagctctttcatcaactaaacggagatccctgagaaaatccacagg

SEQ ID NO: 179507 - DNA, 595 bp, Homo sapiens
tatccccattttgttgttgagaaaaccggacttgaagaggttgaatgacaaaggtcacacatctaaatactcaccagtgaacccaggcctctgaytctaatgtctatatttggattcgttgtctggtgagagcctgttcctcatggatggtaccttctctgcatccttgcatggcagaagaggtgaacaagctcccacagtccttttataagggtactgattccattcatgagggtacctcttaattaatactaccacctgtggattaaatttcagcacatgaatttgggggagggggagacacaaaattttagacctataatattttcctgatactgtgtgatgctatatatttacttattaattgactacctgtctctctaccacataagttgcgggggggaaagttttggaccattttgttcagctcagtattcccagcacctggagtaatattgagaacatccaagaaattcagaacgtatttgttgaataaatacattaatatagaaatgtatcctaaaatctggtgatctcagggttaccaaatagctctttcatcaactaaacggagatccctgagaaaatccacagg

SEQ ID NO: 179508 - DNA, 595 bp, Homo sapiens
tatccccattttgttgttgagaaaaccggacttgaagaggttgaatgacaaaggtcacacatctaaatactcaccagtgaacccaggcctctgactctaatgtctatatttggattcgttgtctggtgagagcctgttcctcatggatggtaccttctctgcatccttgcatggcagaagaggtgaacaagctcccacagtccttttataagggtactgattccattcatgagggtacctcttaattaatactaccacctgtggattaaatttcagcacatgaatttgggggagggggagacacaaaattttagacctataatatttkcctgatactgtgtgatgctatatatttacttattaattgactacctgtctctctaccacataagttgcgggggggaaagttttggaccattttgttcagctcagtattcccagcacctggagtaatattgagaacatccaagaaattcagaacgtatttgttgaataaatacattaatatagaaatgtatcctaaaatctggtgatctcagggttaccaaatagctctttcatcaactaaacggagatccctgagaaaatccacagg

SEQ ID NO: 179509 - DNA, 595 bp, Homo sapiens
tatccccattttgttgttgagaaaaccggacttgaagaggttgaatgacaaaggtcacacatctaaatactcaccagtgaacccaggcctctgactctaatgtctatatttggattcgttgtctggtgagagcctgttcctcatggatggtaccttctctgcatccttgcatggcagaagaggtgaacaagctcccacagtccttttataagggtactgattccattcatgagggtacctcttaattaatactaccacctgtggattaaatttcagcacatgaatttgggggagggggagacacaaaattttagacctataatattttcctgatactgtgtgatgctatatatttacttattaattgactacctgtctctctaccacataagttgcgggggggaaagttttggaccattttgttcagctcagtattcccagcacctggagtaatattgagaacatccaagaaattcagaamgtatttgttgaataaatacattaatatagaaatgtatcctaaaatctggtgatctcagggttaccaaatagctctttcatcaactaaacggagatccctgagaaaatccacagg

SEQ ID NO: 179510 - DNA, 417 bp, Homo sapiens
ccaatgtggaaaacacattttcagcagtaaataatgtcatttaaggagactgattgccaaagcagcctcattgcctaatgggggcctagtctttcattcaacaaatatttactgcctggccctggagctggcactgcagtgcattggtaagcaataacccctgccttgtagttttaatatttttatataagagactaataaaaaacaaatacaaagactttttttaaaccctgcaatttggaataaggwcctgaaaagggtgaagggagtgctggcgtgctgttctttcagccacttgggcaaaatacgcaaggatatttctattctgacctatatttgtagaaagtctctccccaaaacaatgatctaggcacacacacacacacacacacacacacacacacacaccccaaaccc

SEQ ID NO: 179511 - DNA, 407 bp, Homo sapiens
tatgcattgggggtgagttagatgtacatcaagatgacaagagaattgctctgtgttcattccttaaaaacaagatttgcggttgcaaagtgtgcctatgctgcaatgtattttaatgtgctctctagtacacactttctagaggcaggagattcattgttctatgtgccacatagattcctgttccattaaagctattttatctccartattaaagcaaatagtctgagatgcacaattcccagagacgaagagcacactttgacagacacatgtaagcttgtgtagcagagggcagtgcctactctatattatcaaaagtatatgtccacactggtctctccagaaggaggaaagaacttttcaatgcaaattgatgaggttacagacacttcttttaaatgaca

SEQ ID NO: 179512 - DNA, 380 bp, Homo sapiens
tccttttgctagagcagatttgaaacactctttttttacggtttcctagtggatatttagagcgctttgaatcttatggtagaaaaggaaatatcttcttataaaactagrcagaatcattctcagaaactactttgtgacgtagttgggccactttggggcctacggtagagaaggaaatatcctggtagaaaaactacacagaatcattcgcagaaaccacattgtgatgtttgcaatcaactcacagagttgaacattccttttgatagagcagatttttaacactctttttgtagtatttacaggtggatatttggacctctttgaggccttcgttggaacaggaaatttcttgataaataaactagacagaattc

SEQ ID NO: 179513 - DNA, 334 bp, Homo sapiens
aaagcaaaccagggaggaaagatgcactagcactgacctgtaacaggtcaatctgtgccatggcatggcgagaygaagtggagaacccatgtctcattggaatcccggatcatcgtctccacgaaggctgtcttctgcagcactccagggactcacggctctgggcttattgctcagtgtcatgtgacagtaagttttggcgaaggccgtttgtaaggtgattttagtggctggctttgagtggcttccctccagattcacaaaggttgggccacttttccagagaacctgaaatcagaacctgatttcagaacctgagaacctcagaacctga

SEQ ID NO: 179514 - DNA, 520 bp, Homo sapiens
caaatataaatttgcgatgatttcatgtgctatgaaggaacagttcacagggctaggggaacatgcaccccctttctagtctattaaacagcctgcttactggtgccctacctcctgtctccatttccaaacaacttctgtatggctgctggattcatctatctaartcccaattctaatgtcactcttggctctcaaaccttcagtggctccctactttccagagagtgaaatgtacatatctcagcctggcaggcaaaccttccacccagctttccaaacttcctcttagctccattcccaggacaagagccagggtttcccactgcactacctaataccccgtccatctaagacatgaggctcataatgtcctcataatagaaaccccgaactaccactctccaaggcctgtgccaaacgcctcctcttccaagaagccttttctttaacccccatcacttccatcgtccacctgcatgcagcctttggttcatcgttgcctgagaaccctcatgct

SEQ ID NO: 179515 - DNA, 520 bp, Homo sapiens
caaatataaatttgcgatgatttcatgtgctatgaaggaacagttcacagggctaggggaacatgcaccccctttctagtctattaaacagcctgcttactggtgccctacctcctgtctccatttccaaacaacttctgtatggctgctggattcatctatctaaatcccaattctaatgtcactcttggctctcaaaccttcagtggctccctactttccagagagtgaaatgtacatatctcagcctggmaggcaaaccttccacccagctttccaaacttcctcttagctccattcccaggacaagagccagggtttcccactgcactacctaataccccgtccatctaagacatgaggctcataatgtcctcataatagaaaccccgaactaccactctccaaggcctgtgccaaacgcctcctcttccaagaagccttttctttaacccccatcacttccatcgtccacctgcatgcagcctttggttcatcgttgcctgagaaccctcatgct

SEQ ID NO: 179516 - DNA, 559 bp, Homo sapiens
tagcttggtctccatgggtccagaaatcttggaatgccagtatttaaaccaacacaacccaatttaaagaagcatttattgagcacctactggataccaggcattgcattttccacatactgccaccatcattatttattgctgtctccagagtctggtggtaaagagggtatggctttagaaacagacacacctgtctttggatctcagctcagatggtatttactatggaaacttggcctctctgagcctcagtttcctcatctgtaaaatgaaaataataatatgcatgtcacagagccccaggagaattaactgagaaaatatgtgccaaatggttggcacraagtagtcaataaatgtcagtgattcttcctgtcctcttcttcttcttccttctcatcttcctccttttccttatccaacttcttctcctccttcttcttcatcttataatcatcatcatcattcagtgagcttccctagtacccagagcagggctcacttgcacattgttaattgattttatgaatgagtgaatgagaggaaagaagaaagg

SEQ ID NO: 179517 - DNA, 572 bp, Homo sapiens
ctaccttgaatgtataattacaaaattataaatacattttccacaactaagcctttgtccaaaaaaagtcacttagcacatttttaaaggtcagtaagaaatggattttggacattaaagagatcaagtcactgaatttaacagcagcagccctcactaatctagaatcccatagtgccgaaggtgtatgagctagtcatttattacagcaatcagaagagacaggggcaggcacatctatyggaggtggtggcagagctggcaggagaggatggctgggctggtcaggtgagcatgtcctggagacagcagcaacagaaagcagtccagcaggctgtgaggcaggtggatggttccaactcatgtcttctttggtcttctaccacatacactgtggttttaggaggctcccgaggtctgtcctgccagctgtactgtgggtatctttgtatccttgataggtgtatccttgaagaggtgggtagggccccctcccataggtcctgggcccatgtgtttttgtggataaggtgggtatggggctgatggaccagggcctggatgtggtggag

SEQ ID NO: 179518 - DNA, 472 bp, Homo sapiens
cctggggattctggttagctgaagttgcaggttgcctaaaaaatctcttctggctgatactgtggrcaccttagaccctgcttcatcaaagagctctggggcaaggccatgcagttccatgtgacatgccctctattaggtgctttcctaccctgaagagtgaaatgctatgggatggtgagcacagagggatgacaagcagaataacagaatgaatccaaatagggtggtgttcaggcaaggcatatcagccaattcacagctgacatatttatacaaatatcggacagaaagtttcttggtttgaaaacggagtttctatggtacctttgttcaaggaaaaatgtgagcaatgagaggcattgttcaggaagatgggccagagctgtgttaatgactttggcgccagtccattttttcatctgtgacatttatcatgaagcaatattcgggatcttgattgggggctcat

SEQ ID NO: 179519 - DNA, 615 bp, Homo sapiens
agccaatatacacttatattggaaatgaacaattatgtaaatggttgatggatggtgagccaagtggatgatggaaggagaggttaaagataagcaaggagaggttaaagataagcaagggaaggaggcccatatggtaatgaattagagttggagacatcaatatgaaccaatgtttagcttaataaagatatctacatatggaaacatttatagatacatgtccattcatacacatacataggtttccttactcggtcagctaagaagrcctggaaggaaggagaccacagtagcaaagaacagacctagtatccaaaccttgatttctaacatcattctttaatcaaaggaaccagaactccctagagaaatggctgattctaggacaggggtaagtttatactagatgagccttgagcatcttgtagtacccaaacaaacaaacaaaaagacaacgatatagttatgtcaaagggatatagaaaccaacggaaagaggtcccggtggccaaacctggaataatttgagtaataaagtaaaccaaattagtattgaattatagcccaaagtataaaataatatccatgagtttatgctgatgtaaatcaatt

SEQ ID NO: 179520 - DNA, 560 bp, Homo sapiens
cctcaaacaacatagcacatatgaccacgtgccttcttcataccttcatttgaaacagtatttgaaaaatcgttggcaaattatggactgggttgatgataccactaccaagaactatactgtttattgcgtgtcccctttttcagagtctttcggagaaagatgcttggggaattcttgactaacaacagagctaagtaccattaactctcaatttttcaaaaaccgattacctagtgtgtggatttgccagacctcttgattgttctgyttcaggctatttaattgctcattagagagtcgaagggagaaggagatgagtcaaccacatctgtcacttgttagtgcctacagtaaaaatttattagtaaagaggatgaaaccatgcaataaacatcaatttcatttttatattatacccaatcttcattctcacagataatgaaaaatggactctattcagcccacattttcctaggaactaattttggaaattcccatgttgccatcactcaggatttttatgcatacaggcatccatatataatgtacatgaggca

SEQ ID NO: 179521 - DNA, 585 bp, Homo sapiens
agagtctttcggagaaagatgcttggggaattcttgactaacaacagagctaagtaccattaactctcaatttttcaaaaaccgattacctagtgtgtggatttgccagacctcttgattgttctgtttcaggctatttaattgctcattagagagtcgaagggagaaggagatgagtcaaccacatctgtcacttgttagtgcctacagtaaaaatttattagtaaagaggatgaaaccatgcaataaacatcaatttcatttttatattatacccaatcttcattctcacagataatgaaaaatggactctattcagcccacattttcctaggaactaattttggaaattcccatgttgccatcactcaggatttttatgcatacaggcatccatatataatgtacatgaggcattgcaattgcccctaatagaggccaatatataaattgcttcattgctaaccaatgacacaactgagcatgcgccctccagtcaagggtcatggtgctgtaaccatagtaatcaacayaatgcttccaacaattcaactaaaattaaagatagaattttttagaaatact

SEQ ID NO: 179522 - DNA, 544 bp, Homo sapiens
catttgtgcagcaccttgaagaccttctgaagaattcgtgtgtctaaaagatcagaaattatttcatagtacaataatatttaatattcgttgagggagaaagaaaatgttatcactattaattatccaaggggtttttcatatccatatttgtcagtcaataggatggcaataccaaaagcctaaaggtgcagaaaaactttactatattaacatagccaaattctacacatttaataaaattaaggtggaatcctgaaattttcatccatggcacaaaatatccctytaaggtgtttactaattgttaaatcatgattttggactttttattctgacttcctttcatttttaagtttttaatgaggtataataaacatacagaaaatggcacagatcaaagctttataatttgaaaccatttcaccaaattgaatacacctgaaaaaccaccactcagagaaacagaacattggcaatctctaaaagccctgctcatgcccctcttcctatcactattctctctcaatccttaagggtaacc

SEQ ID NO: 179523 - DNA, 485 bp, Homo sapiens
atctgtacatgtcaagcagtacctgaggtggacttcaaacagaaacagcatgatctgatggcttaaaagatggatgtccctagaaagcagaatgagccatgatagaaattgaaatcttgccttcatctttcaaaaacatgaaatcagtattctgcaacatactggggcactagttactcccctgatttaaacatcccagataaatggaattcatttaactctggatgtctggtaaggagtcagcgaccaaatatacccaattgaagatgagggtctctcatttctaagagggcaggaacttaactaactgcagctgcagtatacaatctcaggcttggcctcgtgactgccatgatgtataagcctcttaatagacataaaagaggagacagcacttatgagaatcttgtagctttcagtttmagcaaatgattcactcagtctcagaagcctcaaaacccagtgaaaaccttctatatgccaac

SEQ ID NO: 179524 - DNA, 562 bp, Homo sapiens
acacaattcggaatcacccaaccacttaggacactgggatctggaggcagcagcaaatgtatttcacattcaagaggagaaacattagcaagsacaacatttaatacgctgtgtgccgcaaggatcaggggcttagactttccatttcagcttcactagttagactgcaatctgaacaagagtgtgcagtgaggcagtgtgtttggccctcatctgtgccaagcagcagttttatcatcagtaaggaagcattaagtgaaccccagggatagcatatgtactgtatttagaggaaggggtgaacatcgatcaatgctgtgtaatttaaaaggttttcatgctgttcatgggaagctatataagcttagattcctttgtcccagttaaagagaaaatggttctagtaaagaaagatggatttaaaatagtggttacccatggagtgaacctaagtgataaaagaagacagataggataatggacatcgaccagcacattagaggatgcacatattatttcatatttgcagaagtgcacactttgggaattctgagctagacac

SEQ ID NO: 179525 - DNA, 562 bp, Homo sapiens
acacaattcggaatcacccaaccacttaggacactgggatctggaggcagcagcaaatgtatttcacattcaagaggagaaacattagcaagcacaacatttaataygctgtgtgccgcaaggatcaggggcttagactttccatttcagcttcactagttagactgcaatctgaacaagagtgtgcagtgaggcagtgtgtttggccctcatctgtgccaagcagcagttttatcatcagtaaggaagcattaagtgaaccccagggatagcatatgtactgtatttagaggaaggggtgaacatcgatcaatgctgtgtaatttaaaaggttttcatgctgttcatgggaagctatataagcttagattcctttgtcccagttaaagagaaaatggttctagtaaagaaagatggatttaaaatagtggttacccatggagtgaacctaagtgataaaagaagacagataggataatggacatcgaccagcacattagaggatgcacatattatttcatatttgcagaagtgcacactttgggaattctgagctagacac

SEQ ID NO: 179526 - DNA, 619 bp, Homo sapiens
gggaggagagtgccctgtgtgagttgtcttgaccctagagaggtatatggcaagccaacactataattgccgtatacagaagacaaaggctatataaaggtaggcacaggatctttaataaagcaaatgcaaaagggcagtaaaacaacacaaaggaagaagggcakagaaagcttcccaaaagaggaaaaagaagcgtgtattaaaaagcctagggcttagaatgcagatgatggtttccctggacagttctagcatagcattataaattcaaatcctgccggtgccaagacaggaatctaaatgtactcctagtgaaagacaataggaaatgagggaatttgagaagtagaccatccacatctatataaaggtattcaaatatttagtctttaaactgtgaaggcatctggatttggtctctgactcactagttttcaatccatggtaggctctagagtttaagcgagaaggcaaatggattttgagatgtctgttcagcccatcataagatgagaatgtagaccaggattacagacaaaaacccagtttaaaactaaaatatttatattgtatgagttttggaaataagatcataggcccagaatattttgaagta

SEQ ID NO: 179527 - DNA, 576 bp, Homo sapiens
tctgggtcacacagccttccttgagctctcatgtactacattcagtgaatgatatgtccatgttgaatatgctataaaaacatagatactatagatttggggaatataatcaagaaggatctatctcttcaggcaaattcctcttaatttccatttggagaaccatgaataarcattgtaaaattaagacacttttgaagtcttttagaggaaggtaagggaaaagaaaacaaagccacatttgataaggtgttaggaaatatgaattaagaaatttgcctaataatagtttcttacctgccaaatgtcatgctggcttgaaatattctgaactgacaagttgaacttttcaatctagttattgttttaaatgttaataggaagaggaagtgctggtccaccaaggtcttcatccaggtctttgtaagtgattacttgctgtctagtagacagtacatcacaatgtgggttggcattttttcaatttgtcttttgttttttttcactcctaggtcattttgtagtgagactgtgccctatacatgaacctatttgccagacccatcaagtgaattc

SEQ ID NO: 179528 - DNA, 576 bp, Homo sapiens
tctgggtcacacagccttccttgagctctcatgtactacattcagtgaatgatatgtccatgttgaatatgctataaaaacatagatactatagatttggggaatataatcaagaaggatctatctcttcaggcaaattcctcttaatttccatttggagaaccatgaataagcattgtaaaattaagacacttttgaagtcttttagaggaaggtaagggaaaagaaaacaaagccacatttgataaggtgttaggaaatatgaattaagaaatttgcctaataatagtttcttacctgccaaatgtcatgctggcttgaaatattctgaactgacaagttgaacttttcaatctagttattgttttaaatgttaataggaagaggaagtgctggtccaccaaggtcttcatccaggtctttgtaagtgattacttgctgtctagtagacagtacatcacaatgtgggttggcrttttttcaatttgtcttttgttttttttcactcctaggtcattttgtagtgagactgtgccctatacatgaacctatttgccagacccatcaagtgaattc

SEQ ID NO: 179529 - DNA, 546 bp, Homo sapiens
aaaacacattcccctgaggaagctttagattacttttcttactgcctgagttggctgagttcgtgacaatagagaatggtgtagggaggagcaaggtggtttcaactgctcatcgtcaagtctaatatgatgtcaggattatgtattttaaaaaaattatccacaaggaaaatatttatgcctcagtcatgatattttcatcaaattmccttattccaaatttcaagtatcgagttttgcaaaaatacctagctttgtttcataatcccaggcagggtgcaaactcaatggctgttcaaaagttatgagcagacagggaattaaaactcggagactctggtcttctaatctacactggatcaaaacacttcccactgatgataagatagagtctggaatatgggcaaaggagtttgtatttaaaacacattcagaattctcaaagtcttagagaatgattaaatacccagttcagtaagtggtgatagtttagtgccttgagagctataaattatcctaaaataatgacaaaactgaatggcacca

SEQ ID NO: 179530 - DNA, 383 bp, Homo sapiens
gtggagaggcctagtggagagaaacagaggcccctatccaatagccagcaaaccttgacacayatgtaagcaagccaccttgaaagcggaacttccatcttcaaccttggtttcaaatggctacagcaataatttcagcaaaggtctaatcaagtttccggtactttgcacgcactggataaattagaaattctgttaatattgtcattggacaatactggagattcagcagaaggtcctggtacagagagccctattctgtgcccacaaggacagtgtgtatattatctttgctttcccagggcccagtaggagttcaataaaatatgttttttgaatgccaattatatgccaagcactgttctaggcagtgaatgaatgaa

SEQ ID NO: 179531 - DNA, 453 bp, Homo sapiens
ggcagcgagccgagatcgcaccactgtactccagcctgggcaacagggcaaaaaaaaaaaaaaaaaaaaaagcagaagmagaagaagaaagaaaaaagaacatatgtgtaatatatgactgatgtgttgtattccagtgtctaacagtatagttaaaacaaattttaatcaccttgactagctagatgtttaaacttagaattttaggataaaatggaaaaactacttctgccttttcccaaatatgagaggaaatttgcttttttgatttgtatacccaagagtagaaaaagctctagaataagtttcaagaagcctgagttcaaaactgggctccctcacaaccgaagtcaaatccttctttcattctacaaacatttactgccagatgccctgttttgtgttgaggatacagaactgaatatgatgtggaatttgtcctcaaagaacttg

SEQ ID NO: 179532 - DNA, 453 bp, Homo sapiens
ggcagcgagccgagatcgcaccactgtactccagcctgggcaacagggcaaaaaaaaaaaaaaaaaaaaaagcagaagcagaagaagaaagaaaaaagaacatatgtgtaatatatgactgatgtgttgtattycagtgtctaacagtatagttaaaacaaattttaatcaccttgactagctagatgtttaaacttagaattttaggataaaatggaaaaactacttctgccttttcccaaatatgagaggaaatttgcttttttgatttgtatacccaagagtagaaaaagctctagaataagtttcaagaagcctgagttcaaaactgggctccctcacaaccgaagtcaaatccttctttcattctacaaacatttactgccagatgccctgttttgtgttgaggatacagaactgaatatgatgtggaatttgtcctcaaagaacttg

SEQ ID NO: 179533 - DNA, 573 bp, Homo sapiens
tataatactacctccttttacaaagaatttgttttgcttttttattctcattattattcaaaattttgcttaataattcttaagtaaataaaaagagaaaaatcattcttcgattttattttattttaaaaatatgttgtgggctacctaaccatttgacagggaaaaccataacagatggtgatacacattgtcatttggaaattggtaggtaaactcctgaaagctctccagcagcccctccttgtaaccctggaccaaagtctattcagacctaagaggatgctcatccttaatttgtaagtgaggagagacgctctcaggattaagccgcgctaaattcctgcctcctctttccacagttgctatgcccatgtgttagatgatgtctgcctgccacaactagcctgcacatcccgttgaggtgagagaaaactctactcatctttgttttacctcttcttttcatgtgacccaaccccaccacatcagtgtgcttagttcatggcaaacgactagttaataaatgctcgaagaatgacccsaaaatttaaaggtgcctgggacgaaaaa

SEQ ID NO: 179534 - DNA, 580 bp, Homo sapiens
tgtgaaaggaaaatttggtaagttggacttcattaaaattaaaaatttctctgtgatagacactgttaaaacaatgcaaaaagaagccaatgacttgaagagactatttgcaaaactctgatattggacttgcattttaaaatacacaaaaatttcaacaataagaaaactaacaaaatttttaaaatgagcatatattaaaaaaaaatcatgtcctttgcaaaaacatggatgcagatggaggccattatcctaagacaattagtgcaggaagagaaacctaaatgccacatgttctcacttataaatggaagctaaagattgggtactagggaacgtaaagatgacagcaatagacactagggactgttaaagggggaagggtggggcaagggctgaaaaactacctattggatamtaagctcactacctgggtgatgggatcatttctacccaaaccgtagcatcacttaatgtatccatgcaacaaacctgcactgtaccccatgaatctaaaataaaagttgaaattatttttttaaatgggcataaaatatgattagaaacctcaccaaaggag

SEQ ID NO: 179535 - DNA, 378 bp, Homo sapiens
atctggaccctagtgtgtgggtgagatttggatagttagagagagggtaaaaaggtattattcttgttataaggaagagcataagtaaaagttggggagcggaacaattctgattatagttttagtctttattttagtattcttttgctcctgaaactgctgtagatttcctcaataatttgagggagtgagccatgaagatatttggaggaaaagagtgttccagagccccaagaagggaacttgcctggagggtctgaagtacggaaaagaggccagtgttgctggaamggattgagcgatagggagatgggacggcttcgagtggcagaggcccaaatcactcagtgcctgtgggccattgaaaggaacttcatc

SEQ ID NO: 179536 - DNA, 601 bp, Homo sapiens
gtacatgcaatatttttataaacacatacaatgcgtaataattaaatcagggtaattagggtatccaccatttcaagcatttgttatttctttgtgttggaaatattcctaattctaattttggttatttaaaaatgtacaacgaataattaattctagtccctgttgtactaccaaatattctatcttattaattctaatgaactgtattcatagccattaaccaaccctctcttatccaccccctctctgctacccttcccagcctctagtaaccatcatactaccctatctctatgacytcaatgttttaaaaaaattttagcttgcacatatgagtgagaaccgcaaaattagtcttttggtgcctggcttattttacttaacataacctcctctaggtacatccacgttgttgcaaatgacaagagttcattctttttaatggctgaattatattccattgtgtatatgtattaatactatatatgggccacatttcctcattcacatctgggctgattccatatcttggctattgtgaagagtgctgcattaaatatgggaatgcacagatctcttttatatactgatttccttt

SEQ ID NO: 179537 - DNA, 568 bp, Homo sapiens
tgtggcattaaatattaatttgctgatgaaaggtataattttaatatatgtttatagtgaaaggaaaatattaatcaaatacaactaaatgatagaataaaatgaacactgtcttttttctttttttttttattctcttaagaaaatttgtaactctttgtttccttacttatggaaaaaataaaagttgtaaatctaacttacataaaccacaaaaaaactaaatacattattttgttcactttagttatttacgctatgtttacataaagtgaataacaaatttccaaatggctaraagtttttactcgattatgctatgatcaaacttaataaataaaaaccgtcatctaattctatgaacataatatgttattttttcagccctgtttcatttaacattatatatttatctgctcctcagttaaagcagacataagcgatacaatgttatatgagactatcatatcaaatatgttactatcattattgcaaatgattcctcaatttaaccttttttaaggctttgtgtaacaaagaattacatttaattgtgtttgggccaggc

SEQ ID NO: 179538 - DNA, 568 bp, Homo sapiens
tgtggcattaaatattaatttgctgatgaaaggtataattttaatatatgtttatagtgaaaggaaaatattaatcaaatacaactaaatgatagaataaaatgaacactgtcttttttctttttttttttattctcttaagaaaatttgtaactctttgtttccttacttatggaaaaaataaaagttgtaaatctaacttacataaaccacaaaaaaactaaatacattattttgttcactttagttatttacgctatgtttacataaagtgaataacaaatttccaaatggctaaaagtttttactcgattatgctatgatcaaacttaataaataaaaamcgtcatctaattctatgaacataatatgttattttttcagccctgtttcatttaacattatatatttatctgctcctcagttaaagcagacataagcgatacaatgttatatgagactatcatatcaaatatgttactatcattattgcaaatgattcctcaatttaaccttttttaaggctttgtgtaacaaagaattacatttaattgtgtttgggccaggc

SEQ ID NO: 179539 - DNA, 631 bp, Homo sapiens
ccaccgactcttattttccagataaatctgaaattcagagcatttttgtacaagtgtccattatcttaattcaatctagaagatgcaagcaaattccactttcaaacgtatatgcatactaacttgcaattctttcttttttcatatgttttaatgctgtaaactttcataaattcttctgtttaattaatgtctaatgaaaaaatgagagggtaatttttgaatttttayactgaattcaattacttgttcaagatgactgtgttagcatttcatacaataattggtcttaatataaggaggtattcttttctattttagaaataatttactaatatcttcctgtgctaaaaaatatattagcattgttaccattcccctccccaagcatgtccttttcctctctctaacttactatttgctacagagtttagttaaggcaatatttggtgtttacatttctgtgtttatttatgaacatctggataaccgcagagacatgttgattagtgctaaaggcaggatggcaacatcagcctcacctggcagcttttcagttggagtagtagctctgggagacacttctagaatttaaattggaatctacacattagcaagatttcccaggtat

SEQ ID NO: 179540 - DNA, 594 bp, Homo sapiens
ttttcctctctctaacttactatttgctacagagtttagttaaggcaatatttggtgtttacatttctgtgtttatttatgaacatctggataaccgcagagacatgttgattagtgctaaaggcaggatggcaacatcagcctcacctggcagcttttcagttggagtagtagctctgggagacacttctagaatttaaattggaatctacacattagcaagatttcccaggtatgcttttgaagattctgatttagtagatcttaagtatgacttgagataagattatctaaatatctccaaaaatatcttacatgacgccagtgctctggttctccaaatactctttgtagcaagaatgtaggaaaccatgattaccttttctcttggtataacattttctaacaactatattcaaattgwctttttctacttattttttaaaataaatatctgtcagtaatccaggcctgtattttctgacagaactcaatacagtcaaatgcaccaggttacagatctttcttctctttccccccttccctttgggaaaaagagccttgcaattttacattggctcttctattctgatt

SEQ ID NO: 179541 - DNA, 525 bp, Homo sapiens
gtctcaaaaacatctgtcaataatcatggcactaattcctggaaaccctggcattactgatgaaatgttaaagagttaggccaggttcatggctcatggccgggcgcagtggctcatgtctgtaataccagcatttttaaagactgaggtgggcagatcacttaaggctagaagttcaaaaccagcctggccaacatggcaaaaccccatctctactaaaaatmcaaaaaaaaaaaaaaaaaaaaaagaaaattagtagggcatggtggtgcatgtctataatcccagctactcaggaggctgaggagaatcaactgaacctgggagatggaggttgcagtaagctgagattgtgccactgcactccaacctggtgacagagcaagactctgtcaaaaaaaaaaaagttaaatagttttggattgagacacactcttcatggagagcctgttctgtcagtatacaggcacctagaaatactttggaatatgaattataaacaacccaatagctaggtttttggtc

SEQ ID NO: 179542 - DNA, 596 bp, Homo sapiens
gctctgtgcagccttgggacacaatgctctgcttcccagccaccccagctccagcaatggtgaaaagggaccaaggtacagcttgggccattgcttcagagggtgcragtcccaagtcttagtgtcttccacatggtgttgggcctgagggtgcacagaaggcaagaattgaggtttgggagcctctgcctagatttcagagggtgtatggaaacaactggatgtccagggagaagtatgctgcaggagcagagccctcatggagaacctctactagggcagtgtggagggaaaatatgggattgaagacccaacacagagttcccactggggcactgcctagtgaagctgtgagaagatggccactatccttcagaccccagaatggtagatccaccaacaacttgcactgtgtgccaggacaagctgcaggcacttaatgccagcctgtgaaggcagcctcaggtgctgtaccctgcagagccacagggaagcagctgcccaaggccttcggagcccacctttttcatcagtgtggacctgatataagacataaagtaaaaggagattattttggagctttaagatttaatgac

SEQ ID NO: 179543 - DNA, 596 bp, Homo sapiens
gctctgtgcagccttgggacacaatgctctgcttcccagccaccccagctccagcaatggtgaaaagggaccaaggtacagcttgggccattgcttcagagggtgcgagtcccaagtcttagtgtcttccacatggtgttgggcctgagggtgcacagaaggcaagaattgaggtttgggagcctctgcctagatttcagagggtgtatggaaacaactggatgtccagggagaagtatgctgcaggagcagagccctcatggagaacctctactagggcagtgtggagggaaaatatgggattgaagacccaacacagagttcccactggggcactgcctagtgaagctgtgagaagatggccactatccttcagaccccagaatggtagatccaccaacaacttgcactgtgtgccaggacaagctgcaggcacttaatgccagcctgtgaaggcagcctcaggtgctgtaccctgcagagccacagggaagcagctgcccaaggccttsggagcccacctttttcatcagtgtggacctgatataagacataaagtaaaaggagattattttggagctttaagatttaatgac

SEQ ID NO: 179544 - DNA, 272 bp, Homo sapiens
acttctttcctttataagttaccgagtctcaggtatttctccatagcagcattagaaggaattaatacagacaatatctattatgccagactgtttgttcattttcttctgtgaccaggcacctgcaagggtagtgtcaagaaactgctgaactgttggttgtttattcaagtgtatctattctatgtcagtattaaagaaagatgtatccaacaaataaayaaaccaaccaaacaaacaaaaactgagttttattcatgtttgcctaaatg

SEQ ID NO: 179545 - DNA, 503 bp, Homo sapiens
caatagctatccactctgctctgccaacctctgctgatattttaattgctttcctttgtttttatacacagttgaaagttttgagataaatagcaattaaaatatacaaatatgttcagtggtaatcatcagccttttctgcaacaagccaaataatgagactttgacagtatttgatgagtttatattccattaaatttaaattacaatagaaacatgttttcagtgctagattatagcaagtgcaaaattcagaagcaactaatcttagttgtctatgcatcaagagtagaccattattattgacattatgaacatctccagcataaggcgacaaaagctaacctttctcagggtcatgtgaagtggacattttacagtgaataggtttaaatactycatatgttgaaaattgttttagctatttgatattttgctgacaaataaatgtctgttacttatttctaaatgtatacctgatttttatttaataataattgtag

SEQ ID NO: 179546 - DNA, 539 bp, Homo sapiens
gcagcagtattactcttcttgaaatattttaaggccatatattctctagacaatcctgtatgaattgttctaacaaaagccctccatatgtgccaaattattcctcaattattgctgtgcaacatcttcctttaaacccacatgggttattgggccacccttgtccagatattccatgttcactctaccctttacttttggtcacataaatatttttttccctctggaaaagtagctcttattttttccaattactgagattttttttcaaycaagatttgtattaagcccaagcatctccataaaacctctgttgctaccctagtagacaattgtctcttctctaaactcttaggtcacattgcatctgtctacttatttgtttcttaccatgcaatagtgttttgtggtttctatttattcctattttaagtcctaccacaagccctatatcttattatttgtgtgtgtgcaaaatcatttatttgcatcaccattctgtaacatagagcttagaatatattaggtattcaaatatg

SEQ ID NO: 179547 - DNA, 536 bp, Homo sapiens
ctggtttaatctaagagggttttatatttctattaatttattcatctcctctaggtttyctagtttgtgtgcatcaaggtgttcatattagccttgaatgatgttttgtatttccatggtatcagttgtaatatcttccatttcatttctaattaacttatttgtaccttctttcttcttttcttggttaatttcactaatagtctatcaattttgtttatcttttccaaaaaaccagctttttgttaatttatctttcatttttgtttgtttgctttaatttcatttagttctgctctgatctatgttatttcttttattctgctgggtttaggtttggtttgttcttgcttctctagttccttgaggtatgaccttagattgcctacttgtgttctttcagactttttgatgtaggcatttaatgctatgaactttctcttagtaccatttttgctttatcccagaggttttggttggttgtgtcactatcaactttgagtcaaataattttttaaatttctatcttgatttca

SEQ ID NO: 179548 - DNA, 536 bp, Homo sapiens
ctggtttaatctaagagggttttatatttctattaatttattcatctcctctaggttttctagtttgtgtgcatcaaggtgttcatattagccttgaatgatgttttgtatttccatggtatcagttgtaatatcttccatttcatttctaattaacttatttgtaccttctttcttcttttcttggttaatttcactaatagtctatcaattttgtttatcttttccaaaaaaccagctttttgttaatttatctttcatttttgtttgtttgctttaatttcatttagttctgctctgatctrtgttatttcttttattctgctgggtttaggtttggtttgttcttgcttctctagttccttgaggtatgaccttagattgcctacttgtgttctttcagactttttgatgtaggcatttaatgctatgaactttctcttagtaccatttttgctttatcccagaggttttggttggttgtgtcactatcaactttgagtcaaataattttttaaatttctatcttgatttca

SEQ ID NO: 179549 - DNA, 490 bp, Homo sapiens
gatattggcctatttagagtttcaatttattcccgattcaatctgtggaaattgcatgtttctaagaatttacccgtttcctmtagattttctagtttgtgtgcatagaggtgttttgtaatagtctgaggatcttttgtatttctgtgtattcctcaattgtgatagaacattggattgtcttttgttaactcaacatcatcttcacccctgctaggaatccttctaaataaatttcccaacatcttcttccctatgtggttctatgttaacatctgtcaatgagaaaccatctcacactgtttagaagatgtgactaaaagagacagttacaggcagacaagtaggcagatggcagttatatgattttctgacagtctcctgtgaatcactcactacagtttagctgaaacatattatagtaaatttttgttaatcacttgagttggttctgcaaattaagatagtcagtgggaggctcccagaggtt

SEQ ID NO: 179550 - DNA, 448 bp, Homo sapiens
tctcattagtaatgttcttgtttccctgaaaaaaaaaaaagttaatgtttatgctgtcacataatactttagcatctgcttttttcatccatcccccaagggtaagaaaattgttaagctttttcctcctctcttggaattcatcagttactgtcaatgaagggcctgtgctatgcacagtaatgtgctatgttttatggacatgaaacgtaaaagagcaacaacacatgtttcttgccctggaatatcagtcaaaacagtggcgttaattttgagatactaaagacagcayatgatccttcacatcatcacaatatagtgacccaatatctctgaagggaaagaaaaagggcttatatgaaatgtgcaaacatgaagtatgataaaaatgaaaattaacttttggtttgcaagagtaaatattgaaatattttcattaagttagaat

SEQ ID NO: 179551 - DNA, 687 bp, Homo sapiens
ctaggcctgagaagcccaggagagctgacaagaacacagctagcaagataactaactctaggagctggacctcttaacaagacttgtttggtctttggtagaggaacatagcctcttccaaccccagtacaagcaagagaggagcagagccagggaaatatacacggaggacctcttctttctccaggattatgatctgctcgtgactrttgatttgcagaacccaactagaagtcaaagggcaagggagccttggtgtagttgtggtacatataggctaagtctctgaggtatggatcaaagaggtgaggggtgtggtatgtgtagacaaacatgttgttgggggcagatacacacacacagctactctgatgaaaactctacaaaagatctggaagataactgaatttaaaacatcaagaaattcattaagaaattaaggctgggcgcggtggctcacacctgtaatcccagcactttgggaggccgaggcgggtggatcatgaggtcaggagatcaagaccatcctgactaacacggggaaaccctgtctctactaacaaatataaaaaattagccaggcatggtggcaggcgcctgtagtcccagctactcatgaggctgaggcaggagaatgttgggaacctaggagacggagcttgcagtgagccgagatcgagccactgc

SEQ ID NO: 179552 - DNA, 687 bp, Homo sapiens
ctaggcctgagaagcccaggagagctgacaagaacacagctagcaagataactaactctaggagctggacctcttaacaagacttgtttggtctttggtagaggaacatagcctcttccaaccccagtacaagcaagagaggagcagagccagggaaatatacacggaggacctcttctttctccaggattatgatctgctcgtgactgttgatttgcagaacccaactagaagtcaaagggcaagggagccttggtgtagttgtggtacatataggctaagtctctgaggtatggatcaaagaggtgaggggtgtggtatgtgtagacaaacatgttgttgggggcagatacacacacacagctactctgatgaaaactctacaaaagatctggaagataactgaatttaaaacatcaagaaattcattaagaaattaaggctgggcgcggtggctcacacctgtaatcccagcactttgggaggcygaggcgggtggatcatgaggtcaggagatcaagaccatcctgactaacacggggaaaccctgtctctactaacaaatataaaaaattagccaggcatggtggcaggcgcctgtagtcccagctactcatgaggctgaggcaggagaatgttgggaacctaggagacggagcttgcagtgagccgagatcgagccactgc

SEQ ID NO: 179553 - DNA, 687 bp, Homo sapiens
ctaggcctgagaagcccaggagagctgacaagaacacagctagcaagataactaactctaggagctggacctcttaacaagacttgtttggtctttggtagaggaacatagcctcttccaaccccagtacaagcaagagaggagcagagccagggaaatatacacggaggacctcttctttctccaggattatgatctgctcgtgactgttgatttgcagaacccaactagaagtcaaagggcaagggagccttggtgtagttgtggtacatataggctaagtctctgaggtatggatcaaagaggtgaggggtgtggtatgtgtagacaaacatgttgttgggggcagatacacacacacagctactctgatgaaaactctacaaaagatctggaagataactgaatttaaaacatcaagaaattcattaagaaattaaggctgggcgcggtggctcacacctgtaatcccagcactttgggaggccgaggcgggtggatcatgaggtcaggagatcaagaccatcctgactaacacggggaaaccctgtctctactaacaaatataaaaaattagccaggcatggtggcaggcrcctgtagtcccagctactcatgaggctgaggcaggagaatgttgggaacctaggagacggagcttgcagtgagccgagatcgagccactgc

SEQ ID NO: 179554 - DNA, 587 bp, Homo sapiens
acagtcagggagcctaatctattttaattgcaggcttttttattaacatctgtgttgaaatgtttccacattctcttttccactgctgtkgggataatgtccaagttcgttagtaagatgtttaagtgtgtttttaatgaggcttcaacgatgctgtcagtcatcacatgttttaactattctgacctacttgataattctcaaacataaacttcatatttccatatatttggtaatttttccttttgttggagtgtcctgccctttccctttttatatctgtcaaattgttatttaccctttattacatagctgtcttagtcagagattgtttggatgcagtaccagagatcaccttaagctaaattttataaaaactgtgaatttaatggaaggacatacaaggctatcaaacagaacctaagggcgagaactgcagttaagcttcaggaggactagagtcagaaattggaaaatagcctggaatcaaaactctttttctcactctccttgtctctttctgtgaagctaaatgtcattttattatctttccttcagtgtaggcttcattcttctatctctctgaa

SEQ ID NO: 179555 - DNA, 600 bp, Homo sapiens
ctgcagttgcaagcactgctggcgagtattcttgctacattcaggacaagggttaaaatggttgcttgcggaataaaagtgctgtctgaggataaaagacaataagtgtatagtgaggaggctaaattgtatacttttgtttgcctagaaaaacctattaacaacagcccctttttggaaaagtttactaataaacggcattcaataaatcaccagatcaaagatttatattttagtcttaccagagtgggaacaaatgagaacaagcgaaggctatcctgagcttgctatagcaatggagtcagctaccatcagcagtgtttggtacagactcaaaggcaggcaaaggaataggaatgctttatagtgggaaaaggaaagccttcaggtgtgccttgattagggsttctggcgtggaaaagccataggtgggataaactagaagtgaggcatcctatgtgattggcttggagaacatatttggatgcctctagagggtcctaaagtcatgcaaaaattggggaagccatcgattattaatcaagtccagggcatttggggccacttgttaacaaggttatcatttggcttcctggacca

SEQ ID NO: 179556 - DNA, 600 bp, Homo sapiens
ctgcagttgcaagcactgctggcgagtattcttgctacattcaggacaagggttaaaatggttgcttgcggaataaaagtgctgtctgaggataaaagacaataagtgtatagtgaggaggctaaattgtatacttttgtttgcctagaaaaacctattaacaacagcccctttttggaaaagtttactaataaacggcattcaataaatcaccagatcaaagatttatattttagtcttaccagagtgggaacaaatgagaacaagcgaaggctatcctgagcttgctatagcaatggagtcagctaccatcagcagtgtttggtacagactcaaaggcaggcaaaggaataggaatgctttatagtgggaaaaggaaagccttcaggtgtgccttgattagggcttctggcgtggaaaagccataggtgggataaactagaagtgaggcatcctatgtgattggcttggagaacatatttggatgcctctagasggtcctaaagtcatgcaaaaattggggaagccatcgattattaatcaagtccagggcatttggggccacttgttaacaaggttatcatttggcttcctggacca

SEQ ID NO: 179557 - DNA, 612 bp, Homo sapiens
gtcttctcttccttaactcacactccttaaatgatctcctatttgatcctgtggcttcaatgaccctttatttgctaattaccaaacatttctctctcataggttgtatacctgtatcttcagccacctattggatatatttcttggagactggagtaatccaggttcttatcctagataaatattgaataatctaagtaattattttttggttttcatccagagggggaaaacaaaataaggatccatatggagatgaaaatgaaacattaattttagattagagctatttggtaatttctaagttggagaaagtracaaaactcccattcattttttcactttcctgccaaccatcctcggtacgtacccatatactctctctccctcgcccccctttctctctcttcttgccttcaggttagaagagaaaactatgacctttctcatattccatgcagcagaggaacaacagagagagaaaagagataaatcttcactaattttttttttggccccactcttgtcaatttaactcaaaggatgtcaaagtttctctaacttggcaaatagattagttgttttttcacacacatggagagatgtttgaga

SEQ ID NO: 179558 - DNA, 599 bp, Homo sapiens
cacacatacgaaaatcatgttctctaaaaagaagtaaaattcttagaattgcaaagaacaccggaatatatttcacagaaatgcatttcattttatcatttattttgttttttgtcttggatgaaaatgcatttcaaagttttaccattttaagtatatgctctcaatttttgttctatttatatacagaagatggcttaaactttttccatgaaagtaattttttaacactcttcaactatgagaaattaaagattataggatttctaataagttgaaatcttttgtaagagcactgctaaaaagtcttagttatacaagtttacaagtacyaatgtgcacggtgtcacttttttatgtgataaagaaataatatttttccttttcatgactttgttctgaatataagggatagagaaaataaaataatttttttagtggtagtagctaacatgtgcgatatggttttgttgtgtccccactcaactctcatcttgaattgtagcttccataattcctttgtgttgtgggagggacccggtgggagaaaattaaatcatgggagcagtttcccccatactgttctcttggtagttaat

SEQ ID NO: 179559 - DNA, 599 bp, Homo sapiens
cacacatacgaaaatcatgttctctaaaaagaagtaaaattcttagaattgcaaagaacaccggaatatatttcacagaaatgcatttcattttatcatttattttgttttttgtcttggatgaaaatgcatttcaaagttttaccattttaagtatatgctctcaatttttgttctatttatatacagaagatggcttaaactttttccatgaaagtaattttttaacactcttcaactatgagaaattaaagattataggatttctaataagttgaaatcttttgtaagagcactgctaaaaagtcttagttatacaagtttacaagtactaatgtgcacggtgtcacttttttatgtgataaagaaataatrtttttccttttcatgactttgttctgaatataagggatagagaaaataaaataatttttttagtggtagtagctaacatgtgcgatatggttttgttgtgtccccactcaactctcatcttgaattgtagcttccataattcctttgtgttgtgggagggacccggtgggagaaaattaaatcatgggagcagtttcccccatactgttctcttggtagttaat

SEQ ID NO: 179560 - DNA, 588 bp, Homo sapiens
ctcaccctatattctcaacataacagccaaagtaatcgttaaacacaaatcaaatcctattactcctctgatcaaaatctctcaatagctttcataacacttacaataaaagccaatttcttcaaaatagctttcaaagctccacacaatctagccttcctgatacttctctcttatctcttactactctcctatttactcatattatagtccatccatgctggcctccttaatactttttaaaaacattacgcaaagcatttccacagggcctttgcacttgtcatttgctctgcctagagtaatttttacacagtcamgcttatggctcatcttcaggccttagagatgtcaacaagccttgcttgtccaatctatttaaattttcatcactttctcttttcaaagagttatctccttaatttttttcctataacatttaccatcactgatatatttgtttgcttattgtccatcttgcctctggtagaatataaggtataaagggcatatattacttatatcatttatattacctaatagagaacttggcagaaggtaaatataactctgatatttgatgtataa

SEQ ID NO: 179561 - DNA, 544 bp, Homo sapiens
ctgaaattcagcatcaccttttaaacttgggcgtttggtttaaatacgagtatatattttctttattaaattaaaatgcaccctgtgtgatacaggaagaatgaggtggtagcctttgctgaaggaacaagtagaactaaaggaagcttaaaacaatctgcctttaccctacctgctgtgtaatcaggtatgttgaaaggtaatgaagcagcttaattattatcttttaaatatctgtttaaaatactattatttctttgaaattgctctgattaaacatttctttgatctcagyaaataaggaggtttgtaaaattccctttggggcaggagcctacaaattcctctatcaactggcagatgattgtgcgaaaggagcagagagaagagtctgtctcaatatgaagaggacacataaaatttccatagttatctattagtggaaatggacatctctgaaaggagctctttgtcctcagaggagttcaaatggaagacatgtgtgctctgcagggaacactggagaaaagaaaggtaatacata

SEQ ID NO: 179562 - DNA, 512 bp, Homo sapiens
ttaacaggtgagaaaattgatgcttaaagagggacttgtccaaagtcattcagtgagcaagtgacagagcaaggactcaaacccaaacactggagtccagagcccaaccttcttcacaaagtcagggctagaaaaggccattagagaagattctgcctacccctcccgttccacagcaagggagcaagtccagaaaacagaggaatttataaaatgtagctgatcttgctcaaagattcttcctgagggtggggctgttgagtactctccagaagaaatgaccagttagtcttttactcttattattacatagagttrtacatgataagtgctcaataaattgcacaacagagcctatggtttctcacattattaatgatgaatatcagacacctggttggtgtagtagtccattctagcaatgctataaagaaatacctgagactgggtcatttataaagaaaaaggttgaattggctcatggttctgcagactgtacagaaagcatgatt

SEQ ID NO: 179563 - DNA, 512 bp, Homo sapiens
ttaacaggtgagaaaattgatgcttaaagagggacttgtccaaagtcattcagtgagcaagtgacagagcaaggactcaaacccaaacactggagtccagagcccaaccttcttcacaaagtcagggctagaaaaggccattagagaagattctgcctacccctcccgttccacagcaagggagcaagtccagaaaacagaggaatttataaaatgtagctgatcttgctcaaagattcttcctgagggtggggctgttgagtactctccagaagaaatgaccagttagtcttttactcttattattacatagagttgtacatgataagtgctcaataaattgcacaacagagcctatggtttctcacattattaatgatgaatatcagacayctggttggtgtagtagtccattctagcaatgctataaagaaatacctgagactgggtcatttataaagaaaaaggttgaattggctcatggttctgcagactgtacagaaagcatgatt

SEQ ID NO: 179564 - DNA, 591 bp, Homo sapiens
aattttatattacaaagttatgtatcaagacttctttatcctgaacttgtacaaaaactcagttacccaaatgtctacctaagatactgctttattacatcttccagttgagtcaaagttcaataattgatttagaaatcatttcaccagttaacagctctcttttggctcccaaatgtcaattctgagaaaagggaggaacagagtttctcacacacaaggtaatctttctctggagtgaaaacggggccattcttcagcgctcctcattgattcgcatgaactttccttcccctctgaaattgaattgtgtttgggaactgagatgactgaggaaactctgagcctttgttaggaaaagaaaagaaaagcagtcaattgaggtcttaagccttgggtataagggcttcytctggagtgcgtgggctgcctgacttcccatctcaatatgttgggctctgcctgaatttcatggccaccagaaacttctcttgccaagctatccaattccagtcttcatatcacttgacaggccagcagatcagtccccacttctctgcttccaaccacattgttgcctttttatatcta

SEQ ID NO: 179565 - DNA, 379 bp, Homo sapiens
ggataacctgaatttcttcttcataaccctcatcatacttaaaaatgtctggtttgttgtctatctcacctatagattatgaattccatgagggcgagaccacatccattttatttcatcattgtgtcttcagtgttatgtatagcaccctgtccataatgtgttcaataaacattttaatgaataaataaataactatgtagaagtcatcttttactgttcagaagttgtcacttctcctgaatctatttttgctgtgtgctatagtgtasgtctacatactaaatggaacagaaagatgaagtactacctgaattatccccacaacaacacaaagcactccattctcaattatgtatgaagttcaataaaaatttgt

SEQ ID NO: 179566 - DNA, 539 bp, Homo sapiens
tcactttaataaatccctgcttttgctgccttgttcctgtgtttcgttcctttattactttgtgcattttgttcaattgtttattcaaaacgccaagaacctgaacaacttacactcaaggccctctttccagtaacacctgtgtaaaacatttacacttatgaaacaaccttcttggaagtatagtttataattgctgtctccactttttcacctttcattcattcttttatctgagttctttaaagttataaaagtaaccagtatcaaataataaattttttaaagttaatattttctgctaccttcctttgcatttctttccttctcctttgaaagctgctaataataatattttgggatagtctcttgtactcctttctttaccctyacatccaatcactcttcatccaacttattggacagtaaattgagtatcatttcttgtagtctttatattctttgagctcttaggaatattggacaccgttaattaacctttctttttgaagaccctctcttttcttgctttctatgac

SEQ ID NO: 179567 - DNA, 471 bp, Homo sapiens
ttattattagtcttctggtatctaattcaaatgtgatcggaagttgaatgaaattcctcctgttttatagcaaagttgagagaaataataaataattaccaacatcaactccctcccatatttaaaaaagagggcagaacaaacacattgttcatgagtattaatcaaaacagagctaattccaaccaaactatgkaagagaaaactggaaatctcctggtatttgttgagaggagactttgaggacataataagtcagtattcctattttttccgcatctattgctgtaaaaagtacaatttgaaaataattcacatataagtacctgaaaagaaaaaaaaagtcattcaaatcaagggaaaaaaatctaaaacatgaacaaagataaagtttacaggtaacattctgtatgacaatttttctacttgctgtttgaaacaaacaaaaaaaacatgagcagttttattttt

SEQ ID NO: 179568 - DNA, 442 bp, Homo sapiens
atataaattagccaagtatggtggtgcacacctgtaatcccagctactcgggaggctgaggcaggacaatcgcttgaacccrggaggcggaggttgcaatgaactgagatggcgccactgcactccagcctggtcgacagagtgagactccatctcaacaaataaataaataaataaataaataaataaaagctttctgagaacatttgatcttttaccagtgttttgttggaaaagcaggtgtgaagttatttcatttatagggaatactttatattacttcatgaatttctggagttatgtattaagacatcacccacagtcaggaccaggaaacttaataaatagaaattcagttttaagattgtctaacgaatttataaatttccccttagtcctgtttatagaggcttaggcagactagttttcaaagaacaaaggc

SEQ ID NO: 179569 - DNA, 550 bp, Homo sapiens
ttgaaaaactgctaacctaaaagcctgagatgagattgatttgagtaacaaccccatcttctgtgtagtgtggcaggccttgtgtcaattaaacttttcttcagtgcaatgccatggtctttatttatgcagcgggcaggaagaactgatcaagcaattatccttctactcttgtcttatttggcctattctstatacctcagtcagaatgacccagtaaaactgaaaagaagacaaggtcatttctctgcgcaaaatttttcaatgatttgctgtctttcttaaacagaagcgaaaatctttgacaacaacctacaaaatgttttgcagtcagtcccacttcctccccaaccctaccttgttatttccatgacctcaattcatattatagcctctttcattcattgtcctctggctacacttttttgcttgcttgtcttcctgaacatgccaagcattctcctgcctggaagtctactctggttattctttgtttgcattgctcttcaaccaactagctacatggatatctcttctcttgcaaatttct

SEQ ID NO: 179570 - DNA, 550 bp, Homo sapiens
ttgaaaaactgctaacctaaaagcctgagatgagattgatttgagtaacaaccccatcttctgtgtagtgtggcaggccttgtgtcaattaaacttttcttcagtgcaatgccatggtctttatttatgcagcgggcaggaagaactgatcaagcaattatccttctactcttgtcttatttggcctattctctatacctcagtcagaatgacccagtaaaactgaaaagaagacaaggtcatttctctgckcaaaatttttcaatgatttgctgtctttcttaaacagaagcgaaaatctttgacaacaacctacaaaatgttttgcagtcagtcccacttcctccccaaccctaccttgttatttccatgacctcaattcatattatagcctctttcattcattgtcctctggctacacttttttgcttgcttgtcttcctgaacatgccaagcattctcctgcctggaagtctactctggttattctttgtttgcattgctcttcaaccaactagctacatggatatctcttctcttgcaaatttct

SEQ ID NO: 179571 - DNA, 550 bp, Homo sapiens
ttgaaaaactgctaacctaaaagcctgagatgagattgatttgagtaacaaccccatcttctgtgtagtgtggcaggccttgtgtcaattaaacttttcttcagtgcaatgccatggtctttatttatgcagcgggcaggaagaactgatcaagcaattatccttctactcttgtcttatttggcctattctctatacctcagtcagaatgacccagtaaaactgaaaagaagacaaggtcatttctctgcgcaaaatttttcaatgatttgctgtctttcttaaacagaagcsaaaatctttgacaacaacctacaaaatgttttgcagtcagtcccacttcctccccaaccctaccttgttatttccatgacctcaattcatattatagcctctttcattcattgtcctctggctacacttttttgcttgcttgtcttcctgaacatgccaagcattctcctgcctggaagtctactctggttattctttgtttgcattgctcttcaaccaactagctacatggatatctcttctcttgcaaatttct

SEQ ID NO: 179572 - DNA, 550 bp, Homo sapiens
ttgaaaaactgctaacctaaaagcctgagatgagattgatttgagtaacaaccccatcttctgtgtagtgtggcaggccttgtgtcaattaaacttttcttcagtgcaatgccatggtctttatttatgcagcgggcaggaagaactgatcaagcaattatccttctactcttgtcttatttggcctattctctatacctcagtcagaatgacccagtaaaactgaaaagaagacaaggtcatttctctgcgcaaaatttttcaatgatttgctgtctttcttaaacagaagcgaaaatctttgacaacaacctacaaaatgttttgcagtcagtcccacttcctccccaaccctaccttgttatttccatgacctcaattcatattatagcctctttcattcattgtcctctggctacacttttttgcttgcttgtcttcctgaacatgccaagcattctcctgcctggaagtctactctggttattctttgtttgcattgctcttcamccaactagctacatggatatctcttctcttgcaaatttct

SEQ ID NO: 179573 - DNA, 457 bp, Homo sapiens
aaatttattatctgtgccctatttctttttttctcctcttaggacttctgttgaaataatgttacattttctcactctgtcctgtatatactttattctcttcctgtattttccttttatttctttgtctcccatgcttgtggtgttttttacagtgtaaacttagcttagctagaaatatgttttccatatgtgcttccctatatgcttccaggttatagtgggccaaaatagaagttggtacatgatttggaaagtggagaggaagcaacagccataacctctgttggttgttttggtgttaggctgtaagaaccagaagcatcaacgctcagagaagcaaattcaaaattaaccatactcttcccaactctgcatttgtaatattcacctgctagccctattgaccaasagtgacctcaggcctactccatctcagatgcaaaggcaataccct

SEQ ID NO: 179574 - DNA, 521 bp, Homo sapiens
tgttaagcattcaaacctaagaataattggtgtttccgtggaagaagagaaatcaaaaagtttggaaaacatacctgagrgaacaatcaaagacaacatccccagccttgctagagatctagacatccaaatacaaaacactcaaagaacacctgggaaattcatcgcaaaaagatcattgcctaggcacatagtcattaggttatctgaagtcaagacaaaggaaagaatcttaacagcagtgaggcaaaagcatcacgtaacctataaagaaaaacctatcagattaacagcagatttctcagcagaaatcctgcaagccagaagagattgggggtcctatttttagcctccttaaacaaaacaattatcagccgagaattttgtatccactgaaataagctttataaatgaaggaaagatacagtcttttccagtcaaacaaaagctgtgagaattcgccactaccaagccagcactacaagaaccgctaaaaggagtgataagacttcaaaataaac

SEQ ID NO: 179575 - DNA, 521 bp, Homo sapiens
tgttaagcattcaaacctaagaataattggtgtttccgtggaagaagagaaatcaaaaagtttggaaaacatacctgagagaacaatcaaagacaacatccccagccttgctagagakctagacatccaaatacaaaacactcaaagaacacctgggaaattcatcgcaaaaagatcattgcctaggcacatagtcattaggttatctgaagtcaagacaaaggaaagaatcttaacagcagtgaggcaaaagcatcacgtaacctataaagaaaaacctatcagattaacagcagatttctcagcagaaatcctgcaagccagaagagattgggggtcctatttttagcctccttaaacaaaacaattatcagccgagaattttgtatccactgaaataagctttataaatgaaggaaagatacagtcttttccagtcaaacaaaagctgtgagaattcgccactaccaagccagcactacaagaaccgctaaaaggagtgataagacttcaaaataaac

SEQ ID NO: 179576 - DNA, 552 bp, Homo sapiens
aaaaaatggaatgaacccaaatgtccatcaatcaatgagtggataaagaaaatatatgtgtgtgtgtgtgtgtgtgtgtgtgtgtgtgtgtgtataccatagaatactacacagccataaaaaggaatgaaataatggtatktgcagcaacctggatggtattggagactattattctaagtgaagtaactcaggaatggaaagccaaacatcgtatgttctcattcatatgtgggaacagagctatgaggacacaaaggcataagaatgatacaatagactttggggacttgggagaaatggtgggagggtcgtgaggagtaaaagagtacacattgggtacattgtacactgcttgggtgatgggtgcaccaaaatctcagaaatcaccattagagtacttattcatataaccaaacaccacctgttccccaaacacctattgaaataaaaaaaaaatcaatttataaaacaaacagagaaaagggaagaaaaaagaaaacaaccttcattcacatttaactgaaattggtggctgaacaacgcactatt

SEQ ID NO: 179577 - DNA, 493 bp, Homo sapiens
aaatattagttaaatatacactacttaagaatgatttaaaactagcattaaatgtattaaaatggatatattttgcaggaaaaggatgcctgtgttttcagtgttttatctgaattatttaatggtttacawaactttctgtgaatgaagggaaagcagttttttatctgagtattctcagtgttatctgagcattctcattgcctacataacttattctgaatgaaggcaggcaaaatagagagaaaagactgagtatctataccatataatactttaaatagaaaacattagccctttgttacatatctataggctgaataagaactcaaacacagctcttccaactcaacacacaatgctctctttgaggtctgaaggttataaggctatactcataacagattctcagtctcacaattaaactaaaatctaggcttgaagagattaacactatttagcatgccaggctgggttgtaacacagtagccat

SEQ ID NO: 179578 - DNA, 493 bp, Homo sapiens
aaatattagttaaatatacactacttaagaatgatttaaaactagcattaaatgtattaaaatggatatattttgcaggaaaaggatgcctgtgttttcagtgttttatctgaattatttaatggtttacaaaactttctgtgaatgaagggaaagcagttttttatctgagtattctcagtgttatctgagcattctcattgcctacataacttattctgaatgaaggcaggcaaaatagagagaaaagactgagtatctataccatataatactttaaatagaaaacattagccctttgttacatatctataggctgaataagaactcaaacacagctcttccaactcaacacacaatgctctctttgaggtctgaaggttataaggcyatactcataacagattctcagtctcacaattaaactaaaatctaggcttgaagagattaacactatttagcatgccaggctgggttgtaacacagtagccat

SEQ ID NO: 179579 - DNA, 442 bp, Homo sapiens
tcacttctgttctcacaagtattgttcactgaattgagtcaagaaacgctcaataaaagggaaaaagaactaaaattgttcctgagaattacctgacaaaagtgagatcmccgaaagaaatgatttaggaccataccccggagagacacaaagtggtaccagagaccagctcattaagtttaccatatacaactatggtaatttgtttttaaaagatattctaaaacaggtaagtcaaagtttcacatatggaaatatgtccaaattaaaatgtgcttgtcttcctgaagagtctgggtcattcattaaaaaaaaaaaaaaaaaaaaaaaatgtttgtccaagattttagagcaggaataaaatatcttcatgagaattacttttctattcataacaggaatttgtagtaactcaatgcatttttataattaaaatgtatta

SEQ ID NO: 179580 - DNA, 557 bp, Homo sapiens
gcttggtattaggttttagtaattccatggaaaaaggggcattgtgcttattccctatgctcacaagttattctctagttggttaaaatgcagaaaattatacaaattttgtctgtcatttatttatggcaactgcaaacatggaagtttcttcatggtttggcatttgagttcttgaatattgagtatagtcmggattaaatcaatatcaatgcccttttcctttctaaatagtaaaatgttgcaaacatttttgtttaaaagggccatttttaggccaattaaaactattaagttaaaaactgagaattatttttaaaaaatctgaattattaacaattgcaatttttgttgataataaaaacacactttatccactagtaatattgtatttccttaatcctgctaataatataaactgaatcattattacctaaatattaagttttaaataaaaacttgttagaattgataatataaatatagtatgaaaattaactgcaaagtaatatatatcaaaattaatggcaaaataatatatatcaatatgttgcatg

SEQ ID NO: 179581 - DNA, 615 bp, Homo sapiens
aattataacctttctttccattcattattctcttttatgcttgggaactctaacatccataataatggactttataaaatttggcctcgcagtttttggaacacctactagtaaattttacttatactctactcgaattatccataggcacattagaactgctgacacaatcttatttgcatgttaaaaaaatttattctccctctatggaaagaagacttgcagattatgaacatgaagagagaaaaatcaattacaagtcttttatagtaaatcagagtagagatgacagtatttgtgcttgttcagtcataatgaagttgtagagaaacagagatcagactagatttttcaagtaaaactcacctcccacttgccccacagagggaaaacaacacaggatttttttttttttttccattcatgttaggkgtccattatagcccatctggtgtatatgccatcctcattcaaggaccaaagctaatattacttttcacagtagctggaggaaataacacactggaggatatcatagtggattaagtactttggtccaaaaatgatatgcattcttccaccccacctcacggactgaaactcaccacccagccc

SEQ ID NO: 179582 - DNA, 615 bp, Homo sapiens
aattataacctttctttccattcattattctcttttatgcttgggaactctaacatccataataatggactttataaaatttggcctcgcagtttttggaacacctactagtaaattttacttatactctactcgaattatccataggcacattagaactgctgacacaatcttatttgcatgttaaaaaaatttattctccctctatggaaagaagacttgcagattatgaacatgaagagagaaaaatcaattacaagtcttttatagtaaatcagagtagagatgacagtatttgtgcttgttcagtcataatgaagttgtagagaaacagagatcagactagatttttcaagtaaaactcacctcccacttgccccacagagggaaaacaacacaggatttttttttttttttccattcatgttaggggtccattatagcccatctggtgtatatgccatcctcattcaaggaccaaagctaatattacttttcacagtagctggaggaaataacacactggaggatatcatagtggattaagtactttggtccaraaatgatatgcattcttccaccccacctcacggactgaaactcaccacccagccc

SEQ ID NO: 179583 - DNA, 615 bp, Homo sapiens
aattataacctttctttccattcattattctcttttatgcttgggaactctaacatccataataatggactttataaaatttggcctcgcagtttttggaacacctactagtaaattttacttatactctactcgaattatccataggcacattagaactgctgacacaatcttatttgcatgttaaaaaaatttattctccctctatggaaagaagacttgcagattatgaacatgaagagagaaaaatcaattacaagtcttttatagtaaatcagagtagagatgacagtatttgtgcttgttcagtcataatgaagttgtagagaaacagagatcagactagatttttcaagtaaaactcacctcccacttgccccacagagggaaaacaacacaggatttttttttttttttccattcatgttaggggtccattatagcccatctggtgtatatgccatcctcattcaaggaccaaagctaatattacttttcacagtagctggaggaaataacacactggaggatatcatagtggattaagtactttggtccaaaaatgatrtgcattcttccaccccacctcacggactgaaactcaccacccagccc

SEQ ID NO: 179584 - DNA, 551 bp, Homo sapiens
ggcaccatggcctagccaagttgacacataaaattaatcatcattatgcacacaygcacacacaggcacacacaaacacccacacacacacatatgtatctatgtatttatacactgccttatatattttattttattatttatttatttattatttatttattttttgacgtggagtctcactctgtcacccaggcaggaatgccctggtgctgtctcttctcactgcaaccaccacctcccagggtcaagcgattctcctgcctctgcatcccaattagttgggaatacaggcaagtgctaccacgcctggctaatttttgtatttttagtagagacaagctttcaccgtgttggctaggctggtctcaaaatcctgacctcaagtaatttactcacctgggtcccccaaaatgctggaattacaaggcatgagccaccgcacctggccaccttatatgctttataagctaatctgttttcttggttattacagaaaataagtaagccaatcatcaaattagtgtaaatactgtcattaagcttagtga

SEQ ID NO: 179585 - DNA, 435 bp, Homo sapiens
tcgtgttattttatgcacataggtagcctgttgccacaatcccatttattcaataatgggagaataattttaaatatttttatattcatagtcaaataaattttccaatactctttgaggaagaaatatatttaaawagtacaggcaagtattcctctcctggatatatactcctgagaaattattgcaaagatctatacaaggatggtgtatatggcattagggagttgaaagcaacctgtgtatccatctccagaagaatggattaataaaatacagtaaatcacactatgagatgctgtatagcaatatgaaacaataaaccagatatgtgacatagattggtccccaaacaaggctggatgagtaaagtaggacagagatgggatttacaaaacccttaatggaactgaaaatacacaaaacccacactat

SEQ ID NO: 179586 - DNA, 475 bp, Homo sapiens
acctacttgaaattcataacaaaattgtattcatgactttctcttcactgttaacttgtgtcgtaggaatcattgatcatacaaagaaggtttctgtttgtttgtttttttttttcaatttaagctactaggtttccattttctattacatgaagaagtaaaaagaccatcttctaacttcaaataccaaaaaacaaaaacagcctttttttagtaaaataaaccatttctgaatgtggaataaagtatattcacctcaaactctgggttacaaaaatattacaggaataccagaaacattctatagcattattgcttacagaaaacacacagtgttgcacagcattgaacataagtggagatatgtgtagcttccataaattataaatcagtgatcagaacacagactaaaaaawatatgatacagaaaatgatacaatccacagatgagaaaaagcacaaatatcacactaca

SEQ ID NO: 179587 - DNA, 428 bp, Homo sapiens
gaaggaagagagagagagaggcaagagttgaaagactgttgaattcttttagtgccggggtgatgggatcattcttacacccaacctcagcttcacacaatgtgcccaggtaacaagcctgcacatgtgctcccaaatctaaaatataagttgaaaaaaaagaaagatatcacaaatttaaccactgcgcattattttcactgctgtcactctggctgaaaccatcaccatttatcccaagagttaatgcaaacgtcctttaatagatctttttgtttccactcttgcccacctccctcttcccatgtttatttttgggagaatagccacagygatccttttaaaaattaagatatatagtggcaaatatttaaccaaattttgtattattttttatttcacttagaataacagaccagagtggttac

SEQ ID NO: 179588 - DNA, 389 bp, Homo sapiens
cacacacacacacacacacacactcttaaacactcttacaatacttacaaacatttaccgaacagatacataaggggaattcaagaatgtgactctacacacaacaaaattagccatttaaaacattagsgatcccatttctttcttgagtgtttcaaacatcaccattcttcagtggaaactttacctaaactttccacattctccaaaataaagaatctttttgttatcagaaaaagttcaaattctcaaaagaaataaaatactgtaaataacaacaagcacggtaaaaaactaaaacaatagaccattctgtcatttaaagtactaaaaatatttaagtatgactatttcaattctcagagcaactcattgcagagatttataat

SEQ ID NO: 179589 - DNA, 370 bp, Homo sapiens
acttctactggcctgtgcaaactaatattagttgtggtataacttaatcacatgctcactacttgttagtttgttcaagatgctatamcaaagtaccatatactgggtagcttataaacaacagaaatttatttcttgcagttctggagacagagaagtccaagatcagggctctagcagctacaatgtctggtgacgactagtttcctggttcaaagaaagtgcctttttgctgcatccacacatgatggaaggggagaactctagtctctttagcctcttgtaagcccactaatcatattcatgagggctctgccctatgatctaattacctcctcaggactctatctcttaataccaatatcttggg

SEQ ID NO: 179590 - DNA, 594 bp, Homo sapiens
ataagtatttttagaccaggcatagtggctcatgcctgtaattccagcacttcgggaggccgaagtgggcagatcacctgaggtcaggagttcaagaccagtctggtcaacatggtgaaaccccatctctactaaaaacataaaaagtagctgggcatggtggcgcatgcttatagtcccagctactggggaggctgaggcaggagaatcacttgaatctgggaggtggaggttgcagtaagccaagatcgtgccacctcactccagcctgggtgacaaagcaagattgtctcaaaaaaaaaataaataagtatttttacttattaatataaaagggaaataattagaagtatctrtctattttcattggaacaggttttttttctttaatgagaaatatgtgttaaataaaattttaggttcctttggactctagccagaatgcatttatttgcaatttcccagccatgcaaatacaaaccatattcacaagatcctgaggaaactttttaatttttacttcgaatacttccttctaccaaaaatagagacaacttctatcctttgtatcaaaaaatatgaagtttatatttt

SEQ ID NO: 179591 - DNA, 580 bp, Homo sapiens
attttcattggaacaggttttttttctttaatgagaaatatgtgttaaataaaattttaggttcctttggactctagccagaatgcatttatttgcaatttcccagccatgcaaatacaaaccatattcacaagatcctgaggaaactttttaatttttacttcgaatacttccttctaccaaaaatagagacaacttctatcctttgtatcaaaaaatatgaagtttatattttcctattgtgtcaggaatgtaattaattacacagctagttgtgtaatcttcttgataaactacagattctctacgaaacataaacagaaaagtcaacaakgatttaattagacaataatactgagaaaattattaagcatcttaagtgagtcctgtttatctgtgaactcattcttcatccccttttgtgatttatttttaccatcccaagccatctccccgttgttgtccttgtgtagccttgaggttgttcctagttatgcgttcccctactgaggcacatgcatcccaagcaattcttcatactccaaatctgtctttctttctttgcctacattaaagctaa

SEQ ID NO: 179592 - DNA, 578 bp, Homo sapiens
atgtctgttatttcatgttatattcaaacrtaatagggtactaaaaatatataattgcgtgtgagtgtgtttgtgtgagtatacatatatttcccttaccatagaagaacatcttttttcccaaaaatgtagaattcaggaaattacagtacatatggatatctgtctttagatgttcaattgtttgtccttacaggtttcaaaaaggcgtatagttatataaattaaacattaaaataaagtgccatgaagcgcttttccactccttacctatgactaagtgctacatgaggaactgtcccctcatcatatttcatttatttgaaggtttataaattaaataaatacaagagaaaagcagaaaagcttaaaaggagagatagtacatgcaatggtataccaaagaagagaaaatagtttaagattatggattcatacttaaaacaggggatcactaagttaccaaaaggaaaatagtatttattccctaattctcactacccctatgcaggaccagcttcatgattttttacatttgcacaggactcaatgctcaaaaggttcttgctgttggtttc

SEQ ID NO: 179593 - DNA, 595 bp, Homo sapiens
ctcttttagtaagtaaaatagttgtttttcttggcaacatggaagctttagtaaaagtttattaggtatgttgccctgacattctatttctctgaaaggatgatcaggttaagatgtcacaacctttttactgaaaatgccaaaaatgcacacttattaaaacagctctcaatttcccatatgaagataataaaacttatgtcctctaaagtttacccatttatttgacagacaattaatttgtagatgaattttatttacttctaaaccaccatgtaaatgcatgcttattattggtgtatgtratagtctgttctcacacttctgtaaagaaatgcccaagactcgataatttataaaggaaagaggtttaattgacacagtttctcatgactagggaggcctcaggaaacatacaatcatggcagaaggggaagtaggcacatctcacatggtcgcaggagggagagagagagagagtgtttaaaggaggaactgtcaaactcatgaaaccatcagatcttgtgagaactcactaaaacaagaacagtatgggggaaactgtacccgtgatccaatcacctcccaccaggtt

SEQ ID NO: 179594 - DNA, 595 bp, Homo sapiens
ctcttttagtaagtaaaatagttgtttttcttggcaacatggaagctttagtaaaagtttattaggtatgttgccctgacattctatttctctgaaaggatgatcaggttaagatgtcacaacctttttactgaaaatgccaaaaatgcacacttattaaaacagctctcaatttcccatatgaagataataaaacttatgtcctctaaagtttacccatttatttgacagacaattaatttgtagatgaattttatttacttctaaaccaccatgtaaatgcatgcttattattggtgtatgtawtagtctgttctcacacttctgtaaagaaatgcccaagactcgataatttataaaggaaagaggtttaattgacacagtttctcatgactagggaggcctcaggaaacatacaatcatggcagaaggggaagtaggcacatctcacatggtcgcaggagggagagagagagagagtgtttaaaggaggaactgtcaaactcatgaaaccatcagatcttgtgagaactcactaaaacaagaacagtatgggggaaactgtacccgtgatccaatcacctcccaccaggtt

SEQ ID NO: 179595 - DNA, 595 bp, Homo sapiens
ctcttttagtaagtaaaatagttgtttttcttggcaacatggaagctttagtaaaagtttattaggtatgttgccctgacattctatttctctgaaaggatgatcaggttaagatgtcacaacctttttactgaaaatgccaaaaatgcacacttattaaaacagctctcaatttcccatatgaagataataaaacttatgtcctctaaagtttacccatttatttgacagacaattaatttgtagatgaattttatttacttctaaaccaccatgtaaatgcatgcttattattggtgtatgtaatagtctgttctcacacttctgtaaagaaatgcccaagactcgataatttataaaggaaagaggtttaattgacacagtttctcatgactagggaggcctcaggaaacatacaatcatggcagaaggggaagtaggcacatctyacatggtcgcaggagggagagagagagagagtgtttaaaggaggaactgtcaaactcatgaaaccatcagatcttgtgagaactcactaaaacaagaacagtatgggggaaactgtacccgtgatccaatcacctcccaccaggtt

SEQ ID NO: 179596 - DNA, 595 bp, Homo sapiens
ctcttttagtaagtaaaatagttgtttttcttggcaacatggaagctttagtaaaagtttattaggtatgttgccctgacattctatttctctgaaaggatgatcaggttaagatgtcacaacctttttactgaaaatgccaaaaatgcacacttattaaaacagctctcaatttcccatatgaagataataaaacttatgtcctctaaagtttacccatttatttgacagacaattaatttgtagatgaattttatttacttctaaaccaccatgtaaatgcatgcttattattggtgtatgtaatagtctgttctcacacttctgtaaagaaatgcccaagactcgataatttataaaggaaagaggtttaattgacacagtttctcatgactagggaggcctcaggaaacatacaatcatggcagaaggggaagtaggcacatctcacatggtcgcaggagggagagagagagagagtgtttraaggaggaactgtcaaactcatgaaaccatcagatcttgtgagaactcactaaaacaagaacagtatgggggaaactgtacccgtgatccaatcacctcccaccaggtt

SEQ ID NO: 179597 - DNA, 414 bp, Homo sapiens
tgcactttggctgtgtgtaataaaaaatgttgggatgagtcagggagagctagtgtgggagcaatctctagagctgttttcaaggaacggaaagaggagtggggaaaggatttrggatctttgaggtcagctaggtttccatttgtgagtttatataatggttttgtaatgcctaactttgtttttactaaccttgtttttagattctcctttttcctttaatcacttagccttgtttatacctgaattgactctactttagctaagagagccagacagactccatcttggctctttcactggcagccccttcctcaaggacttaacttgtgcaggctgactcccagcacatccaataatgcaattaactgataagatactgtggcaagctatgtccgcaattcccaggaattc

SEQ ID NO: 179598 - DNA, 413 bp, Homo sapiens
gcactttggctgtgtgtaataaaaaatgttgggatgagtcagggagagctagtgtgggagcaatctctagagctgttttcaaggaacggaaagaggagtggggaaaggatttgggatctttgaggtcagctaggtttccatttgtgagtttatataatggttttgtaatgcctaactttgtttttactaaccttgtttttagattctcctttttcctttaatcacttagccttgtttmtacctgaattgactctactttagctaagagagccagacagactccatcttggctctttcactggcagccccttcctcaaggacttaacttgtgcaggctgactcccagcacatccaataatgcaattaactgataagatactgtggcaagctatgtccgcaattcccaggaattc

SEQ ID NO: 179599 - DNA, 412 bp, Homo sapiens
gaattctgactgcacagctctgcactttggctgtgtgtaataaaaaatgttgggatgagtcagggagagctagtgtgggagcaatctctagagctgttttcaaggaacggaaagaggagtggggaaaggatttgggatctttgaggtcagctaggtttccatttgtgagtttatataatggttttgtaatgcctaactttgtttttactaaccttgtttttagattctcctttttcctttaatcacttagccttgtttatacctgaattgactctactttarctaagagagccagacagactccatcttggctctttcactggcagccccttcctcaaggacttaacttgtgcaggctgactcccagcacatccaataatgcaattaactgataagatactgtggcaagcta

SEQ ID NO: 179600 - DNA, 524 bp, Homo sapiens
aaagaccaacacagcccaactagaaacataggtctccaggcctaggtcaggccccttaaaactgtgcctaagtcaagtgaagccattaggttaattctttttatctacctcacttgtttgtttttgccctttaaatcctctgtatcttcctactcctttctcctcacctctttcacaacaggacgtgtatttgcaaacaccacttagaaggctggtacctccaaagaagtctcctttgcagttgatttatgtgtactcttcccagagccagccggtacccatgaagagcaacacaatctgccagtcccaggagcaggaagtgttgacsttgcagcaagatttaagcgctccaagagccaaactagatgtagaagctccaaaagtgcagaaaaaaagactccaaaatgttgacttttacctctgtcctagaaatcaccctgacgctagctgtcaatatacttatcagtttttctgccctgattagacatgtgtaactttagccacctactctagaggatcaacca

SEQ ID NO: 179601 - DNA, 610 bp, Homo sapiens
agatctccaaagggtatacaatcgcaagagtttagaggggttcttctgagttgtgacattataaacccaaatttcaagggtccaagtcttgctgcagtgtagatggcaagcagactcaatgtcttgattttagattataaaaggttttactaccctgagtaagtagtggccaggtgtagtggctcatgactataatccctgcacttttggtggccaaggtgggtrgatccctggaggccaggagtttgaaaccagcctagcctggccaacatggagaaaccctgtctctactaaaaatacaaaaaatagacaggagtggtggtgcatgtatgtaatcccagctactctggaggctgaggaatgagaatcactgaacctgggaggtggaagatgcagttagtcgagatcatgccactgcaccctgggtgccagagtgagactgtaaaaaaaaaagcaaagctttatttaccttgtgaaaatatgctttgtcataatggattaaggacttgctgcatttagtaataatagacttcagtagcagaagatacatgaggttctattattacatgcataggctttccagtaactattttagaagggtcaacacatt

SEQ ID NO: 179602 - DNA, 327 bp, Homo sapiens
aactaaactgttactgacggccggacaccgtggctcatgycagtaatcctagcactttgggaggctgagacaggtggatcacctgaggtcaggagttcaagaccagcgttgccaacatgttgaaacagtgtctgtactataaatagaaaagttagccaggcacggtggtgagtgcctgtaatcccagttactcaggagtctgaggcaggagaatctcttgaacttgggaggtggaggttgtggtgagctgagatcgtgccactgcactccagcctgggtggcagagcgagactttgtctcaaaatgaataaataaatagacattgac

SEQ ID NO: 179603 - DNA, 570 bp, Homo sapiens
ctccataaccctacaacactccaatatcactttgttgtcagtgtaaacaagggcatagcctgaaagcactgaggccactgacaacctgtgtagccttcctatcaaaaatccttaacctagtaatctgtggatggcccaaatgcattcaatctgtagtggcaactgctttgctaacagaagaaagtagaaaaataacttttagaggaaacctyattttgagcacatctcaccagttcagaagtatcctaaaaaaagaaaaaaagatgatttaacattaaccactgaaaattcccttaacccagcaggttccctaacaggggatctaaatcttaattaccatacaaaattccgaccagacctaggaggaactcccttcatgacaggacgatagatgattcctccaaggtaattaaaaaaaaaaaaacctatctataccaattctaagttcatttggactaaacaaggtcttattgatagcaaaggataattgaaatcccaaacttacaaggttttcaacaaaagtaaaatttgctaaaagttaacagtgtaacatgtattatagtaacttct

SEQ ID NO: 179604 - DNA, 456 bp, Homo sapiens
ctgatacataattgttgaataaggggagggatgtttaagatattttgcacattattaacttagagtcagtctatacactctctgtattaaatatctagagaaaattctattactttttggctcagggctatctatactaaaasgctattgctttttatgtacatgaaaagaaactcaagatttatgtttctggttctggattttcagttaagagctatattctgttacaaaaatatcaataagaaatcatcacttttttcttaaaatctgatgacttattttttttaaaacattgcagcccctaaagaactgatgactgcacctgaattcaaaccccaaattgatttcataaaacatcttcctctagtaaatggcaaaaatcataacctcctgtagaaagtgatgttgggttggctgacatagcagattgcttggtgaaaacatggggacctgaaa

SEQ ID NO: 179605 - DNA, 456 bp, Homo sapiens
ctgatacataattgttgaataaggggagggatgtttaagatattttgcacattattaacttagagtcagtctatacactctctgtattaaatatctagagaaaattctattactttttggctcagggctatctatactaaaaggctattgctttttatgtacatgaaaagaaactcaagatttatgtttctggttctggattttcagttaagagctatattctgttacaaaaatatcaataagaaatcatcacttttttcttaaaatctgatgacttattttttttaaaacattgcagcccctaaagaactgatgactgcacctgaattcaaaccccaamttgatttcataaaacatcttcctctagtaaatggcaaaaatcataacctcctgtagaaagtgatgttgggttggctgacatagcagattgcttggtgaaaacatggggacctgaaa

SEQ ID NO: 179606 - DNA, 418 bp, Homo sapiens
gaatctctgtactgttttccatagtggttgtactagtttacattcccaccagcagtgtaaaagtgttccctttccaccacatccaccccaatgatggccattcttgcaggagtaaggtggtattgcattgtggtttttatttacatttccctgattattagtgatgttgagcattttttcataagtttgatggccctgtgtatatcttttttttgagaattgtctattcatgtccttagcccactttttgatgggattatttggttttttttccttgctgattttaaaactggaaaagttcccttgtcccccttgcagggcgtgcgatgagggtgtggcttccttcttcaatgcccsggtgctcagacctctacgggagcatacagatgggcaggctgtagggctccgaccccacagc

SEQ ID NO: 179607 - DNA, 429 bp, Homo sapiens
tagataaagtgcttctgctcagcttttttcctctttaggggctgctggttaaaattagggggctgaaattttcatacccccaaaatagtttcagcctatctcagccttctccttaatgttagaggcccttttatttctagatgttttccccagcctcaccttttttttttcctcaaaactttaaaaatagaatctgatacttaaaactaataaataaatgatagttttaaaaagaaaacccaagtttctcaagcatgctttcctcttttttttaatcctctcccctccctcttccaaatcaccagcctcaggcatgctttaagagagttatttgggttacattatttttaagaacatcaatttcttaagcaacatcttagtagcctggktattcctcatctatagatctttcaaaaacactttgaattc

SEQ ID NO: 179608 - DNA, 537 bp, Homo sapiens
atcacatagaagaggtccacacctgtggtcataagtggtttgggtcttagactggcacaaaccagaggtcagcaggtggaggatgggccaactgacagaggcagagactgtggggctctaatcactgctgtgctataaagttcttatgaccattcagtgcaaaccactcaatctcattggattccaattcctttacttatttatttatttattttgagacggagtttcgctcttgttgcccaggctggagtgcaatggcgcaatcttggctcaccgcaacctcttactcctggttttaatcaattctcctgcctcagccaccsgagtagctgggattacaggcatgcgccaccacgcctggctaattctgtatttttagtagagacggggtttttccatgttggtctcgaactcccgactgcaggtgatccacctgccttggcctcccaaagtgttgggattacaggcgtgagccactgtttctggccccaattcctttatttcataagcatatttaatatgagagaaattgaattc

SEQ ID NO: 179609 - DNA, 413 bp, Homo sapiens
catcaaggctgtggatcaattaatcagcctagctcatgtagtaatgcattcccccaccctagaagtattcaatgagaggttacataacttctttggagaaaacattacatggagatgttcaagcattcatgcttcaaagaccttaaatattgcttccaacactaaaagtctgcagaattatcayagatccttttttgtctatggtttaagatatcttgtcccaaacatgcatgagtataagtaaaaacaactgagcatcaaagctgagaaaatgcgaggactgtaacatactaatttaaaatgcagtacagattgggcactgctcaccaatatgcattgtggcatcgaatgattctcaggttatggaggattatgaaaaacacaaaaagaagccagtgcaccttaaggaattc

SEQ ID NO: 179610 - DNA, 437 bp, Homo sapiens
ttgaactttataaaaaataaattgggttttaggaattacacaggtaatcttaaccatatcaccctaccccagtctcaccagatcattgggtcttgcagagccaatttactaaaaaagcaagtatctatctatttattttcgtaaaagtgtaaattactccttttgatctttagtcctataaattttgacaaatgcatgcagtctatgtaaccactaccacatcaatcaaaatatgaaactgttccattttctcccccaaactccttcatgtsttttattctaaaccatacccccatacccaactcctgaaagcgcttgtctgatatctgtttctgtagttttaccttttctaaaaaggcgtgtaattgaagccatgatagagtatgtagtcttttgaaactggctcatctcaatcatcccaaagcccttgagattca

SEQ ID NO: 179611 - DNA, 437 bp, Homo sapiens
ttgaactttataaaaaataaattgggttttaggaattacacaggtaatcttaaccatatcaccctaccccagtctcaccagatcattgggtcttgcagagccaatttactaaaaaagcaagtatctatctatttattttcgtaaaagtgtaaattactccttttgatctttagtcctataaattttgacaaatgcatgcagtctatgtaaccactaccacatcaatcaaaatatgaaactgttccattttctcccccaaactccttcatgtgttttattctaaaccatacccccatacccaactcctgaaagcgcttgtctgatwtctgtttctgtagttttaccttttctaaaaaggcgtgtaattgaagccatgatagagtatgtagtcttttgaaactggctcatctcaatcatcccaaagcccttgagattca

SEQ ID NO: 179612 - DNA, 612 bp, Homo sapiens
tcattggtttataaaacaaaaacaaaacaaaatgtataaataattaaatgatctctaataggtaaaatgtatgagtgctcactacatgcctggtccgttcgacatgattaatatatattaactaatttaatcatcatgactttcctacaaattgtgtttcaatattgtcccctttatgtagatgaagaaactgagttacaatgaacttaagtgacctggaccaaacttcatagttaataaggtgcctgggacaggatttcagctcaggcaatgtagttccagagtcactgtttkttgttgttgttgttgtttgtttgttttgttgttgttgttgtttccataggtttgggggaacagggggtgtttggttacataagttctttagtagtgatttgagattttgttgcatgcatcacctgagcagtatacactgaaccgaatttgtagtcttttattcctcaccctccctgtcatcctttgtcccgagtccccaaagtccattgtatcattcttatgcctttacattctcatagcttagctcccacttatgagtgagaacatacgatgtttggttttccattcctgaattacttcacttaggataatagtctc

SEQ ID NO: 179613 - DNA, 596 bp, Homo sapiens
tttgtgttttctagatccccagagctttggcagcatatgatacatagtaagtatccaataaatgtttgttgaatgaattgacaaatacattacataaataaataaagctaatataatttttaacaaarttggaaaattacttaaaatgcaattttatataatgcttgaatttatcatgagctcttctttatgtcattaaatattctttcaaaccattattttttatgacaatataaaatacaattttactgatctatcataatttgaagattccctcattggtagacacttggcttttgtccagcattttgatattgtaaattagcctgccttataccaccatgaatattaatatttgaccatcctaacactgcctatgcatgatagtctcattttaatgaaattctctatattgttcacataaaaaccaattgtgttataaacatgccctgctttaagcaattttgattaaagtctaattatatataatagttatagattttttattttaaaaatgttcaccatgtgagtctgctgaagagaaattcctttaccatactattgtagtccagaaaaaagaaaattgagaccaaaca

SEQ ID NO: 179614 - DNA, 538 bp, Homo sapiens
aggtattcgggaggctgaggcaggagaatcgcttgaacccagattgcagtgagctgagatcatgccactccattccagcgtgggtgacagagtgagactctgtctcaaaaaacaaattataggatcacctctctccttcactagtgaattctataatattttctttttatctgattttatttaggtattgtataataatttacatacaataaaaatcaccagtattaagtgtacaagtgaaatgtgacaaatgcatagagtgaggataattgtcacacagaccttttccactatctggacaagttccctcttacccctctgtggtcattctctgcctcctcctcccagaccctgaaaccactggcctgctttctatgtatttttccatttctgtctcagtattttgccatttcacataaatgttatcatagagtatgtggtgatttgtgtctggaatctwtcattcaatacaatggtgctcagattcatccatgttgttacatgcatcagcagcttgttcctttttattgctcagtag

SEQ ID NO: 179615 - DNA, 525 bp, Homo sapiens
atctttacaatacatacaacggaggctcaaaataatagacattaagttcggtttgaagaaaaaaaagtaaatttcctgcatatgtacctcctggattaaaatttatactacatcacacaggaatcacacttgtctgagatgaaacaagccacattattgtgtaaaagtgactgcaacaacttttttaaaataaaaattgtgttccaatcagcacctagatgaaatgcccagcacagtgcctagtttatctgcctagttaatagatgacactcaaaactgattgcttttctgattacacraaataaaagtactatctgagaagaagcaaaattcccatgtctacaaacaggaaagctaacttggataataagtgtgcaatgagagccaaatgaccttgaaggcttctaaatcagaaaactcagtatatgtttgatgcaacggctccctgagaaagttttatgatttcaaaatcatatactatatcaggttattttgcccactggcagtaccggaattggcaaagct

SEQ ID NO: 179616 - DNA, 525 bp, Homo sapiens
atctttacaatacatacaacggaggctcaaaataatagacattaagttcggtttgaagaaaaaaaagtaaatttcctgcatatgtacctcctggattaaaatttatactacatcacacaggaatcacacttgtctgagatgaaacaagccacattattgtgtaaaagtgactgcaacaacttttttaaaataaaaattgtgttccaatcagcacctagatgaaatgcccagcacagtgcctagtttatctgcctagttaatagatgacactcaaaactgattgcttttctgattacacgaaataaaagtactatctgagaagaagcaaaattcccatgtctacaaacaggaaagctaacttggataataagtgkgcaatgagagccaaatgaccttgaaggcttctaaatcagaaaactcagtatatgtttgatgcaacggctccctgagaaagttttatgatttcaaaatcatatactatatcaggttattttgcccactggcagtaccggaattggcaaagct

SEQ ID NO: 179617 - DNA, 524 bp, Homo sapiens
gaattcaatgatgcgatctcggctcactgcaacctctgcctccctggttcaaggggattcttctgccttascctcttgagtagctgggattacaggcatgcaccagcacgaccggctaattttgtatttttagtggaaacggggtttctccatgttggacaggctggtctcaaactcctgacctcaggtgatccaccctcctccgcctcccaaagggctggaattacaggcgtgagccaccacgcccggacttctgacactattttttatgtgaatccaagttttggacctatataatctgccttttccctaaataacttattttaacatttcttgcaaggcagtcccagcaacaaattccctccatttttgtttgtctgataaattaattctttttcacttctgcaggtaagttcagtgattatagaattttagcttggtggttcttttttttttttctttcaacattttaaatatttcaccttgcttttttcttgcttgcatggcttcagaagggaagtctg

SEQ ID NO: 179618 - DNA, 524 bp, Homo sapiens
gaattcaatgatgcgatctcggctcactgcaacctctgcctccctggttcaaggggattcttctgccttaccctcttgagtagctgggattacaggcatgcaccagcacgaccggctaattttgtatttttagtggaracggggtttctccatgttggacaggctggtctcaaactcctgacctcaggtgatccaccctcctccgcctcccaaagggctggaattacaggcgtgagccaccacgcccggacttctgacactattttttatgtgaatccaagttttggacctatataatctgccttttccctaaataacttattttaacatttcttgcaaggcagtcccagcaacaaattccctccatttttgtttgtctgataaattaattctttttcacttctgcaggtaagttcagtgattatagaattttagcttggtggttcttttttttttttctttcaacattttaaatatttcaccttgcttttttcttgcttgcatggcttcagaagggaagtctg

SEQ ID NO: 179619 - DNA, 524 bp, Homo sapiens
gaattcaatgatgcgatctcggctcactgcaacctctgcctccctggttcaaggggattcttctgccttaccctcttgagtagctgggattacaggcatgcaccagcacgaccggctaattttgtatttttagtggaaacggggtttctccatgttggacaggctggtctcaaactcctgacctcaggtgatccaccctcctccgcctcccaaagkgctggaattacaggcgtgagccaccacgcccggacttctgacactattttttatgtgaatccaagttttggacctatataatctgccttttccctaaataacttattttaacatttcttgcaaggcagtcccagcaacaaattccctccatttttgtttgtctgataaattaattctttttcacttctgcaggtaagttcagtgattatagaattttagcttggtggttcttttttttttttctttcaacattttaaatatttcaccttgcttttttcttgcttgcatggcttcagaagggaagtctg

SEQ ID NO: 179620 - DNA, 542 bp, Homo sapiens
ctggctggctggctggcttggctggcttggctggctggctrgcttgctaacttggctggcttggctgggtgggtggcttggatggcttggctgactggcttggcttgcttggctggcttggacattaaatataatatatttggtacattaaatataaacattgtatacattaaatataaacatcttttatacatcaaacataaacattttatacattaaatgtaaacatatacattaaatataaacatcttgtatacattaaatataagaatacatttggtacatttaatgtatacaatacattaaatatagacattttagacattaaatataagcatatattcagcacattaaatgtaaacatattttatacattaaatataaatactgtatatgttaaatataaatatgtattttctatattaaatataaatatgtattctgtacattaaatataaacattttctatattaaatataaacatgtattttggatagtaaatataactatacattgtctatattaaatattaacatgtattt

SEQ ID NO: 179621 - DNA, 542 bp, Homo sapiens
ctggctggctggctggcttggctggcttggctggctggctagcttgctaacttggctggcttggctgggtgggtggcttggatggcttggctgactggcttggcttgcttggctggcttggacattaaatataatatatttggtacattaaatataaacattgtatacattaaatataaacatcttttatacatcaaacataaacattttatacattaaatgtaaacatatayattaaatataaacatcttgtatacattaaatataagaatacatttggtacatttaatgtatacaatacattaaatatagacattttagacattaaatataagcatatattcagcacattaaatgtaaacatattttatacattaaatataaatactgtatatgttaaatataaatatgtattttctatattaaatataaatatgtattctgtacattaaatataaacattttctatattaaatataaacatgtattttggatagtaaatataactatacattgtctatattaaatattaacatgtattt

SEQ ID NO: 179622 - DNA, 542 bp, Homo sapiens
ctggctggctggctggcttggctggcttggctggctggctagcttgctaacttggctggcttggctgggtgggtggcttggatggcttggctgactggcttggcttgcttggctggcttggacattaaatataatatatttggtacattaaatataaacattgtatacattaaatataaacatcttttatacatcaaacataaacattttatacattaaatgtaaacatatacattaaatataaacatcttgtatacattaaatataagaatacatttggtacatttaatgtatacaatacattaaatatagacattttagacattaaatataagcatatattcagcacattaaatgtaaacatatwttatacattaaatataaatactgtatatgttaaatataaatatgtattttctatattaaatataaatatgtattctgtacattaaatataaacattttctatattaaatataaacatgtattttggatagtaaatataactatacattgtctatattaaatattaacatgtattt

SEQ ID NO: 179623 - DNA, 542 bp, Homo sapiens
ctggctggctggctggcttggctggcttggctggctggctagcttgctaacttggctggcttggctgggtgggtggcttggatggcttggctgactggcttggcttgcttggctggcttggacattaaatataatatatttggtacattaaatataaacattgtatacattaaatataaacatcttttatacatcaaacataaacattttatacattaaatgtaaacatatacattaaatataaacatcttgtatacattaaatataagaatacatttggtacatttaatgtatacaatacattaaatatagacattttagacattaaatataagcatatattcagcacattaaatgtaaacatattttatacattaaatataaatactgtatatgttaaatataaatatgyattttctatattaaatataaatatgtattctgtacattaaatataaacattttctatattaaatataaacatgtattttggatagtaaatataactatacattgtctatattaaatattaacatgtattt

SEQ ID NO: 179624 - DNA, 449 bp, Homo sapiens
agatctgacagttttataaacaggagttcccctggcacaaggtgtctcttgcctgctgccgtgtaagacatcagtttactcttccttcatcttcttccatgattatgagaccacctcagccatgtggaactatgattccattaaaccacttttctttataaattatttggtctcaggtatgtctttattagcagcatgataatggactaatacagggcctttcctaatctttgaattttctgtatayggtgactcttgaataaaatatttattataaaattagagtgtgtccttgtttctattgatccttgtcctcagttacttgacccattttctaaacaactttaaacctcatcttccctgtcatctcctctgcaggaacacagctgcctcctccctgcaatttctgacactctcaggatgtgggttttcacattgtgtctctcaca

SEQ ID NO: 179625 - DNA, 524 bp, Homo sapiens
gctgtgcccatggatgtgtccctggttatggtgactctgccctggaacttctgtgcatagcttgtgctgccatcactagggcacaccaatcccatccactcaagcccttgtgcatgggcctggcacacccagtgcatacagtagctggtgaaggtgtatccagaagccttgcaggagatcctcactgaggccccaggcttcttcacctcagccccagactgcatcagctgtacctgggactgggcacctgtggagaggacacaggagtggataaaaccccctttgacyggacccagtcaccttagtcctggggactgagaattatcctacctgcagctatgaccaccaaaaacaggatcctccaagtccagcccatggtgaggagctgtgctctcaggggcttctctagaggacgtgtgtggttattgggtgatgctctcagggcgcagacatatctgtagtgttcacctcaggtgatttgcatattcacaagaactactacttcatagccttacacttgatcc

SEQ ID NO: 179626 - DNA, 417 bp, Homo sapiens
tctggttattggaaagtggcagttcctgctattccatgaataatgtgaatgggctaatttgaggggtactgccccatttcctgtttagaacttaccaaaggggcacgtgctttttgaaaattgctttcaraaaaaaaccttctagaccaagcttgtccaacctgtggcatgcaagctgcatgtagcccaggacagctttgaatgcagcccaacacaaattcctaaattttcttaaaacattataagattttttgtgtgtgaattttttttagctcatcagctatcattagtattaagtttatgtgtggtccaagacaattcttcttcttccaatgtagcccaaagaagtcaaaagattgggcacccctgtgctagacttttattaagctgaagttcataggtttccttagttattca

SEQ ID NO: 179627 - DNA, 417 bp, Homo sapiens
tctggttattggaaagtggcagttcctgctattccatgaataatgtgaatgggctaatttgaggggtactgccccatttcctgtttagaacttaccaaaggggcacgtgctttttgaaaattgctttcaaaraaaaaccttctagaccaagcttgtccaacctgtggcatgcaagctgcatgtagcccaggacagctttgaatgcagcccaacacaaattcctaaattttcttaaaacattataagattttttgtgtgtgaattttttttagctcatcagctatcattagtattaagtttatgtgtggtccaagacaattcttcttcttccaatgtagcccaaagaagtcaaaagattgggcacccctgtgctagacttttattaagctgaagttcataggtttccttagttattca

SEQ ID NO: 179628 - DNA, 259 bp, Homo sapiens
agatctttcaccctccttttgctttcagttgctgtataatgacttcactttttctctaatcatattaaagtctgcaggtatgctgtccatatagcaatcctgcacacacataaaagctgcatttttcaatacaagataaaaagatattttgcaaaaagcagaagaatattgtgcctgctggcatatctgcagtgactccttcaggaatttccttttatttttttcacaatggktcttacactcggatttatttattttg

SEQ ID NO: 179629 - DNA, 414 bp, Homo sapiens
taatatggcttggaaaaaaggagctccactttttcagcactgccacttctaagccacaaaacctaggggagaaaactgatctcacttccccttactttcctcacctgtacagtgaagggttttcaaggtcttctccagaacaatattytaagaatgctttgcaaaattaaatatgcatttattgataatttactatgtggaaaggcatcatgttatctcataggatacagaaatgcaaaaacagtaagtactttcaaaaaacacttatcatcaggagccagtgtatgaaccttcaaaaagttttaagtcataaactgtttccctttacaagtggccattctgatgcagggcaggggagcccccaaactggggcttagcctggcagggttcttggcttcactccaaaaagaattc

SEQ ID NO: 179630 - DNA, 413 bp, Homo sapiens
aatatggcttggaaaaaaggagctccactttttcagcactgccacttctaagccacaaaacctaggggagaaaactgatctcacttccccttactttcctcacctgtacagtgaagggttttcaaggtcttctccagaacaatattctaagaatgctttgcaaaattaaatatgcatttattgataatttactatgtggaaaggcatcatgttatctcayaggatacagaaatgcaaaaacagtaagtactttcaaaaaacacttatcatcaggagccagtgtatgaaccttcaaaaagttttaagtcataaactgtttccctttacaagtggccattctgatgcagggcaggggagcccccaaactggggcttagcctggcagggttcttggcttcactccaaaaagaattc

SEQ ID NO: 179631 - DNA, 413 bp, Homo sapiens
aatatggcttggaaaaaaggagctccactttttcagcactgccacttctaagccacaaaacctaggggagaaaactgatctcacttccccttactttcctcacctgtacagtgaagggttttcaaggtcttctccagaacaatattctaagaatgctttgcaaaattaaatatgcatttattgataatttactatgtggaaaggcatcatgttatctcataggatacagaaatgcaaaaacagtaagtactttcaaaaaacacttatcatcaggagccagtgtatgaaccttmaaaaagttttaagtcataaactgtttccctttacaagtggccattctgatgcagggcaggggagcccccaaactggggcttagcctggcagggttcttggcttcactccaaaaagaattc

SEQ ID NO: 179632 - DNA, 440 bp, Homo sapiens
tttttctgtctattgttttcttcaatggtgtggtatccattaccatcaaacagagcacctgtaataagtcaccagggctcttgaagaaattggtgaagcttcattctcttgcagtgcttattagtgattcagtgtttgttcagcttctgctgatggagaattttctcttcrgaagcttcacaagtcagaggttaccccttgctccctccaacccaattttctatgcaagaagcatctactttctctgcctaattagagacactcctcctcctgaatgacactggagtgacctgtcatggaggcaaaatgagagcacatagagagtgtgggtaagtatgtaaagacctgggcccagagggaggtacagagggcaggggcgaagtgtggagctggctatgcagaccgaatccaaatggccttagagagtagctccactttcc

SEQ ID NO: 179633 - DNA, 440 bp, Homo sapiens
tttttctgtctattgttttcttcaatggtgtggtatccattaccatcaaacagagcacctgtaataagtcaccagggctcttgaagaaattggtgaagcttcattctcttgcagtgcttattagtgattcagtgtttgttcagcttctgctgatggagaattttctcttcagaagcttcacaagtcagaggttaccccttgctccctccaacccaattttctatgcaagaagcatctactttctctgcctaattagagacactcctcctcctgaatgacactggagtgacctgtcatggaggcaaaatgagagcacatagagagtgtgggtaagtatgtaaagacctgggcccagagggaggtacagagggcaggggcraagtgtggagctggctatgcagaccgaatccaaatggccttagagagtagctccactttcc

SEQ ID NO: 179634 - DNA, 560 bp, Homo sapiens
cttggctacatttttttttcttgggccttatcaccagctggcatatgctaaatgtktactcgctgggttgtgtattgtcttcccacacccactcacatctaagcttgtagagagagggaatttttttcactttaattcagagctgtattctcagcatctataaaattatttggcacacaagaggtgctcaataaatgtgtactcagtgaataaattaatgaatgggctgttttaaggattaagtgaaacaaatataaaaacatttagtccactaactcacatgtgggaagtgctcacttaactgtaattgttaatgattgtcatagccctgtgtttggatagcattttcattccattgttgactttgtttttaaggattccttgctgcagaggtgcatgtgagggaatttataatacaccaagcgggtgtagtctgtattctctatgaattatcacagatctttgaggttgaaggttgggggttagggaggggagaaaagagatttataatgttgtcccttgtgctagttgggaggaattgaaatacccctttctgtcta

SEQ ID NO: 179635 - DNA, 560 bp, Homo sapiens
cttggctacatttttttttcttgggccttatcaccagctggcatatgctaaatgtgtactcgctggkttgtgtattgtcttcccacacccactcacatctaagcttgtagagagagggaatttttttcactttaattcagagctgtattctcagcatctataaaattatttggcacacaagaggtgctcaataaatgtgtactcagtgaataaattaatgaatgggctgttttaaggattaagtgaaacaaatataaaaacatttagtccactaactcacatgtgggaagtgctcacttaactgtaattgttaatgattgtcatagccctgtgtttggatagcattttcattccattgttgactttgtttttaaggattccttgctgcagaggtgcatgtgagggaatttataatacaccaagcgggtgtagtctgtattctctatgaattatcacagatctttgaggttgaaggttgggggttagggaggggagaaaagagatttataatgttgtcccttgtgctagttgggaggaattgaaatacccctttctgtcta

SEQ ID NO: 179636 - DNA, 560 bp, Homo sapiens
cttggctacatttttttttcttgggccttatcaccagctggcatatgctaaatgtgtactcgctgggttgtgtattgtcttcccacacccactcacatctaagcttgtagagagagggaatttttttcactttaattcagwgctgtattctcagcatctataaaattatttggcacacaagaggtgctcaataaatgtgtactcagtgaataaattaatgaatgggctgttttaaggattaagtgaaacaaatataaaaacatttagtccactaactcacatgtgggaagtgctcacttaactgtaattgttaatgattgtcatagccctgtgtttggatagcattttcattccattgttgactttgtttttaaggattccttgctgcagaggtgcatgtgagggaatttataatacaccaagcgggtgtagtctgtattctctatgaattatcacagatctttgaggttgaaggttgggggttagggaggggagaaaagagatttataatgttgtcccttgtgctagttgggaggaattgaaatacccctttctgtcta

SEQ ID NO: 179637 - DNA, 543 bp, Homo sapiens
aatcaggtagaatacctcagaaaacttcccgcctcagtagtggggcaaaacacttgtaaaccctaaacaaaacacgtgtaagaattcaactgtttccaaacaacataatcatgtcccagaacaaagctcaataaaatttacaggaattttaaaatatccagcacccaataagataaaaatcacagtatctggtatcagataaaaaattatttggcatgcrtagaagcagatatctacaacacacaaaaagaagaaaaatcaattaatctaaatcagtagttctcaactgggggtgatttctcactgtctgcatcctgggagcattagtcaatatctggagaaatgtttaattgtcgtgactgaagatgggactggcatttagtaggtggaggacaggaattctgctaaatatcctatgatgcacaggaaatcccctacaaaaattattagccactgaaaaatgtcaatattaccaatgttgacaaaacttactgaaaaccaggtcagaaatgacacaggtgacagaattagtaaataaggaca

SEQ ID NO: 179638 - DNA, 560 bp, Homo sapiens
cttggctacatttttttttcttgggccttatcaccagctggcatatgctaaatgtgtactcgctgggttgtgtattgtcttcccacacccactcacatctaagcttgtagagagagggaatttttttcactttaattcagagctgtattctcagcatctataaaattatttggcacacaagaggtgctcaataaatgtgtactcagtgaataaattaatgaatgggctgttttaaggattaagtgaaacaaatataaaaacatttagtccastaactcacatgtgggaagtgctcacttaactgtaattgttaatgattgtcatagccctgtgtttggatagcattttcattccattgttgactttgtttttaaggattccttgctgcagaggtgcatgtgagggaatttataatacaccaagcgggtgtagtctgtattctctatgaattatcacagatctttgaggttgaaggttgggggttagggaggggagaaaagagatttataatgttgtcccttgtgctagttgggaggaattgaaatacccctttctgtcta

SEQ ID NO: 179639 - DNA, 331 bp, Homo sapiens
tgtgtgcttattcatctgccagcccctgtagaatgtccaatgatctgatgttcaatgcatccaaaatgaggaaggcaggaagtcaaagttcagagcttccttgtttgaagggaaacaaaaacttttccccccagaatctctggctttccattgtataaacatggattctacaacattggggttagatgtgctgactggtgtcattgagtcttacatggtgaggggctatgaggtaccaggctttactggcttactgtacccagagaaagttcagacattctgaaaatgtagagtctccmtagggaaaccgggcctcttgtaatggtggagc

SEQ ID NO: 179640 - DNA, 443 bp, Homo sapiens
aaatctcctggcttcagatactcttagagcagagcttagtgtttggaatgagaaaggaaaaaatgactatcagagcatcagcttatgaagcaagtatccttagaatgcttaaggttttgaagggcaattctgataaatatagtctcattgtttgtgctggggaaggagcatggcctcytagaactgtagaattctacagaatcattttacaagtgaagaacctgaggcccacagagagagaaagcattgggaaatatgtttatggatttgacccaacactcctgtttagggaagatacatccagatggccactcctatacccataacatacactatgattttttatttccttggtcaaccttccaatttgatacagcccagtcctcttgcttattcccatctccccacccagtgccactcctggccacagactgggatgatag

SEQ ID NO: 179641 - DNA, 443 bp, Homo sapiens
aaatctcctggcttcagatactcttagagcagagcttagtgtttggaatgagaaaggaaaaaatgactatcagagcatcagcttatgaagcaagtatccttagaatgcttaaggttttgaagggcaattctgataaatatagtctcattgtttgtgctggggaaggagcatggcctcttagaactgtagaattctacagaatcattttacaagtgaagaacctgaggcccacagagagagaaagcattgggaaatatgtttatggatttgacccaacactcctgtttagggaagatacatccagatggccactcctatacccataacatacactatgattttttatttccttggtcaaccttccaatttgatacagcccagtcctcttgcttattcccatctccccacccagtgccactcctgrccacagactgggatgatag

SEQ ID NO: 179642 - DNA, 466 bp, Homo sapiens
aggatatacacgtgtaccataaaacagaaaatgaggttagctgaacaacatgtgcttcttgtttatcccatgatgattcctagtgactactatttgcttttccaaagttacacataccattttttaaataatstattatagaatcttttgcctaggattttaaactaactcatgaatctgagttcataaaactattttgaaaataggaataattgcttgtctccagtctttcagaacattcccactctgcaatgatttcctgaaatattactagcaatattatattacattatagtgtgacatctggcctgggatgtaattgttgagattaagagacttaaggcagatggagtcctcttataactgggtcaccagaactggtcatttgtattcattattcctaatctaccccaggtttgtgacttataggactagtctctcagtgagcctggacttccaccatcat

SEQ ID NO: 179643 - DNA, 624 bp, Homo sapiens
gttataatattataaatattgggttgaattaaatgttttcaaaataaatatataatctatttgtatttactttttaaaatgtagctactagaaaatttaaaattacatacttgatttgcatttagatatgtatctgttgaaaactactgaatagtgctgctctagattgaaataaggccattttctgccatttaagaaactaggagaagaaaatacagctgaaaccaggggtcataaatgyaaatggttacatctggtggtacatgaaatgcttgagatctggatgtgaaacaaaagcatttctattgcacccaagcctaaaacctatcttgttaccttgccttttaaaacactgtgagcatgaagcagccaaccaaaagatgcctgccatttgccatttaagaagcattggagtaaaaagaaagaatggagagaatggatatttactgggggaaggcctttccttattcactggtagggataagggctcatgtttaaatgatacactctcacactcccaattttagtaatggagcaaagataaagaggcaaatggaaagtctgaaatccatagggtcttagggtcttagattttctttaaatatctttgtgtgtgtgtggttt

SEQ ID NO: 179644 - DNA, 439 bp, Homo sapiens
gaccaatgaaaaatcaacacaatgatgagtttatgccaagtttatacaactttttatggctgaggatagattgaaattttgattaatttttttatctcctttttataacggtaaaataggtaaactggttttgtaaaagagctttttagggaaaaaatgttgaatattcatactttttctcaatcaaaatgtcaatgcttacaccaaaaatagaggttttttttgttgttgctgctygtttgtttgtttgtttttaagacggagtctcgctctgcatgcagtggcacaatctcggctcactgcaacctccgcctcccaggttcaagcgattcttctgcctcagcctcctgagtagctgggattacaggcgtgtgccaccacgccgagctaatttttgtatttttagtggacacagggtttcaccatgtaggtcaggctg

SEQ ID NO: 179645 - DNA, 439 bp, Homo sapiens
gaccaatgaaaaatcaacacaatgatgagtttatgccaagtttatacaactttttatggctgaggatagattgaaattttgattaatttttttatctcctttttataacggtaaaataggtaaactggttttgtaaaagagctttttagggaaaaaatgttgaatattcatactttttctcaatcaaaatgtcaatgcttacaccaaaaatagaggttttttttgttgttgctgctcgtttgtttgtttgtttttaagacggagtctcgctctgcatgcagtggcacaatctcggctcactgcaacctccgcctcccaggttcaagcgattcttctgcctcagcctcctgagtagctgggattacaggcgygtgccaccacgccgagctaatttttgtatttttagtggacacagggtttcaccatgtaggtcaggctg

SEQ ID NO: 179646 - DNA, 439 bp, Homo sapiens
gaccaatgaaaaatcaacacaatgatgagtttatgccaagtttatacaactttttatggctgaggatagattgaaattttgattaatttttttatctcctttttataacggtaaaataggtaaactggttttgtaaaagagctttttagggaaaaaatgttgaatattcatactttttctcaatcaaaatgtcaatgcttacaccaaaaatagaggttttttttgttgttgctgctcgtttgtttgtttgtttttaagacggagtctcgctctgcatgcagtggcacaatctcggctcactgcaacctccgcctcccaggttcaagcgattcttctgcctcagcctcctgagtagctgggattacaggcgtgtgccaccacgccragctaatttttgtatttttagtggacacagggtttcaccatgtaggtcaggctg

SEQ ID NO: 179647 - DNA, 390 bp, Homo sapiens
gctcctgattattcagtgttacctgggggcacgtgattcccgcactttctcagcctcctcaacgtaaacatcgtcatccacatcttcatcattttctgtaaatacaggaatgttcattcagatatttctcacttcacattctgcaagcatagtcagcccaatgtgtgcagacacatgaacatctaggcatgggtcaccattcaactgaaagctctcatgttttatctttaacaaaatgccctggcacagtttcctaatccatcaggcaatgcatttctgatctggagggccaccatcaagatgtggycaaatattgaaaacatcttttggtccccatatccctggagacttgtccagcctctctctggactttggcagctgtctccgcca

SEQ ID NO: 179648 - DNA, 471 bp, Homo sapiens
tgtcgtcccattttctgtaactcttccgcacctttcttccttgcaccctacacccttgttattacattgggcctgcccatgtaatccaggataatcttcccatctcaagatccttacttaatcacatctgcaaatcccttttgccatgtgtggtaacgtattcacagactccagagacttacttggacctttttgggggcccattattctgacctccacaagtgtatttagataattatctattcttccatttatttttgtcctgaatcttctggatttttggttagtaggtaaaatttttgactattataaatttcctttgagtaattaggaagattttatacattktaaattatttcctggtaaacttttaggctgatattcgtcaataaatgaacaggttatatctatctcaatacctaacagtttattctttaagtgatgactattatctaattagggacttggaag

SEQ ID NO: 179649 - DNA, 629 bp, Homo sapiens
tttgtattgtttgcatccccttgccctcaataaataaagttcttttttagttccaaatttgagacagaatgtttgttgttccctcagaaattcttgttccccaagaggcagcttgcccttgggcagccagcacacagcagagcttttcttacacagcagagcttttctcacagaactggcaaaatgagaaaacactcttcattcaggcttggagtctgacttctctaattgttctgcccttgtagctgtgtctatatgaaggactcaaacttgaaggattaggagaaggctctacaggaatagatggtaagtttataattactgggcacagttttgcccagttaaatcagtgcttttctagccagcactttgcatgcctgcaatgtctgaatccawttttcatagcaaagtgtcagcaaacctaaggcagaactaggagaaccaatcaggagagggtgtagcttgacaccttggtaataacatcacattagcatctattaagtcaactcccagatgtcaggaaatatggtaggcatgacttatacacggggcagtacacttttgttgaaaatgaagtgtcagtactgatgtcttgataatcaatgcaaaatgttcctcctagccctttt

SEQ ID NO: 179650 - DNA, 629 bp, Homo sapiens
tttgtattgtttgcatccccttgccctcaataaataaagttcttttttagttccaaatttgagacagaatgtttgttgttccctcagaaattcttgttccccaagaggcagcttgcccttgggcagccagcacacagcagagcttttcttacacagcagagcttttctcacagaactggcaaaatgagaaaacactcttcattcaggcttggagtctgacttctctaattgttctgcccttgtagctgtgtctatatgaaggactcaaacttgaaggattaggagaaggctctacaggaatagatggtaagtttataattactgggcacagttttgcccagttaaatcagtgcttttctagccagcactttgcatgcctgcaatgtctgaatccaattttcatagcaaagtgtcagcaaacctaaggcagaactaggagaaccaatcaggagagggtgtagcttgacaccttggtaataacatcacattagcatctattaagtcaactcccagatgtcaggaaatatggtaggcatgacttatacacggggcagtrcacttttgttgaaaatgaagtgtcagtactgatgtcttgataatcaatgcaaaatgttcctcctagccctttt

SEQ ID NO: 179651 - DNA, 547 bp, Homo sapiens
tagaattttcagtggtgtttgaaatttctcccattagaataataattatgactttgtatcataacttggkgttccaaatgctctggttatcgggacagagaaatatcttaaacattaatagccatcaaaggttgagtgcagtggctcataccccttatcccagtacgttaggaggcagaggtgggaggattgctagaggctgggagtttgagaccagcctggtcaacagcaagactccatctctgaaaaaaatcctaaaattacccaggtgtggtggcacgtgcttatagtttcagctcttgggaggctggggcaggaggatcacttgagcccaggaatttgaggctgcagtgagctatgattgtgccactgcactccagcctgggtgacaagagtgagaccttgtctccaaaaaaagaagaaaaaaaaattatcagaattctggatccacagctaccctgccagcactgagaaaaacccactaaaacaggatgggttattctggacagtaaatgattacaaaagtggggatagttctgctgaaagt

SEQ ID NO: 179652 - DNA, 547 bp, Homo sapiens
tagaattttcagtggtgtttgaaatttctcccattagaataataattatgactttgtatcataacttggggttccaaatgctctggttatcrggacagagaaatatcttaaacattaatagccatcaaaggttgagtgcagtggctcataccccttatcccagtacgttaggaggcagaggtgggaggattgctagaggctgggagtttgagaccagcctggtcaacagcaagactccatctctgaaaaaaatcctaaaattacccaggtgtggtggcacgtgcttatagtttcagctcttgggaggctggggcaggaggatcacttgagcccaggaatttgaggctgcagtgagctatgattgtgccactgcactccagcctgggtgacaagagtgagaccttgtctccaaaaaaagaagaaaaaaaaattatcagaattctggatccacagctaccctgccagcactgagaaaaacccactaaaacaggatgggttattctggacagtaaatgattacaaaagtggggatagttctgctgaaagt

SEQ ID NO: 179653 - DNA, 409 bp, Homo sapiens
gggaatgaagactccgtagggcttttgtctgttattattttcaacccaactgtaaagaaccagcaaagatcaacatatggtctaaagtggataaaagcagagtgaaactgagtttctaatggggtgaacattcagcaaaagacaggattcattatctttgcagggccagctgataacacaggatttctgcaaagaaaaagtagaaattgcactctttataatgagctcttcagaggagccttaaattgtttcctgctaatttcaagcagaacaatcagagtaaacagactgttgacttacctttggtaagatgagcacacctatatggacamataaaggtgaacctcagctgttagtagctgtgcctcagagaaaacatatgcttattaaacagctatgtctccttaat

SEQ ID NO: 179654 - DNA, 579 bp, Homo sapiens
ctctttcttgcaaatagcctattccattaggtggtctcacagtatttcttgggaaaaccagatcccatgcctgtcattcatattacaaattacaaataccaaaactgatttatgacttaaagatgtacgcttcatgcattttaatgacaggaaaaaaatacattgataggattagagtctaatgttaaggccctggaatttcagcctcagttggcatataacagaaaatatctggggagatccaagcatttcatccttcatgattaatcacatagaagagcatctcactctcttatattaagccaatcctgctccttatttttcatgaaaccccaaaagcctttagtcctggtgtttccgttggtgaaattgaaatgtgagatagcataaaaagaagtaggtggagaatcaaaagcctgaggcttaagtccaaggtcacttcttgtcagtagctctagcctcagttttgcyatcttggacattgcattggtgggctcattcattttttcaattcatactaataaagctccaactgtaaaatgagaatgacagtaactccatctcacagggctgtgatga

SEQ ID NO: 179655 - DNA, 411 bp, Homo sapiens
tgatagacgggaataggttaagggaagatcatacccagtgctgagtggctgaatgtcctccactgggcagccatgtcctgagggagaygcagagaagaccagcaaggcctctctggcctcaggggtgctggcagaacagaacttcccaaccaagagtctagcattgctcagggcaagggtcagcctctctcacttcttcacactctctggcttcttgaatattcatccatctgtatctaataaggctcttctcaatgacgggagaagaaggcagctaaagagagcttttatttctcttggcatcgtcaccttaagcatttgcttatactgaaactgtaggtagaaactaatgcagtatgtttttttgtgtgttgttttttgtttgtgtgttttgtttttttcagacagatc

SEQ ID NO: 179656 - DNA, 411 bp, Homo sapiens
tgatagacgggaataggttaagggaagatcatacccagtgctgagtggctgaatgtcctccactgggcagccatgtcctgagggagacgcagagaagaccagcaaggcctctctggcctcaggggtgctggcagaacagaacttcccaaccaagagtctagcattgctcagggcaagggtcagcctctctcacttcttcacactctctggcttcttgaatattcatccatctgtatctaataaggctcttctcaatgacgggagaagaaggcagctaaagagagmttttatttctcttggcatcgtcaccttaagcatttgcttatactgaaactgtaggtagaaactaatgcagtatgtttttttgtgtgttgttttttgtttgtgtgttttgtttttttcagacagatc

SEQ ID NO: 179657 - DNA, 411 bp, Homo sapiens
tgatagacgggaataggttaagggaagatcatacccagtgctgagtggctgaatgtcctccactgggcagccatgtcctgagggagacgcagagaagaccagcaaggcctctctggcctcaggggtgctggcagaacagaacttcccaaccaagagtctagcattgctcagggcaagggtcagcctctctcacttcttcacactctctggcttcttgaatattcatccatctgtatctaataaggctcttctcaatgacgggagaagaaggcagctaaagagagcttttatttctcttggcatcgtcaccttaagcatttgcttatactgaaacygtaggtagaaactaatgcagtatgtttttttgtgtgttgttttttgtttgtgtgttttgtttttttcagacagatc

SEQ ID NO: 179658 - DNA, 411 bp, Homo sapiens
tgatagacgggaataggttaagggaagatcatacccagtgctgagtggctgaatgtcctccactgggcagccatgtcctgagggagacgcagagaagaccagcaaggcctctctggcctcaggggtgctggcagaacagaacttcccaaccaagagtctagcattgctcagggcaagggtcagcctctctcacttcttcacactctctggcttcttgaatattcatccatctgtatctaataaggctcttctcaatgacgggagaagaaggcagctaaagagagcttttatttctcttggcatcgtcaccttaagcatttgcttatactgaaactgtaggtagaaactaatgcagtatgtttttttgtgtgttgttttttgtttgtktgttttgtttttttcagacagatc

SEQ ID NO: 179659 - DNA, 562 bp, Homo sapiens
tggtagttgtgttatcataatgatgtctgccatatagactattgtagggtcaaatgagatagtatatttgaaagcactttataaaacataaacctttatctacactatatatataacactatagagtagcataaagtatattcatttttatttaataacatttctatcagttataaaatttggttataaactataattgtatcatgtgctagtaagctttagtgaatttcagctctgctttagtttgcagtttcmtttttaacctataatcttgtacaagttgttgtgaactggtcaactgaaccatgtatatcaaaggaccgttcttcactgaagctctatttgctataagcagttaaccaactattctttgttttttgagccctagatgaatgcaggtgattttcattggttttcattacatgagagtcacaagaaacaagagacttccaaagtttataaagaaagtataatatgagattattcatgcatagacttcagttcaccttgtacaaataaaacctaagtatttagtgttctcacatagtattacatttgttgg

SEQ ID NO: 179660 - DNA, 187 bp, Homo sapiens
ggatgaatcagggttagacctgaggaggcactctggtggcagactgccacagctggtgtcwtgggctgtaggaacaaatcttgggaccaagccatccagcctccctggctccagcaggggaaaagtgcaacctgaagctgcagaaatgggtgctgccctttcctgcccagggagcttagaatgttag

SEQ ID NO: 179661 - DNA, 662 bp, Homo sapiens
tggaggcagtgtttcaggactttaaaaaatctctttagtgcttccttcagtgatacgaagttaaaaccaggtaatatgagtgctcacctgatttttggttcttaggaaggtatttttttctgtgtagataattgttttcttggtgttcttgcagtgaggggacaattggtggagccttctattttgccatcttgctctgccttctctctaaatatgtttttatttacaaattgtaggctcagtgttttagaaataaagcgtttaatataaactatgtttttagtccacatggtcaatatgtactatgtctatagtatgctagtcatactactagggaaaaattaagaatatacctagagaaacataatcattaaaacaaatgtgtttggatcatgattatgaactcaagtgtgagtgcttaagttttattttattcaggatgtttatgtagattatgtagaaagtatgaaagrttattcatagtctatttttaaaccagaagcaactgtatcaagttaaagcctagaattgtaatttcaattggaatatcaccctgtctaattaggaacatttcttcctggtttgaaatactcttccagtatatgttgtaatgaatgagaagagctgtggttttcactgatgctcctgatatttgttggaac

SEQ ID NO: 179662 - DNA, 516 bp, Homo sapiens
aagatgatgggaaaagatgaaaggacatgcgtaaaaggcacattagctttttagaggagaggcagtaggtaccataatacgtattcagcctcacaagaaacaagctttcctcagtcagtggttttcacattattttcggcaaagsctagggctccctttccttgaagaatctccaggggcaactagaagtatgaggtggggctgtgtgtgagcaggatactcactgcagcttccatcagaataatcatacatttgtacattgtgcctacacttctggaaaagtttgtctctggataaatgtctcaacttcctcttttgtagaatgggaaaaatagtaattcatatttcagagggccattacattgattgaataaattattttagagaaaatgcttgaaagagtacccaatacatggtggtagaaaagtgttagctgctataatattagtaaccttagaacagtgttagctgctataatattagcaacttttatttacacatctttaccacatatta

SEQ ID NO: 179663 - DNA, 528 bp, Homo sapiens
atttatatatataggtaaatgattactgcaatactgctaattaacatatccatcacttcacatagtatacactacattgttattaaccacagttattagatcaccagaacttattgatattacaactaactttctacactttgaccaacatctatccactcccccagactctggtaaccacccttctgccctctaagtttgactttttaagatttcacgtatcagtgagatcatgcagtatttgtctttctgtatttggcttatttcwttcagcataatgtcctccagtctcattcatgctgttgcaaatgacagaattttcttcttttttatggctgaatcatattctggtatgtgtctgtgtttgtgtctgtgtgttttttgtgtgtgtgtgtgtacattttttatccattgatctattggtagacacaagctatttttatattttggctataatgaataatactgcaaagaacatggaggtacatatatctctttgagatactgaattaattttctttggaaacc

SEQ ID NO: 179664 - DNA, 528 bp, Homo sapiens
atttatatatataggtaaatgattactgcaatactgctaattaacatatccatcacttcacatagtatacactacattgttattaaccacagttattagatcaccagaacttattgatattacaactaactttctacactttgaccaacatctatccactcccccagactctggtaaccacccttctgccctctaagtttgactttttaagatttcacgtatcagtgagatcatgcagtatttgtctttctgtatttggcttatttctttcagcataatgtcctccagtctcattcatgctgttgcaaatgacagaattttcttcttttttatggctgaatcatattctggtatgtgtctgtgtttgtgtstgtgtgttttttgtgtgtgtgtgtgtacattttttatccattgatctattggtagacacaagctatttttatattttggctataatgaataatactgcaaagaacatggaggtacatatatctctttgagatactgaattaattttctttggaaacc

SEQ ID NO: 179665 - DNA, 528 bp, Homo sapiens
atttatatatataggtaaatgattactgcaatactgctaattaacatatccatcacttcacatagtatacactacattgttattaaccacagttattagatcaccagaacttattgatattacaactaactttctacactttgaccaacatctatccactcccccagactctggtaaccacccttctgccctctaagtttgactttttaagatttcacgtatcagtgagatcatgcagtatttgtctttctgtatttggcttatttctttcagcataatgtcctccagtctcattcatgctgttgcaaatgacagaattttcttcttttttatggctgaatcatattctggtatgtgtctgtgtttgtgtctgtgtgttttttgtgtgtgtgtgtgtacattttttatccattgatctattggtagacacaagytatttttatattttggctataatgaataatactgcaaagaacatggaggtacatatatctctttgagatactgaattaattttctttggaaacc

SEQ ID NO: 179666 - DNA, 537 bp, Homo sapiens
taagaaattataaaagtattaatttggggaacaaataaatgtccataaaatcttcacaatccatgttcttctgccatgacttcagccgtttggggtccctgacttcccgaaacagatgccctttatttttttcttttgtctcattgctctggctgggaattccagtactgtgatgaataaaggcagtgagaggggcatyattgtcttgtttctgatttttcagtttttcaccattgagtaggatgttaactgtcagctggtcacatatgacacttattaggttgagatacattccttttatactggttttgttagaatttttttaatttgcaaatttatttttaaactgatatataaaattgtgtgtattattcatgtatagcataatgttttgaagcatattatacacattgtgaaatagttaaatctagctaaataacaaatatatagttatcatttttgtggtgagaacactgtacatccactttcttagcatttttcaagaacacactatattatcattagtcactatgctgt

SEQ ID NO: 179667 - DNA, 608 bp, Homo sapiens
tacaacaaatctacacttttacttcccccacacacataattttcatttttaatgtctgaattacatctttttttatagtatgtattcctcaacaatttatttcaacagtagttattaatgtttttgtcctttacccctgtactaagaataaaattattttatatactaacattatagtcctagagcattctgattattgctctgtattacttagaccactgggtttgtgcatttataacttttatgttatttattagaagctttttgtttcagtttaaagaacttcctttagcaattcctgtaaggcaggcctaatggtgataaactcccttaacttttgtttacctgagaatgtttttattttttcctcatttcttttttctttttttaatgtttgtagcaactttattcaycagaaccagaaaacctgaaaaatattcagccatccttcaatgggcatgtggttaaacaaactgatacatccataacatggactacctcagcaatacaagaaatgaactattgatacatgcagaaaattgtatgaatcttcagggagttatgctgagtgaaaaaagccaatccctaaagattagacattatatgat

SEQ ID NO: 179668 - DNA, 432 bp, Homo sapiens
tagaggtggtaagtagaattcttgtcttgctctagatcttacaggaaaagctttcaactcctccccattcatataattttagttgtgggtttgtcatatatggacttgattctattaaggcacaattcttctatacctaatttattgagagtttttatcatgaaggaatgttgaattttgcccaatgtgttttctgcatctattgaggtgatcaatgttttttgttttttatcytgctgatgtgatatatcatgtttattgatttgcatatcttgaaccatcttttcaaccctgatataaagcctactcagtcataatgaactatctttttaatgtgctattgaatttgttttgctagcattttgttgattttttttttcagtctatgttcatcagagatattgacctgtcatgttctctttttgttgtttc

SEQ ID NO: 179669 - DNA, 376 bp, Homo sapiens
tgaaagagcacgcttatttcctgagacagtatattcttaaatttaaaaagaacaaattgtcttttataaataatataaagtgaaagtcggcctcactgtaatgtattcagtgcttcacattactacgcagtcaytgaatctcctgctttgcaattatgactgttgggttacagccgattaatttgtctcttaaaagccattgttttagctatacaagtaactgggaaaaaaactttagaagaattacttgtaaatcataaattaattttttagcaacatatattagtctatttgagctgctgtaacaaaataccataggctgggtatctcataaataacagaaatttatttcttattctagaggctgggaagtcta

SEQ ID NO: 179670 - DNA, 617 bp, Homo sapiens
cttaaacaaaaacaatggcccattgcctcatcaacctccattcctagatctttctcctaaagattacctgcatatctgtgaatgatgtgtagggaggaatttcttgtcaatttttagatattttgtattaggttcttaccaaggcagatgaggatttagcctacttatagctaccccatcttccttccttttcatatagttataatatcattttgttcctgaatccttatatttgaaacattaaataatattcttaacctttgctattttttctgctaattataaacagtaatttttaaattctatagttcataagatgtagatattagttacctcttgctcctcctctcagcatttctctcttccagtttctgttatgtatattttaacttttacattgtcacagttgataacaatttcttactatatattacatgaaagagggggttaattaaactcaagaytaataatgtttgcattctgtgaattggttaagaaaaaaaatagaccaaaaccaattttgttcacaataatcatggttttaagaaacctgtaccttgttttgcttaaaaactccagaagaagcctcataatatgcaatatgaaatgtgtttaaa

SEQ ID NO: 179671 - DNA, 562 bp, Homo sapiens
attaaatttaaaggagtttaactgagcaatgagcaatttctaaattgggaagcccccagaattacagcagattcagagagactccagggatgcctcatggtcagaataaatttatagacaaaaaaaggaagtgatgtgcagaaatcagaagtgaggtacagaaacagctggattgattacaggttgatgtttaccttatttgaacacagtttgagcactcggcagtgtatgagaggttgaagtatggctgctgagattggccaagactcagttattgttaaaagcacatactcctaaattagggtttcaatcttgtccacctattaagttaggttgtggttcatccacaaggactcaaatatagaagtacagagtccttctcaggttatatttagtttactttaacaagactaaaaggttatagcatttctctcccactgacaatcattacccaagaaaagttttcgtttgaatgaggtggatcaagctaaaacaattatgcatatagtttagcaattaatttagctccargtaagttaaagaactaacgggtgttcaaaaa

SEQ ID NO: 179672 - DNA, 391 bp, Homo sapiens
tatagattggatgtactaaaatgtatttcagtacaaaacattgttgcagaaattaaaggcaagaaatatttctttagaatacatagagaacaatatgaacatgcttactattgtggtttcatcatttacaaatatgcaactacatatttaactatttcataaacattttatttttcagyataccattttggcagcaataaattaaaaatggaaaatgcaggtttaattattagtccaatttctgaatgccaagaaaattgttgatgattatgcaacttaaacataatgtctgtgaatatttacacccaccatggggtctataatgatattactgatcacataaaaaccagaagacataggaacactaaaaaagcatcaaaaaaaggaggag

SEQ ID NO: 179673 - DNA, 649 bp, Homo sapiens
aatattaatattaatgattgtatttagtgaatatttactatgtaccacttcatgygtttataatacaattttaaatttagtcctcataacaacctaatgcctgagaaatattgcacaacacctaaaagccacatatctagaaaatgattgaaattggactcagacacaggtgtgactatgaggctcagccacatcagatgttatatttaattacatacagaaatgcacattatttgctaaaggatagaaagtataatatatagtgttattacattaaaaatctttaaatatatggagaaaaaagctagaaagacattactacagggagaatagttacttctgggtggtgggactacagacaattttccaacttttacgcaatgaacatatgttgattttataatttaaaaaaggtgggtttcttcctcccccaaatctccctgccccaaaatgttaattgcagcattatttataagataatgtggaacaacttacatcatctctaataacagaagaattgtttaataacatattgttcaattcaatgtagtaatataaaatgattaagtacaagcagcaaattatgaaaatatttattaaattatgttctgtaaaataagggagaatagaagttatttacactaagatt

SEQ ID NO: 179674 - DNA, 642 bp, Homo sapiens
tattgctacatttaacatgagtagatctcacagacataatgctgaatgaatgaagccagatgaaacatattgcatgaattcagtcatggaaagttcaaacacaggcaaaaataagaaggattagggatagaagaagggatagtgactggaggaggactcctgggggtgttagtaatgctttatttctggatctggttggcattacatgattgtatttattttgaggacagatcaaactgttcagtttggcatacttttctgtctgatgttatagttcaawgaaatgtttgtttaaataaaatatagaacagatatgatcacagaatatatgatagcattttaaattaaaaagcattaattatgggaatgagttgaaaattatcagatatataacatttttgagttcacaataacaatacagtagtctcctcataatccacaggagatgtgttctgagagactcagtgagtactgaaaccatggagagtaccaaaccctatatctacagagttttttctacaaatacatatgataaagtttaatgtataagttatgcacaggaagatattaacaacaataactaatagtagaaggaaacaaatacaacagtatgtcagcgtcactactcttgtgttttggggc

SEQ ID NO: 179675 - DNA, 599 bp, Homo sapiens
gtattatggctgcctctgctgcatcacacaggttgccagggacgtgggggaaagccaggagccacaggcctcacccagctcccatgcagctggcagcctgaaagacaggtctcactcccaccgagctcccccaacagtactgagtttaattccagagagttggtgaccagggctgagtacttgccccaggctacactcctcccagctgagaacaagctgacatagttccttggctgtcctatggagcttgaggtgccattctacctccttcaaagggtctgtggattctcttggcttttctggtatgttcctgaagtaattcttggagcaaaagtttacagcgtgagtctccatatgctgctctgtccatccgaatgggacctgcaagttagttttgcctcctatccgccatttttctstaagtctccccccaaaatcaatgcagaaagaaaaaagagcaacaaaaatatggaagaaaaatgattaaaaaataagtaccaaagttaatagtataacacattaataacaatgataaaattaagtggtttaagtgctcctcttaaaagcaaaagggtatcagaccaataaacctaaatccg

SEQ ID NO: 179676 - DNA, 559 bp, Homo sapiens
aataatctagacttctaagcacctaatatacagcttggaaactatataaagccagaactgaccaaatacaaataaaattaacaaaacagtagcactgtcagagatttaaacacacacattttaatgactgayagaatttgtagacaagcatatcaatgataatagcgtgttttaacaatgtaatttatcagcttcaaactgtagaagacatattctttctgagcaagcaagtgggccacataacacatttcaaaggatgaatttcatatccatttcattctttaactgctatatattcaacttataataacatgtatataattgagtaaaaaagataattcaaagaatttgctctaaaaacttcattaaaaaactgttagaactaatatcaaattcagtaaagttgcaggatataaaatcaacatagacaaatcagttgtttctttacatcagtgacaatctattggaaaaggaaatttttaaaaatcccatttagaccacatcaaaaagaataaaatacttagggataggtttaaccaaggaggtaaaagacctgtac

SEQ ID NO: 179677 - DNA, 581 bp, Homo sapiens
agttgtttctttacatcagtgacaatctattggaaaaggaaatttttaaaaatcccatttagaccacatcaaaaagaataaaatacttagggataggtttaaccaaggaggtaaaagacctgtacattgaaaactataaaacatagatgaaaaaaactgaagaagatacaaataagtggaaaaatacttcccattcatggattaaaaaattaatattgttagaatgtccatactacccaaagtgatctacatattcaatgcaatccttctcaaaaatttaatggcwtttttcaaagaaataaacaccttagaatttgtatggaatcaaaataggcaccaaatacacaaagcaacttgagaaagaagaacaaagttgaaagcatcattaccttacaagctgtagtagtcaaaatagtatggtgttggcataaaaacagacatatgggacaatgaagcagaatagagagcacagaaaataaacacatgcatatacagtcaactaatttttgatagggtcaccaaaagaacacaatggggaaaggatagttgtttcaataaatgatgtcgggaaaactggattt

SEQ ID NO: 179678 - DNA, 575 bp, Homo sapiens
tcctgcttatggtgattttgatatttaattacttgtagtgaatgcatttgcagtaatagatttatcctgttctgactcaatcctgaaatctgcttggaacattcagattaaagaaaatgcttactttttcatctgtcactctatttaggcaaaatttttcctgttaattacttttgtatttaatactttttttcctttaggaacaaatttactctcttaagttctgttaaatatttatttagttgttatacccaagagcagaggaatagatgaatatggaaaatggtccaayagttaaaagtgctcagatatattcatatgctagaatgtgcttttattatttaatggagaaaatgaatttttctgcagaaatgttattgttagtactttctgcactactggggagaatggaagtcatctttattagccttctcatttgaagagaatacaaactttcagcaaagttttcatgaaagagattattctcacttcagggagctcagtatgatctgtgctgtggatcagaaaactgaaccaggccacgaggactccattggaacctaaatttgcttgtt

SEQ ID NO: 179679 - DNA, 604 bp, Homo sapiens
gtctctgtagcttgtgggtccccagtgcaaagccttatttatgtgctcttttgccctcacctgctgtatgattctactagattccaagcasgaagcagaatgaagcttaccagggtataattctcattatatttactttctaactcccttcctggatttcctgtggggggaaatgtgtgggttttgggcatgtactcacagttacatgtagggtctcagttccataacatctagcccagcacatccattacagagggactaccataatacacctgctatcttggattttatgtattaaaaattttatcagaatcactttttattgttccacaaacatgcattactacattttagttataactaaatttaatatcaattatagataatagagaaaataaaacacatcactcacagactgatgtaaaaccatggttttactgattatctacttccagccctttcgtaggtataatttacacaattttggagaacatacaatcttgcgattgttttttatttagctttatatattttaccatttttcatatttgtagtcccttctagaatcattgttttaaatgatgcattatattctattaaaaag

SEQ ID NO: 179680 - DNA, 467 bp, Homo sapiens
aaggggagaaaaaaacctcagggttaaatggaactcaatagaaattcaaatatgcttaaataaaattttctcttgggctttaattctggtctttgatttgcattcttctaaaaaaattaaatgttttaaatatggcagtccttttgtatcyttcatttaatcacaaacctttgactttgggcattgttaataacattaaatattgagcttacattgttagcttaatagtaagtggaaaggatggctttgtaattgtatgatttttctcactcaagccgtttcttttaataagtccgtttaaaaattcaagagacagtctaatattagggtacttactagaggaactactcatccaagaaagaggcatagctggtgcaaatcatttaaaatttagaaattaatgagttttactgagtttatccttgaaatttattgaaatgccacctaaaatgtgtgttaattgggcg

SEQ ID NO: 179681 - DNA, 467 bp, Homo sapiens
aaggggagaaaaaaacctcagggttaaatggaactcaatagaaattcaaatatgcttaaataaaattttctcttgggctttaattctggtctttgatttgcattcttctaaaaaaattaaatgttttaaatatggcagtccttttgtatccttcatttaatcacaaacytttgactttgggcattgttaataacattaaatattgagcttacattgttagcttaatagtaagtggaaaggatggctttgtaattgtatgatttttctcactcaagccgtttcttttaataagtccgtttaaaaattcaagagacagtctaatattagggtacttactagaggaactactcatccaagaaagaggcatagctggtgcaaatcatttaaaatttagaaattaatgagttttactgagtttatccttgaaatttattgaaatgccacctaaaatgtgtgttaattgggcg

SEQ ID NO: 179682 - DNA, 301 bp, Homo sapiens
gtgtgttttttcaaaagccactgcttctccgcaatgttctgatgtatctcacggaacagaaaaaggtggcatgctctgtttactcatacaaaagacttactacagacttcagctcagcacttcccaagctttccacctcttggctggacatttctatgtgaatgcctctcctacacaaaataatatgcctgcctgttatccctgcatcttatctccttcctgacttcctcaccttcaaccayacaggaatgactcttccttttgatactctcatctgatcatcagcaagccttttccgtta

SEQ ID NO: 179683 - DNA, 634 bp, Homo sapiens
ttgagtttattttcttatatggggagaaatatgagtctagtttccttcttctgtgtgtggatatccacttgtcccaacaccatttattaaagagactgtgctttcctcattgtgtgtkcttgacatactttgtcaaaaatcaaatggctgcaaattcatggacttatttctggtctcctcattctgcttccttggtctatgtgtctgtgtttatgccactaccatgctctttgattacgatcacttcatatcatattttgaagccaaactagtgtgatgcctccagctctgttacttttgctcatgatatctctggctatttgaggtcttttgtagacctggtagaaagtgtttggatgatgagggtctatccctcatgaatggcttgggccagcccactgctcataagtgctctctctttgagttcacatgagatctggtcacacgatgtgacatgtgtgctcccgcttcaccttctgccatgactgtaagcttcctgaggcctccctagaccaagcagatgccagcaccattcttcctgtaaagcctgaagaaccatgagccaattaaacttcttttctttatagattacccagactcagttatttcttcacatcagtgcaagaacagccta

SEQ ID NO: 179684 - DNA, 634 bp, Homo sapiens
ttgagtttattttcttatatggggagaaatatgagtctagtttccttcttctgtgtgtggatatccacttgtcccaacaccatttattaaagagactgtgctttcctcattgtgtgtgcttgacatactttgtcaaaaatcaaatggctgcaaattcatggacttatttctggtctcctcattctgcttccttggtctatgtgtctgtgtttatgccactaccatgctctttgattacgatcacttcatakcatattttgaagccaaactagtgtgatgcctccagctctgttacttttgctcatgatatctctggctatttgaggtcttttgtagacctggtagaaagtgtttggatgatgagggtctatccctcatgaatggcttgggccagcccactgctcataagtgctctctctttgagttcacatgagatctggtcacacgatgtgacatgtgtgctcccgcttcaccttctgccatgactgtaagcttcctgaggcctccctagaccaagcagatgccagcaccattcttcctgtaaagcctgaagaaccatgagccaattaaacttcttttctttatagattacccagactcagttatttcttcacatcagtgcaagaacagccta

SEQ ID NO: 179685 - DNA, 634 bp, Homo sapiens
ttgagtttattttcttatatggggagaaatatgagtctagtttccttcttctgtgtgtggatatccacttgtcccaacaccatttattaaagagactgtgctttcctcattgtgtgtgcttgacatactttgtcaaaaatcaaatggctgcaaattcatggacttatttctggtctcctcattctgcttccttggtctatgtgtctgtgtttatgccactaccatgctctttgattacgatcacttcatatcatattttgaagccaaactagtgtgatgcctccagctytgttacttttgctcatgatatctctggctatttgaggtcttttgtagacctggtagaaagtgtttggatgatgagggtctatccctcatgaatggcttgggccagcccactgctcataagtgctctctctttgagttcacatgagatctggtcacacgatgtgacatgtgtgctcccgcttcaccttctgccatgactgtaagcttcctgaggcctccctagaccaagcagatgccagcaccattcttcctgtaaagcctgaagaaccatgagccaattaaacttcttttctttatagattacccagactcagttatttcttcacatcagtgcaagaacagccta

SEQ ID NO: 179686 - DNA, 597 bp, Homo sapiens
tcatgtaccccaggacaggatccttgcacatgctgttctccctctgcctggagctgtctcttatgcgtctcccctggccccttacgttggccagctccttagctgaaatacatttattcatcagttcttagctcaaaagtagcttccttaggcaagcttttccttccaatccagagtaagtgggctttctttaaaattgcaatatattttcatgtatttgtgttactttatatcagagaactttttactgatgtctctgttaatgaatgataatctaatttttttktgtgtgtgtgatagttaagctggtctcctccatgaaattgcaaagtccatgagtttagaggctgcaactgttatctgggtcgccactgtatcctaacgcagcagataatatagtgtattaggtacacgctacctaatgcagtgacaggcaccaatttttattgaatgaagatgtaagtcgtatcctccaccttttgtgtgtgatgactgatgagttacatttgtagccttctcgagaagtatgctttgagtaactggagctgcctcattcaaagatacctgagaggtacacaaataagccctctcccccac

SEQ ID NO: 179687 - DNA, 390 bp, Homo sapiens
aatcacttgcaggaaaattcctattttaggttctacttccaaccaaacccaaataaagacatgcaataaatttgagcatttcttgctcaaccaaaaaataaaataaccaaaagaaccctgaaatagtatccattggtataaatctttggatagagaaaaattatagctcactcttctcaaagggggcagaaattcacagacatctgataatttggggggggggtagaacctccatagttattaaagcaaagttttattcattcctggaaatgtktattctcaaattgtgccactatacactaatacatttcttaacagcactattcaagtagagagcatgtgtgatgtctgactgccaggattttcatctcccctgtatttgtgggtttc

SEQ ID NO: 179688 - DNA, 623 bp, Homo sapiens
agccctccttcagtgactgttgatgttgccagcccagcctgtgtccctgcaaagcaagatcagtgcctccctgaccttgaagtcaccatcagattattgttgggttctcaaattctttartagtaggctttcagaagcccacattggctcatgcctgggaatgaatttttcccccaatacagaagaaaattcagagactgttaatgttattatcctgaatgatacagagttcatttggggctttaattagaaagatttgaattctcaccccatgatcaaatattctttatcatccagagaattaggacttggccacagcaactatatcaattcagggtctcagaaaaggctgaaaagtaaaagtagtctattttctgaattcactcatcttttgagggcattttctctggtcccagtgctccctatttcttttggggcaataagagaaccccaccccacctccattctggccttaatttttttgaaactcttccttccctgaaagatacattaaaattcatctgaattgatgtaatgctgggataaatttaagattaggttagaatagctagtatattgatgtattgctgcaaaaaaatcagcccacaatttggtggcttaaa

SEQ ID NO: 179689 - DNA, 623 bp, Homo sapiens
agccctccttcagtgactgttgatgttgccagcccagcctgtgtccctgcaaagcaagatcagtgcctccctgaccttgaagtcaccatcagattattgttgggttctcaaattctttaatagtaggctttcagaagcccacattggctcatgcctgggaatgaatttttcccccaatacagaagaaaattcagagacygttaatgttattatcctgaatgatacagagttcatttggggctttaattagaaagatttgaattctcaccccatgatcaaatattctttatcatccagagaattaggacttggccacagcaactatatcaattcagggtctcagaaaaggctgaaaagtaaaagtagtctattttctgaattcactcatcttttgagggcattttctctggtcccagtgctccctatttcttttggggcaataagagaaccccaccccacctccattctggccttaatttttttgaaactcttccttccctgaaagatacattaaaattcatctgaattgatgtaatgctgggataaatttaagattaggttagaatagctagtatattgatgtattgctgcaaaaaaatcagcccacaatttggtggcttaaa

SEQ ID NO: 179690 - DNA, 543 bp, Homo sapiens
ggatttacaatttgagaatgctccactcttctctcctccccacatttgcttaaaataaaatgttctcagacasttttggcttagggaagctctgacttcagaagacaggttcttggggctttgggaatgcagagttaagaaaaaggggctgggagagtggggggagagtggagagtaaaatggaaagaatggagggaaaggtaaaggatttaggcctacagtagtaagctgatctactagtggcctgagatgaaggaggagttgggagtatagtctgacatttgttacagagcagttggctgtgaaggtaggtgaggaaagaggatttcaggtgtttggactgtgcatttgatatgttttagagttcttgatggatttggccaaagaaagggattccctttaggttaattttgccccctgaactgtacttctgtacttttggaaagggattcatctcaaaaacaatcacttgggtgttggggttcaagagctcagaaatgaaaagtgtcattaacagtgtggtctctgaagtcccatagatct

SEQ ID NO: 179691 - DNA, 520 bp, Homo sapiens
ggatttacaatttgagaatgctccactcttctctcctccccacatttgcttaaaataaaatgttctcagacacttttggcttagggaagctctgacttcagaagacaggttcttggggctttgggaatgcagagttaagaaaaaggggctgggagagtggggggagagtggagagtaaaatggaaagaatgragggaaaggtaaaggatttaggcctacagtagtaagctgatctactagtggcctgagatgaaggaggagttgggagtatagtctgacatttgttacagagcagttggctgtgaaggtaggtgaggaaagaggatttcaggtgtttggactgtgcatttgatatgttttagagttcttgatggatttggccaaagaaagggattccctttaggttaattttgccccctgaactgtacttctgtacttttggaaagggattcatctcaaaaacaatcacttgggtgttggggttcaagagctcagaaatgaaaagtgtcattaacagtgt

SEQ ID NO: 179692 - DNA, 543 bp, Homo sapiens
ggatttacaatttgagaatgctccactcttctctcctccccacatttgcttaaaataaaatgttctcagacacttttggcttagggaagctctgacttcagaagacaggttcttggggctttgggaatgcagagttaagaaaaaggggctgggagagtggggggagagtggagagtaaaatggaaagaatggagggaaaggtaaaggatttaggcctacagtagtaagctgatctactagtggcctgagatgaaggaggagttgggagtatagtctgacatttgttacagagcagttggctgtgaaggtaggtgaggaaagaggatttcaggtgtttggactgtgcatttgatatgttttagagttcttgatggatttggccaaagaaagggattccctttaggttaattttgccccctgaactgtacttctgtacttttggaaagggattcatctcaaaaacaatcacttgggtgttggrgttcaagagctcagaaatgaaaagtgtcattaacagtgtggtctctgaagtcccatagatct

SEQ ID NO: 179693 - DNA, 472 bp, Homo sapiens
ggcccagtgggtcctaaatttctcagcccagaactgacacatgtttcttaggtcctatcaagtctcatgaccaaatcaaatttaaaaggggcaaggaaagasaatcccaacatgtacttaaaggaagagacaagatatatcagtgaatagccctagtaacaaccacaaccttacatctggggaatcctgagacatccaggctatgattgataattaccatgtaagagctcctaaggggtcctgtgtgggacttttcaatttttgaggaattggtaataacctttacctgagatcaaaacacaccctgttactctcacattcagccaaatgactctcacctattatgggatttgctgagaaatgccagtttaatggaactacacttgaatatatcctttcttctctttggggagtggggatagggtgagatgggactcattttgtttccgttcctgggggggtggacgtggat

SEQ ID NO: 179694 - DNA, 524 bp, Homo sapiens
tttaactgaagttagataagctcatttttccatcctacacgaggcatcaaaagattgcttttaaagtatgttgtttaaacactgatttagctctcagtaatttattaatatattaatatctctttttttcaattttattctcagaggaagcagccaagttttctcttagggcatgtttggtgtaaggatatggagaataggagtgttaatgggttgtccatttttccttgagacagtgctctgagaatgttcatattgaaagctggagaaggggatggggcaggaggagataaaagagcccattcagagctttgtctcatctttcttctgaaatatccattcagcaaaaatcctsttagagtcgtactttcttccccaccacagcctgactgcagaatcttgtcccttagtgtctgtgccactgattcatccttatagatttcaatatccccttgaagccatcttgcagactacagtcccgctttctggactatatagaggatcctttccaaggtaccactgta

SEQ ID NO: 179695 - DNA, 491 bp, Homo sapiens
ccctagtagtcagtatggactgaagaaataaatcagatatagaccccatcatgtgccacaactcatttcaaaatggcakcttgtatagtgaaaatctgggaatgctatccacttggcacttaaatttctggaggatcacaatttgaacagagaagaggacttgaagtttattccttactgatccaagaagcaagaaatgtaggcagggtattaggtcaaaagttaatctcagaattttcagagaccatgcatgatggacaaggcctatgtactattgtctcctctacattcctaacaaaatgattagtcttaacacccacttagctgtccaagctgtaaatctcaggcttcctccaagtcctgtaaattctacttcttaggttattttctttcaatctagtttgtcttgctcattcccatgaacactgcattatttcaaatccacatctactcgtgccttgttcactgcagtaacttcctaattggcctcc

SEQ ID NO: 179696 - DNA, 484 bp, Homo sapiens
atgttgaagcatgcatcaatatttcattcctttttgtggccgaataacattttattctgtgtatataccacattttacttattcattcatcacttctcagatatttgggttgtttgcamcttttggttattttggataatgctacaataaaagttaatgtgaaagtttttgtgtacgcacatatgttcagatttctttagggtgtatacctagaataggggaactgttggatcatatggtaaccctgtgtttatcattttgaggatatgccaaactgttttccaaagtggtttcaccattttacaattccatcaacaatgtatgaaggttctcattttctgcatcctcaccaacactagttattgtctttttgacttagctatcttagtgggtattaaatggaacttattgtagatttgatttgcactttttgaatgactaacaacattgaatatctttttttggtgtttactggccaatggca

SEQ ID NO: 179697 - DNA, 484 bp, Homo sapiens
atgttgaagcatgcatcaatatttcattcctttttgtggccgaataacattttattctgtgtatataccacattttacttattcattcatcacttctcagatatttgggttgtttgcaccttttggttattttggataatgctacaataaaagttaatgtgaaagtttttgtgtacrcacatatgttcagatttctttagggtgtatacctagaataggggaactgttggatcatatggtaaccctgtgtttatcattttgaggatatgccaaactgttttccaaagtggtttcaccattttacaattccatcaacaatgtatgaaggttctcattttctgcatcctcaccaacactagttattgtctttttgacttagctatcttagtgggtattaaatggaacttattgtagatttgatttgcactttttgaatgactaacaacattgaatatctttttttggtgtttactggccaatggca

SEQ ID NO: 179698 - DNA, 435 bp, Homo sapiens
gatgctttcatttttagcatctttgagcttaaagaagtatggaaccaactttggaagcagtctggctatagctttagtatgcaaatggtatttcatctgcaattaccacaagccttgagatacaggaaatatctcaaacctggtgatccatgactgatattaatgccaataccttcccatggaatcctataaaggtgaatgcagagcaaataggaaatggaaaaagaagatggattggtrattgcaaacaaaggcaattgactatagaccctctgtcttcttagaggatgcaccaaagccaacatacttcatgagataatgtgttctggagtggaaagtgaggaggacaatgggaagaaattatagcccaggggactgcttttaaagcaaatgaaacctctagaaatccagaggtagaagaaggtcattcaatcc

SEQ ID NO: 179699 - DNA, 410 bp, Homo sapiens
atgaattcatgctgacagcctatagcctatctaccrgctcctacacttaagtaccatctactggactgcagcctgaagtataccaccaaacaaaaatacattgctatgacatacagcatctgaaaaagcaactgcatgaacctatttgcaaccaaggaacccatacagaaccctggtcctctgagagtatccagatataacaccaatcagtcatacacaacatatgctacggtcataccctcgatggaaaaaagaataaaaaatttaaaagccctatccaagcaatagcatattcaagaaaagaagcatcacttccctcagataaggattcagcacaagatctctggcaatacaaaaagccggcatgttttggctccttcacaatggatcctagccagaataacatatct

SEQ ID NO: 179700 - DNA, 605 bp, Homo sapiens
gccactgcactccagcctggcaacagagtgagactcagtttcaataaaagaaaagaaataaagtggcaaattgaataaaaaaaaaattcattcatctgctattttcaagagacccaccttacatgtaaataacacccataggctcaaagtaaagggactaaggaagattcattcatgcaacaataaaaagcagaaaagagcagaggtcattattcttgtatcagataaaacagactttaaaccaaaaacagtaagaaaagacaaagattattacataatgatgagggtttaattcaacaagaagatttaactatcataaatatatatacaaccaacattagaamactcagacttataaaacaattagactactagatactagtctggtagtgtctatctaagaaaagagatagatggccacacaataacagtgggggactgcaacaccccattgacagcattagacagataattgaggcagaaaattaacaaagaaattctgcacttatattcgacacttagccaatttgacctaatagacagctacagaatactctacccaacaaccatagaatacacattcttctcatctgcccatggaacag

SEQ ID NO: 179701 - DNA, 508 bp, Homo sapiens
ctaggctacccattgaagaatggtagttaatatttctttatattaaaaatattttgtgcatctatactaagaaaattatttttacttccttataccctcttctaccacatgcccacacacgtgcccactgatgcatgctggtttactgtttctcaccaacgaattagaaagattaattcattaaatttccatattcaggagggcctgtcaagaaccttccagatttcttttcaccaggtattgyttgacagactgctcaaacttctgaattaaagattagctccagctgataaagtttagttacacaaacattgagaaacaatgagtttttattacccatggagaataaatgcagacaattcaaactcactacctaggttttatgtattataatacaaaagttctgatatctcaagttcaaatatagagtttgatatgaatcccaacagaaaatagactattcagccacagttattcatagctgttccagactttgggcatgggttgt

SEQ ID NO: 179702 - DNA, 399 bp, Homo sapiens
aacaaaaaggtaatgccttaagaatcaaagaaatgaacaatatttttcaaaccaattagagattggggctactcccagaaaagaaatctcccattactattcacagtaggacaactggtaagcagaagcttgctttctaatgacagctattaaatgctgttagcattgaggcttggtacagcagtagtttccaaataactgtaggatggagaggaacttgccagaacaatagaagaaaaacattcaagagcaagaatgactccatggggtmcatgatagaaactcaggacctgctgaggctcagtaaggtttgtgcagaggaacttggcattctagtaaaacacacattggcacctgcatgcctctgccatgttccagtctgcatattccttaaggaca

SEQ ID NO: 179703 - DNA, 567 bp, Homo sapiens
acaggtttcaaaaaaagtaggtaatgcatgatcccagttttactgtggaaaagaaagaatgtctagaagaatatcaaaacattaacagggatctaaagagacattatgcaatcaggagtgattttaatatgctyttttttggttttaactaaatctttctcaattttacaaaagaaacatttggtacttaaaaattacacattatcaggccattgccatcaatttgacaaacattggttgcctacatactgtgggaccttgtaatgcatgctaaaataatatgaaaggaaagagggttccttgtcttccatagacttacagtctagttagttggccagaagacaaataatatagaggtagtcaaaatatggtgaaagatacttctaatttttaaataaacttataaacatagagtacttttagatatacagaaaaaattgagcagacggaacagagatctcctatagaatccacatccactttcctctattatcttcttatgttaatatagcacatttgtcataattaatgaactgatatttatacactactatgaactaattccca

SEQ ID NO: 179704 - DNA, 555 bp, Homo sapiens
gtatatatttatttgcgtatgagtatatacataatattcatacaaatgcatatacaacacaaattattttatattgctgttaatatctctgacttggagagaggcatattttttcagtatctttcctggcttggttatagaatgctattccaattagctcaatcaaatcacccaacatgtataatatttctgagctaatagtctgccagtatttaccagtacagcaaaatcatttctgtatcagtcagcattcatttcataggtgcctatctgattggtcaatgtccaggycataatccttaaaggcagagttgacatcacagctccatactcataaccactaccaaaaccatgtccttaactctccatggttctagaatctagtcccacatgctcaaattcctgcctcctcaagcaagtccaaagataatcaaaactgagagaaagacgaatattttctagataggaatgggaaaaatgaacagtagaactctgaactctttatacctgcaacagactaaaggcaggataaatttttagagatattagcatgat

SEQ ID NO: 179705 - DNA, 457 bp, Homo sapiens
agcctcccccagttctgctatttggagtyagtttctcccaccacatttcatgtggacctctgctctagcttatataaactttctggttttctagtggtttgctgacctttatgtgttctactcaaatgtgagtttcttgagggcaggggctgtgtcactcatctttggggacagagcctattacatcatcagaacggacagaatctaggccaagctaaatcaagttacagcagctcctagatcccatttccacctggccttctcttctagctttcctgcaaggtttttgaaatgaccaggccatgtgatgctggcaggttctaccctagagctggtgtaaggccactctagcaattctgagtgtatactactatgttctcatgtctgtttcatagatgcatatttgacagggtgctcctggctaacagattaggttccccagacatgcccagtttac

SEQ ID NO: 179706 - DNA, 456 bp, Homo sapiens
gcctcccccagttctgctatttggagttagtttctcccaccacatttcatgtggacctctgctctagcttatataaactttctggttttctagtggtttgctgacctttatgtgttctactcaaatgtgagtttcttgagggcaggggctgtgtcactcatctttggggacagagcctattacatcatcagaacggacagaatctaggccaagctaaatcaagttacagcagctcctagatcccatttccacctggccttctcttctagctttcctgcaaggtttttgaaatgaccaggccatrtgatgctggcaggttctaccctagagctggtgtaaggccactctagcaattctgagtgtatactactatgttctcatgtctgtttcatagatgcatatttgacagggtgctcctggctaacagattaggttccccagacatgcccagtttac

SEQ ID NO: 179707 - DNA, 404 bp, Homo sapiens
gggaagacaatgtttacctctccattcagtttctttgcctagcttcagctctgagaatcctagcctggtttagagagctgagccttcccattttatcagaataaacctgcagttacttgcactgttccaggaagcaaaagaatagagaattaagagtaaataatgagctctggagtcaagctgcctgggttcatatcctggtttcaacactaaagagcwgtaagtttggtcaaatagcctttgcgatttcagtttacttagctataaagtaaaatgagagtagtgcctattgcacaacatttttgtgagaattaaaggaaataacatgggtaaagcacctggcacaatgcctggcttgttgtaagggctcagaaatagtagctcttattattattggaagaacc

SEQ ID NO: 179708 - DNA, 583 bp, Homo sapiens
ctttttgttctaaaagtatccttagaaatgatccatctaagagcctcagcctctgtgtgggctttggcttcttccggctctctggctctgcctcacccatggcttatcctgtgtcttcctcctcctctctatctcatggctgttgcttctttgttgcttctcttgactcatggatggtttctgccatttcccgtttctgtctgagtgtgcctttgtgaagggtttgcattcacattccagacatgacaaggcatgatgtactggtcaccacacmtggagggcatctctattgggaacagtcctcacagcaggacttctcacaggctgatggtctccctgaagccccacctataagatactgactgcccctgtgcccagaactgaccctctatccaattcattatcccaaacactgctggttcacatggcattgacaagtataccaagaacctcttttggctactctgcacagaattcagctagaggtagaacaagtggaacaaatagtttggattcctctcagtgacttgtatgcatgtaactcttgtctgttcttataaaacatctattgattattctagtt

SEQ ID NO: 179709 - DNA, 580 bp, Homo sapiens
tgaagtccctaagttggacctgctaatttagcactttctcttttgggaggtccttgctacattttgtagctagggtataagaaaaaaggaagaaggaacttcaacattgtatctcagtgctctcacacagaatgtgagaaggcatttacaaatctgtagtgtctagattggaaggcttgaggtaagaggatggctgcatcatgccaaatattcccattaatctgactaaaacaatcagctgatcaataaaaagccccagttgttggtttagcttaatcacttgtggatctaaataattgctcagtttagtttgcattatttagtcttaaaggctacttaccatcttaaaaatgcaaacttaatggtaagaaccattaatgaaaatagtaaccattaatgactcytgttctcaaaatttcagtttaaaaagacatttcttttgttcaggtggctccctggtaagcatttagatacaagtggaagaacattaatttaaaccttaggggttcttttcagtctatgttagtttctttaagaatctaacttcaaagaaattatatatgttccagggagaacagag

SEQ ID NO: 179710 - DNA, 441 bp, Homo sapiens
tgcatttttcttagtgagcagaggggtgactttgaatagaatgtgaggcaggttggccctacgtagttcccagcttgacttttccctctagcttagtgatttgggggcccaaagatttattttcctttcayaccaccaacacttgttcccacttcttccagtctccctacactatttcattgtagtgacataccttgccaatgtccaaacactggcaaatttttattcagcagaagttatgcataatatgcccaaatcagttatttctaaccctgactttttgtttttttaaccaatttaagttggcttctggggagcctggactccatttaacatttagaattattaaatacagcccaataatgatcttactgcaccccagctgtttcaaaaaatcattgtcatttcatgcagaattatggatacccagtgcactgtttg

SEQ ID NO: 179711 - DNA, 441 bp, Homo sapiens
tgcatttttcttagtgagcagaggggtgactttgaatagaatgtgaggcaggttggccctacgtagttcccagcttgacttttccctctagcttagtgatttgggggcccaaagatttattttcctttcacaccaccaacacttgttcccacttcttccagtctccctacactatttcaytgtagtgacataccttgccaatgtccaaacactggcaaatttttattcagcagaagttatgcataatatgcccaaatcagttatttctaaccctgactttttgtttttttaaccaatttaagttggcttctggggagcctggactccatttaacatttagaattattaaatacagcccaataatgatcttactgcaccccagctgtttcaaaaaatcattgtcatttcatgcagaattatggatacccagtgcactgtttg

SEQ ID NO: 179712 - DNA, 441 bp, Homo sapiens
tgcatttttcttagtgagcagaggggtgactttgaatagaatgtgaggcaggttggccctacgtagttcccagcttgacttttccctctagcttagtgatttgggggcccaaagatttattttcctttcacaccaccaacacttgttcccacttcttccagtctccctacactatttcattgtagtgacataccttgccaatgtccaaacactggcaaatttttattcagcagaagttatgcataatatgyccaaatcagttatttctaaccctgactttttgtttttttaaccaatttaagttggcttctggggagcctggactccatttaacatttagaattattaaatacagcccaataatgatcttactgcaccccagctgtttcaaaaaatcattgtcatttcatgcagaattatggatacccagtgcactgtttg

SEQ ID NO: 179713 - DNA, 543 bp, Homo sapiens
gcagcaaattggacactgtgagtttgtgaaagcaagaagagacagtatttataatcatgctgggacaacagacgccaactaggcctatcctggcccaacttcttcctatggttttctctagataaggcaccaggtagttaataaagtcaccatgtaaaaatcacggactgcttattttaatcaaggggtagttctagatgctgggagtcaaataagatagtttctccttgcagtatttcatattatgtttttaaaccttaaagtccatatatctgagtcttttccttgtattctcagaaaaaaagtrtgtgtactttggggtgggtagaagtaagagaagagtactgggtagacagagaaccaaagtggaaagagggtaaatccaaggagggggaaacccatgaactggtgcatggtgtaggcagcttaaaaatgaaggatgaggagaaacggatcacagatagctgaaagtttttctaaactatgaagctcttatctgggaggaaaaaggcaagaaactcctggagagggagcaagtttagg

SEQ ID NO: 179714 - DNA, 560 bp, Homo sapiens
aagtaacctccgattcatagactgacatggtataaagattaggattaaaagccttccattctctatttccctcccttttatagaaaaaaattggggtaattaactgaactcttggaggattcgttgaaagcactttgatgatggctactacaatgagattttatttagattatagcaggtgctcactgaggcaaagagtgccttttaggtttacaaaataattttatgtcaattggcttatcactgattagagatattccataaaaccacacatatcatctgattacatggtttatcctgtacacattttacacatgaagaaaagttcagttatttaaacccatcatgggaaaatttgctggcaacatcccaaaataactgataatcaaaatctgtattgacactgcctgactgtggctgtttggttacgtagcaatgggtttctttcagatgcwtgttttggtagatgagggagtgcttagaggtccaaccaccgccgtaggttgaatccctgagaagcacattattttgcccttaaggtcaccggcaataacccctcc

SEQ ID NO: 179715 - DNA, 468 bp, Homo sapiens
gatttcaccatttcatggtaaccgtgaggtatgctcactgatgttctaggtattcaggttctcacttctgcacttctccatccaggctggaggttacaggggcctgcaggatgtgctttagctaatgcaatattattgtgagatatgtgtgctaatcctgaaaaggagcttcaagagccaatgtgtgtgttcccaagcctttttaacacttgtgctggtgaccagaatatttcaaaatagtggctgctggattattctggttcctgaaaacacaactggaccctgacccatggtgatatgtagtatgggaaagaaagaagtctttgtggtttgaakcccttgaattttggggtttatttgctactcagcataacttagtatattctaaatgatgtgcttagatcaaactcttcctcccaattttcaccctgtctccaacatgcaaaagtctttcctcatcttcactgt

SEQ ID NO: 179716 - DNA, 449 bp, Homo sapiens
acatgggctgaaccttgtgggtccrtttctacacagacgtttttcaacagatacagttggtcatctgtatccatgggttccacatctgcaagcaaatgtggatggaaaatacagtattcatgggatatgaaacccacggatgagggttaactttacctatatgcaggttctgcagggctgtctgccagatttgggtgtgcacagattttgagatcctcaggggttctggaaccaatgcctcacagatacaaggtatgacgatataagatatcatcagactcaaaaccttcgtgaattaattacccagtcaactccagttagctgagagcaattgtgctagaatagttatcaggcataaagcaatggccaaagtaagaatagctgtcgtgtgacctgcacctttcctcctcaattttctgcttttgaactaccccacctcaccaggtctg

SEQ ID NO: 179717 - DNA, 283 bp, Homo sapiens
tttatttcagcccatccctttgtttcccataaggaatacttttagttaatctataatctatagaaacaatgcttatcactggcttgctgtcagtaaatatgtgggtaaatctctgttcgaggctctcagctctgaaggctgtgagaccyctgatttcccactctacacctctatatttgtgtgtgtgtgtgtctttattcctctagcatccctgggttagggtctccccgactgagctggtctcagcataaagcaatattagtaagtctagtcaggagactgg

SEQ ID NO: 179718 - DNA, 555 bp, Homo sapiens
cagtggtgagcacctaatccaggtagacggtgtcagggaagccacatctgtctttgagggcagagtccagctttccttcaatgtcatttttcatcatgtggttaaaagggccaccaattttcccaggaagacacatacttatttgtcctctgtgatgagttgaagagaactagagatacctagttacacattctcagtgctttgactacaatttttagtcaaccgaaaaatatcagtctaaatacaatcagggkacaatttgggaatattggtggcagactgcagaagacaagtttccatgctcttgcctctccagtggggaatgtatccatttatccccaaatctcttagaatttctctacaatctggtctgacactctagcttaaagagtgaccaaagtatataacttgtagtttatgtggaaaacaaaaatgtagaaagcaagcaagaaaccctgacatctttatgaaatatgcctgaaacacagccgaaagataaaattgtcaaatagctgtaagaggcagaaccagtttgaggaattcatggcctaatcc

SEQ ID NO: 179719 - DNA, 542 bp, Homo sapiens
aaacatcaagtgatagcaggctgccatgtagccatgcatcyaagaacacttgatcccaatgtaacagacttctacaactcccactgtccattcttccagaatccagatataaagtcaataacgctcagacttgaaggctatgtgccagataattgctagtgccagataacttctaactgacagaaacttatagcgactttggctgatggtcttggattgtttagggagagtcacttcaaggctgttgctttctgcttgtctctaatcctgctctgaggttttctaacataaacttgacctcagagtatgtataggttggtacaggaggaatcccggcttttgccattgtggcaaaggctgcaattacttctctaccaacctaatatatcgcacacgctattccaagatcttaatcttaactgacaagcaaaatgaggtaggaactactatccccctcttaacacaagaaactgaagcaaggaggtgcaatacttgcctgaggtcacacaataagtcagggaggcaagactcaaccccagatc

SEQ ID NO: 179720 - DNA, 542 bp, Homo sapiens
aaacatcaagtgatagcaggctgccatgtagccatgcatctaagaacacttgatcccaatgtaacagacttctacaactcccactgtccattctyccagaatccagatataaagtcaataacgctcagacttgaaggctatgtgccagataattgctagtgccagataacttctaactgacagaaacttatagcgactttggctgatggtcttggattgtttagggagagtcacttcaaggctgttgctttctgcttgtctctaatcctgctctgaggttttctaacataaacttgacctcagagtatgtataggttggtacaggaggaatcccggcttttgccattgtggcaaaggctgcaattacttctctaccaacctaatatatcgcacacgctattccaagatcttaatcttaactgacaagcaaaatgaggtaggaactactatccccctcttaacacaagaaactgaagcaaggaggtgcaatacttgcctgaggtcacacaataagtcagggaggcaagactcaaccccagatc

SEQ ID NO: 179721 - DNA, 542 bp, Homo sapiens
aaacatcaagtgatagcaggctgccatgtagccatgcatctaagaacacttgatcccaatgtaacagacttctacaactcccactgtccattcttccagaatccagatataaagtcaataacgctcagacttgaaggctatgtgccagataattgctagtgccagataacttctaactgacagaaacttatagcgactttggctgatggtcttggattgtttagggagagtcacttcaaggctgttgctttctgcttgtctctaatcctgctctgaggttttctaacataaacttgacctcagagtatgtataggttggtacaggaggaatcccggcttttgccattgtggcaaaggctgcaattacttctctaccaacctaatatatcgcacacgctattccaagatcttaatcttaactgacaagcaaaatgaggtaggaactactatccccctcttaacacawgaaactgaagcaaggaggtgcaatacttgcctgaggtcacacaataagtcagggaggcaagactcaaccccagatc

SEQ ID NO: 179722 - DNA, 396 bp, Homo sapiens
ctgctcctaccatcatggcccctagccatgatatgatttatttgcgtgctagcagaaactaaccaagtcccttttgacctaacagaaggagagtcagaattagtctcaggtttcaacattgaatatgctgcaggttcatttgcccttttctttatagcagaatacatgaatattatcgtgataaatgccctaactactactattttcctaggatcactgcacactatatattcaccagaactctataccataaatttcattaccaaaaccctcattttaactgccctctttttatgaatttgaataacatacccctgattccactacgaccaactcatataacttctatgaaaaaattccataccacttwcaccagcattctgcatatgatatact

SEQ ID NO: 179723 - DNA, 589 bp, Homo sapiens
atccccaacggctcaagagaagaagccaagacaccaggtatctttggtctccgtaattacccgccgtgcactgacaggacaggaaaggattcgccattaaaagccgcgttttaaaacagaaatgaagctcatatttcaggagaaagaaggagttccgtttcagagttggttagaatgagatgctaaaggacattgaaatggaaatttcaacagaccactagagatgcataactgcagcttgagagaggagtaagggctggagacccagaggggaagtcgtccacagcaggggatcagttgagactctgaggtgttcatggcccagaggcagcagcaacaatgaggctttggagctagattactcatggattcaaattctggcagcactatttacttggcatatgattttagacaaagtacttaacccctctctgccccagttttctcatctgtaaaatggagatagtaataggactttacttttgaggattaaaggagtgaaagcacataaagttaagctagaggagtgcctggcacatataaatgttagctagtaygtttctcttgttagtctcaatattaaaagttt

SEQ ID NO: 179724 - DNA, 449 bp, Homo sapiens
tagaccaaccttccctgcatactcattagagtcaactagcctgattttttttggtcagatcctacccctgagattctgatcaggtggtctggggtggcgctctggcaacagtatcaaaggctatcatgtatttctaatgtgcaattgaggataaggacagctgtattagrcagtgcttccaaaggacagggtttcagccttattctttgatctcttatcaccctgaacagtggctggccatgagtgagcacttaacaaatgttggttgagctggataaaggagcccaggtcctctgtccattttctccttctaccctgtcctctccatatttaacccttcacctctcctcaacaaaacacctgaaacgagactcgtggacaaatgctgtctcgaggtctagagaattagactgtctgaaatcagcataggctgggggaagcagaagaat

SEQ ID NO: 179725 - DNA, 449 bp, Homo sapiens
tagaccaaccttccctgcatactcattagagtcaactagcctgattttttttggtcagatcctacccctgagattctgatcaggtggtctggggtggcgctctggcaacagtatcaaaggctatcatgtatttctaatgtgcaattgaggataaggacagctgtattagacagtgcttccaaaggacagggtttcagccttrttctttgatctcttatcaccctgaacagtggctggccatgagtgagcacttaacaaatgttggttgagctggataaaggagcccaggtcctctgtccattttctccttctaccctgtcctctccatatttaacccttcacctctcctcaacaaaacacctgaaacgagactcgtggacaaatgctgtctcgaggtctagagaattagactgtctgaaatcagcataggctgggggaagcagaagaat

SEQ ID NO: 179726 - DNA, 566 bp, Homo sapiens
tggtgttgagaaggattacatcagatcatcacagcatgcatgcagcacactcatgtcccctgatcaagcacacttgtaaacattttcattatttttattgttacttttgccttgggattcctcttccaaagccagagcccctaatcctggatagaaagaggactccagcagcataacagaggcaaagctttactcctagccttcccagagatttctccccaatgaacagccagtcttgtgactggaaactgtgggaaagacctctaagatgaagatgtaatctagtgagtatcccatgacagaccatcaaacccactgaataagactggactgctsctccaaacaggctccccagggacaaacgtttaccctgcccttactaacagtccccaaaaagcatgctgtcagtgacagagtgaaggtgagtgaagcccccctgaagatgccccagcggggaggtgcacccacaacatgggtatgaggagcggataacgtgaggtaaaaggaagcctgggtctgcaactcatgttgacaacattacccagatttccccagaccccacagct

SEQ ID NO: 179727 - DNA, 566 bp, Homo sapiens
tggtgttgagaaggattacatcagatcatcacagcatgcatgcagcacactcatgtcccctgatcaagcacacttgtaaacattttcattatttttattgttacttttgccttgggattcctcttccaaagccagagcccctaatcctggatagaaagaggactccagcagcataacagaggcaaagctttactcctagccttcccagagatttctccccaatgaacagccagtcttgtgactggaaactgtgggaaagacctctaagatgaagatgtaatctagtgagtatcccatgacagaccatcaaacccactgaataagactggactgctgctccaaacaggctccccagggacaaacgtttaccctgcccttactracagtccccaaaaagcatgctgtcagtgacagagtgaaggtgagtgaagcccccctgaagatgccccagcggggaggtgcacccacaacatgggtatgaggagcggataacgtgaggtaaaaggaagcctgggtctgcaactcatgttgacaacattacccagatttccccagaccccacagct

SEQ ID NO: 179728 - DNA, 566 bp, Homo sapiens
tggtgttgagaaggattacatcagatcatcacagcatgcatgcagcacactcatgtcccctgatcaagcacacttgtaaacattttcattatttttattgttacttttgccttgggattcctcttccaaagccagagcccctaatcctggatagaaagaggactccagcagcataacagaggcaaagctttactcctagccttcccagagatttctccccaatgaacagccagtcttgtgactggaaactgtgggaaagacctctaagatgaagatgtaatctagtgagtatcccatgacagaccatcaaacccactgaataagactggactgctgctccaaacaggctccccagggacaaacgtttaccctgcccttactaacagtccccaaaaagcatgctgtcagtgacagagtgaaggtgagtgaagcccccctgaagatgccccagcggggaggtgcacccacaacatrggtatgaggagcggataacgtgaggtaaaaggaagcctgggtctgcaactcatgttgacaacattacccagatttccccagaccccacagct

SEQ ID NO: 179729 - DNA, 566 bp, Homo sapiens
tggtgttgagaaggattacatcagatcatcacagcatgcatgcagcacactcatgtcccctgatcaagcacacttgtaaacattttcattatttttattgttacttttgccttgggattcctcttccaaagccagagcccctaatcctggatagaaagaggactccagcagcataacagaggcaaagctttactcctagccttcccagagatttctccccaatgaacagccagtcttgtgactggaaactgtgggaaagacctctaagatgaagatgtaatctagtgagtatcccatgacagaccatcaaacccactgaataagactggactgctgctccaaacaggctccccagggacaaacgtttaccctgcccttactaacagtccccaaaaagcatgctgtcagtgacagagtgaaggtgagtgaagcccccctgaagatgccccagcggggaggtgcacccacaacatgggtatgaggagcrgataacgtgaggtaaaaggaagcctgggtctgcaactcatgttgacaacattacccagatttccccagaccccacagct

SEQ ID NO: 179730 - DNA, 504 bp, Homo sapiens
gtcccagctacttgggagctgaggtgggaaagtcacctgagccctggaggcggaggttgcagtgagccaagatcgcgccactgcactccagcctgggagagagagggagaccctgtctcaaaaacagaacaaaacaaaacaaaacaaacaaacaaaaaacagctacttattgggtactatgctcactcactacctggtgacgggatcatttgtaccccaaacctcaacattacacaatatacccatataacaaaactgtttttttccccctgatgctaaaataaaagttgaaattacacaagaaaaaacaagctatcttcctgacaaatatgattgtcctcagtgtcgaaggagagtcaggagtccaaggatggaaacacaaatgatcaggcctgctggaaaacccctgcagaacaggctctgtgggacctttatacrtaaatggtcagattaaagatgtcacaaactcttcttgggtgatctgttttaaataggagtaaaaca

SEQ ID NO: 179731 - DNA, 481 bp, Homo sapiens
tatcaggaaagataaatgtgtttacatacattatatatttttctactcattagttcatcattcatttgtccattaatttaccatctcatattgaatgcctttgtgtgccagatgctgttctggcactgggaatattggaaggaaaacttccattccttgctacagtctatgccacaaggaaaccaaaccaaggtgggaaaaacatgttcttattatattcagtagatagaccagtgatagtttttcaattttcactggtattaaggcacactgagttctgaaaaaaaaaagctacaaaaataagaattaaaaatatttgaaactttcaaagcaaaataattaattttctagaattcagggctcagcaaacatttaatgctataamcctttaaaaaaatcataaggtcagggatcatggcacttaaaattgcatcctgtaccatttggagataggaattttaggttgtaacatactcaatat

SEQ ID NO: 179732 - DNA, 608 bp, Homo sapiens
ctctgcactaggtctgccttgacacttttgtttgcagggtttaggaccagatggaagtgccttgtaaactgaaaaataccacattatatattatatcacattattatactttctgataaatggttacaaagctatctgaaatagaagtttacattttatttctgattaactttcaatattaagtgatagaacctaagaagcaaaagcgaacataaaattcaactggaaaatttgaaagagaaatggttttttctctaggaaatttgcactaataactttttcccaccatcccccsaccagtaactttttgacaagaaaatgaacgtggcctattaatttatctaaagctatttcataaaattttcttccttcaatccagattattggaaatgccatgtgaataatgctgttttatgaaaatagaaaccatattttatggtcagggtacaactgacacgatttccaacaaaacctactcttctgcatttatggagcactttctttgaatcaaatcacatggaaataaatcttcttttcatttaattgaagacaaaagggagcagtaatgaagccactgagacattcttgttttattcccagacccctaa

SEQ ID NO: 179733 - DNA, 256 bp, Homo sapiens
aatgcttgagaagtagatatttaatcataacatttcaaaatctactggataacctagaattgaaamatagcctataggttgaaaaactcctgtagtgaagaaagaaaataactaatatacagtgacaatataaatattataagtatttattttattatcaccctgaaatttgataatacaaacatgtaatatctacatatcatccatatatcaggtcataaaatatcaatacattcttcaaaaatttagcataaca

SEQ ID NO: 179734 - DNA, 256 bp, Homo sapiens
aatgcttgagaagtagatatttaatcataacatttcaaaatctactggataacctagaattgaaacatagcctataggttgaaaaactcctgtagtgaagaaagaaaataactaatatacagtgacaatataaatattataagtatttattttattatcaccctgaaatttgataatacaaacatgtaatatctacatatcatccatatatcaggtcataaaawatcaatacattcttcaaaaatttagcataaca

SEQ ID NO: 179735 - DNA, 507 bp, Homo sapiens
gaaatgaattctgacaggttttgcactgaagacattcacatgtgaggaaaacaggaaaaccactacgctagaaaaagcaaatgctgttgagattgtctcagaaacacaaattgcgtgccagcaggtaggtttgagcctcaggttgggcacattttactttaagtgcactgttggtggaacttaaggtgactgtaggacttatatatacatacatacatataatatatatacatatttatgtgtatayacacacacacacacacacacacacagggtcttgctatcttgcccagggtggtctccaactctgggtctcaagcgatcctctgcctccccttcccaaagtgctgggattacaggtgtgagccacctcgcccaggccattttaattttaatttaatacttttaatttgaatacacaatccaaaaatcatataacaagtacaggaaacccactttatgccaagtttacaaaaacaggaaagatatgtcaatgacaaagcgtca

SEQ ID NO: 179736 - DNA, 545 bp, Homo sapiens
gacttctagcctagggactcagagaatagaccactcagaacaagaagcccacacgaagaccttcctgcccagaggattgctttcaaaagaagcctgggactctaccccagcttcagagagaatattcatcccttcagattcaaaatctgtccttagccatcaacgggcttttgtctggagcaatggctcaggaatmtgattcaccaatggatccctaatcagtcagaaatgacaacaaagacttcaaaggcatgcatttagggttctgagtgagaggcccaggatccagtgatgaatctgtcctagttgagtttcaacaccatagttgttaaagaaaaaattattcagtgatacttcaaatgcacagtaaagaagactttattcaggaccatcaccatagatataggaaccacggcaacacagtcttggagctggggagagagatgggcttaactctgaatacagcatgtggaagtgggaatttatagcccaggagcaatgcaggggtcagtgaatggaaaatcactaagaggaaacatcaggag

SEQ ID NO: 179737 - DNA, 545 bp, Homo sapiens
gacttctagcctagggactcagagaatagaccactcagaacaagaagcccacacgaagaccttcctgcccagaggattgctttcaaaagaagcctgggactctaccccagcttcagagagaatattcatcccttcagattcaaaatctgtccttagccatcaacgggcttttgtctggagcaatggctcaggaatctgattcaccaatggatccctaatcagtcagaaatgacaacaaagacttcaaaggcatgcatttagggttctgagtgagaggcccaggatccagtgatgaatctgtcctagttgagtttcaacaccatarttgttaaagaaaaaattattcagtgatacttcaaatgcacagtaaagaagactttattcaggaccatcaccatagatataggaaccacggcaacacagtcttggagctggggagagagatgggcttaactctgaatacagcatgtggaagtgggaatttatagcccaggagcaatgcaggggtcagtgaatggaaaatcactaagaggaaacatcaggag

SEQ ID NO: 179738 - DNA, 545 bp, Homo sapiens
gaacaagaagcccacacgaagaccttcctgcccagaggattgctttcaaaagaagcctgggactctaccccagcttcagagagaatattcatcccttcagattcaaaatctgtccttagccatcaacgggcttttgtctggagcaatggctcaggaatctgattcaccaatggatccctaatcagtcagaaatgacaacaaagacttcaaaggcatgcatttagggttctgagtgagaggcccaggatccagtgatgaatctgtcctagttgagtttcaacaccatagttgttaaagaaaaaattattcagtgatacttcaaatgcacagtaaagaagactttattcaggaccatcaccatagatataggaaccackgcaacacagtcttggagctggggagagagatgggcttaactctgaatacagcatgtggaagtgggaatttatagcccaggagcaatgcaggggtcagtgaatggaaaatcactaagaggaaacatcaggagtaagggagattctggctaaaccgccctaaaagaattc

SEQ ID NO: 179739 - DNA, 532 bp, Homo sapiens
gacttctagcctagggactcagagaatagaccactcagaacaagaagcccacacgaagaccttcctgcccagaggattgctttcaaaagaagcctgggactctaccccagcttcagagagaatattcatcccttcagattcaaaatctgtccttagccatcaacgggcttttgtctggagcaatggctcaggaatctgattcaccaatggatccctaatcagtcagaaatgacaacaaagacttcaaaggcatgcatttagggttctgagtgagaggcccaggatccagtgatgaatctgtcctagttgagtttcaacaccatagttgttaaagaaaaaattattcagtgatacttcaaatgcacagtaaagaagactttattcaggaccatcaccatagatataggaaccacggcaacacagtcttggagctggggagagagatgggcttaactctgaatacrgcatgtggaagtgggaatttatagcccaggagcaatgcaggggtcagtgaatggaaaatcactaagag

SEQ ID NO: 179740 - DNA, 532 bp, Homo sapiens
gacttctagcctagggactcagagaatagaccactcagaacaagaagcccacacgaagaccttcctgcccagaggattgctttcaaaagaagcctgggactctaccccagcttcagagagaatattcatcccttcagattcaaaatctgtccttagccatcaacgggcttttgtctggagcaatggctcaggaatctgattcaccaatggatccctaatcagtcagaaatgacaacaaagacttcaaaggcatgcatttagggttctgagtgagaggcccaggatccagtgatgaatctgtcctagttgagtttcaacaccatagttgttaaagaaaaaattattcagtgatacttcaaatgcacagtaaagaagactttattcaggaccatcaccatagatataggaaccacggcaacacagtcttggagctggggagagagatgggcttaactctgaatacagcatgkggaagtgggaatttatagcccaggagcaatgcaggggtcagtgaatggaaaatcactaagag

SEQ ID NO: 179741 - DNA, 412 bp, Homo sapiens
gaattcaagaatttcaaagatatcttattttaaaataccaaaataggaatagratatgaagggctggttatgagtaatatgatacaattttatgagatgatgagattacaataacaatacctcctctcatagaatagccagcaagtctccactaaataacagtgccttgattttatagatgtttcatcatggatattgagttaatgtgaaccatttgtagacacaggagtttattaaagacttatataatatctttcaagtatttagaatagtgttgaaattaagcctgcatccccacgattttcagcggtgctgatgcctaataaactcaaccccttgcatgccaaaattggcttaaagcccatctgttacccaagctacacttcaagcatcgaggttcaaaaatgtgatt

SEQ ID NO: 179742 - DNA, 412 bp, Homo sapiens
gaattcaagaatttcaaagatatcttattttaaaataccaaaataggaatagaatatgaagggctggttatgagtaatrtgatacaattttatgagatgatgagattacaataacaatacctcctctcatagaatagccagcaagtctccactaaataacagtgccttgattttatagatgtttcatcatggatattgagttaatgtgaaccatttgtagacacaggagtttattaaagacttatataatatctttcaagtatttagaatagtgttgaaattaagcctgcatccccacgattttcagcggtgctgatgcctaataaactcaaccccttgcatgccaaaattggcttaaagcccatctgttacccaagctacacttcaagcatcgaggttcaaaaatgtgatt

SEQ ID NO: 179743 - DNA, 412 bp, Homo sapiens
gaattcaagaatttcaaagatatcttattttaaaataccaaaataggaatagaatatgaagggctggttatgagtaatatgatacawttttatgagatgatgagattacaataacaatacctcctctcatagaatagccagcaagtctccactaaataacagtgccttgattttatagatgtttcatcatggatattgagttaatgtgaaccatttgtagacacaggagtttattaaagacttatataatatctttcaagtatttagaatagtgttgaaattaagcctgcatccccacgattttcagcggtgctgatgcctaataaactcaaccccttgcatgccaaaattggcttaaagcccatctgttacccaagctacacttcaagcatcgaggttcaaaaatgtgatt

SEQ ID NO: 179744 - DNA, 412 bp, Homo sapiens
gaattcaagaatttcaaagatatcttattttaaaataccaaaataggaatagaatatgaagggctggttatgagtaatatgatacaattttatgagakgatgagattacaataacaatacctcctctcatagaatagccagcaagtctccactaaataacagtgccttgattttatagatgtttcatcatggatattgagttaatgtgaaccatttgtagacacaggagtttattaaagacttatataatatctttcaagtatttagaatagtgttgaaattaagcctgcatccccacgattttcagcggtgctgatgcctaataaactcaaccccttgcatgccaaaattggcttaaagcccatctgttacccaagctacacttcaagcatcgaggttcaaaaatgtgatt

SEQ ID NO: 179745 - DNA, 412 bp, Homo sapiens
gaattcaagaatttcaaagatatcttattttaaaataccaaaataggaatagaatatgaagggctggttatgagtaatatgatacaattttatgagatgaygagattacaataacaatacctcctctcatagaatagccagcaagtctccactaaataacagtgccttgattttatagatgtttcatcatggatattgagttaatgtgaaccatttgtagacacaggagtttattaaagacttatataatatctttcaagtatttagaatagtgttgaaattaagcctgcatccccacgattttcagcggtgctgatgcctaataaactcaaccccttgcatgccaaaattggcttaaagcccatctgttacccaagctacacttcaagcatcgaggttcaaaaatgtgatt

SEQ ID NO: 179746 - DNA, 412 bp, Homo sapiens
gaattcaagaatttcaaagatatcttattttaaaataccaaaataggaatagaatatgaagggctggttatgagtaatatgatacaattttatgagatgatgagattacaataacaatacctcctctcatagaatagccagcaagtctccactaaataacagtgccttgattttatagatgtttmatcatggatattgagttaatgtgaaccatttgtagacacaggagtttattaaagacttatataatatctttcaagtatttagaatagtgttgaaattaagcctgcatccccacgattttcagcggtgctgatgcctaataaactcaaccccttgcatgccaaaattggcttaaagcccatctgttacccaagctacacttcaagcatcgaggttcaaaaatgtgatt

SEQ ID NO: 179747 - DNA, 412 bp, Homo sapiens
gaattcaagaatttcaaagatatcttattttaaaataccaaaataggaatagaatatgaagggctggttatgagtaatatgatacaattttatgagatgatgagattacaataacaatacctcctctcatagaatagccagcaagtctccactaaataacagtgccttgattttatagatgtttcatcatggatattgarttaatgtgaaccatttgtagacacaggagtttattaaagacttatataatatctttcaagtatttagaatagtgttgaaattaagcctgcatccccacgattttcagcggtgctgatgcctaataaactcaaccccttgcatgccaaaattggcttaaagcccatctgttacccaagctacacttcaagcatcgaggttcaaaaatgtgatt

SEQ ID NO: 179748 - DNA, 412 bp, Homo sapiens
gaattcaagaatttcaaagatatcttattttaaaataccaaaataggaatagaatatgaagggctggttatgagtaatatgatacaattttatgagatgatgagattacaataacaatacctcctctcatagaatagccagcaagtctccactaaataacagtgccttgattttatagatgtttcatcatggatattgagttaatgtgaaccatttgtagacacaggagtttattaaagamttatataatatctttcaagtatttagaatagtgttgaaattaagcctgcatccccacgattttcagcggtgctgatgcctaataaactcaaccccttgcatgccaaaattggcttaaagcccatctgttacccaagctacacttcaagcatcgaggttcaaaaatgtgatt

SEQ ID NO: 179749 - DNA, 412 bp, Homo sapiens
gaattcaagaatttcaaagatatcttattttaaaataccaaaataggaatagaatatgaagggctggttatgagtaatatgatacaattttatgagatgatgagattacaataacaatacctcctctcatagaatagccagcaagtctccactaaataacagtgccttgattttatagatgtttcatcatggatattgagttaatgtgaaccatttgtagacacaggagtttattaaagacttatataatatctttcaagtatttagaatagtgttgaaattaagcctgcatccccacgattttcagcrgtgctgatgcctaataaactcaaccccttgcatgccaaaattggcttaaagcccatctgttacccaagctacacttcaagcatcgaggttcaaaaatgtgatt

SEQ ID NO: 179750 - DNA, 412 bp, Homo sapiens
gaattcaagaatttcaaagatatcttattttaaaataccaaaataggaatagaatatgaagggctggttatgagtaatatgatacaattttatgagatgatgagattacaataacaatacctcctctcatagaatagccagcaagtctccactaaataacagtgccttgattttatagatgtttcatcatggatattgagttaatgtgaaccatttgtagacacaggagtttattaaagacttatataatatctttcaagtatttagaatagtgttgaaattaagcctgcatccccacgattttcagcggtgctgatgcctaatwaactcaaccccttgcatgccaaaattggcttaaagcccatctgttacccaagctacacttcaagcatcgaggttcaaaaatgtgatt

SEQ ID NO: 179751 - DNA, 393 bp, Homo sapiens
gaatagaatatgaagggctggttatgagtaatatgatacaattttatgagatgatgagattacaataacaatacctcctctcatagaatagccagcaagtctccactaaataacagtgccttgattttatagatgtttcatcatggatattgagttaatgtgaaccatttgtagacacaggagtttattaaagacttatataatatctttcaagtatttagaatagtgttgaaattaagcctgcatccccacgattttcagcggtgctgatgcctaataaactcarccccttgcatgccaaaattggcttaaagcccatctgttacccaagctacacttcaagcatcgaggttcaaaaatgtgattttgaatatgcaagagtttgaggaattc

SEQ ID NO: 179752 - DNA, 343 bp, Homo sapiens
atgagtaatatgatacaattttatgagatgatgagattacaataacaatacctcctctcatagaatagccagcaagtctccactaaataacagtgccttgattttatagatgtttcatcatggatattgagttaatgtgaaccatttgtagacacaggagtttattaaagacttatataatatctttcaagtatttagaatagtgttgaaattaagcctgcatccccacgattttcagcggtgctgatgcctaataaactcaaccccttgcatgccaaaattggcttaaagccyatctgttacccaagctacacttcaagcatcgaggttcaaaaatgtgatt

SEQ ID NO: 179753 - DNA, 341 bp, Homo sapiens
caacacctaattttctattttgatctatctttatgtttacaatatattttsctctgtgttcattctttgatttcagaacttcaatctttctgaagcgtgttttcagagtttcctttgagtttctttagtggaattctgctggtggtgttttgttttttgtctctaaatatgtgatttagccataggttgatgaatatttttcttggttgagaatttcagaatggcattattattcttaacaaataatattgtttattttacctttcatgctttcagatttcaatatgattaaaggtaatttgatttttctagtgctaattgaaatatttttcccttcctga

SEQ ID NO: 179754 - DNA, 341 bp, Homo sapiens
caacacctaattttctattttgatctatctttatgtttacaatatattttgctctgtgttcattctttgatttcagaacttcaatctttctgaagcrtgttttcagagtttcctttgagtttctttagtggaattctgctggtggtgttttgttttttgtctctaaatatgtgatttagccataggttgatgaatatttttcttggttgagaatttcagaatggcattattattcttaacaaataatattgtttattttacctttcatgctttcagatttcaatatgattaaaggtaatttgatttttctagtgctaattgaaatatttttcccttcctga

SEQ ID NO: 179755 - DNA, 341 bp, Homo sapiens
caacacctaattttctattttgatctatctttatgtttacaatatattttgctctgtgttcattctttgatttcagaacttcaatctttctgaagcgtgttttcagagtttcctttgagtttctttagtggaattctgctggtggtgttttgttttttgtctctaaatatgtkatttagccataggttgatgaatatttttcttggttgagaatttcagaatggcattattattcttaacaaataatattgtttattttacctttcatgctttcagatttcaatatgattaaaggtaatttgatttttctagtgctaattgaaatatttttcccttcctga

SEQ ID NO: 179756 - DNA, 629 bp, Homo sapiens
aatgtagtacacagatttgtagcctgggagaaagaggctataccatataacctaaacgtggtaggctgtacaatctaggtgtttgtaatactctctgtgatgtttgcaaaatggtaaaattgcctatgaatacatctgttaaaacgtatccctatcattcagtgatgtgtgactgtactaaaatgctcaatgtaagtttcaatgccctccataaaattgttgtactgtgaaatacaaatctctcacccatggcctgaatatgtttgcaaactaagcagatcatgggaaggagaatgtgctggcaccgctgggatgattttctcactctacatgaataatatctacagacttcgtgaatatgagccacttgcatagagttaaagtaggcatctctttgctgggaaaattatcaaatgggagtatgaagtgtttttacaagatactcgtttgtttgtagctggtaggcctacagtggctcwtggtaatggttgaggttgctaagatttggtggaagaaggcaaaatgaaatggccacttatatggtatatggtatatggatcacttatttctgttgagttacaaactcagctggctatttctcctatgttagttatttggagaaaaaaaac

SEQ ID NO: 179757 - DNA, 603 bp, Homo sapiens
cgtggcaagctagtgaatcaccgttataatttaacaatcttcaagataaaattatctctgatatttagattttgcccaattattaagatatttgggtgtttcgttaagaatggaaaactctagtctcttgagcagagactataaaggcctcagatgatcatttttaattttatgctcttttctttaacaccttcaacacagttggaagcagccgatattccgcagagttgttgtgttttttaaaccaaatgcatggttcagtggtagaaaactgggctgatccaagctgttttcagyaaacacttcatttcaggtgacccatttcgtattaaataatctctagatcctgtcttcgaaactaactagatcagataaactaccctggattttctctttttagggtctgagagctgcagtcacttttgtgaaaatgattacaatgacaagatagagttgtagatggggaaaatgttttgactaatttaagcacagtggtatttcatatgagaatttaagttacacacatttgaaaattataatggagtctcttggctgagctttaaaaagaaatagcgtttaggctaaaaagggaactgctacctc

SEQ ID NO: 179758 - DNA, 603 bp, Homo sapiens
cgtggcaagctagtgaatcaccgttataatttaacaatcttcaagataaaattatctctgatatttagattttgcccaattattaagatatttgggtgtttcgttaagaatggaaaactctagtctcttgagcagagactataaaggcctcagatgatcatttttaattttatgctcttttctttaacaccttcaacacagttggaagcagccgatattccgcagagttgttgtgttttttaaaccaaatgcatggttcagtggtagaaaactgggctgatccaagctgttttcagtaaacacttcatttcaggtgacccatttcgtattaaataatctctagatcctgtcttcgaaactaactagatcagataaactaccctggattttctctttttagggtctgagagctgcagtcacttttgtgaaaatgattacaatgacaagatagagttgtagatggggaaaatgttttgactaatttaagcayagtggtatttcatatgagaatttaagttacacacatttgaaaattataatggagtctcttggctgagctttaaaaagaaatagcgtttaggctaaaaagggaactgctacctc

SEQ ID NO: 179759 - DNA, 357 bp, Homo sapiens
gtctcttggctgagctttaaaaagaaatagcgtttaggctaaaaagggaactgctacctctcctaaaatcagaaagatgttacagtaattctccattctctagaattatcaagaagcacctttgtgatgatttacttttgctcttgcgagtgtgagcccgtgyagtcgtggaaccatcaattagaatggttgctttctgatcccaaagtcactcgttctgaaaacaatatttttcataaatttgaaagtgagaagttttgatcttgccattcccaagtaactctcttaataagaggcatcagcatgcttcagtgacagctgtcaccttccattgctgagagtcatctttgagttctc

SEQ ID NO: 179760 - DNA, 357 bp, Homo sapiens
gtctcttggctgagctttaaaaagaaatagcgtttaggctaaaaagggaactgctacctctcctaaaatcagaaagatgttacagtaattctccattctctagaattatcaagaagcacctttgtgatgatttacttttgctcttgcgagtgtgagcccgtgtagtcgtggaaccatcaattagaatggtkgctttctgatcccaaagtcactcgttctgaaaacaatatttttcataaatttgaaagtgagaagttttgatcttgccattcccaagtaactctcttaataagaggcatcagcatgcttcagtgacagctgtcaccttccattgctgagagtcatctttgagttctc

SEQ ID NO: 179761 - DNA, 357 bp, Homo sapiens
gtctcttggctgagctttaaaaagaaatagcgtttaggctaaaaagggaactgctacctctcctaaaatcagaaagatgttacagtaattctccattctctagaattatcaagaagcacctttgtgatgatttacttttgctcttgcgagtgtgagcccgtgtagtcgtggaaccatcaattagaatggttgctttctgatcccaaagtcactcgttctgaaaacaatatttttcataaatttgaaagtgagaarttttgatcttgccattcccaagtaactctcttaataagaggcatcagcatgcttcagtgacagctgtcaccttccattgctgagagtcatctttgagttctc

SEQ ID NO: 179762 - DNA, 363 bp, Homo sapiens
cacaatcatattattctctggtgaaattatctcatatattcctatcgcatttaaaattaattcagaatcatcccatgattatcaaaaccctacatgctcttccacaacatggtttacttccaagatatctcttcaacatttttttcactstactgaattggtgactaatagtcatatttttgtttttgctcaaaaagtcttgacttgtaaatttttcagtttctcctttatccacaggtaactctttcctgataaggcgaattgcttgcttccttgaattctgctctcaaagatacccttcactttctacctaatattaataactttaatcattcattattccattactatgctctatggtgt

SEQ ID NO: 179763 - DNA, 363 bp, Homo sapiens
cacaatcatattattctctggtgaaattatctcatatattcctatcgcatttaaaattaattcagaatcatcccatgattatcaaaaccctacatgctcttccacaacatggtttacttccaagatatctcttcaacatttttttcactgtactgaattggtgactaatagtcatatttttgyttttgctcaaaaagtcttgacttgtaaatttttcagtttctcctttatccacaggtaactctttcctgataaggcgaattgcttgcttccttgaattctgctctcaaagatacccttcactttctacctaatattaataactttaatcattcattattccattactatgctctatggtgt

SEQ ID NO: 179764 - DNA, 363 bp, Homo sapiens
cacaatcatattattctctggtgaaattatctcatatattcctatcgcatttaaaattaattcagaatcatcccatgattatcaaaaccctacatgctcttccacaacatggtttacttccaagatatctcttcaacatttttttcactgtactgaattggtgactaatagtcatatttttgtttttgctcaaaaagtcttgacttgtaaatttttcagtttctcctttatccacaggtaactctttcctgataaggcgaattgcttgcttccttgaattctgctctcaaagatacccttcaytttctacctaatattaataactttaatcattcattattccattactatgctctatggtgt

SEQ ID NO: 179765 - DNA, 575 bp, Homo sapiens
ggcgtatgcatgctacggcctgtcatttccactgatcacaatttgaaactctrgacaaaatataaatagcaatgacccaagtactctgaaaagtaaccagcagacaggttgggaaacgtcaaaacctgaagaattatctggatggtggtggtgagagatcatattctgggtcataaaacaaaccctaaagttaaacaattaaaattcagtgaattattttctctgatgacagaattaaactaggaatctagaacatttctagaacatccccaaatatgagaagttaaatggcatacttctaaatggcccataggtcaaagagagtatcttaagacaaattggaaaacagtttgaacttaataaatatgacatcatcttatcaaaatatgtgcttacagggcaatttatggcactaaattatgagaaatgaagcatcaaatcaataatgtaagcatttactttaagtaaaaaaagaaccaaataaactcaaatcaggcataagaaaaacagactaaatcagtaatatttaaacaaaaacagtaaaggaaaaaaattcaacgaaatccaaagttggt

SEQ ID NO: 179766 - DNA, 575 bp, Homo sapiens
ggcgtatgcatgctacggcctgtcatttccactgatcacaatttgaaactctggacaaaatataaatagcaatgacccaagtactctgaaaagtaaccagcagacaggttgggaaacgtcaaaacctgaagaattatctggatggtggtggtgagagatcatattctgggtcataaaacaaaccctaaagttaaacaattaaaattcagtgaattattttctctgatgacagaattaaactaggaatctagaacatttctagaacatccccaaatatgagaagttaaatggcrtacttctaaatggcccataggtcaaagagagtatcttaagacaaattggaaaacagtttgaacttaataaatatgacatcatcttatcaaaatatgtgcttacagggcaatttatggcactaaattatgagaaatgaagcatcaaatcaataatgtaagcatttactttaagtaaaaaaagaaccaaataaactcaaatcaggcataagaaaaacagactaaatcagtaatatttaaacaaaaacagtaaaggaaaaaaattcaacgaaatccaaagttggt

SEQ ID NO: 179767 - DNA, 575 bp, Homo sapiens
ggcgtatgcatgctacggcctgtcatttccactgatcacaatttgaaactctggacaaaatataaatagcaatgacccaagtactctgaaaagtaaccagcagacaggttgggaaacgtcaaaacctgaagaattatctggatggtggtggtgagagatcatattctgggtcataaaacaaaccctaaagttaaacaattaaaattcagtgaattattttctctgatgacagaattaaactaggaatctagaacatttctagaacatccccaaatatgagaagttaaatggcatacttctaaatggcccataggtcaaagagagtatcttaagacaaattggaaaacagtttgaacttaataaatatgacatcatcttaycaaaatatgtgcttacagggcaatttatggcactaaattatgagaaatgaagcatcaaatcaataatgtaagcatttactttaagtaaaaaaagaaccaaataaactcaaatcaggcataagaaaaacagactaaatcagtaatatttaaacaaaaacagtaaaggaaaaaaattcaacgaaatccaaagttggt

SEQ ID NO: 179768 - DNA, 575 bp, Homo sapiens
ggcgtatgcatgctacggcctgtcatttccactgatcacaatttgaaactctggacaaaatataaatagcaatgacccaagtactctgaaaagtaaccagcagacaggttgggaaacgtcaaaacctgaagaattatctggatggtggtggtgagagatcatattctgggtcataaaacaaaccctaaagttaaacaattaaaattcagtgaattattttctctgatgacagaattaaactaggaatctagaacatttctagaacatccccaaatatgagaagttaaatggcatacttctaaatggcccataggtcaaagagagtatcttaagacaaattggaaaacagtttgaacttaataaatatgacatcatcttatcaaaatatgtgcttacagggcaatttatrgcactaaattatgagaaatgaagcatcaaatcaataatgtaagcatttactttaagtaaaaaaagaaccaaataaactcaaatcaggcataagaaaaacagactaaatcagtaatatttaaacaaaaacagtaaaggaaaaaaattcaacgaaatccaaagttggt

SEQ ID NO: 179769 - DNA, 511 bp, Homo sapiens
ccaatccacttataatttatcaaaaagtgaaaatagtccatattcctccaatgacaaaccaataagcaaaccatgtagtatttatacaatggattactatttggcaattaaaaggaataactgttgatrcagtatatgaaagtagccagactcaaaaggctacatcctgaacgattccatttgtataaaattctgaaaaaaaagcaatgccagaggaacacagatcagttattgccagaagtttacaatggaaggttttactataaagggtaaggtaatttttggagtgatcatataattttgtaatctaccaaaaacaaacataataaatgggcagataagtaaagttcatggattggaaagttcaatattgcaaagttctcccaaaaatgacctatcaatttaatcccagtggaaattccaatcagttttgtgaaggctgctaagtcaactctaaaatggccaagaatagacaagatcaccggagaggaagcagggaggtggacacaaa

SEQ ID NO: 179770 - DNA, 511 bp, Homo sapiens
ccaatccacttataatttatcaaaaagtgaaaatagtccatattcctccaatgacaaaccaataagcaaaccatgtagtatttatacaatggattactatttggcaattaaaaggaataactgttgatacagtatatgaaagtagccagactcaaaaggctacatcctgaacgattccatttgtataaaattctgaaaaaaaagcaatgccagaggaacacagatcagttattgccagaagtttacaatggaaggttttactataaagggtaaggtaatttttggagtgatcatataattttgtaatctaccaaaaacaaacataataaatrggcagataagtaaagttcatggattggaaagttcaatattgcaaagttctcccaaaaatgacctatcaatttaatcccagtggaaattccaatcagttttgtgaaggctgctaagtcaactctaaaatggccaagaatagacaagatcaccggagaggaagcagggaggtggacacaaa

SEQ ID NO: 179771 - DNA, 494 bp, Homo sapiens
agagaagcagaaatgtttatgtggcctcctgccaaaaacaatcacttgcacttatttctagtactccagaagacagtaatagaagtttttcaatttagaaaaacatttacagcaaagaaaaaaatctctgtaaacttcctgcttatccaatctagtgaattgtgatgagccatataaattcatttagccaccttatgaaagacttaatccaaagtcacttctaacttctagaagagctaatgtattataatcacagttgtgaaagactcaaaggccagaaatgtcaaggtgtggtctatatcctaagtccagaaaaaaaaaccaaaagcaacaygtacaggccaaatgattgccaatttcttctgcctacgtcatctttcttcactatagcctgaaattacatttcatgtttgacaattctcagcaaggagacaaaacaagcttatgagtaaaataatagaaagcagagccacagagaggacgagaggcaggag

SEQ ID NO: 179772 - DNA, 652 bp, Homo sapiens
tttttttttgtgcctagaggcagatattttgccccatggctatttacggtatgaaactgtatttaaatgagtgtacatayataaaagctgccattctggctgtaaactattgcaggttatcaagattaaaaaataaacaaataaaaatatttcagtttttctatgaaatgtctttactcgagtccaaatgtagagatataaaatgcttgaaattcataaaaccaagtgtttcacatatttcagttgtgatggcctttgtcctacttttgttagtgaagcaggcagactgcattttttccctctcatacatcttcaaatggtagacagaaaaatttgataaaacttctagggcattatctgatgaaacacattaaacactaaaggagaaatacaacttcattgtttataaaagacgtataagaaggaaacctgcatacatatatctatcagttttgtattttcaagaaatatttgccttaaaatgaacttcattagaatatgtgttctcccacagagccaaggaaagtaagttagacacaggatctggaagtctacctgtgtgatgtaattacattgaaaacattccacaaataatgcagaaatgtatcattgtgacccaaaatattctctaaattttctcaaagcaatgtgg

SEQ ID NO: 179773 - DNA, 373 bp, Homo sapiens
ttaatgatcactgatcacagatcaccgtaacgaatataataataaggaaatattttaaaaattgtgaagattaccaaagtgtgaaaccaagacacaaagtgagcacaggctgtttgttaaatggcaccaatagacttgcttcaccagggttgtcacaaacatctcatttgtaaataaagaaaaaatgttcctatctgtgaagcacaataaagagaagtgcaataaaatatgtttgtattaatttggttaactttattccaacttaatgtaaattagttttaaaacagtttataaaattctwaaatgaacctggcaaatttagagcaataataaaattatttaaattagaaaagtcttttttaaaaaggataaa

SEQ ID NO: 179774 - DNA, 373 bp, Homo sapiens
ttaatgatcactgatcacagatcaccgtaacgaatataataataaggaaatattttaaaaattgtgaagattaccaaagtgtgaaaccaagacacaaagtgagcacaggctgtttgttaaatggcaccaatagacttgcttcaccagggttgtcacaaacatctcatttgtaaataaagaaaaaatgttcctatctgtgaagcacaataaagagaagtgcaataaaatatgtttgtattaatttggttaactttattccaacttaatgtaaattagttttaaaacagtttataaaattcttaaatgaacctggcaaatttagagcaataataamattatttaaattagaaaagtcttttttaaaaaggataaa

SEQ ID NO: 179775 - DNA, 643 bp, Homo sapiens
agaatggtattttcactcaaatctcttgaaacatatatttatagtcaatagttaaattttatttaatatcaattgttcctttttattagtattttcttaaaaaaataatattggcccagcgcagtggttcacacctgtaatcccagcactttgggaggctaaggtgggcagatcacttgaggtcgggagttggagaccagcctgagcaacttggagacaacctttctctactaaaaatacaaaaattagccggacgtggtggtgcatgcctgtaatcccagctactcaggaggcttgaggcaagakaattgcttgaacctgggaggtagaggttgcagtgagccgagatcgcaccaccgcactctagcctgggtgacagagcgagactccatctcaaaaaaaaagaaagaaagaaaatgccagacatttattgaagggctggaatggtatagtgaagtgttctgagtcagttgggctctgattgataaagagcttggcatgtttgaaggacagcaaggaagccagaatagctggagcatagcagcagggagacaagtgccacaagatgagctggagaaaggcactgggaaaggtttgtcttttaagtgctctgagaagcaattgaagatttgaaatagaatag

SEQ ID NO: 179776 - DNA, 531 bp, Homo sapiens
tgtcagatctccaaactgctaactcttctctttggcagatcaaatgcttcttcttaaaaaaattaagtttttaaaatgtatttcataggatttttgttctctccctctttttgtgcatatgtgtgtgtgtctgattagtctttaytatcttaaaatggttagtcctgatagacctgtttcttcaaaatttctctcagttctttggcagtttgctcttagcttataattaaagatcaatttctgacttgtcttgttctagaaaacctcaatggaaattacagcaagctgaataggatattaattaaaaacataaacctggtgaaacccgaacatagaggctccagttcaaagatgcttccaatagttgacatggcccttcattccttaaaaccagctatttttcttttgaattacattacctttaattctgtaaattggatgttatatagtaccatgaaaactgctgtgagtaattataatactcattgctgagtgatgtgacttctttctcaaggctatttctgagggaaa

SEQ ID NO: 179777 - DNA, 531 bp, Homo sapiens
tgtcagatctccaaactgctaactcttctctttggcagatcaaatgcttcttcttaaaaaaattaagtttttaaaatgtatttcataggatttttgttctctccctctttttgtgcatatgtgtgtgtgtctgattagtctttactatcttaaaatggttagtcctgatagacctgtttcttcaaaatttctctcagttctttggcagtttgctcttagcttataattaaagatcaatttctgacttgtcttgttctagaaaacctcaatggaaattacagsaagctgaataggatattaattaaaaacataaacctggtgaaacccgaacatagaggctccagttcaaagatgcttccaatagttgacatggcccttcattccttaaaaccagctatttttcttttgaattacattacctttaattctgtaaattggatgttatatagtaccatgaaaactgctgtgagtaattataatactcattgctgagtgatgtgacttctttctcaaggctatttctgagggaaa

SEQ ID NO: 179778 - DNA, 531 bp, Homo sapiens
tgtcagatctccaaactgctaactcttctctttggcagatcaaatgcttcttcttaaaaaaattaagtttttaaaatgtatttcataggatttttgttctctccctctttttgtgcatatgtgtgtgtgtctgattagtctttactatcttaaaatggttagtcctgatagacctgtttcttcaaaatttctctcagttctttggcagtttgctcttagcttataattaaagatcaatttctgacttgtcttgttctagaaaacctcaatggaaattacagcaagctgaatmggatattaattaaaaacataaacctggtgaaacccgaacatagaggctccagttcaaagatgcttccaatagttgacatggcccttcattccttaaaaccagctatttttcttttgaattacattacctttaattctgtaaattggatgttatatagtaccatgaaaactgctgtgagtaattataatactcattgctgagtgatgtgacttctttctcaaggctatttctgagggaaa

SEQ ID NO: 179779 - DNA, 531 bp, Homo sapiens
taactcttctctttggcagatcaaatgcttcttcttaaaaaaattaagtttttaaaatgtatttcataggatttttgttctctccctctttttgtgcatatgtgtgtgtgtctgattagtctttactatcttaaaatggttagtcctgatagacctgtttcttcaaaatttctctcagttctttggcagtttgctcttagcttataattaaagatcaatttctgacttgtcttgttctagaaaacctcaatggaaattacagcaagctgaataggatattaattaaaaacataaacctggtgaaacccgaacatagaggctccagttcaaagatgcttccaatagttgacatggcccttcattccttaaaaccagctatttttctttygaattacattacctttaattctgtaaattggatgttatatagtaccatgaaaactgctgtgagtaattataatactcattgctgagtgatgtgacttctttctcaaggctatttctgagggaaattgtacaattagatcttta

SEQ ID NO: 179780 - DNA, 410 bp, Homo sapiens
ttgtctacttttgactaaactaacttcacaaaaggttaagtgggttaaaaaatttcctacaaagaaataccaaatttagataatatgataattcaagaacaataaaatatcagagctacatttcttcaattagttgtatatactcttgtcaaccacrtagcaaagttgaaaacaatggcaaggagtcagccaaaaattctacattatcatcaggaaagcattttgaaacataggttatatccattgtcatcaatgtcaactcactctaagtgcatattctaactcaagatttgaagttgatgatagtattcaggaaacacgtacgatttgattactcatgctcaaagccatgtgttattgaaccagccactttacaaaatttaattaaacttaatgatgaaaattaaaag

SEQ ID NO: 179781 - DNA, 410 bp, Homo sapiens
ttgtctacttttgactaaactaacttcacaaaaggttaagtgggttaaaaaatttcctacaaagaaataccaaatttagataatatgataattcaagaacaataaaatatcagagctacatttcttcaattagttgtatatactcttgtcaaccacatagcaaagttgaaaacaatggcaaggagtcagccaaaaattctacattatcatcaggaaagcattttgaaacataggttatatccattgtcatcaatgtcaactcactctaagtgcatattctaactcaagatttgaagttgatgatagtattcaggaaacaygtacgatttgattactcatgctcaaagccatgtgttattgaaccagccactttacaaaatttaattaaacttaatgatgaaaattaaaag

SEQ ID NO: 179782 - DNA, 566 bp, Homo sapiens
aaactgatgcactgaaatacagtcaggtaaaataaagagttaggggcacattttaaaatacatttaaggtgcatcaaagatttaaaccaatcacttgtaacatctctatttgtcaaactcattggtgatcattagcatttagagagacccaggaaaatygcaagattctaaataattttcaaaccatagtagaggatactttgtttactgttatttatgtattaaatatcttttaatatactatagctttataagaacagataatccatttttggaatttgtgttttaattggccaaagagttaaatccattttttctagatcctctggataattaggaatcggtagtaaaaagcaattgcacttttccaataaaataatatgctcagttgttcaaacccacattcttgataaaaacaactagaaattctgcataagatagaagaaaaagaagattttgaaacaacaaagagcatacaagatggtaaggaattacaagaccaaaatctaagtgatgtcttgatctcagaaaagaaagctaaatgttgaattccctttggcccttgg

SEQ ID NO: 179783 - DNA, 566 bp, Homo sapiens
aaactgatgcactgaaatacagtcaggtaaaataaagagttaggggcacattttaaaatacatttaaggtgcatcaaagatttaaaccaatcacttgtaacatctctatttgtcaaactcattggtgatcattagcatttagagagacccaggaaaatcgcaagattctaaataattttcaaaccatagtagaggatactttgtttactgttatttatgtattaaatatcttttaatatactatagctttataagaacagataatccatttttggaatttgtgttttaattggccaaagagttaaatccattttttctagatcctctggataattaggaatcggtagtaaaaagcaattkcacttttccaataaaataatatgctcagttgttcaaacccacattcttgataaaaacaactagaaattctgcataagatagaagaaaaagaagattttgaaacaacaaagagcatacaagatggtaaggaattacaagaccaaaatctaagtgatgtcttgatctcagaaaagaaagctaaatgttgaattccctttggcccttgg

SEQ ID NO: 179784 - DNA, 566 bp, Homo sapiens
aaactgatgcactgaaatacagtcaggtaaaataaagagttaggggcacattttaaaatacatttaaggtgcatcaaagatttaaaccaatcacttgtaacatctctatttgtcaaactcattggtgatcattagcatttagagagacccaggaaaatcgcaagattctaaataattttcaaaccatagtagaggatactttgtttactgttatttatgtattaaatatcttttaatatactatagctttataagaacagataatccatttttggaatttgtgttttaattggccaaagagttaaatccattttttctagatcctctggataattaggaatcggtagtaaaaagcaattgcacttttccaataaaataatatgctcagttgttcaaacccacattcttgataaaaacaactagaaattctgsataagatagaagaaaaagaagattttgaaacaacaaagagcatacaagatggtaaggaattacaagaccaaaatctaagtgatgtcttgatctcagaaaagaaagctaaatgttgaattccctttggcccttgg

SEQ ID NO: 179785 - DNA, 577 bp, Homo sapiens
ttattttgttaaattaatttaaattttaaaaatttatcttcactctatgcaataatatttgtgaaattttgactctggtgtgtaaattaacttgtttactgcattgaatcctttgtcatttttgtaatactttgattatctccatctaaatattcaaacatcacctcttaacataaccagtggtacactttccatgatttagatatggtggtctgactagcgttgaaacttgagagaagctagcctcaataacaggacccagggataaccatctagttctccagcgaagggccttaagccttctgggggtccacmttgttggttactcactaatcaaagatgtacccggcccctagttttctcctccctgactcaagttcatgtcattcaactctctgcctggttcacggactcatggtattctgccctactcctgctgcttggctatccaccagttaccaaaagctgaagctgatgcaaccacgtgaaatttctacaagaccctcccctctttgggctcccatcacattatcactactgccagatgtcatcagcgtgagagaatcagtggtggtcc

SEQ ID NO: 179786 - DNA, 577 bp, Homo sapiens
ttattttgttaaattaatttaaattttaaaaatttatcttcactctatgcaataatatttgtgaaattttgactctggtgtgtaaattaacttgtttactgcattgaatcctttgtcatttttgtaatactttgattatctccatctaaatattcaaacatcacctcttaacataaccagtggtacactttccatgatttagatatggtggtctgactagcgttgaaacttgagagaagctagcctcaataacaggacccagggataaccatctagttctccagcgaagggccttaagccttctgggggtccacattgttggttactcactaatcaaagatgtrcccggcccctagttttctcctccctgactcaagttcatgtcattcaactctctgcctggttcacggactcatggtattctgccctactcctgctgcttggctatccaccagttaccaaaagctgaagctgatgcaaccacgtgaaatttctacaagaccctcccctctttgggctcccatcacattatcactactgccagatgtcatcagcgtgagagaatcagtggtggtcc

SEQ ID NO: 179787 - DNA, 553 bp, Homo sapiens
cattaaatcctcagagggccttcgttgctgaaaatctgagtaatattgtgatacccttttgagtcyggcaggacattctctttccagggcatatgacagtgggcgaataatttcttttcattcattttcattaagggctgaacttccttaatgttctggagattattaaatttgatttgtatagttgtgaaaagtgctcatattgctgattccattgcttacatatgatcatataagtcttttctctcctttctgtagtgtggtttaaacttaatccttaaaggacatgtatttgaatttttcagctggttagaaacctgaatataccaatcaaagaaaactgctccttacatgctacagatttagtgttcttcctgtgctaagatgtcttttagatatagtaaatttgttaaagccaagagctcctatggaacaaagttgggtgggagggggacattgagtagtaagatcactcttgtaatagagatgccactcttgcagatattgacaactattgggccccgtaaaattttaacaaacattggaaagacaa

SEQ ID NO: 179788 - DNA, 402 bp, Homo sapiens
tattaatacagcttcttgtgggttaagtagaaagctcttttgtaaatatccctcagtttaagtatatatatagtttacatttccaggtaaactataaattmtctaagaaaggcccagcacggtggttcaagcctataatcccagctctttgggagtctgagatgggtggatcactggaggtcaggagtttcagaccagcctggccaatgtggtgaaaccccatctctaccaaaaatacaaaaattagccaggcatggtggtgcacacctgtaatctcagctactcaggaggccaaggcaagtgattaaacccaggaggtggaggttgcagtgagctgagatcgcaccactgcactccagcctgggtgacaagctggactctgtctcaaaaaaaaaaaaaaaa

SEQ ID NO: 179789 - DNA, 402 bp, Homo sapiens
tattaatacagcttcttgtgggttaagtagaaagctcttttgtaaatatccctcagtttaagtatatatatagtttacatttccaggtaaactataaattctctragaaaggcccagcacggtggttcaagcctataatcccagctctttgggagtctgagatgggtggatcactggaggtcaggagtttcagaccagcctggccaatgtggtgaaaccccatctctaccaaaaatacaaaaattagccaggcatggtggtgcacacctgtaatctcagctactcaggaggccaaggcaagtgattaaacccaggaggtggaggttgcagtgagctgagatcgcaccactgcactccagcctgggtgacaagctggactctgtctcaaaaaaaaaaaaaaaa

SEQ ID NO: 179790 - DNA, 402 bp, Homo sapiens
tattaatacagcttcttgtgggttaagtagaaagctcttttgtaaatatccctcagtttaagtatatatatagtttacatttccaggtaaactataaattctctaagaaaggcccagcacggtggttcaagcctataatcccagctctttgggagtctgagatgggtggatcactggaggtcaggagtttcagaccagcctggccaatgtggtgaaaccccatctctaccaaaaatacaaaaattagccaggcatggtggtgcacrcctgtaatctcagctactcaggaggccaaggcaagtgattaaacccaggaggtggaggttgcagtgagctgagatcgcaccactgcactccagcctgggtgacaagctggactctgtctcaaaaaaaaaaaaaaaa

SEQ ID NO: 179791 - DNA, 425 bp, Homo sapiens
ataaagcctcataacatgatagtaagcaaatatcaatcttaaaattttttaaataaaagagcaactatattacatamtgactttttagagagggttggcatagaaagataaggagtcaaagaggaaggtaagaaaagagaaaggatgagaaagtaaatatacaagaaaacgtaaccagaggctcaaaaaaaaaaaaaaaaaaagcaaagtaggacagtaaaataaacattttgacctatttatatgatttttaagttcaaaataacttgctatgagattttcatcattaactgacatttagattagagaaaatatacatgaagcaagcatcaccccaggtaatacaacagctccgattccacttttcagctttgacctgcctcggccacctcgccccgacagtcctgcacctcgaggtctccgct

SEQ ID NO: 179792 - DNA, 425 bp, Homo sapiens
ataaagcctcataacatgatagtaagcaaatatcaatcttaaaattttttaaataaaagagcaactatattacatactgactttttagagagggttggcatagaaagataaggagtcaaagaggaaggtaagaaaagagaaaggrtgagaaagtaaatatacaagaaaacgtaaccagaggctcaaaaaaaaaaaaaaaaaaagcaaagtaggacagtaaaataaacattttgacctatttatatgatttttaagttcaaaataacttgctatgagattttcatcattaactgacatttagattagagaaaatatacatgaagcaagcatcaccccaggtaatacaacagctccgattccacttttcagctttgacctgcctcggccacctcgccccgacagtcctgcacctcgaggtctccgct

SEQ ID NO: 179793 - DNA, 425 bp, Homo sapiens
ataaagcctcataacatgatagtaagcaaatatcaatcttaaaattttttaaataaaagagcaactatattacatactgactttttagagagggttggcatagaaagataaggagtcaaagaggaaggtaagaaaagagaaaggatgagaaagtaaatatacaagaaaaygtaaccagaggctcaaaaaaaaaaaaaaaaaaagcaaagtaggacagtaaaataaacattttgacctatttatatgatttttaagttcaaaataacttgctatgagattttcatcattaactgacatttagattagagaaaatatacatgaagcaagcatcaccccaggtaatacaacagctccgattccacttttcagctttgacctgcctcggccacctcgccccgacagtcctgcacctcgaggtctccgct

SEQ ID NO: 179794 - DNA, 485 bp, Homo sapiens
agtctgaattaaacagccatattccagaatattaaatatagaatatgaagaaaaactgtcatctccagtcaatgaagtattttaacttttgagttaatactttttcaaattaatttttttctcttcaaaatgcatcacactacttaactcacttcaaggactggcacagccatcaaccaatgtcatggggraaaaagccttgtcattttaaggtattaaacagacaatgaaatctgccacaattttggtatttcttctccataagaacataataaattaatggagttttttcttttgcttttttctaagcaacaaagttttatgatatcatgaatgaaaaggtccttaattaccttttggtctacatgtcaaggacttctccctcataaaaccggtagtaatcacaacaaaaggaattaaccataaaaagaggtattaaaaatgtatattgatttttaaatgcaagcatattatttctttacatt

SEQ ID NO: 179795 - DNA, 504 bp, Homo sapiens
tctgaattaaacagccatattccagaatattaaatatagaatatgaagaaaaactgtcatctccagtcaatgaagtattttaacttttgagttaatactttttcaaattaatttttttctcttcaaaatgcatcacactacttaactcacttcaaggactggcacagccatcaaccaatgtcatgggggaaaaagccttgtcattttaaggtattaaacagacaatgaaatctgccacaattttggtatttcttctccataagaacataataaattaatggagttttttcttttgcttttttctaagcaacaaagttttatgatatcatgaatgaaaaggtccttaattaccttttggtctacatgtcaaggacttctccctcataaaaccggtagtaatcacaacaaaaggaattaaccataaaaagagstattaaaaatgtatattgatttttaaatgcaagcatattatttctttacattaaaatttttagatttaaaaag

SEQ ID NO: 179796 - DNA, 632 bp, Homo sapiens
gtttctggaagctcaatctagaaaagaaagatttaattctttacacccagtagggcaaaacaaatcagacagaaatgatatatgaatgtaaatgcaattttatttaccactttgatgctccaaatggcactgccaggaagctgcctgggtttaaaaatttcccgacctcctgaaatgtctggggaccaggaaggtgggctcactgtattatgggtactccaagcctcctagkatatggcagttgagaaaatagatgtgtaaaactcagcaacataaaaggtcaaagccagcaactaaggaattttagaacagcaaaaacaaatgcaaacatatggaaatttaggacaaattgcttcaaggaaggcaaaataagctaatcactaacagtgatttaaacatttaagtataacaaataacttaaatgattgctgctacagagacatcactacaatgaaacattaaaaattaaggtttatatgacatcaacattgactcatgaactgcaattactgcaccaaaaagtaaataaaagtcaatcacactttaagaattaacactagaagaaagtattggggggttatttttcttctaacaactatcactctacttaaaaggagaaatggataaccata

SEQ ID NO: 179797 - DNA, 632 bp, Homo sapiens
gtttctggaagctcaatctagaaaagaaagatttaattctttacacccagtagggcaaaacaaatcagacagaaatgatatatgaatgtaaatgcaattttatttaccactttgatgctccaaatggcactgccaggaagctgcctgggtttaaaaatttcccgacctcctgaaatgtctggggaccaggaaggtgggctcactgtattatgggtactccaagcctcctaggatatggcagttgagaaaatagatgtgtaaaactcagcaacataaaaggtcaaagccagcaactaaggaattttagaacagcaaaaacaaatgcaaacatatggaaatttaggacaaattgcttcaaggaaggcaaaataagctaatcactaacagtgatttaaacatttaagtataacaaataacttaaatgattgctgctacagagacatcactacaatgaaacattaaaaattaaggtttatatgacatcaacattgactcatgaactgcaattactgcaccaaaaagtaaataaaagtcaatcacactttaagaattaacactagaagaaagtattggggggttatttttcttctaacaactatcrctctacttaaaaggagaaatggataaccata

SEQ ID NO: 179798 - DNA, 591 bp, Homo sapiens
actgctaccaccaatgttgctgtttattagccttctaagcaagcaatgtagtgcctggtgaaagagattgtttcataccttcatatctatttgataaccttcctgatgatagyttggtgagcattcgtattaagcacaaatattcttacactctggctcattttctgtggttcatctacatattttttccccaaaactcattgccaccaatccttcagtctttgtctttccgagtccctaattatcttttcttttcttttttttttttttttttgagacagagtttcactttgttgcccaggctggagtgcagtggtgcaatcttggttcactgcaacttcttcctcctggattcaagagattctcctgcctcagcctcccaagtagctaggattgcaggcacacaccaccacatctggctaatttttgtatttttagtagagacggagtttcaccatgtcagccaggctggtttcgaactcctgacctcagacaatccacctgtcctgtcctccaaaagttctgggattacaggtgtgagccatcaggcctggccccaagtccctaattatctagacaaattattagctg

SEQ ID NO: 179799 - DNA, 591 bp, Homo sapiens
actgctaccaccaatgttgctgtttattagccttctaagcaagcaatgtagtgcctggtgaaagagattgtttcataccttcatatctatttgataaccttcctgatgatagcttggtgagcattcgtattaagcacaaatattcttacactctggctcattttctgtggttcatctacatattttttccccaaaactcattgccaccaatccttcagtctttgtctttccgagtccctaattatcttttcttttcttttttttttttttttttgagacagagtttcrctttgttgcccaggctggagtgcagtggtgcaatcttggttcactgcaacttcttcctcctggattcaagagattctcctgcctcagcctcccaagtagctaggattgcaggcacacaccaccacatctggctaatttttgtatttttagtagagacggagtttcaccatgtcagccaggctggtttcgaactcctgacctcagacaatccacctgtcctgtcctccaaaagttctgggattacaggtgtgagccatcaggcctggccccaagtccctaattatctagacaaattattagctg

SEQ ID NO: 179800 - DNA, 578 bp, Homo sapiens
atttataagactattaatggcaataaacatgatttaatataatgttttcaaaaattaggggaattctattcccagcattgtggtagactaaatttgctgaatcactatcctgctatatgaaatctacaaataccagataaaatgtacatgtcatttttcaaaagtatattactgacttgaatagaaaytaaggtgaaccacataggccaagcataaggagaatacataaatccagagaggtatgcagacccccaaaccagaagcttccataaggacagtcctggtcctagtaccctgagcttcaatttttatgaccacctgggatatgggagagtgtgagacaaaacctagtgcctgcccagtacagcagtcttacaggagaaaactgctgaaagccagagatacgaaggactataatttcagtgaaaggataaactagataaaaacctgttcctcagggggagacaaccaggaaattttcctgcctcaaactcggtgctatttagaggaaaaatgagaaggccatcttcacatgaatttgtggtttaaattttcactgtaagtataagttaaaaaaa

SEQ ID NO: 179801 - DNA, 578 bp, Homo sapiens
atttataagactattaatggcaataaacatgatttaatataatgttttcaaaaattaggggaattctattcccagcattgtggtagactaaatttgctgaatcactatcctgctatatgaaatctacaaataccagataaaatgtacatgtcatttttcaaaagtatattactgacttgaatagaaactaaggtgaaccacataggccaagcataaggagaatacataaatccagagaggtatgcagacccccaaaccagaagcttccataaggacagtcctggtcctagtaccctgagcttcaatttttatgaccacctgggatatgggagagtgtgagacaaaacctagtgcctgcccagtacagcagtcttacaggagaaaactgctgaaagccasagatacgaaggactataatttcagtgaaaggataaactagataaaaacctgttcctcagggggagacaaccaggaaattttcctgcctcaaactcggtgctatttagaggaaaaatgagaaggccatcttcacatgaatttgtggtttaaattttcactgtaagtataagttaaaaaaa

SEQ ID NO: 179802 - DNA, 578 bp, Homo sapiens
atttataagactattaatggcaataaacatgatttaatataatgttttcaaaaattaggggaattctattcccagcattgtggtagactaaatttgctgaatcactatcctgctatatgaaatctacaaataccagataaaatgtacatgtcatttttcaaaagtatattactgacttgaatagaaactaaggtgaaccacataggccaagcataaggagaatacataaatccagagaggtatgcagacccccaaaccagaagcttccataaggacagtcctggtcctagtaccctgagcttcaatttttatgaccacctgggatatgggagagtgtgagacaaaacctagtgcctgcccagtacagcagtcttacaggagaaaactgctgaaagccagagatacgaaggactataatttcagkgaaaggataaactagataaaaacctgttcctcagggggagacaaccaggaaattttcctgcctcaaactcggtgctatttagaggaaaaatgagaaggccatcttcacatgaatttgtggtttaaattttcactgtaagtataagttaaaaaaa

SEQ ID NO: 179803 - DNA, 525 bp, Homo sapiens
tggggagctgtaaaaatgcccaggccctactctgtgtcaattaaatcagaatccagaatctctgcttgagtgtgtctagagtattggtcaaaggaaacagtgattttgatgtgcagccagttaagagctgatattctcaaggatcatgatgtgacacagctgtttcagaagggtaaatctccatactcccactttagaagaaaagaaaaggcaaaatgacaaaacaatcaagcaaaagggctggaagagctggtagataacagggtgtcaacttgaattaattcagctctttggtaaagattagctggagtaaagaaattccagttagtcaaatgggatgaatgtcctttyatggaaaccatatcatgctttttgaatgatctgagaaagactggaagcattagaggtgaagtatatccatttgctcaatgggaaaagattttgttttattttatttacataatgtgatatgcttggccatctgcagtagtgcctgaaaggggatgtaaaacggaaaatgtagtc

SEQ ID NO: 179804 - DNA, 508 bp, Homo sapiens
taaaaatataattcatgcacccagtaagaaaatcaaaaaattaaataaaggtaaaaatgaaatataaaattctctttcctctagtctcttacccccagacatctagaatctctccttaagataatcactgttgacaatttcttgagtatctttttaaaaatgaccttaatacacatcccccgtatagaatatagatcttaaacaagwtagaaaataaaattttatcttttagtattacacaaaaggatgttcagaactaggctttgtattttttttttctagagatgaggtctcactgtgttgcccaggttggtctcaaactcctgggctcaagcaatcctcccgcctcagtctccaaaagtgttgggattataagcatgagatgaagtcttgcctggcctaggctttctatttttgtttaataatttaccttcaagatattcttaacttttaacaactgtattgtataaatatattttttattaaaacaataggctaccaataacat

SEQ ID NO: 179805 - DNA, 508 bp, Homo sapiens
taaaaatataattcatgcacccagtaagaaaatcaaaaaattaaataaaggtaaaaatgaaatataaaattctctttcctctagtctcttacccccagacatctagaatctctccttaagataatcactgttgacaatttcttgagtatctttttaaaaatgaccttaatacacatcccccgtatagaatatagatcttaaacaagatagaaaataaaattttatcttttagtattacacaaaaggatgttcagaactaggctttgtattttttttttctagagatraggtctcactgtgttgcccaggttggtctcaaactcctgggctcaagcaatcctcccgcctcagtctccaaaagtgttgggattataagcatgagatgaagtcttgcctggcctaggctttctatttttgtttaataatttaccttcaagatattcttaacttttaacaactgtattgtataaatatattttttattaaaacaataggctaccaataacat

SEQ ID NO: 179806 - DNA, 508 bp, Homo sapiens
taaaaatataattcatgcacccagtaagaaaatcaaaaaattaaataaaggtaaaaatgaaatataaaattctctttcctctagtctcttacccccagacatctagaatctctccttaagataatcactgttgacaatttcttgagtatctttttaaaaatgaccttaatacacatcccccgtatagaatatagatcttaaacaagatagaaaataaaattttatcttttagtattacacaaaaggatgttcagaactaggctttgtattttttttttctagagatgaggtctcactgtgttgcccaggttggtctcaaactcctgggctcaagcaatcctcccgcctcagtctccaaaagtgttgggattayaagcatgagatgaagtcttgcctggcctaggctttctatttttgtttaataatttaccttcaagatattcttaacttttaacaactgtattgtataaatatattttttattaaaacaataggctaccaataacat

SEQ ID NO: 179807 - DNA, 603 bp, Homo sapiens
tagatcttaaacaagatagaaaataaaattttatcttttagtattacacaaaaggatgttcagaactaggctttgtattttttttttctagagatgaggtctcactgtgttgcccaggttggtctcaaactcctgggctcaagcaatcctcccgcctcagtctccaaaagtgttgggattataagcatgagatgaagtcttgcctggcctaggcwttctatttttgtttaataatttaccttcaagatattcttaacttttaacaactgtattgtataaatatattttttattaaaacaataggctaccaataacattaataacatatcttggtttatgtattttacaagattctccatgtgataaattccaacctgagaagttgctatacaacatatgaatttaacattttttaattgctgcgatctaatatgatcctaaaacatggccttagtttatattcctatgagaatgtctaatacctacactcttgctaacattgactgctattgcattttaaagacgcattaatttgattggattgatgttgaacatcttctgttactcctggccattgcatttctttttctacctattaatctc

SEQ ID NO: 179808 - DNA, 544 bp, Homo sapiens
atcttctgttactcctggccattgcatttctttttctacctattaatctcccttgtataatattgcattatttgtcttttttgtctcatttatygacaaagattaaagttattggcagtagtgaaaatggagaaaaaaatcaaaattcaaatactgtagagtacaatattttggagaataatttgattctatatattgaaatttaaattgcctttaatctttgacccagttattctatttctagtaatttttctacccaaataataattcaggaagaaaacctttacagagattattcttataatgtttgtgatacaatatttacaggcaacataaattctcatccagagatcggagtaaatattatatagtatatctgtagaatgaaatgtaccttgctgtttaaatgaataaattagttattatcataaaataaatgtcatgtaaagacatttattttatggtgtataaaattagaaaaacaagttattaaaaataacatgattttttgtaaaatgcttttattttgtttttaattgacata

SEQ ID NO: 179809 - DNA, 544 bp, Homo sapiens
atcttctgttactcctggccattgcatttctttttctacctattaatctcccttgtataatattgcattatttgtcttttttgtctcatttatcgacaaagattaaagttattggcagtagtgaaaatggagaaaaaaatcaaaattcaaatactgtagagtacaatattttggagaataatttgattctatatattgaaatttaaattgcctttaatctttgacccagttattctatttctagtaatttttctacccaaataataattcaggaagaaaacctttacrgagattattcttataatgtttgtgatacaatatttacaggcaacataaattctcatccagagatcggagtaaatattatatagtatatctgtagaatgaaatgtaccttgctgtttaaatgaataaattagttattatcataaaataaatgtcatgtaaagacatttattttatggtgtataaaattagaaaaacaagttattaaaaataacatgattttttgtaaaatgcttttattttgtttttaattgacata

SEQ ID NO: 179810 - DNA, 544 bp, Homo sapiens
atcttctgttactcctggccattgcatttctttttctacctattaatctcccttgtataatattgcattatttgtcttttttgtctcatttatcgacaaagattaaagttattggcagtagtgaaaatggagaaaaaaatcaaaattcaaatactgtagagtacaatattttggagaataatttgattctatatattgaaatttaaattgcctttaatctttgacccagttattctatttctagtaatttttctacccaaataataattcaggaagaaaacctttacagagattattcttataatgtttgtgatacaatatttacaggcaacataaattctcatccagagatcggagtaaatattatatagtatatctgtagaaygaaatgtaccttgctgtttaaatgaataaattagttattatcataaaataaatgtcatgtaaagacatttattttatggtgtataaaattagaaaaacaagttattaaaaataacatgattttttgtaaaatgcttttattttgtttttaattgacata

SEQ ID NO: 179811 - DNA, 544 bp, Homo sapiens
tgtgtaatggtcaaatttaaaaattaaatgtattgatagaaaaagtgtttggatatttgtatcctaaatgctaacagtgatgatatctggaatgtggaactgctggtaatttttccctttttcttttagagatttttgtacttatttttaataataaacatatactaattttataataaaaataacaatgaagtcctttccattttgaaaaattaattccaatagaaaaataytgtactcgagccactttccagggttttcttattcttagtgctggtataaggtaccagtgatattatattttcagatatgtttggcttttctgccttatggttgaagatgagcttaggaagtattgctgcctaattttcaggcttttgagccaatgcttggtgcacaaaaagcaccacatcaactttaaacagaatattctgcttctttagactgtatttcctactttttatagtatttattagcgccagaactctgtgactgtttcccaaagaacaagagagaaggatcaaggaaagtgagaagcaatgaa

SEQ ID NO: 179812 - DNA, 544 bp, Homo sapiens
tgtgtaatggtcaaatttaaaaattaaatgtattgatagaaaaagtgtttggatatttgtatcctaaatgctaacagtgatgatatctggaatgtggaactgctggtaatttttccctttttcttttagagatttttgtacttatttttaataataaacatatactaattttataataaaaataacaatgaagtcctttccattttgaaaaattaattccaatagaaaaatactgtactygagccactttccagggttttcttattcttagtgctggtataaggtaccagtgatattatattttcagatatgtttggcttttctgccttatggttgaagatgagcttaggaagtattgctgcctaattttcaggcttttgagccaatgcttggtgcacaaaaagcaccacatcaactttaaacagaatattctgcttctttagactgtatttcctactttttatagtatttattagcgccagaactctgtgactgtttcccaaagaacaagagagaaggatcaaggaaagtgagaagcaatgaa

SEQ ID NO: 179813 - DNA, 490 bp, Homo sapiens
tctgtggtggggggctgggggagggatagcattaggagatatacctaatgtaaaagatgagttaatgggtgcagcacaccaacatggcacatgtatacatatgtaacaaacctgcacgttgtgcacatgtaccctagaacttaaagtataataaaaaaaattaaaatattctgcagtcacagtgactgtcttggcttctcttaatttatgaggacytttgtcttatagactctttttttttaaaaaagatggggtcttgctatgttgtccatgctggagtgcagtggctattcacaggcttgatcattgcatactacagtctggaactcctggactcaagtctcccagtggctgggaatacaggtgagtgcctaccacacctagcctgatttacagatttttgacatctattatagttaaatgtattttcagcatttgcatattaaaggaataatattgatgcttaacttcattagtgatcagggaattc

SEQ ID NO: 179814 - DNA, 273 bp, Homo sapiens
aggaatttattgttttgagtttcatggttttctatatcaactgatgacatcttgaaaggtgtaagcctyccagacttccatgatgttctctctattgggtttctcttttgcaatgttgacaaacctttccatagagtgccatatgtagagccttaaaggtccttatgactcccttatctagaggctgaggtagagatgtgtttgggggaaaaggagacaccttcagtgcctttggtgttgaactcatggggttctgggtggccagggggcatt

SEQ ID NO: 179815 - DNA, 273 bp, Homo sapiens
aggaatttattgttttgagtttcatggttttctatatcaactgatgacatcttgaaaggtgtaagcctcccagacttccatgatgttctctctattgggtttctcttttgcaatgttgacaaacctttccatagagtgccatatgtagagccttaaaggtccttatgactcccttatctagaggctgaggtagagatgtgtttgggggaaaaggagacmccttcagtgcctttggtgttgaactcatggggttctgggtggccagggggcatt

SEQ ID NO: 179816 - DNA, 427 bp, Homo sapiens
caaatatcccaactcaaaactgataaatgataggaatagatgtgtttcccaagaagatacatgaacggtcaataatcccataaaaatatactcaacagcatcactcttcaggcaactacaaatcaaaaccacagttagatactctatggctagaactggccactttggaaaataatttgatggcttctaaatatatkaaacatagaattgtcatatgacccagaaagttattcctaggtatacacccagattattggaaagaggtgttcaaacacaaattgtacacaagtatttttagcagcagtatctaaaatagccaaaggctgaacacaactcaaatgtcaataaaaatattattggataaacaaaaggttatatccatgaaattgaatgttatacagttataaaaagaaataaagtaccaata

SEQ ID NO: 179817 - DNA, 581 bp, Homo sapiens
gatgggtgcataggacgttaacagctagggaaggcggggtttctttttgaagagatgaacatgctctataattcattgtgatggcggctccacttatctgtgcatatactaaaagccactgacttgtagacattaatgtgtgcactctacactatgtaaattatatctcaataaatcctttcaaaaatacacagaagagtaaggggttttggaatgttgcagctgggatgcagtttgaaatactgaataggcctcatcgagaatgtgaagtttcagtaaagacctgaggaagttgaatgagctgatcaatggatatatggagggctatctttccaagccaaaaaattaactagagtcttgatcrtaaggcagcagcatgttggtatgtccagaggacagtgaggtggccaggaccactggtaagatcaagggtgaagatataaaagaattttggcggttaacatgaggcagatgatgatgggcttgcagaccattgtaagaaatgttgtttttagtgtacatgaaatggggagacaactcattatcccattatcaatattttaataaattggatccatgaa

SEQ ID NO: 179818 - DNA, 538 bp, Homo sapiens
tcaaacgctaaataataaaggtacacaaagggcaaattatactagatttctttcccacttgttttctatgtctcatgcaattcaccttgattcccttcagtttctgtttaatgtagaaagtggcattttcattattttaagcttctagcacaatgaaagaatttctctttttcatgaacaggatcatacatgaaaaggaggaagagtgtcctatatcatatttattgttcaacaaaacactgctccacggcttaaattcagtttaaraaagagaatttgttgaacatctaacacatacataaaaggcagtaaagacacatgagaagagggcaggatattgaagtatacagacttcaatgctgagttttatatcttaggaagttactccacctgacagaagctcaatttcccctgatttaggaaggcgatgctaatgggtattgcataggtgtaagtataaaaatgtatttaagagaatcccacaagcttggtataaggcagaaaataaatagatgcgacatgaataagtagtttatta

SEQ ID NO: 179819 - DNA, 538 bp, Homo sapiens
tcaaacgctaaataataaaggtacacaaagggcaaattatactagatttctttcccacttgttttctatgtctcatgcaattcaccttgattcccttcagtttctgtttaatgtagaaagtggcattttcattattttaagcttctagcacaatgaaagaatttctctttttcatgaacaggatcatacatgaaaaggaggaagagtgtcctatatcatatttattgttcaacaaaacactgctccacggcttaaattcagtttaaaaaagagaatttgttgaacatctaacacatacataaaaggcagtaaagacacatgagaagagggcaggatattgaagtatacagacttcaatgctgagttttatatcttaggaagttactccacctgacagaagctcaatttcccctgatttaggaaggcgatgctaatgggtattgcataggtgtaagtataaaaatgtatttaagagaatcccacaagcttggtataaggcagaaaataaatwgatgcgacatgaataagtagtttatta

SEQ ID NO: 179820 - DNA, 422 bp, Homo sapiens
actttttaatttggttctcacaaaatgattagatactaacaattaattcagtaaaatgtatgttttgcaatatttctccatgttattatgctttaaattagtttaatcatgcccctataatgtgtacattttaacctttgactataggtctcaatcttactttggttcctgtatttgaatttatgctaataaagtcccacagcttaataagattacataaattttttgtataatttttactagcattctgatgtcattttaaattatgtaatgaaatcaaattttaatttggattattgttatctgagttaaggatataaatttttaattttcttataaatattacttaattatttctgaaccatacattgactaatctgcyctttatatgatgtgtattataagagcttaggattgtttca

SEQ ID NO: 179821 - DNA, 565 bp, Homo sapiens
tcatttcattagggagacagagacaaaccaaaaaatatgataagagaatgtcaaatgtggaatgtcaaacccttccaccaacactgttatctccataacatcctataaaattatcactcaagctcgaattacaacaaactctcaataaatcctagaccacttttattctcactggacaaataaatatccttgttcttgtcccacactgcctgaatttccattttccaagtcatgttatcataatggcacaccaattcacccatttgttgtacctgtaagtaccagaaaaatcaagtaaattaactcaagcaggttgagttaaatctgacaattgacttaacctttaattacttatgtgccagacataaaagaatgaaacacatggcatgcagaaaaactgtacaatcacatcacatagaaaaaattttaaaactaggttaagtaaattaataaattttggttawtcaaagtatgttctgaaacattaagtctgataacttcttcctaataaatacaagagtctgaattattttcttaaaattttgctatttcaagtacagaactt

SEQ ID NO: 179822 - DNA, 573 bp, Homo sapiens
catgcccttccctctttatgctttgataataagggaaatgtcagctagatcagtattccactgcatgtggcatataagattattttrtaggatactcgtgtgaacaatatttcattttaattgcaatggatttactttaacatatttttaaataatgaacctgtcattacaatcccacaatttcatagatattattgcttaaggcaatgctataaactaaatatttgtatttaaaaaataagttgatttaacaaaaatgttaagtaaatgacagtctaagtactagtgtgcagttgtaggaaaatcatgaatttagtgagtgaatgattgaaattagaagtacattctgtgtgctgttaccagagatagcagatcaatttttactgtcaaaataccactattataccaaacccattttcctcagtttccaaatttcacatgccctgaaattcaatctgacaactaatggttgttatgcctatgcttcttacaaaagtaatattttgaaaaacataaaagtaaccactagtagatttgaacacaaatatgtatcctcaaaactggaaacattct

SEQ ID NO: 179823 - DNA, 573 bp, Homo sapiens
catgcccttccctctttatgctttgataataagggaaatgtcagctagatcagtattccactgcatgtggcatataagattattttgtaggatactcgtgtgaacaatatttcattttaattgcaatggatttactttaacatatttttaaataatgaacctgtcattacaatcccacaatttcatagatattattgcttaaggcaatgctataaactaaatatttgtatttaaaaaataagttgatttaacaaaaatgttaagtaaatgacagtctaagtactagtgtgcagttgtaggaaaatcatgaatttagtgagtgaatgattgaaattagaagtacattctgtgtgctgttaccagagatagcagatcratttttactgtcaaaataccactattataccaaacccattttcctcagtttccaaatttcacatgccctgaaattcaatctgacaactaatggttgttatgcctatgcttcttacaaaagtaatattttgaaaaacataaaagtaaccactagtagatttgaacacaaatatgtatcctcaaaactggaaacattct

SEQ ID NO: 179824 - DNA, 573 bp, Homo sapiens
catgcccttccctctttatgctttgataataagggaaatgtcagctagatcagtattccactgcatgtggcatataagattattttgtaggatactcgtgtgaacaatatttcattttaattgcaatggatttactttaacatatttttaaataatgaacctgtcattacaatcccacaatttcatagatattattgcttaaggcaatgctataaactaaatatttgtatttaaaaaataagttgatttaacaaaaatgttaagtaaatgacagtctaagtactagtgtgcagttgtaggaaaatcatgaatttagtgagtgaatgattgaaattagaagtacattctgtgtgctgttaccagagatagcagatcaatttttactgtcaaaataccactattataccaaacccattttcctcwgtttccaaatttcacatgccctgaaattcaatctgacaactaatggttgttatgcctatgcttcttacaaaagtaatattttgaaaaacataaaagtaaccactagtagatttgaacacaaatatgtatcctcaaaactggaaacattct

SEQ ID NO: 179825 - DNA, 573 bp, Homo sapiens
catgcccttccctctttatgctttgataataagggaaatgtcagctagatcagtattccactgcatgtggcatataagattattttgtaggatactcgtgtgaacaatatttcattttaattgcaatggatttactttaacatatttttaaataatgaacctgtcattacaatcccacaatttcatagatattattgcttaaggcaatgctataaactaaatatttgtatttaaaaaataagttgatttaacaaaaatgttaagtaaatgacagtctaagtactagtgtgcagttgtaggaaaatcatgaatttagtgagtgaatgattgaaattagaagtacattctgtgtgctgttaccagagatagcagatcaatttttactgtcaaaataccactattataccaaacccattttcctcagtttccaaatttcacatgccctgaaattcaatctgacaactratggttgttatgcctatgcttcttacaaaagtaatattttgaaaaacataaaagtaaccactagtagatttgaacacaaatatgtatcctcaaaactggaaacattct

SEQ ID NO: 179826 - DNA, 506 bp, Homo sapiens
gacatatatatatataaaggggagtttattaagttttaactcacatgatcacacagtcccacaatagcctgtctgcaggctgaggagcaaggagagccagtctgagttccgaaactgaagaacctggagtccaatgttagagggcargaagcatccaacatgggagaaagatgtaggctgagaagctaggcctgtctctcttttcacatttttttgcctgcttatattctagctgtgctggcagctgattagattgtgcccacccagattaagggtgggtctgcatttcccaaccccctgactcaaatgttaatctcctttggcaatgccctcacagacacacccaggatcagtactttgtatccttcaatccagtcaagttgatactcagcattaaccatcacactgacaaaattaattgcaagtgaggatccatagaagaatgtatccatggaatcaaagtgcattttattaattatggttaaatattttaatgatgatatacc

SEQ ID NO: 179827 - DNA, 542 bp, Homo sapiens
taagatttattacattcagatttatatttaccygactcttctttagtaacgataactgtaattcagttatcattacttaagtaaaacatttttatttacccaactctctctcgctccctctctcttcatgaaactatagctccttgatgtttgaaagcaagtgttagcaatcagctttcccagggtgcacaggacaatggtttgattatgtaagtgccaataaggtctggcgaaggagtaaacacaaaaggaggtgttatttattgatgtattgatttatgtatattccttttgctatgactgtttcccacagcagggattaacacagtaagattgctgaactgctacagggacattttttgttttgtattttcacaacctatgcaaggaaactttagggactttgagtgatggacaaccccctatcagatatcatcagcctgaaacatccttatcttggcattaaattagaaggaaccccagaccctgcgtaccagaattgttagaatcacagtctcagtaaagaaccaactcctgatcac

SEQ ID NO: 179828 - DNA, 383 bp, Homo sapiens
taaaaacaaaaataaaatgattatctcaatagatgcagaaaaagcatttgacaaaagtcaacatcctttatgataaaaaatcctcaacaaactaggcatagaaggaacttacctcaaaataataacagccatatatgacaaacccacagccaacatcacactgaatgcagacaagttgaaaacattacccgtaagaaccagaataagacraggatgcccacctccaccacttatactcaacatagtactggaaatcctagccagagcaatcaggcaagagaaagaaataaagggcatccaaactggaaaagaggcagtcaactaccattgtttgccaatgatatgatctcatacctagaaaaccctaagactcctccaagaga

SEQ ID NO: 179829 - DNA, 383 bp, Homo sapiens
taaaaacaaaaataaaatgattatctcaatagatgcagaaaaagcatttgacaaaagtcaacatcctttatgataaaaaatcctcaacaaactaggcatagaaggaacttacctcaaaataataacagccatatatgacaaacccacagccaacatcacactgaatgcagacaagttgaaaacattacccgtaagaaccagaataagacaaggatgcccacctccaccacttatactcaacatagtactggaaatcctagccagagcaatcaggcaagagaaagaaataaagggcatccaaactggaaaagaggcagtcaactaccattgtttgccaatgatatgatctcatacctrgaaaaccctaagactcctccaagaga

SEQ ID NO: 179830 - DNA, 603 bp, Homo sapiens
aaagaaaaacagggcaatttgttacagccgttcatgagcagcattatctccaatagctaaagcatggaagcaacccaattgtccatcaacaaataaatggataagtaaaatctagtacacacataaaatggaatattatttagcctgaaggaggatggaaattctgacatttgctacaacacggataaactttgaggaaattaaaccaatcacmaacaatgaaataaaccaatcataaaaccctgatcacaaaaagatcaatactatatgttttcacttatatgaggtacttagaacagtcaaaatcatagagacagaaagtaaaatagtggttgccaggagctgggaggagagaggactaggcagttattgtttaatgggcatagagtttcaattttgcaagatggaaagagttctggagatggaagatagtgacggttgcacaacaatatgaatgtatttaatatcactgaatttagccacttcaaaaagggtaagatggtaaattttacatcatgtgcgttttaccacaataaaaaaattgtaagacacacatatacacacacaataagtagggcaatgatgtgtaacttgaatgcaaag

SEQ ID NO: 179831 - DNA, 603 bp, Homo sapiens
aaagaaaaacagggcaatttgttacagccgttcatgagcagcattatctccaatagctaaagcatggaagcaacccaattgtccatcaacaaataaatggataagtaaaatctagtacacacataaaatggaatattatttagcctgaaggaggatggaaattctgacatttgctacaacacggataaactttgaggaaattaaaccaatcacaaacaatgaaataaaccaatcataawaccctgatcacaaaaagatcaatactatatgttttcacttatatgaggtacttagaacagtcaaaatcatagagacagaaagtaaaatagtggttgccaggagctgggaggagagaggactaggcagttattgtttaatgggcatagagtttcaattttgcaagatggaaagagttctggagatggaagatagtgacggttgcacaacaatatgaatgtatttaatatcactgaatttagccacttcaaaaagggtaagatggtaaattttacatcatgtgcgttttaccacaataaaaaaattgtaagacacacatatacacacacaataagtagggcaatgatgtgtaacttgaatgcaaag

SEQ ID NO: 179832 - DNA, 430 bp, Homo sapiens
gaactaccagttggctttaaatttaaactaccttttcaggctttcttcttcagagtttatttgaaccatcataattgcgtacattttgttcccgctcatgtgacagctgacctgtcattatgaagaatcgggagtgtctttctactttctccagaaacaaagctgcaagttgatttgtatgattctcattataggatttttttcccctggagtttcacctctccaggagccctggctttatatgtttgttatcattattacaataatcatacatgactactaaagttctaatgaatcaaaacaagggttgcctttcagcaaagtacattttycacattttcctccagttgttaaataaaactgttcacatgctatctcctaagcaacacatttccctataaaagccaatattttcaaatttaaatatttt

SEQ ID NO: 179833 - DNA, 491 bp, Homo sapiens
ggacttgagctgaatcttggaaaatgagtaggattcgaagaggagcaggagaggataagagtgaacttaatatagagaagaatatatttgatagatgtatttagggctggaaaacagtttgattagaataaagcacttgtatgaaaataatcatgactgtaaaagaagatcaggaagattttggagaaggatagaacattcccagtaaatagtttgtctaattctcatgtattaggttatctctgctatgcgatgtgcaaaggaatcaaataatgataacattgggaagccaggagtggcagcagaatatcaggtggcctagaaaacagaaggacygaaatagaggaaccagtagggaaactgttactcaacctgatgcatgagatgattaataaagaaaaagaactccaagacttagttgacaaaacaaatatgatatacgaagtagagaaaacgttcaaagatggtatgagaatgtggcacctttagca

SEQ ID NO: 179834 - DNA, 544 bp, Homo sapiens
ccttctttgtgtctctgtgttctcattgtttagctaccacttataagtgagaacgtgaggtattttgttttctgttcctgtgttagtttgctaaggataatgacctccagttccattcatatccctgcaaagggcattatcttgttctttttcatcgctgtgtagtattccatggtgtatatgtatcatattttctttatccagtttatcactgatgggcatttaggttgattccatgtctttgctattgtgactaatgctgcaatggatatagaagtacatgtatytttataaaagaatgatttgtattcctttgggtatatatccagtagtgggattgctgggtcaaatggtatttctgtcttcaggactttgaggaatcaccacagtgtctccaacaatgtttgaactaatttacactcccaccaacagtgtataattgttcctttttccccacagaaaggttgtattcttaacatgagaggtcattgcaaaaatgcagcaggcaaaaccaggtctcacagaatacagaggactgtttgga

SEQ ID NO: 179835 - DNA, 565 bp, Homo sapiens
agctgaaaatctattaagaatattagaattggaatttaaraaacacttataaaaaaccaagtctttctttatatcacaaatagccagtcaaaaaacattataaagtgattccactgtaatataacaatgaaataaaacaccactttcctggagcatacatttttcttggggatgagaaacagtaaacagacaaactaatatatcataagtaaagtagggataaacgctgaagagaaaatctaaacaggatcagggagataggaaatatggggagaagtacgaaatgaggtgcaattttatgtaggatagccaagaaaagcctcaccaagaagttcacatttgagtaaagacctacctaaaatagatgaggcatgagccacgagacctacctggaaggtaacagcttttcaggcagagggaacaacagcatagagaccctcaagctgcatgtggtatgttcctggaccatcaagaaggctggtatggctgacctgacatgggataattgagggaaagggagttggagatggggtcccaaagatctggaggtggggtggtggtggtg

SEQ ID NO: 179836 - DNA, 565 bp, Homo sapiens
agctgaaaatctattaagaatattagaattggaatttaagaaacacttataaaaaaccaagtctttctttatatcacaaatagccagtcaaaaaacattataaagtgattccactgtaatataacaatgaaataaaacaccactttcctggagcatacatttttcttggggatgagaaacagtaaacagacaaactaatatatcataagtaaagtagggataaacgctgaagagaaaatctaaacaggatcagggagataggaaatatggggagaagtaygaaatgaggtgcaattttatgtaggatagccaagaaaagcctcaccaagaagttcacatttgagtaaagacctacctaaaatagatgaggcatgagccacgagacctacctggaaggtaacagcttttcaggcagagggaacaacagcatagagaccctcaagctgcatgtggtatgttcctggaccatcaagaaggctggtatggctgacctgacatgggataattgagggaaagggagttggagatggggtcccaaagatctggaggtggggtggtggtggtg

SEQ ID NO: 179837 - DNA, 565 bp, Homo sapiens
agctgaaaatctattaagaatattagaattggaatttaagaaacacttataaaaaaccaagtctttctttatatcacaaatagccagtcaaaaaacattataaagtgattccactgtaatataacaatgaaataaaacaccactttcctggagcatacatttttcttggggatgagaaacagtaaacagacaaactaatatatcataagtaaagtagggataaacgctgaagagaaaatctaaacaggatcagggagataggaaatatggggagaagtacgaaatgaggtgcaattttatgtaggatagccaagaaaagcctcaccaagaagttcacatttgagtaaagacctacctaaaatagatgaggcatgagccaygagacctacctggaaggtaacagcttttcaggcagagggaacaacagcatagagaccctcaagctgcatgtggtatgttcctggaccatcaagaaggctggtatggctgacctgacatgggataattgagggaaagggagttggagatggggtcccaaagatctggaggtggggtggtggtggtg

SEQ ID NO: 179838 - DNA, 532 bp, Homo sapiens
tgatcaatttagttaaacattagggaacaaaataaatttagtttcctatctcataccatatttaaaagcatattttcaatggattataaacatttaaaccataggaatayaaaaagaaaatacaggacgttttttctaatttgcaatatttagttagggaaaccttttcttatcattatactactgaaaggaactaagaagtaaataacagattgatcatgtggaaatatgaaacttctgtatggaaaaataataccatcaattcagctgggcatgtggcttacacctgtaatctcagcacctggggaggctgaggtgggagaatcgcttgagcccaggagtttgagaccaacctgggaaacatggtgaaaccacatctctacagaaaataaatagaattagccaggtgtggtggtgtacacctgtggtcccagccctggggttctaggctgaggtgggaggattgcttgagctgaggaagtctaggctgcagtgagccatgattgtactccagcctgggcaacagagcaag

SEQ ID NO: 179839 - DNA, 532 bp, Homo sapiens
tgatcaatttagttaaacattagggaacaaaataaatttagtttcctatctcataccatatttaaaagcatattttcaatggattataaacatttaaaccataggaatacaaaaagaaaatacaggacgttttttctaatttgcaatatttagttagggaaaccttttcttatcattatactactgaaaggaactaagaagtaaataacagattgatcatgtggaaatatgaaacttctgtatggaaaaataataccatcarttcagctgggcatgtggcttacacctgtaatctcagcacctggggaggctgaggtgggagaatcgcttgagcccaggagtttgagaccaacctgggaaacatggtgaaaccacatctctacagaaaataaatagaattagccaggtgtggtggtgtacacctgtggtcccagccctggggttctaggctgaggtgggaggattgcttgagctgaggaagtctaggctgcagtgagccatgattgtactccagcctgggcaacagagcaag

SEQ ID NO: 179840 - DNA, 532 bp, Homo sapiens
tgatcaatttagttaaacattagggaacaaaataaatttagtttcctatctcataccatatttaaaagcatattttcaatggattataaacatttaaaccataggaatacaaaaagaaaatacaggacgttttttctaatttgcaatatttagttagggaaaccttttcttatcattatactactgaaaggaactaagaagtaaataacagattgatcatgtggaaatatgaaacttctgtatggaaaaataataccatcaattcagctgggcatgtggcttacacstgtaatctcagcacctggggaggctgaggtgggagaatcgcttgagcccaggagtttgagaccaacctgggaaacatggtgaaaccacatctctacagaaaataaatagaattagccaggtgtggtggtgtacacctgtggtcccagccctggggttctaggctgaggtgggaggattgcttgagctgaggaagtctaggctgcagtgagccatgattgtactccagcctgggcaacagagcaag

SEQ ID NO: 179841 - DNA, 419 bp, Homo sapiens
taaaatatcagtaaattaaaatcaatgtattctatgttctagcaacaaataattagaaaaataaaatttgaaaaacacatttataataatatcataaaattaaatacctagaaacaagcttaatgaacatgtgcaatatcttacagaaaaactacaaaacattactgaaattaaataaaatcatataaatgataggatgtrtcatgcttattgcttaaaagagtaatattgtaaagatgtaaattctcctttcaaatacttcatagaaaaatctaactccagtgaaaaaccatattttgtggaaatgaaagaaatttaattaacaagaaaacacaaaggatcaatatcagccatgacaactttgaagaagaacaagattagagaactaaaaccaccagacttacaaatctacagtaatt

SEQ ID NO: 179842 - DNA, 626 bp, Homo sapiens
tttgtcttttaaaatccttttgacaacaatgcttcttcaagaaagaatattatgcaattttcctcattggtataatttcactaagtgcataggcccccttgattttctatttctataataattttattctctttccattgatgactttcagacataatgaattaatctctctttcaatgggcacagccatgataaacctctataaaacagatggtgtgacttatactgaaaatgacagttaattgcttttacaattatgatatttattattaaaaatacatttttaaaacatctgttagtactctgagttgaagtgttccacacaagatggaaaatcattttccaaggttactgctgagttactttgctctcttccttcatgaaatctrgacttctcagcatacccctttaggaggtgggtcctgccaattgagatagcctcgtctttcacctgtactttatagcaaatcagtgatccaaccaccacacctgcctcattgcaagcccctgggcttggggaacttttaccatgctgctcgttttgcctgcttgtccaaacagcagtcttctgcttttaagcattaactccttcacaaagactttcccgatgtggggtgacagtgtag

SEQ ID NO: 179843 - DNA, 626 bp, Homo sapiens
tttgtcttttaaaatccttttgacaacaatgcttcttcaagaaagaatattatgcaattttcctcattggtataatttcactaagtgcataggcccccttgattttctatttctataataattttattctctttccattgatgactttcagacataatgaattaatctctctttcaatgggcacagccatgataaacctctataaaacagatggtgtgacttatactgaaaatgacagttaattgcttttacaattatgatatttattattaaaaatacatttttaaaacatctgttagtactctgagttgaagtgttccacacaagatggaaaatcattttccaaggttactgctgagttactttgctctcttccttcatgaaatctagacttctcagcatayccctttaggaggtgggtcctgccaattgagatagcctcgtctttcacctgtactttatagcaaatcagtgatccaaccaccacacctgcctcattgcaagcccctgggcttggggaacttttaccatgctgctcgttttgcctgcttgtccaaacagcagtcttctgcttttaagcattaactccttcacaaagactttcccgatgtggggtgacagtgtag

SEQ ID NO: 179844 - DNA, 578 bp, Homo sapiens
tatgtgtgcatgtatgtttgtgtttaaaaggccttcatgcttttgttttttttctctcctaagactttgtattttttgatcaaaagttttttttcttctcagttgaccaaattctgttttcttcatttacttctgctgtctctcctttctcttgcaccctctgcagcatgggggacctaaagtagtttataatagcctggaattwcttaaagaaaatggagaaggcatcagactcccttttggggagaagcctgtttttccttatagaaccccaagagtgcaaacaggcaagtttgtctcagctctgaaactgtttgcttttgtattttgttacctgatgttctgactaaaatagagtctcttgggtttgtaaggaagactgtagtttagacactttaaaatgtctctgtttaaaaaaatttttttacttgcactgtaaaagtatcacatggtctagccttataataattctccgtttctggagacccagtattcagtgcgggctctgcccagagctcacacatacagttaaaagataggtagccctatctataaaattggtttccttttaaaatcct

SEQ ID NO: 179845 - DNA, 441 bp, Homo sapiens
gtacttatggcatggcttttttaaaaagcattataarggaaatttacttctcaaatgtaaacccagctttagtttcatattcctaaggctaaaatgaatttattggactactctttaaaagtaattcagattctttaattcctaagaaactagcaactctcagggctatacaatataaagttgcagaagcaggtaccatactctatagaaaacagctgccccaaaaatgcatgttgaatgaattaactgagaagttaaaaaaaaagactgaaatgattttttgcttcaagaaacacttccccacctaccctcaaattgattacatagaaatatagtgaaggtagctgttttatgtcaatattctcacacaatcatcaaagttgatcaattctcctcagtctgtcctatcttgtttctatctcagtctgcctgtgtgaacct

SEQ ID NO: 179846 - DNA, 605 bp, Homo sapiens
tcttcaattgtcccattggaaaacagtgactactattaaagatcacaggaccactgaggatattactgaatgatttctaaagcactcagaaatgccttatacacattaaatgattctctctctcgttcctattcatttcacttttgagtattttctgagatatttctaagaataaagatgcmgttcaaaattcactccccttcccatcctccaggacctagcatagtgccttatacatagtaataactcaataaatatgtattgatttgatctgataacctaacagtgttagaatgcatttattcagaaaacatattagtcatttgatcattacaattgcctcgacctaaagcatacattgcaaaccctgagacctgtctgatgcagcagaaactaagtttggatactaatcctaggagaccttgaagcgaaggcaacattatgtctagggtttttttccccccgccccccacagtgatacatacctcagagtcaagagaagagataataaatctaattgatcgccttgcacgttatcttaacacagagtcaggcacaaactctactgcaatatttaaatgaaaaccacacagagtcaacatgat

SEQ ID NO: 179847 - DNA, 595 bp, Homo sapiens
aaaaactgcacgtattaagggaagatgtataaagatttaaactatgaaaatgttattatgtctgaaaaatcccaaagatgaattttttcttttgttgataagggatgttgtataggaatcaagagcttggtagacagaagtcttagaggcggagctgcctagattcaaattctgactctaccacttcctagctgtggcaagtgactaaacctcctacctaaggcaagtggctaaacctccgtgtcttagttttayagttttacaataactaatgatttttaacacacttagaacaatgtaagtatatagaacttgaatttgtaacatggcaagtgataagtatatgttaagtaaataaaaattttaaattgttactggtaaaaaaaaatgttgctttttttctgaaacactaatactgcttttgaaagcctaaaataataaaccttcaagcaaaatgtctttgaaaacagaaattgagaagcagggaatattcctttctactttctacctttctaatggttgaatatgtttaccgagagcaatgtataatgttctgttaagacaaaaaaagcacaaatctttctatgttctgcaa

SEQ ID NO: 179848 - DNA, 543 bp, Homo sapiens
agcatgagttgctaagacagagcccctggctgcaatgttgcatgaccagggattaagaactgtcaatacagtaccgcgacattcaggaattaagggattaacctgaaatttgggcaaaaattcattrtatcaaggtgttaattaaaattagaatagaacattagaaataagccaagcattcaacagtggtgatttagttaaacgagattcagccatacagtgatctattaaatagtcatcaaaaaggtatttggggagtgctttcaatgacatgggggatattcgtggcattccactgaaagcaaaaattaaaatgcaaaactgtatatactatgtaatcccattatgcaaaatattatattgtatactgagaaaagactgaaaggaatcatggtaaaatattaatagcaattatctctgaattataacatgattatttttttcttatggctaattttaattttttctttatcattttctatgttttccaagtttaaaaatcaggaaaaatgtttttaaattactttgatcttaaagagctgt

SEQ ID NO: 179849 - DNA, 543 bp, Homo sapiens
agcatgagttgctaagacagagcccctggctgcaatgttgcatgaccagggattaagaactgtcaatacagtaccgcgacattcaggaattaagggattaacctgaaatttgggcaaaaattcattgtatcaaggtgttaattaaaattagaatagaacattagaaataagccaagcattcaacagtggtgatttagttaaacgagattcagccatacagtgatctattaaatagtcatcaaaaaggtatttggggagtgctttcaatgacatgggggatattcgtggcattccactgaaagcaaaaattaaaatrcaaaactgtatatactatgtaatcccattatgcaaaatattatattgtatactgagaaaagactgaaaggaatcatggtaaaatattaatagcaattatctctgaattataacatgattatttttttcttatggctaattttaattttttctttatcattttctatgttttccaagtttaaaaatcaggaaaaatgtttttaaattactttgatcttaaagagctgt

SEQ ID NO: 179850 - DNA, 543 bp, Homo sapiens
agcatgagttgctaagacagagcccctggctgcaatgttgcatgaccagggattaagaactgtcaatacagtaccgcgacattcaggaattaagggattaacctgaaatttgggcaaaaattcattgtatcaaggtgttaattaaaattagaatagaacattagaaataagccaagcattcaacagtggtgatttagttaaacgagattcagccatacagtgatctattaaatagtcatcaaaaaggtatttggggagtgctttcaatgacatgggggatattcgtggcattccactgaaagcaaaaattaaaatgcaaaactgtatatactatgtaatcccattatgcaraatattatattgtatactgagaaaagactgaaaggaatcatggtaaaatattaatagcaattatctctgaattataacatgattatttttttcttatggctaattttaattttttctttatcattttctatgttttccaagtttaaaaatcaggaaaaatgtttttaaattactttgatcttaaagagctgt

SEQ ID NO: 179851 - DNA, 543 bp, Homo sapiens
agcatgagttgctaagacagagcccctggctgcaatgttgcatgaccagggattaagaactgtcaatacagtaccgcgacattcaggaattaagggattaacctgaaatttgggcaaaaattcattgtatcaaggtgttaattaaaattagaatagaacattagaaataagccaagcattcaacagtggtgatttagttaaacgagattcagccatacagtgatctattaaatagtcatcaaaaaggtatttggggagtgctttcaatgacatgggggatattcgtggcattccactgaaagcaaaaattaaaatgcaaaactgtatatactatgtaatcccattatgcaaaatattatattgtatactgagaaaagactgaaaggaatcatgrtaaaatattaatagcaattatctctgaattataacatgattatttttttcttatggctaattttaattttttctttatcattttctatgttttccaagtttaaaaatcaggaaaaatgtttttaaattactttgatcttaaagagctgt

SEQ ID NO: 179852 - DNA, 537 bp, Homo sapiens
aaaacacaaacaccacaggactaactaagaggcagctattttcagcaaatgtggtgacttttgtaatgcaagccaagctctggagtgagacaaacagtaatggtgaatgcattatgtcaaattggggggaggggaaagccttcctgataggaggaataatctytctttaagaaaagattaaaaaatgattagcttatgcttatttcttaggagaactagtcctagtaggaagactaaaaaggaatgaagtgcctcctgtccccctcatttggggacagaggcaggcatcctctcttccacatcctgtcaggactgagtatcattcaccacccagcaaagcttgaggagctccactttgtagcataagggaagagccttatccattgccaatgtgcagagaaggaggacagggatgcctgattgtgagacttggaagatggaaagataaagggactcaggagaaggtgctggaaacatccactggaagccctctacttcaagtcctcataaccaaagagcctagctaaattaaacagg

SEQ ID NO: 179853 - DNA, 455 bp, Homo sapiens
ttacttgttaaatattgctccattttagaatattaaaactaatattatttctggctttcgaagtgatatgtcacttgcatcyaatatagagaaaatcagctgttatttaaaaactccagagaaaagagaagcatgtacaaaccttgggaactgcaaaataccatatgggaacaagaattatgctaatgtccaacttacaagagaaaaagagcaaaactgaggcaacagctgctctcaaacaatgatattcaggagaatggcactgaaatatgtttaatttttaggattgaatatctcaggttcctagtcttgcatgagcaaacctagatataagagcagaagttaatctgacctaaactttttgcacataaaacctcaagttgcttagcacctcaaagacctgctgccaaatattttaactcccacctcaatctgattcctaaggtataattctg

SEQ ID NO: 179854 - DNA, 634 bp, Homo sapiens
gtagatttctgaatcttaaaccatccttgtattattggggtattccttaccagatcataatagctgaagcttttaatgtattaatgaatttagaatacttatattttatgacacatattcatctrtaattggaattttagatgggcatatggaatgtatgggaaatagatttcaagccaactacaatccttcagtggtaacaagcattactatgttgagaattactgtgaagttgcaggttcagtcccatgcactctaggtaatgatggaatgtgctaagtggtgactgaatgccctgtagacagaagtctgtatttgtatgcttttatctttcaagtctgcctcctcctgttcctgcccctgttctttagtgctattttgagaaaatgttgatgttgggagtggagttatgcttcattaaattaattagctaagtttttgaacacataatcaaattatgtagtatggcctttaaaactctgagaagtttttagtaaactttattttctgggatggttttcgaaagtaacttttaattataatttttgataattattttactgtatttctttgtgatttgttcaatttcgttagttaattttagcttttaataaattgtaattatcgccgggtg

SEQ ID NO: 179855 - DNA, 553 bp, Homo sapiens
tttgtgtgttatgctttggtttttatttatgtcaagaaattttttcatccagtggtcatttargagcatgttgtttaacttccatctatttatacaatttccaatgttcctcttattgatttctagttttattttattgtgttctgagaagatacttgttatgattttgattttttaaacatttgttacgaattgttctgtggcttaacatgattgatcatggagaatgtcttatgtgctaatgagaaaaatgtgtgttctgtggctgttgggtgaaatgttctgtaaatgtctgttaggttcacttggtctgatgtacagtttaaattcaatatttctttgttaattttccatgtaaatgatctatctaatactaagagtgaagtgttgatttcttcaattattattgtattagagtttctctttccttttacgtctagtaatgtttgctttatatatctaggttctccagtgtgggtgcataatatttagaatcattatatcctcttgctgaattgatccctttatcactatataatgaccctctttttcg

SEQ ID NO: 179856 - DNA, 553 bp, Homo sapiens
tttgtgtgttatgctttggtttttatttatgtcaagaaattttttcatccagtggtcatttaggagcatgttgtttaacttccatctatttatacaatttccaatgttcctcttattgatttctagttttattttattgtgttctgagaagatacttgttatgattttgattttttaaacatttgttamgaattgttctgtggcttaacatgattgatcatggagaatgtcttatgtgctaatgagaaaaatgtgtgttctgtggctgttgggtgaaatgttctgtaaatgtctgttaggttcacttggtctgatgtacagtttaaattcaatatttctttgttaattttccatgtaaatgatctatctaatactaagagtgaagtgttgatttcttcaattattattgtattagagtttctctttccttttacgtctagtaatgtttgctttatatatctaggttctccagtgtgggtgcataatatttagaatcattatatcctcttgctgaattgatccctttatcactatataatgaccctctttttcg

SEQ ID NO: 179857 - DNA, 553 bp, Homo sapiens
tttgtgtgttatgctttggtttttatttatgtcaagaaattttttcatccagtggtcatttaggagcatgttgtttaacttccatctatttatacaatttccaatgttcctcttattgatttctagttttattttattgtgttctgagaagatacttgttatgattttgattttttaaacatttgttacgaattgttctgtggcttaacatgattgatcatggagaatgtcttatgtgctaatgagaaaaatgtgtgttctgtggctgttgggtgaaatgttctgtaaatgtctgttargttcacttggtctgatgtacagtttaaattcaatatttctttgttaattttccatgtaaatgatctatctaatactaagagtgaagtgttgatttcttcaattattattgtattagagtttctctttccttttacgtctagtaatgtttgctttatatatctaggttctccagtgtgggtgcataatatttagaatcattatatcctcttgctgaattgatccctttatcactatataatgaccctctttttcg

SEQ ID NO: 179858 - DNA, 460 bp, Homo sapiens
tggggtgaaactgagaattaagaaaccttagtttcagacctgacatttatcattctatactagatttctcacatggaaaatatggaagggtgggagctatttaacctctccgcatcctaggttttygtgcttctgaaaatgaaatagtaatgaaaatattttgttcatattgccacatacaaatagcaagtagcactaaatctaagtatgagtttaaaatccaggcataaaggagtgtgcaccaaaaatcagcccaatttaaaatctgtcagtgctataaagtaccaattagaaaccaggactccattaccagcattctagaaataaagtgcttattttgccagcgttgttactgccactgatttcatgtacttcttttaaaaccactttgcaagaacaaacttatactccagaaatgtataaaatctgcatcgcatggaacagtacttacataaatttt

SEQ ID NO: 179859 - DNA, 544 bp, Homo sapiens
acctgaaaaacataaaaaaactgaaaaaaatgccaaacagaggtttaaaaatgtaaataaatgttatatgtctacatttaaacacattaacacttttaatttaaaaacaacaggacatatacttgtagtacccaaacaaaattataaaattcagaagaaacttgagtttaaaattttaagataaatgaacctaaattcttctctaaatcttctctaaatccatcagttaatccctgggactaaggaacctcctatagagagaagctcaaaagtctaaatttaagatactgggccttctgtgaactgaggccctggccaaataggcctcctccccctggaataatccctgccagacatcttacagggataaaatgggcatgaaagccaagggttgggggtgatcttttcacattatagatctgtacttttaaggcttcatagctgccttttatttgaatatttaaataaattytaatttaaaaggacaaataacctaagccctgagctttgctctaccactatatagccacaggacactgaacat

SEQ ID NO: 179860 - DNA, 586 bp, Homo sapiens
aatataactgattgagacagaatcattgcaatatcatttgcaacatcattgcaaaactattaaagaatccattaaatatgtgatttagtgaaagctacttagtaaaaaggttatgttctatttatttgtagtatccctaaggcgaaacctgtaggcttcttagacataccattgaaggctactgaaattattgaattcaatattatagtatctgctagtgcaggccaatatgcgtaggtcaatacccaatcatgatggttaatttcatgagaatattgttgcagaatgttgggtttgagggaacctcccatgttcactgaggttaaaatacatccaaactcatccaacataatttcctaacatgccaagagtgattgggaaaggratacatttttgggatagattaaaataaaaaaagtgataaaacatgaaaacaaatagggcctaaaatcagctaattaattcaaaagtgatcagagaataaaagttctgcaaataaaggttagaatggaactcaaaggaagcaagtaatgctcaccttccctagagagctctaataagaatgtcacattaggtcatgaccatc

SEQ ID NO: 179861 - DNA, 586 bp, Homo sapiens
aatataactgattgagacagaatcattgcaatatcatttgcaacatcattgcaaaactattaaagaatccattaaatatgtgatttagtgaaagctacttagtaaaaaggttatgttctatttatttgtagtatccctaaggcgaaacctgtaggcttcttagacataccattgaaggctactgaaattattgaattcaatattatagtatctgctagtgcaggccaatatgcgtaggtcaatacccaatcatgatggttaatttcatgagaatattgttgcagaatgttgggtttgagggaacctcccatgttcactgaggttaaaatacatccaaactcatccaacataatttcctaacatgccaagagtgattgggaaagggatacatttttgggayagattaaaataaaaaaagtgataaaacatgaaaacaaatagggcctaaaatcagctaattaattcaaaagtgatcagagaataaaagttctgcaaataaaggttagaatggaactcaaaggaagcaagtaatgctcaccttccctagagagctctaataagaatgtcacattaggtcatgaccatc

SEQ ID NO: 179862 - DNA, 474 bp, Homo sapiens
gaaaacaaagtaaaactaattcctctctcataatctatgctttagctaaacactaccttcttcaaaatgctctgtacgtctggttccctctgccagaatcgctttcctcccaacacttatctaactcctctttatctttaggacacggttggggttcagagaatgacactgcaaagtatggcactttggcatgctgagtgctttgaattaaaggagaaccaaagcttctccgaccttctcttgccctcctgtctctcacccatctttctccccaaaagggcagggcagaggccttctcataagttstcttacctacctgatgacagaacctccaaagcggaacttatctgtcattttgtcattaatccccattacgggaatctcatgaaccagggaagagtgtatcacaggagcagagatcgaggtcaaaatcatgcccggactttgtcacaggctatcacctattcttcttag

SEQ ID NO: 179863 - DNA, 600 bp, Homo sapiens
gagtacaataaaaactgaataatgcattttcatttttctaagcactataaattcttgtgtatttcaagacaggacaagtacctcaaaaagatcttagatgtttgacatccatgactattttgtcctttcagaattgcaatacctacataagcaattacttaaaatcataaaaatataacgaagttaaaaattattattgtttttcttcaatgtaaatcataaaaataatcaggttagacaattacaagttttccttcaatctaacatctctttaggtacaaatatgtgagtttttgctgatagttttgcaarcttaaaaatcatctttgattaaaaggaaaaactgtgtttcattttttccctatggttgtataattttttggcagaagagatataaatttatacgtaaatcttctgaatatgacttttatagtttaaaaaagtgaatgtttttagaacattatataatcatatacgaagaatacagaatttgcctaagtactctggataacagtagtaattaaatacacacaaacatacagactaacacatgcacataaacataaagcatttgtcaattactgttcctgccatacttat

SEQ ID NO: 179864 - DNA, 550 bp, Homo sapiens
gagttctttgcctattactggagacaagtttgcaccaaaacatccacttcctgatttgtgaactataagtatttgccagtgggttgggcagggttaggaataagtttaaacaaggttaaccaactggtactccactaagactacaagaatcccttcagagctagaaacaaacacgaaggttaaaaaatatcatcataatgatgctgtgattaaaataatactatatccttagaaagctcaaaaaagtttttaataaatacgtcttaaaaatgtaacatccattcatttattcattgaataattttttgttagatttctrctatgttctggacattcgtactaggtcctcagaagacaaagatgaaaaaggatttagtatttatcgttaatgaaattacagtcttgggcctctagttcacatagtaactgaatttcggcccacagtttggggaggacactatagctaccctttgctacttactctagtaactttcatttgtctgcttgaggtcaagttagatcggcctggtttgggggctgtgtttgttaa

SEQ ID NO: 179865 - DNA, 417 bp, Homo sapiens
caggtaggttaagatcacttaagggacttactcaaaatacagatgctggaaattccacttgaggatgcctggaagagagatccaggatttttcattcttaccaagaacctctggtgatcctaatgcaagtccccacgcctctctttgaaagtaacctctgcttctaagactatagcattaggaaaaggaagtaaaaagctccattgtcgggtggcctgactttgcctctggcagtctctcacagatgcccaaggacataattccacaaccccagcaccactcarttgcagtggcctttttctcttgaccactctgctgctggtgagaaggcagtggaggtactgcccatctttatctgctgtgcttattgtagaaactcaatcagattttttttttttttttttttttttttgagat

SEQ ID NO: 179866 - DNA, 413 bp, Homo sapiens
  misc_feature (1)...(413): n = A,T,C or G
gggtttgctgtgtccccacccaaatytcatcttgagttgtagctcacacaattcccatatgtcatgggaaggacccagtgggaggcaattaaatcgtgggggcaggtctttcccatgctgttcttgtgatagtgaataagtttcacgagatttgatggttttataaaggggggttccctggcacaaaggggttttttttttttttttttttttttttnnngcctgctgccatgtaagacgtgccttttgccttccaccatgattgtgaggcctcctcagccatgtggaactgtgagtccattaaaccgctttcctttataaattacccagtctcaggtatgtctttatcagcagcatgaaaatggactaatacaacctctgtctcaaacaaaaaaagaggaaaaagaagaatt

SEQ ID NO: 179867 - DNA, 573 bp, Homo sapiens
aggagaacaggaggaactcccgccaacctgctgcctgtttcagatacaagggaattttataygttttgtgcatattttattattatttctactagatttgctgtctacaatgttcccttgaaattaatatggaagataaacttatgtgttctacaatggaagtaaggaaatcaactaaataaaaagctatcataataatcttattagaaatggtgatggacttaagtaatacgaatagaggtaaaaaaaagtagttttcaaatcaaactattttcttttccataatgtctgatattattaacctcttccagtaactgagaacacacattctttgaggaataaagtagtaagtagaagctcagagaccaatataatctatagacagtagtatactcactgctgtctcaaatttccttacacattccagtattattaaactcatatttctcttaaaaaaacttgacaagttaacttttgaaatgtactagcaatgtgtggaagatgacatatgaacattgtcaacatatttgggtatgtgtgtatacatttatccataaacaaataaaaatgtat

SEQ ID NO: 179868 - DNA, 645 bp, Homo sapiens
aaaaactcgagactgagtaatttataaagaaaagaggtttaattgactcaaagttctgcatggctggagaagcctcaggaaacttacaatcacggccgaagacacctcttcacagggcggcaggagagagaatgagcgcaagcaagggaaatgccagaaacttataaaaccaacagatcttgtgagaactcatgatcatgagaacagcatgggggaaaccactccyaggatcctatcacttcccaccacacagtcccacgacatgtggggattatggaaactacaattcaaaatgagatttgggtggggagacagccaaaccatattaatagtgtatgattgcaactatatgatgttctagaaaaggaaaaactaagaagactaaaaatgttgtttccaggagttaaagagaaaggagggatgaacaggtgcagcacagaaaatttttagaacagaaaaactattctgtatgacactataatgttccaatatatctctatacatttatctaaatcaatagactgtaaaacactgaaagtgaaacttaaaatgtggaccttgggtgatgttgatgtttcattgcagatattcatcaactgtaacaaatgtgctactctagtgaggaatgttgactgtgagaaaggc

SEQ ID NO: 179869 - DNA, 594 bp, Homo sapiens
gtgtaactatgtggtatttttatcactgtaaaaaaaatgaattgaaatttgaagacataaaacacaaaagacaaacatgtatcaaaatttaatagcgaaattataaaaactaataaaaattggttttactagattacataaatggtagtttgcatggattttaatgaaaatttaaataaactgtcttatactattgaatataaatgacaagttaggtgctatttaaatgagttaacagagtgtgaaaaacattaccattttaataaagacttgctatactactcagtgttattatataccaagtctcctgatgttaagattttgatttagccaggtgttcttgcctgtaatcctagaattttggaagacagaattgggaagattgcttgagcccaagagttcaagaccagcctgagcaacatagcaagacccttatctttacaaaagtgaaaaaggttagccaggcatgtggcacttgcttgtgrtcccagctactcagaaagctgaggtgggaggatcgcttgagcctgggaggttaagccaatagcgagctatgatcctgctactgcactccagtttgtgtgacagagcaaa

SEQ ID NO: 179870 - DNA, 542 bp, Homo sapiens
ataataaatcattacttaacaatgctattttagtatgctgttagtggcagtaattaaattctgtgttstccatatatcaattgttaaaatgacacctggatgtagaccaaaacaatgctcaaatgatttaaaagttttatttaaatgaatcattgaattttagcactaggaaaaaagtttagatattaattattatatttgtctcttattttagagctgtataagcaaggaaacagtagttagatgacatgggaaagcaagaaaccaaatttgcccagtctagatagaatactaaaatgtgttttaccaatattagtctgttttcatgctgctgttaaagacatacccgaggctagtgattatatttttatttccatttgcaaacattaaatttatgttaacaaatacaactaaccattcaattatcagcttgatacttcctcggtgaaggcactgcatttttttcctggacaaatatgtctattgagttttaataacatgtaatatacctttattgtagttttatactattatgttagagt

SEQ ID NO: 179871 - DNA, 548 bp, Homo sapiens
tcttcactctctgagcttatctcttctcttcttgcttttggtaacttaactttgcttcagacactggcctttgtgttgttccttaaccaagcgaggcaccctccaaacttagtgtctttttactcattcttatttcatrtaacacatttttttccagaccttcagtgcttaactttttcattgtattcaagattttattcatatgttaactttacatagattactgtcctgacaaacatatttggattttcaaacatgattcttagaactcccgctggacctgatcctgctccaattttataacagttatagcctcatagcaaaataacatacttatttattatgcatgttatatattttctaactctcttcctatgcaacgtaagctccatgaaaatagtttttattttataatattaccatgtgtcctgagcaatgcttggtatagggtatggtcattaatttgttacataaattaatgttgaactacaatatttattcattttgttcacaattagaatcactcaagatgtttttgccaaacgttg

SEQ ID NO: 179872 - DNA, 507 bp, Homo sapiens
tgtaggaaaataaaacaaataagggatctcatgtatgctttgaatatatttgaaaactgatttttttcataaatgccataatttagatataaaataaaatgtagagagaagataataatcttttaagcaatggaatagcactgactttaaaaagctaattgtttttaaacaattaataaggtcaaatacctaggttactctaaagggattattatctataaggaattgactatatttttattaggtaagcttatataatttgtcttctgttctttttcaaaccaaaataagtagagataaktaaaattgtccaaaattcagtcagactctctaataaaataaccaagacatatgatttttaaaggataagagcaacatttaaaacactccttaaatagtgtaataaaaatataccatttatcagtttcctagtagtaaattttccaaacaatgtgtatcaacggtatgcaagaaattatgttcacaatgagttgctagattacctat

SEQ ID NO: 179873 - DNA, 575 bp, Homo sapiens
tacactgccgaagccatcaaaaaggggaaggagaggggagaacagyagcataagtggctggcagaggcagggaaagaccagcagaaaggaaagaaagagacagaaagtcagagagagagaggaagagacagacagagagaaagaaagagacaaagaagaagtcaaagagagagaaagagagatagaagtagtaaagaaaaaacattgtaccctattcctttaaaagccagggaaaatttaaaatctataattgataattgaaggtcttctctgtaaccctataacactccaataccaccttgttggtggtgtaaacaagggcacagcctgaaagcactgaggctactgtcaacccatagacttcctatcaaaaatccttaaccctgcaggtttcctaacaggggatctaaatcttaattaattaccatacaagggtctgaccagatctaggaagaactcccttcaggacaggacgatagatggttcctcccaggcgattaagggaaaaagacacaatgggtattcagtaagtgataaggaaactcttgtagaagcagagttaggaaaattgccta

SEQ ID NO: 179874 - DNA, 510 bp, Homo sapiens
aagaactcccttcaggacaggacgatagatggttcctcccaggcgattaagggaaaaagacacaatgggtattcagtaagtgataaggaaactcttgtagaagcagagttaggaaaattgcctaataattgttcggctcaaacgtgcgagttgtttgcattcagccaaaccttaaagtacttacagtatcaggaaggagccatctatactaattctaagttaatatggactgaatgaggtcttattaatagcaaagaataattgaaatcccaaatttacaaggttttcaacaaaagwaaagtttgctaaaagttaacagtgtaacatgtattatcctactaccacacactctcaaaggatttctcagacaagaaataacagaacttatctttactccacaatcccaaatagactctttggcagcagtgactctccaaaaccaccaaggcttagacctcttcactgctgagaaaggaggactctgtaccttcttaggggaagagtgttgtt

SEQ ID NO: 179875 - DNA, 411 bp, Homo sapiens
gtgctgggattacaggcatgagccaccgcaccaggcatgtggacctttcaatagtcaarttttgtttttcatgcacacttagaaagtaagcaggaaaatatgtttaattggcactgttctgccagatggatataatggctagaccatagaatctaagagaagtaaagataaaagttattatgtgggtgacaaaataatctgtacaccaaaccctcatgacatgcaatttacctatatagcaaacctaaacatgtatacccgagcctaaaataaaatttaaaaagagcagcaagttctcagtacattaatatttgatgattgactttattttctctgctgttacacatatattttctaaaaatactacaaagctgactcagatataaaaaataaacaatgtagtacatgtgg

SEQ ID NO: 179876 - DNA, 456 bp, Homo sapiens
gaattcagaattaactttaaaataagagcttatttttgtggtatcaggtacttgaaacacggctttaggaatcaatgttttatcattaaaactattttgtttggagtgtttataagttatcttttcccctgcyttcttaatatatgaatcacaatttaagaattgattgattgattgctcagtctttattgcaaactttaataattagacaaagccatattttcttcagggattattgacatgtttgtgcttacactaaatggctccttttgtgttttataaaacaactttgtgtgtttttaaaatcttctcctttgctgagacagctattatttcttgcttttgacagtatgcaaaatttcagcagccctcctttttttaaaaattaaatatttaaatttttattctcatattaatatgttgtgaagtttgaaattgtatatgttagataattca

SEQ ID NO: 179877 - DNA, 428 bp, Homo sapiens
gtgtgttttattttttaataaccacaagcttcctactttaaaattctagattatgcttgttttctcaccagaaggaattaaatagtcaaaacaaaacaaaacaaacacaactaaaaaaacacaacaaaaatgcctgtggaactgaacttcaattttccacatagtaagtctcccagcagsatcagtgtaaggcctgtttctgcggtaggaaaaagtgagacttgtgcatggaccatgtgttttatagagaaatattttttctagagaaaccacaaaatgtaccatactaagtaaaaagttgtatttaaggaacatatattcataacttaaatatcaaagatatttatgtggatcacttatttcctttccattctctgctgttctcaaaccactgtctgtgcattgtaggtttgggttgtgtagaattg

SEQ ID NO: 179878 - DNA, 560 bp, Homo sapiens
atggcttgtgtgggaattgaaacagcatatatctgcagtgcacaggaccagtactttaatttcaatactttcatgactgtgagagaaattacctttgtgattcttccccaggaaaaatctctgccaatctgtggcgggtaaatggtcaatttatttggctctacagtgggacacttggtttttcagggattaacttaaccagctttaaattaatcggkctatttccttctttattcttgataatttctgtgaattacttttattattttctattttagtttttgtggctacaaagtagatgtgtatttttatggagtacctggaaagttttgatacaagaatgcaatgcttcataaccacatcatgtaaaatgaggtacccatcttctcaagcatttatcttttgtgttacaaacaatccaattatactcttttggttattttaaaatatacaattaaattattattgactatagacactctgttatgctgtcaaatactaggtattattcattatttctaactattttttgtactcattaaccatcctcacctaccccc

SEQ ID NO: 179879 - DNA, 561 bp, Homo sapiens
agtttcaaaggaaaaatgaaccatagagcattatatactcacttttgtcatgtttctatattattaaaaatatctctatcttaaattgagatttttgtctacatggaaaaaatagccaaatcatagacagcccatgtgctagacagatggcgtttctgattgggaaatatggttatatttctcaatcttacttgttactggaagaaatcagagggcaggcacattgctgacagtcatttggcaatcccttgacaattccatagtatccaagagcacatcgttcacagaagtcaccagcagtgtgatgttgacaattctgtaaaggaaaagggagaagaagtttgtttttaatttagtgatagttagaatgtaatttatcatacagtccctagctatgaatgtgtgtctatgaacacatatactttcttacacacacacactcacacacacactttatcactgacagagaactcagtctttgatataaatatttttaaaggaactctttgatttgagaaactaatactgtgctrtcgtagctacactgacaataagagttgc

SEQ ID NO: 179880 - DNA, 456 bp, Homo sapiens
tctcctatgccggatgcttcctgcccttgaacatcagattccaagtttttcagcttttggacccttgcacttacaccagtaatttgccacgggctctcgggccttcggccacagactgaaggctgcaccgctggcttccctaattttgaggttctgggaatcgaactggctttcttgctactcagcttgcagatggcctattgtgggacttcaycttgtgatcatgtgagccaattctcctaacaaactccccttcatatatacatcaatcctattagttctgtccctccagaaaaccctgtgtaagaattaacttctaaaatctggagctagatgcagtggcacacaactataattccagctacttgggaggctgaggcaggaggattgcttgagcccaggggtttgagaccagcttggacaacacagcagaacttcatctaaaataaataaata

SEQ ID NO: 179881 - DNA, 600 bp, Homo sapiens
tttgtttcttttctctgctgcttttagggtcctttctttatccttgaccttggagagtttgattcttaartgccttgaggtagtctttaggttaaatctggttagtgttctataactttcttgtatttggacattgatatctttctctaggtctaggaatttctctgttattatctctttgaataaactttctactcctgtctctttctttacctcctctttaaggccaacgactcttagatgttctcttttgaggctattttctaaatcttgtaggcatgcttcattcttctttgttcttttatttggtttcctctgactgtgtattttcaaatagtctgcttcaagctcactaattctttcttctggttgattgattctgctgtaaagagactctgacacattcttcagtatgtcaattgaatttttcaactccagattttctgcttgaatctttttaataattttagttatttcaatccctttgctaaatttgcctgatagaattatgagttccttctctgtgttatctcaaatttctttgagtttcctcaaaacagctattttgaattctttctctaaaaggtcacatatctgttt

SEQ ID NO: 179882 - DNA, 600 bp, Homo sapiens
tttgtttcttttctctgctgcttttagggtcctttctttatccttgaccttggagagtttgattcttaaatgccttgaggtagtctttaggttaaatctggttagtgttctataactttcttgtatttggacattgatatctttctctaggtctaggaatttctctgttattatctctttgaataaactttctactcctgtctctttctttacctcctctttaaggccaacgactcttagatgttctcttttgaggctattttctaaatcttgtaggcatgcttcattcttctttgttcttttatttggtttcctctgactgtgtattttcaaatagtctgcttcaagctcactaattctttcttctggttgattgattctgctgtaaagagactctgacacatycttcagtatgtcaattgaatttttcaactccagattttctgcttgaatctttttaataattttagttatttcaatccctttgctaaatttgcctgatagaattatgagttccttctctgtgttatctcaaatttctttgagtttcctcaaaacagctattttgaattctttctctaaaaggtcacatatctgttt

SEQ ID NO: 179883 - DNA, 533 bp, Homo sapiens
gtccttcaacagggcacttgttgttttttttttgttttgttttttatcctaagacagggtcttgctctgttgcccaggctggagtgcagtggcatgatcttggctcactacaacctccacctcccaggttcaagcaactctcctgcctcagggcggtgctcttgtgctgagacagctctggaaagtgtggagtttccagctgggctggggcttttgcccaacatgatcaggctgagctggagcagccttgatctcagatgtgggtctattcaagggcaggttcaccacggtgccaaggaaagatgcctgaggacacctgagtggcctcattctacaccttcctgatggcagtggcctcattctgcacctcctgatggcagtgrcctcattctgcaccttcctgacggcagtggcctcattctgcaccttcctgacagcaatgcagcccccaacggtgatccattttttctgaatatgcaaaaaatatcaactccataaaagactcgtgtctagttaataatccaaacaggatt

SEQ ID NO: 179884 - DNA, 542 bp, Homo sapiens
tgctcagcctgtggtagacactaaactaatatttgtcatgttgaacacgcatgtggtgagtgccgactgcatctgaagcacatgcasagaccacatgtgaagtcttgccgacttcagagttcaggagcctagcaagaggtgagagaaacacaaacaacataagtcaaaagtgacgtgatacgaggtcaggagtttgagaccagcctggccaacatggagaaaccccgtctccactaaaaatagaaaaatacaaaaattagctgggtgtggtgacacatgcctgtagtcccagctactcaggaggctgagtcaggagaatcacttgaacccgggaggcagaggtttcagtgagccaagatcgcaccactgcactccatcctgggtgggtgacagagtgagactccatctaaaaaaaaaaaaaaaagtgatgtgatagaaatacagattccaaaaacgggttcctgtcataggtgctttttcgtctccaagtcgagagtatcatgttcctttccaaatgacacggatcatacaagtttaacaca

SEQ ID NO: 179885 - DNA, 359 bp, Homo sapiens
caccccagacgagctgagcagccttgtgtcggtgtcctggatcagagaaacaaccctacaagtcactcctggcaggcacactcccaggtcagctaagcaactgtgtgcccatgcttctggccggaggaacagccatgtggctccaactccaatragccagaccccatgttgggtgacctaccgtgtgcatgtgtgtatcccgaacccgagatatagcctgagagcctacccttggaaaagccgcatcactgttaccacagactccctcactgtaggccactgagaaactcacaaacaccactagtgtgtatgacagctaaaggaacaatatggagactacattgctgtgtccatctaga

SEQ ID NO: 179886 - DNA, 442 bp, Homo sapiens
cactcggcatttgcttagaccgggcattggcagactttttctgtaaaaggccacatagtaaatattttgactttgcagtacgaaagcagctatggacatgatgtaatagaatgattgtggctgtctaccaacaagattttattaacaagagcgagtgggtgctggggtttggcctggggccctggtttgctaacccctggctctgagggtccttggcctgttatggggtggggtggggactcccctagactctgcaagtctgggcctccctgtctgtgagatgggggtagataacagtgccatcaggttgaagatgtagggattggttcagagtctttaacacagagcatggcacccagtgtctaagcagtgagttgctgtggttgttacygatgagccaagtgtttgatcctccctgacacaaaagtaaactggggctggt

SEQ ID NO: 179887 - DNA, 529 bp, Homo sapiens
agaattcgagtaactgctcaattgctttatggaaatgtccatgttaatgcttttattaactataaaatgaattgaagaaaaagtttattggctgaccatataaaattcctgtcttggtgctcaggccagagagttaatatttatgctgatgccacagtgataggctctggggttggtgggcaaactggcctctcaacacaggtcccagcattgcatctatgaggagtattccttctctttcagggctgcagctgttacctctgctgtttctgctgctkttgctgctgtcccagcaaaggccatgctcttggggtctgcagagttccagactgcccatgtatgcctgtgtgtacctgatggccaggccaactgcttagcactcaagctaccactgtctgctgtacctgcagacctgagaccacatgtttactatcatctggttatgtcctctgctcaatgcatgctctattgccccattaaactttacttataaggcctaggtacaaaattataaaatgattaaggattt

SEQ ID NO: 179888 - DNA, 608 bp, Homo sapiens
atttaaatgatagaatttcctgagagaaaacacagagaagaattaatcaacaatataattcaagaaaatttcccagaactgaaaaaaatgagtttctagatggaaacagctcattgaagtatccagcacagtgmattaacgtaaacctaagacacatcttcgtaaaatttcagaatactaaatatgaaaagatttttaaaatttccagatttaaaaaaaggattacatttttgaaatcaataatcaggacactttggacctctcaacagcctcacttaaagttagaagacaatcaatatatgccttcaaaaattttaagaaaaaattcaaactaatattctatattcaggcaaactgttagttaagtttcagggtacaataaaagcattttcagacacaatgagtctccaaaaatttcttgtttgccttttcttagaaagctattggaggatgagttccaccaaatcaagaggtaaaccaagaaaaggaagacatagaatagtggaggcaggaaggaaggagatacatgcagaacaaaaacgggaaaagtccaagttctggaagagaaagatcccagatgatggctctgcaacaggttgggaggtcat

SEQ ID NO: 179889 - DNA, 541 bp, Homo sapiens
gcaaaagtatataaataaataaataaatacataattaaataaataaaggtcaaaggaaaaggaggggaaatgcaaaaactaaggatattcaagaacctttgacttgagcagcagtgattcattccagccctgacaacaagaaaataccccttcctgcactgtcgtttctaactataaatccctcccacccctcattctttagaatgacatttgaaattcatgtacaagctatcacaacctcagaggctccacattccaattatgcatcataaaaaatcagctgtaactactaacttagacatttggagagttgggtcactagccattcctctcatgagatttcctataacagtgatatatggccaaaccaaaggtcaacaytgaaaataaaagtcctgagacaggggatgaaaaagaaaatggggaagcaagagaattgagggtatgtgtgtatatgcagtcatttatttagttagatacaacaatgttattggtattacaggcagtccaatttgtgaaaagaaagattcaaagaaagtcc

SEQ ID NO: 179890 - DNA, 598 bp, Homo sapiens
accatatggtttagaaaacatctatacacgtctggtgtcatttaattgtgtgagcaaaccataaagaactcaggactcttggtggcacctctagcctacagatgatgaaattgctcctggcaattatgtgaccttgcctgggtggtgcagataggacagaggtctacacattttaacagaccattttcatccacacagcaagcattttmtgggaacctcttaagatacaaacatggcattgttttgcttacctaacatgcaaaaaaaaatgggtaagatgaaatcaaagggaaaaataatcccttctgctatacatcttatttttaaccttacctctctcattttaaccttcttcctaccctataaagaagagctcatttcatcattgttcatgtcagcatagtgctatggtgcaaccagctccactgtgcattttggtgttgctgttctttctcgttagataaaatagaaccccagtggtcaaagtgggcttagagaagtaggaatcttaaaataaagactgggacctggtcttcttgttatgctgtctgagttgtgttattttaacaaccccagaagttcctagatcaaatatgtc

SEQ ID NO: 179891 - DNA, 598 bp, Homo sapiens
accatatggtttagaaaacatctatacacgtctggtgtcatttaattgtgtgagcaaaccataaagaactcaggactcttggtggcacctctagcctacagatgatgaaattgctcctggcaattatgtgaccttgcctgggtggtgcagataggacagaggtctacacattttaacagaccattttcatccacacagcaagcattttatgggracctcttaagatacaaacatggcattgttttgcttacctaacatgcaaaaaaaaatgggtaagatgaaatcaaagggaaaaataatcccttctgctatacatcttatttttaaccttacctctctcattttaaccttcttcctaccctataaagaagagctcatttcatcattgttcatgtcagcatagtgctatggtgcaaccagctccactgtgcattttggtgttgctgttctttctcgttagataaaatagaaccccagtggtcaaagtgggcttagagaagtaggaatcttaaaataaagactgggacctggtcttcttgttatgctgtctgagttgtgttattttaacaaccccagaagttcctagatcaaatatgtc

SEQ ID NO: 179892 - DNA, 598 bp, Homo sapiens
accatatggtttagaaaacatctatacacgtctggtgtcatttaattgtgtgagcaaaccataaagaactcaggactcttggtggcacctctagcctacagatgatgaaattgctcctggcaattatgtgaccttgcctgggtggtgcagataggacagaggtctacacattttaacagaccattttcatccacacagcaagcattttatgggaacctcttaagatacaaacatggcattgttttgcttacctaacatgcaaaaaaaaatgggtaagatgaaatcaaagggaaaaataatcccttctgctatacatcttatttttaaccttacctctctcattttaaccttcttcctaccctataaagaagagctcatttcatcattgttcatgtcagcatagtgctatggtgcaaccagctccactgtgcattttggtgttgctgttctttctcgttagataaaatagaaccccagtggtcaaagtgggcttagagaagtaggaatcttaaaataaagactgggacctggtcttcttrttatgctgtctgagttgtgttattttaacaaccccagaagttcctagatcaaatatgtc

SEQ ID NO: 179893 - DNA, 550 bp, Homo sapiens
tggttattgttgtgctaagaggacctacgcaggggaaccagctacccttgttatcytcatctcaggaagaaactgaactcccattctgagaagtccagtatctgttttccaaagtcctatgcacccctcaggctgcaagagaattctgtcggtgcctacctgaagctggttgcaatcgcctgttaaaatcatgatcccattagtcgtagcactattaatcttcttatagactgtgagacagaaaaaccacaggcagtgaaataacagctgattgggagtgatgaaactttaaaaagacacagtggagaggcctggtgtgaaaccacaccaaagcccagccttcaaacagcaaacccgattactatcccccacaggctggctgaaacacgttcagaactgaaaagatccactaggtgggtgtgagaggcctgacatgcccgttactcatgtcactcactgcttaaggcctggaagaagcacccaaaaaatacaatctctgggctcacaaatattctgaccagcccacaacatgtttctctcccttcacttc

SEQ ID NO: 179894 - DNA, 577 bp, Homo sapiens
ctggttattgttgtgctaagaggacctacgcaggggaaccagctacccttgttatcttcatctcaggaagaaactgaactcccattctgagaagtccagtatctgttttccaaagtcctatgcacccstcaggctgcaagagaattctgtcggtgcctacctgaagctggttgcaatcgcctgttaaaatcatgatcccattagtcgtagcactattaatcttcttatagactgtgagacagaaaaaccacaggcagtgaaataacagctgattgggagtgatgaaactttaaaaagacacagtggagaggcctggtgtgaaaccacaccaaagcccagccttcaaacagcaaacccgattactatcccccacaggctggctgaaacacgttcagaactgaaaagatccactaggtgggtgtgagaggcctgacatgcccgttactcatgtcactcactgcttaaggcctggaagaagcacccaaaaaatacaatctctgggctcacaaatattctgaccagcccacaacatgtttctctcccttcacttcccacacttacccattgtcagaggtga

SEQ ID NO: 179895 - DNA, 577 bp, Homo sapiens
ctggttattgttgtgctaagaggacctacgcaggggaaccagctacccttgttatcttcatctcaggaagaaactgaactcccattctgagaagtccagtatctgttttccaaagtcctatgcacccctcaggctgcaagagaattmtgtcggtgcctacctgaagctggttgcaatcgcctgttaaaatcatgatcccattagtcgtagcactattaatcttcttatagactgtgagacagaaaaaccacaggcagtgaaataacagctgattgggagtgatgaaactttaaaaagacacagtggagaggcctggtgtgaaaccacaccaaagcccagccttcaaacagcaaacccgattactatcccccacaggctggctgaaacacgttcagaactgaaaagatccactaggtgggtgtgagaggcctgacatgcccgttactcatgtcactcactgcttaaggcctggaagaagcacccaaaaaatacaatctctgggctcacaaatattctgaccagcccacaacatgtttctctcccttcacttcccacacttacccattgtcagaggtga

SEQ ID NO: 179896 - DNA, 439 bp, Homo sapiens
cctgggcctcctgcaaatgaagagtcaaaacagaaaggaatgtgttctatcatrgatcagatcaaagtctttgtttctcctcctggcaagaaagcagacactctgctgatggctcttagcaaaagtagttatcagtggctttggaaagataaagcttacctaaggctgacatgtattttatttcagtggccttgactggtggaagttgctcttgcttttcctacttgttttaactcagggaacaacacttgacattttttataatgctctgctcttcccaaagggtttgcatgacaataaaaccctgtaggatgcaggtgtttcttagcaccattcaacaggtcaagaagtgtgggcaacgacacatttattgagggtttaggatgtgtcagacactcatgaaatagatattatgaccctgttcttgcagacaaggaag

SEQ ID NO: 179897 - DNA, 590 bp, Homo sapiens
gggtttatttgttcatttgctcatttattcattcrcttaacaaatgttgattgagtacctactatgtgctagagaccactgtaggggctgggaacagacatggaaacaatgggcagaacactctgctcccaggaactcacactctagagcaggggtcagcaaaccttttctgcaaacagccagataataaatgctttaggctctgtaggccacatggcctctgttgcaatttacttgattttgctgtgagagcacagaagcaatcagagacaaaatgcaagttagcaggagtagctgtgctccaatataactttatttacaaaaataggtggtgggccagagattcatgatcaagtttaccttgtattagtctaatttcatgctgttgataaagacatacccgagactgggtaatctacaaaaacaaagtggtttaatggactcacagttccacatggctggggaggcctcacaatcacggcagaaggagaaaggcacatcttacgtggtggcaggcaagagaggatgagagtcaagtggaagggaaaaccccttatcaaaccatcagctctcatgagacttattcacta

SEQ ID NO: 179898 - DNA, 445 bp, Homo sapiens
tctctcacaccagactggatgttccttgagggcaagaaccagaccatggaattttaaacctttcccatatgccgggatacagcaaatactccacatacaatttttgattcactgtctcaaaattgaaaaagtgtcagtcttgacttttagcaagagctccctcactctgacctcttagaataagaaatggggaaggcaaagaaaatttcgaaccaggcagctcaaggtaggtatggagtaaggtgggtgtggagcaagttagatatggagtytccatattaaggactttggggacctagaagatggagttaaaagtgatggcttggacacttatcagcatttttttttgtgctgggcaagtcagttaacacctctgagtcccagtttcctcttctctaaattgaggttaaagttacttacctaactagttatggaaaataccaag

SEQ ID NO: 179899 - DNA, 564 bp, Homo sapiens
ccttagatcagctcagtcatactttcttcataacacgccatatggaatacctgtgaatgatttcccatggcctgcttatctttcattataagcaagtcaaggcatccatgtgcagtacctgttttcaagagagaagagtattttgcagaaacgaatacatcaacagtcttcccttctcctctgctccccagccttttcccctaattggatcttataagcatacaacatgttttttttagagcaggcttctcaagctgctaagtgcatgcaaatcacctgggcatcttgttaaaatgcagattctaattcagaaggtctagaatggggtccaagaatttgcatttctaacatgctcacaggcaatgctaattctgctgatcccttcacaggccacactttgagtggcgtggttctaaggaacatggaattagtcccagcaaaaccttgtaagggtgagataagacaggcttatttgcaaaaaggaaactctctgtgcaatagtgaatgagaattaaagatatttttgaatgtrtggatatagatttcgttcacatttatgttctt

SEQ ID NO: 179900 - DNA, 550 bp, Homo sapiens
tgaaatgtgatttccagtgttggaggtgggacgtattcgatcaaggggatggatctctcctgaatggcttagaccttggtgatgagtgagttcttgctcagttagtctatgagttatttcaggtgagatgtggttgtttaaaagagtctgggacctcaccttctctctcttgttccttgtctcgccatgatataccttctcccccttcaccttctgccatgattgtaagctccctgatgcctcatcagaagtagacactggcaccatgcttcctgtccagcctacagaattgtgagccaattaaacttcttttctttataaattacctagcctcaaatatttatttacagcgatgcaagaatggactaacacagcctccctcctgggggagaaagcctcaggaatggcatccacaattagagacttatttctcagatgggccagcctttcttyccctctccctacctcacagcaccctatcttgaccaagaggaggaggctggggtcccactgtccagctagaagtggccctgtctcttactagctgggc

SEQ ID NO: 179901 - DNA, 555 bp, Homo sapiens
tattactatggctcactctatgcctctgagttccaaagtatctttggagttaccatggataccagtgacaagtattctcccataactgctctgtgtctcatcaaacacaagaaaactgacatggcaggaatcaaggcatcaagacattatgaatctctaattgtttatatcactgttcatgcttttaaaaaatagtatatatatatatatatatatatatctttaattaaccagctaatcagctaattattttaaaaaatctgaatagacatcaaattattgaatagaaaatgagttatttttaaaaaggtataaacattaaaataagccaatatgacaatctgtgattcaaagtaaaacctgaatctgaaagtaaacttgagttttgagttcttcagtaataaaaacttctaattatatgaaagacaatatctcataggaacattcatattatatagcccataataaaaaatttcaaaagaggtcatttgtgagaatatgcagattgttcaaggttaagtgttaacttgyaataaaaacatcactgcaaaatgg

SEQ ID NO: 179902 - DNA, 433 bp, Homo sapiens
acatggaaataattgtatccatacaatatcaatatagatcaacattttaatttaactttttatgttcatgcatagaaggtagaattatattrtagtagaatctcctttggttttttattacagtgaatcactaatttatgccactgtaattttatttttgaatgcctgctatgctatgcacagagatagaaaaagagctgtttaagagaagattaacgtctttctgccaagttgagaagcaacaggtggtttgtgtgctgaagtaatagtagtggtaaaatataagactgaaaagttaaattggtatagatcatttagggtcttaactgatgggccaagcaattaggactgctttttaggcagtgaaggccattagaagattttaaactaaaagccttacatgacctgacttttgctttaggaagataaccct

SEQ ID NO: 179903 - DNA, 433 bp, Homo sapiens
acatggaaataattgtatccatacaatatcaatatagatcaacattttaatttaactttttatgttcatgcatagaaggtagaattatattatagtagaatctcctttggttttttattacagtgaatcactaatttatgccactgtaattttatttttgaatgcctgctatgctatgcacagagatagaaaaagagctgtttaagagaagattaacgtctttctgccaagttgagaagcaacaggtggtttgtgtgctgaagtaatagtagtggtaaaatataagactgaaaagttaaattggtatagatcatttagggtcttaactgatgggccaagcaattaggactgctttttaggcagtgaaggccattagaagattttaaactaaaagcyttacatgacctgacttttgctttaggaagataaccct

SEQ ID NO: 179904 - DNA, 368 bp, Homo sapiens
tggtgttgcagtttgggctacaatccagtagctggcacttaagagtaatggccagtagctaggctaatacccagccacacaactctttggtacttcctcactttcacaggtgtgcactgcagtggggaagtcagggatggggagaggggaaggagaagagatggcctcaccaggtccacttgggggagctccctccaatcatgggcgcccatgccygagtttcttttgttaggtgttccgggctgccaggccccccaggcagaggctgcaacagagagatatgccaaaccccttctggacaggccctgtttaaggagaaatgcatgtctggttcccaccctggtccaggaacccatgcgtgtcgcccc

SEQ ID NO: 179905 - DNA, 522 bp, Homo sapiens
ttccatttctctgcatccccgycaatatctgttatttgactttttttttttttttctcgagacggagtctcgctttatcgcccaggctggagtgcagtggtgtgatcttggctctctgcagcctctgcctcctaggttcaagcgattctcatgccttagcctcccgagtagctgggaccacaggcacacaccaccacgcccagctaatttctgtattttcagtagagatggggtttcactatattggccaggttagatgttatttgactttttaataacagctattctgattggtgtaagacggtatctccttgtggttttaatttgcatttctctgatgattagtgatgttgagcattttttcatatgcttcttggccatatgtatgtcttcctttgcaaaatgtctgtgcatttccgttgctcactttttaatggggttatttgagggattttggttgagttgtttgcattccttgtagattctggacattggacctttatcagatgcaaagttggctag

SEQ ID NO: 179906 - DNA, 531 bp, Homo sapiens
aacatctgaacagggagttgaatattatagaaatccgcttgatggaaatgaaagacaaggtaaatctacagggtcagtgtgggagtctaccacatactattcaggtagctcaaacaaataaataacgttgtaagcctgacaagtgaaaaggaaacaactaaaagaaatggcaagcaaaatgaaaactgagtcaattttctaccatgtgtcaaagcaggaatgcatttttaatgtgacttactaaaatatataggatcaattagcaaggcaaattccatttctatttgtttaggatgaacatacamtaatgtaaaaaaattataaatgcactcaaagaggttagaaatgatgaaatgtaatatcaattatggtatgtccaattggaagttaaaatgtgaagtatgattgttgtggacagttgtatacattcaaaacaagatttataatggttatgctgaggacgtggtttgagaggataagaggaaaatttgaattgaatttagtatgaatattactctgagataaatttag

SEQ ID NO: 179907 - DNA, 531 bp, Homo sapiens
aacatctgaacagggagttgaatattatagaaatccgcttgatggaaatgaaagacaaggtaaatctacagggtcagtgtgggagtctaccacatactattcaggtagctcaaacaaataaataacgttgtaagcctgacaagtgaaaaggaaacaactaaaagaaatggcaagcaaaatgaaaactgagtcaattttctaccatgtgtcaaagcaggaatgcatttttaatgtgacttactaaaatatataggatcaattagcaaggcaaattccatttctatttgtttaggatgaacatacactaatgtaaaaaaattataaatgcamtcaaagaggttagaaatgatgaaatgtaatatcaattatggtatgtccaattggaagttaaaatgtgaagtatgattgttgtggacagttgtatacattcaaaacaagatttataatggttatgctgaggacgtggtttgagaggataagaggaaaatttgaattgaatttagtatgaatattactctgagataaatttag

SEQ ID NO: 179908 - DNA, 563 bp, Homo sapiens
aagacttcttcctcttacttacctcattcaaatgatcatcaaatcttctgtcacctccccartttaactccttattaacaggcccattgacttggtgtagtctctgatcatctctcatttgaacagtggtaaggtggttctttcataatatgccttcgatgcctcaaaccttcccttgttcataatggaaccaaatgacctttctaatatttatatatgatttactaagttagcttaaaagcatcagttttttcctgtagactttggaaaaatgctcagattctgtgtctgtcagtcatgtaagatcttaaatgttctgatctcttcctgcattaatgcattcctgctaaatactccttctaactctgcatttaattcacggtcatgccatattacttacagtaccccacatgcatgtaacatgtcattttatgcttatatatttgcacatgtcaacttctcatggagggctctttgtactcttggtccatctgatgcacttatggttaccttaagatttgaaagcatgcatttttacaacctcctctgacatgttttgtttc

SEQ ID NO: 179909 - DNA, 563 bp, Homo sapiens
aagacttcttcctcttacttacctcattcaaatgatcatcaaatcttctgtcacctccccaatttaactccttattaacaggcccattgacttggtgtagtctctgatcatctctcatttgaacagtggtaaggtggttctttcataatatgccttcratgcctcaaaccttcccttgttcataatggaaccaaatgacctttctaatatttatatatgatttactaagttagcttaaaagcatcagttttttcctgtagactttggaaaaatgctcagattctgtgtctgtcagtcatgtaagatcttaaatgttctgatctcttcctgcattaatgcattcctgctaaatactccttctaactctgcatttaattcacggtcatgccatattacttacagtaccccacatgcatgtaacatgtcattttatgcttatatatttgcacatgtcaacttctcatggagggctctttgtactcttggtccatctgatgcacttatggttaccttaagatttgaaagcatgcatttttacaacctcctctgacatgttttgtttc

SEQ ID NO: 179910 - DNA, 563 bp, Homo sapiens
aagacttcttcctcttacttacctcattcaaatgatcatcaaatcttctgtcacctccccaatttaactccttattaacaggcccattgacttggtgtagtctctgatcatctctcatttgaacagtggtaaggtggttctttcataatatgccttcgatgcctcaaaccttcccttgttcataatggaaccaaatgacctttctaatatttatatatgatttactaagttagcttaaaagcatcagttttttcctgtagactttggaaaaatgctcagattctgtgtctgtcagtcatgtaagatcttaaatgttctgatctcttcctgcattaatgcattcctgctaaatactccttctaactctgcatttaattcacggtcatgccatattacttacagtaccccacatgcatgtaacatgtcattttatgcttatatatttgcacatgtcaacttctcatggagggctctttgtactcttggtccatctgatgcacttayggttaccttaagatttgaaagcatgcatttttacaacctcctctgacatgttttgtttc

SEQ ID NO: 179911 - DNA, 388 bp, Homo sapiens
aagtcagacctgagctaaaactccattaattacttgatctccataagcccctagtttaactggaggacaacaatgacattttgggtaccctggaatgaacatcagctcagagccagtgtccagtgttgcccgaaaattctcatcattcccttttcctcagtgcacattaccctgataawaggccagaggtctccctggggaaagatgggagaaaaattaacagcataaattgtcagtagtgtagttggggccttcctcaaggggaccccatgtccccttcattcaaagcgttctttgtctgtaaactggttcaagtctggaagttgatagaggggtcattattctctattttttttctttttttttttccttatactttaagttttag

SEQ ID NO: 179912 - DNA, 655 bp, Homo sapiens
attcattgagcaaaatatacagtaaacactaactatgctagagagtaagggaagcaccagtgatgaagacatggtttctatattcctaaatcttaagagaaagactgtagaaatctaaaaaccacacacgcagcaaagtaatgtaattagtggatctggatttcagcctacctatgagtaataaacataagataaaatcctggtattttccataagttctgtccatccccctgcctatctcccactggttatgaggttgcaagctagayaaatgaggactgatgatgtgtagtttaatattttaaaataagtttttaataaaaatgcattaatgttttctaaaattcacatatatgtcgtttctgtatcctcaggcaagcactgggttgaacatatactcaataaatggcttctatatttcacattgcatgcctgtatcaaaacatctcatgtaccccataaatacatacacctactatgcaccctcaaaagttttttaaatatacaaaatttaattaatagtttccaaataaattttattatttatgtaccaagtccctagaacagtgcctggcaagataaatgtctgtatgtttcaacatcataattaggatctcatgaacttaatgcatatgaaaggaagccaataattagc

SEQ ID NO: 179913 - DNA, 493 bp, Homo sapiens
tgccttgtggcttggcaggatacagcctccctcctggctgctttcatgggctggctttgagtgtctgtggcttttccaggtgcacagtgcaagctgccagtggatctaccattctggggtcgggagtatgatggccctattctcacagctacacmaggtagtgtcccagaagagggtctgtgtgagggctccaacaccacattttccttccacactgccccagcagaggttcttcaagagggccccacccctacagcaaacctttccctgggcatccaggcatttccatacatcttctgaaatcttggtggaggttcccaaacctcaattcttgacttctgtgcacctgcaggctcaacgccatgtggaagctgccaaggcttggggcttccaccctctgaagtcacagctgagttgtacatggacccctttcggccacgtctggagcaactgggacacaggacaccaagtccctaggctgcacacagcacgt

SEQ ID NO: 179914 - DNA, 493 bp, Homo sapiens
tgccttgtggcttggcaggatacagcctccctcctggctgctttcatgggctggctttgagtgtctgtggcttttccaggtgcacagtgcaagctgccagtggatctaccattctggggtcgggagtatgatggccctattctcacagctacacaaggtagtgtcccagaagagggtctgtgtgagggctccaacaccacattttccttccacactgccccagcagaggttcttcaagagggccccacccctacagcaaacctttccctgggcatccaggcatttccatacatcttctgaaatcttggtggaggttcccaarcctcaattcttgacttctgtgcacctgcaggctcaacgccatgtggaagctgccaaggcttggggcttccaccctctgaagtcacagctgagttgtacatggacccctttcggccacgtctggagcaactgggacacaggacaccaagtccctaggctgcacacagcacgt

SEQ ID NO: 179915 - DNA, 622 bp, Homo sapiens
tataaatgttactttacatttcagattaagtacattaaatggtagtgttcatatcactttttatcaggagtgataaggacaataaataaatggtcatttgccatgaaattaatagcttggggagaatttctgtcaagtatcctgatgtgtgtttcacctggtcaaattacattagatctgcttaaagatttaacaaagtgtgttttacttaattcttaaattttaaacttgtctacttatatttggagttgactttttaacaatcagtttatccacaaagaggaatcatgagactgtgatgcccttgtttaattgctgtttgtaagctttagctctttggagcatgcatttatggtcttgagtaaagattgttctaatgaataagcattgaatctcagataccagktctaaactgaaagggaacttcaaatgacattttgcaggataatgtgagtggatatgttaactacttgaatcacattagcctcaattgtccctcagatgattgactgtgccattaattgtcaacattcttctgtcctgctcttcccaatttcatctctgcttgcaatgagaaatgcttagttgaaaaattctggggatactttttaggagagttatg

SEQ ID NO: 179916 - DNA, 458 bp, Homo sapiens
taataaactgtagtataaaatgtgttgttaattttaatcggactcttccattcttagcacttatgttacctttttttgaccttcaaatttatatatatgaaacaaatttaaaaattggagataggcatcagtgggcagtgtatacattaatgtggactatgtcaagggtttttttatatatatattattttcaagcaatataktcaaacatggaaataattgagtatttcctcttagtaccttgttctaactgaatgtgtcaaatgaattcactaagaattcttgaactatagcaatataaatttatactggaatattgcatttttaatttattaaataacatataactattttatttgctttaattctaactcaactcaaatcaagcagtatgatacaacataatagttcctactacattttgggagaaactagttcgcttctgagaataactgccc

SEQ ID NO: 179917 - DNA, 458 bp, Homo sapiens
taataaactgtagtataaaatgtgttgttaattttaatcggactcttccattcttagcacttatgttacctttttttgaccttcaaatttatatatatgaaacaaatttaaaaattggagataggcatcagtgggcagtgtatacattaatgtggactatgtcaagggtttttttatatatatattattttcaagcaatatagtcaaacatggaaataattgagtatttcctcttagtaccttgttctaactgaatgtktcaaatgaattcactaagaattcttgaactatagcaatataaatttatactggaatattgcatttttaatttattaaataacatataactattttatttgctttaattctaactcaactcaaatcaagcagtatgatacaacataatagttcctactacattttgggagaaactagttcgcttctgagaataactgccc

SEQ ID NO: 179918 - DNA, 546 bp, Homo sapiens
cctgtgtaccacattcatgccaacatctactgttttttgattctttgattatggccattcttgcaagagtaagctggtattgcactgtcgtttcaatttgcagttcactgatcattagtgatgttgagacttttttcatatgtktgttggccctttgtataccttccatgagaattgtgtattcatgtgcttagcccacttttgatgggattgttgttttattctaaccgattttagtttgttgtagattttggatattaatcctttgtcagatgtatagattgtgcagatttttgtcccattccgtgtggtgggttgtcaactctgctgactgttccttttgccgtgcaaaagctctttagtttaattaggtttcagctatttatctttgtttttattgcatttgcttttgggttcttggtcatgaaatccttgcctaagccaatgtctagaagggttttccaatgttatcttctagactttttatagtttcatctcttaggtttaagtccttaatctatcttaagttgatttttgtataaggta

SEQ ID NO: 179919 - DNA, 546 bp, Homo sapiens
cctgtgtaccacattcatgccaacatctactgttttttgattctttgattatggccattcttgcaagagtaagctggtattgcactgtcgtttcaatttgcagttcactgatcattagtgatgttgagacttttttcatatgtgtgttggccctttgtataccttccatgagaattgtgtattcatgtgcttagcccacttttgatgggattgttgttttattctaaccgattttagtttgttgtagattytggatattaatcctttgtcagatgtatagattgtgcagatttttgtcccattccgtgtggtgggttgtcaactctgctgactgttccttttgccgtgcaaaagctctttagtttaattaggtttcagctatttatctttgtttttattgcatttgcttttgggttcttggtcatgaaatccttgcctaagccaatgtctagaagggttttccaatgttatcttctagactttttatagtttcatctcttaggtttaagtccttaatctatcttaagttgatttttgtataaggta

SEQ ID NO: 179920 - DNA, 591 bp, Homo sapiens
ctttttagcaactgtggcaaaaacactcattgtgaatttatttttcttacagcttgtatatgttttctttatcttgaattgtctgcccaagtagatgagagatttgaaaaattctgtcgacagtggtaacagagtcagaggtcaaaagtttccaagcatgaactaaacctaaacagcaagaaaaatatcaaaatgtatgcaaaaatacacagaaaggttattgatcttctaaaatcataccagattttagaagaaataccagaaaatagccttaaggaaataaaccttgtgtttgtctaataaaacccatcaagaagtatgtaataattacatcaaccctcttgaaatttttttaaaaaggccaagtctatagaatgaatagtatcaggccaagaaaaaaaattcaggccctgtttccaakgacaataatagtggaacagacagatagtggccagtctagcctggggaatgcaaaccaaccaagtaaaaaatttgacaactcagttttttataaaattaaaccaatgctgtgtataaaagtatccagaatgaaatgaagaactgactcatattttgataattaatgctcaa

SEQ ID NO: 179921 - DNA, 591 bp, Homo sapiens
ctttttagcaactgtggcaaaaacactcattgtgaatttatttttcttacagcttgtatatgttttctttatcttgaattgtctgcccaagtagatgagagatttgaaaaattctgtcgacagtggtaacagagtcagaggtcaaaagtttccaagcatgaactaaacctaaacagcaagaaaaatatcaaaatgtatgcaaaaatacacagaaaggttattgatcttctaaaatcataccagattttagaagaaataccagaaaatagccttaaggaaataaaccttgtgtttgtctaataaaacccatcaagaagtatgtaataattacatcaaccctcttgaaatttttttaaaaaggccaagtctatagaatgaatagtatcaggccaagaaaaaaaattcaggccctgtttccaaggacaataatagtggaacagacagatagtggccagtctagcctggggaatgcaaaccaaccaagtaaaaaatttgacaactcagttttttawaaaattaaaccaatgctgtgtataaaagtatccagaatgaaatgaagaactgactcatattttgataattaatgctcaa

SEQ ID NO: 179922 - DNA, 465 bp, Homo sapiens
aataatttcacagggctgtgtaagcattttaaggaattgaggctttatcctaagcctaagggaaagccatccatataaccaaatttctgtttggaaaaatgtgctctggttgtagtacagagaattagttgtcagaacaaaggtgagatggtggtgatatagatgccaaagtaagaaaatatgaatgtgctatgctatttcactcttytgtccttcaccaacctattttctctgcttccttttctctttgttcatattttcagttcaagtttcaccccttctatgaaacatttcatgaagtatcagcccattctgtacaatcaaccactcctgcctctgtgcccaaacagtatatgcttttatcatggcccatgccattgaaatgcatttagctgtatatgtatattcgtccttgtacaaatcaataaataaattcttaatgaaatttattttctgtctccagca

SEQ ID NO: 179923 - DNA, 606 bp, Homo sapiens
gtaattttgccaaaatttaaatgaaggctacacmacatatattccctagccctcactaatctattttagttacccactcaaagctctgcaagtgaagcatgattttcctttagaaaaaccaggttcactccccaccagaaggtcatatttatttatgccttcagcattactctcctttattagagttcctaccaacttactggctccataacatcactgaaataaatatctaattctatggaattctttacatttaaaatgtaaatatgaacttattgtatttatatgtcattctttaacatgctattcataaaatttttataaaatgatatttccagaaagagaagtaaaatacactatttcctcaataaagaccaggacataaggaaactaaaatgttcctgactacgttgactattccacgatggaattcaagggtagaattctggctactgagaataaattccccaaggctagagctattcaagcacatagtacagatgaactcaaagcattcaagttgatggagggctggagaggtgagagaaatagagtgatcatgtatgttagatcacctttagatcctgagattttgtgattccatca

SEQ ID NO: 179924 - DNA, 475 bp, Homo sapiens
tctttaacatgctattcataaaatttttataaaatgatatttccagaaagagaagtaaaatacactatttcctcaataaagaccaggacataaggaaactaaaatgttcctgactacgttgactattccacgatggaattcaagggtagaattctggctactgagaataaattccccaaggctagagctattcaagcacatagtacagatgaactcaaagcattcaagttratggagggctggagaggtgagagaaatagagtgatcatgtatgttagatcacctttagatcctgagattttgtgattccatcatcttctatcatctcttgcttatttcacaacactgtaacactctgcttaaaaacaaagggcaagagaaggggaaaaaaccctatagtactcaattttgttattttcatcttctgtcgcaaatgtttaatttttgtagtaaaccatattctattggatgtatt

SEQ ID NO: 179925 - DNA, 584 bp, Homo sapiens
cagtattctccacaatgtgggacaaatacccactggtagcacataaattgatttcagatggcatacaggcatggccttaaattacaccgaattacacagtgagaaaattgtcctcttccaaagcttctgattacattaagaaaagttcacagtttggtgccagtatgtcttcaacctccttctatggctggctaagctcccattttaacaaagaaagggcaagctttaggctaaaatttgataacattgatttagttttggtcttgtactgtgcatgtgttttagggacacctcccatttatggtaaaatacactgattattcatttgtgttaactataatttacttatataaatttatctaggttaaaagggagtcaaaatgtrtttaggaaatagtagtaatattatggtgaaacagcaagaaaagatggtgagattatggtgatgacttcgtacctgaaataaaatgaatttatgatgaaagtcttatgataacgtaatcacattgttgagttataaagacaccttggtcagaatacggcatattctcccatttacaattcacatatttcctagaaatatc

SEQ ID NO: 179926 - DNA, 600 bp, Homo sapiens
tgattgaacctctgattattataaaatgttcttctttgcatctgataacaattttttccttaatggctgttttgtctgatattagtatagccactgccagttgctatttgatttctgtatatcttctatatttttctcctctctattcttcaattccctttattgttttcaaataaatattttctcgtgtgtatcttaaattttcttgtttcttttataactctgtggtcatttttctggttattctccttggggaatataattagcatctcaaaagaatctagtttgaattaatactaacatattttcaacattatacaaatccttgctctaatttcatcctccttatgaatttcatcattagattataaatcaatgaaaaaaaatttataattatttgtggatttataaagctatccactaaaataaatagaagaaaaaagatacccttaaaataaatttatactgactytcataatcatgggataattactcttactgggacattttatttctttgtatgaatttgaattaccatcaaatgccctttcaccctgaagacctcccttaagtatttcttaaaggggagatttgctagca

SEQ ID NO: 179927 - DNA, 600 bp, Homo sapiens
tgattgaacctctgattattataaaatgttcttctttgcatctgataacaattttttccttaatggctgttttgtctgatattagtatagccactgccagttgctatttgatttctgtatatcttctatatttttctcctctctattcttcaattccctttattgttttcaaataaatattttctcgtgtgtatcttaaattttcttgtttcttttataactctgtggtcatttttctggttattctccttggggaatataattagcatctcaaaagaatctagtttgaattaatactaacatattttcaacattatacaaatccttgctctaatttcatcctccttatgaatttcatcattagattataaatcaatgaaaaaaaatttataattatttgtggatttataaagctatccactaaaataaatagaagaaaaaagatacccttaaaataaatttatactgactctcataatcatgggataattactcttactggkacattttatttctttgtatgaatttgaattaccatcaaatgccctttcaccctgaagacctcccttaagtatttcttaaaggggagatttgctagca

SEQ ID NO: 179928 - DNA, 571 bp, Homo sapiens
tggcaatgttggcagggatggaggttatggatgggctcagcaatgtggacttccactcaccaaggctgacctggctacagccactgctgagtgcccaatttgccagcrgtggagaccaacactgagccctcgatatggcaacattatttggggtgatcagccaactactttgtggcaggtttattatattggactttttcatcatggaaagggtagcagtttgtcctcactggaatagacacttattccagatatgggtttgcctatcctgcacacaatgcttctgccaagactaccatccatggactcccagaatgccgtatccaccattatggtattccacacagcattgcctctgacaaaggcactcactttacagctaaagaagtgcagcggtgggctcatgctcatggaattcacttgtcttaccatgttccctattatcctgaagcagctagatcaatagaatgttggaatggccttttgaagtaataattacaatgccaactaggtgacaatactttgcaggtctggggcaaagtttcccagaagctgtgtgtgctctgaatca

SEQ ID NO: 179929 - DNA, 564 bp, Homo sapiens
tgggtttgcctatcctgcacacaatgcttctgccaagactaccatccatggactcccagaatgccgtatccaccattatggtattccacacagcattgcctctgacaaaggcactcactttacagctaaagaagtgcagcggtgggctcatgctcatggaattcacttgtcttaccatgttccctattatcctgaagcagctagatcaatagaatgttggaatggccttttgaagtaataattacaatgccaactaggtgacaatactttgcaggtctggggcaaagtttcccagaagctgtgtgtgctctgaatcagcatccaatatatggtactgtttcttccatakccaggatttgtgggtccaggaatcaaggggtgaaagtggaagtggtaccactcaccatcacccctagtgacaagggagaattctctggtcccctttttggggacttgtgacaggggtgtggctcacttacttggctgtggcattcaaacccctgtgggaggggtagcacacagataagcctgtgctggggctgggacaagggcttttggggtctg

SEQ ID NO: 179930 - DNA, 575 bp, Homo sapiens
ctgtccacggatggctaagtggagagtcagagtgacagctcactggagagtcagggtgatagccttttacaccctgcctttacccagctcagtggagagtcagaatgatagccttttacaycctgcccttttggtacctgggtccttgtccagcatctgggaagaatcatgtcacacggacttgaaggatggtgaatgcagaggttttattaagctgtggaagtggctctcaaagcaaggagagctggaaaggggataacgcaggaagaaggtaatctttccttgaagcccagacatctctggccaggcttctcaccaaagtcgtgctgtctgatgttaagctgagtctatctgcagtccccaaagctcagtttctgctgcttctcttgacattcagctgcttgtccctctgcaagctgaggtctggggtttatatgagcacagaatgtgggggtggggtgggccaaaaatcaacatttgggcacaaaaactggaatgccttttctagtttagggccgggggtccaggcttaagggtgaagccctccctagggatgccaccctcctgcctcctgt

SEQ ID NO: 179931 - DNA, 564 bp, Homo sapiens
tactagttcattaagaactataataagaaaggatgtgaggctaagacttgcatagaggaataaaagggatctggagaaatagaggtaggaggacctagtaggagggttactagatggaattccagatagttaaagaatgggaaggaatctcagaagaagagtttggagggtgcaagtgtgtgagtgagggtgtgtgtatgcacacttgtgcttgtaatgggggaggggaacttgagctgaatgtgaaatagttaagcgagagaatgtccgtcacgaggaacacagtttgggtrctagaaataatgcatcagagtcctcagcagctgaaatttagctttacttgagtgagcctctgccatcaggtctatccttagatcttcatgaaggaaaaaatcgaccacttcctcacagatcgtcccatgactgcccaacagagaaagctgagccacatcataaaacatcaatttgaccctatcttatttcactccttgtgcaagcctttctttgttgccttcagagttcccataagccccaaagcagcccctggcaattaggaagatattg

SEQ ID NO: 179932 - DNA, 451 bp, Homo sapiens
attatcacttttaaacaggaaaagcaatttttaagacaatattctagaaaatgcaggcccaggctcatttgtttytaattgacatttcctttaatgacaggagtggcagatgaaattattctggaaccacagcataaagaatgaatagaacatatgaagaatcattaggcagaaggtaaagcttgcttcttgtcttatctaacaggacaagacggtaaaaccattaagtcaaaacataagtaatcaacattaaccacgttgaccaatgatgatgatgatgatgacaatgatgatgatgattatacactagtaatagtagaaaaataagcacttatatttcagacagtgacagtgtgctgagtttttttttttttttttatagacaatagctcatccaaccctcaaaactttttatacatgagaaacttcagatctggaagagttaagcaaa

SEQ ID NO: 179933 - DNA, 585 bp, Homo sapiens
aaatataaatatgttttccaaatggatagccagttgccttaaaacaattaattgaatagtgcattcttttttgatcgaactaaaattccaaatttctacaggtacgtttcacactatccactacacttcactgatgtaactttccagattgttacagtcaagataaagttttatatatgctttggtatctaggaaggcactttaatttttctttctgtttcaaaatattgtaaattattcttacrtgtttccttttccaaattatttaggatcagtttgtcaagttacatgaaatattttcatgagatttgcattagtcttgcattgcatgtatacatatttatttgaaagataattacatctttatggtattattctagtaaagaacacattacttctattttttcaatctctccagattcatcaataaagtccactagactcaaaggtttatgcttttctttgaaattttgttgttacactgagtgtaattaattttctatattttagaaaattaatattgatgatttaattttgtgtccagattccatataaaactctcttatgagttttccagttttagat

SEQ ID NO: 179934 - DNA, 608 bp, Homo sapiens
cttcatgatcttgaaatgtaaaataatttcttaaataactatttaaaaacgcagccatgaaggaaaagaatgaagaatgwtacatttgcgtacatgaaattaaagacaaaactcaaaatgactcaagacacactaagtaaatgaaaagccaagttttgaattggaggaaatgtttgcaccctatataaattaaatactatttacttctcagaatacataaagaaacctctgcaaatgaataagaacaaaaagcacaattaaataacaatgggacaatgactttatgagccaagggtacatccagaaaattcacaaaagagaaaaatctgtttaataatatataaaatgatcatcaactttactcacagggtaaagccaagtcaaacctagagagagaattgtaagtttcatgcgtaaacaacatggacttcagaatcagaccccgtgggtgcagattctggttctatctctgactacctgagtgacctgaacctgggaaagtgattttacatctttgggtctgctctttcacctgtaaagtggagacaaaaataatactttcctacatgattaagtaagctttagaatatattagctgtttagaacca

SEQ ID NO: 179935 - DNA, 608 bp, Homo sapiens
ggcacatggtgggtacaaaattctcagctgaattcattgatctcttcttcaaagagggcttccttaatcttctatcttgcactgcaagaccagttagttttcaagacacaaatgttacattctattgtcattaagcatttttttcttcctcccagtgaatagaaacaaatagaataaggcatttactttggtagtatctagtactctctttctgaattgtctttcactttgatattattgcttctctgcctgagtaactctatctaattctctgttgccctgccaataaacaggaaattatttttttcatcamttatttatccttaatgtaagttgctttgcttagatatttgcagtttaatcctttagtcattattgggaatgaaaatcatagattcctttgatgggggcttttggttaaagtatagcaaaatattgacagaaagggtaaaaaaaacaacatttatttatatactatgttgtattagggtgttgaatttcatgcttgcttaggatcacattcagccataaaggtaactaaagagatgctgcatctcctccaccactcccggcttcatataaacacatacataccagcccttcacact

SEQ ID NO: 179936 - DNA, 490 bp, Homo sapiens
ggattgctgggttgaatgggacttcacgttcttcactaaatctgcgtactgctttccgcagtggatgaataacttatattcccaccaagagtgtataagtgttctttctccacagccttactgacacctgtttttttttttttttttttttttaaaaaaacccaatctgactggggkgaaatggtatttcattggggctttcatttgcatttctctgatgatcagggatgttaaccctgtttttaatacatttgtgggccactggcatgtccttgtttgaaaaatgtctgttcttgttctttgcccattttttaaagaaattatttctttttttgttggtggatttctttacctcccttataaattctggatattggacctttctcaaatgcatagtttgggaattgtttcacccattctgtaggtggtctgctcacactgtggatcatttctcttgctgaataaaagctcttttcatttaattaggtat

SEQ ID NO: 179937 - DNA, 490 bp, Homo sapiens
ggattgctgggttgaatgggacttcacgttcttcactaaatctgcgtactgctttccgcagtggatgaataacttatattcccaccaagagtgtataagtgttctttctccacagccttactgacacctgtttttttttttttttttttttttaaaaaaacccaatctgactggggggaaatggtatttcattggggctttcatttgcatttctctgatgatcagggatgttaaccctgtttttaatacatttgtkggccactggcatgtccttgtttgaaaaatgtctgttcttgttctttgcccattttttaaagaaattatttctttttttgttggtggatttctttacctcccttataaattctggatattggacctttctcaaatgcatagtttgggaattgtttcacccattctgtaggtggtctgctcacactgtggatcatttctcttgctgaataaaagctcttttcatttaattaggtat

SEQ ID NO: 179938 - DNA, 341 bp, Homo sapiens
attttgtgtgtatgtgttttaaaattttttaaacagtaaagccaagtgagaactgcaagaagtcatatttttgtttggtaagtgcaaattttatctcatacattagctattttactcagcttaaataaagttcacatttaatattctctcaaaatatttgttctaaaattaaagaatgaattgagcaagtatcattattatttcatgagacttacttactgaaaataattttktcagacaaagaatgggagtgtttaaaaaatgatcttcatcaatgttttaagtactctatgtacaccactaagagaactttggtccaaatcccagcctagctacttaac

SEQ ID NO: 179939 - DNA, 548 bp, Homo sapiens
tcatacatttattgtttattattcaggatattttaattcattatattatgactgtttatattttctaactgttactggtacagagaaaagttgctgattttttcagtttcattatcttcccggacatttaaatgagattttcttattttttgtttttcagtttatgatttgcaaatagtcatgctttctctcatagttgtaacgcttatatctgtttaatgtcttgttgttttgtaaacctgaaataacatttttcgattttaattttgatacaggtgccttcagttactcaccataaataaaatgttgtctaattgagtatgataggcttccttaccctaaatattatttatttaaagagataayttattcttgattttctaattgggtggtattgaaacctatcatataaattttcaattctgtgaagatgttctttttctaatttttccaattgataaaatatttattctttagagattctaacattaatcaattttatatttctgagatgcatcattgctaggtttgttaatattgtttttaat

SEQ ID NO: 179940 - DNA, 444 bp, Homo sapiens
ttatttcttggaataaattctcagaactagtatgactggatgaaatagacataaacacataaaaaaactagcgaggattttgtttgaccatgtataatttaatttcttccttcatcatgatgtatccagaaaatgtatcctgtacaatttctgctttgaaatttatagaaggtttcttggttaccttataaccagaatgtgtactgtacaatgaagagaattttatcctttttttctttgctgtatcatagtaactagaagaaagcctggcacacagcagacaaccaatgtattgagtgacttttaaaacatattcagtggttcactggaataaaaaatttatggtatctctctgtagggtgctaagttcaatatrctatagctattaactcaactttattaattctgttcttcaaattctctataagtttcctaatttctatc

SEQ ID NO: 179941 - DNA, 598 bp, Homo sapiens
aatttctgctttgaaatttatagaaggtttcttggttaccttataaccagaatgtgtactgtacaatgaagagaattttatcctttttttctttgctgtatcatagtaactagaagaaagcctggcacacagcagacaaccaatgtattgagtgacttttaaaacatattcagtggttcactggaataaaaaatttatggtatctctctgtagggtgctaagttcaatatactatagctattaactcaactttattaattctgttcttcaaattctctataagtttcctaatttctatcttttaaattagctataaatgggtagtgatttctccagttgtatggtgttcaatttttctcatrcttctaacagtctgtgatccatgtattttgattataccttttatggcatatgaaggaacatgaatattatacctttctaagaatattaaatgatcgactttttttcttaacttctttggcaccgaataatatagcagtcactcctttttacttttggatttgccttatgcttttgcctttcatttaaaacttttctttccaaggagtgtccatcttcatatattactcttgtatca

SEQ ID NO: 179942 - DNA, 504 bp, Homo sapiens
gtttgcctgctaggaacaaaggaaagaaaagaggataacgaatccaaaagtgtcaaagagggtatgatgaaagaactgacwgaccagcctgcccttagctacttgtggattgaggtgagagcttagcacagttcctgccacagtgtctgacacacaaaatacactcaacaaatgtggaataaatgaatgaacaagtgaacgaatgaaagaacaagcacatgctggaaattcaggctggttatggaagaaatgaagtggactaggaaggattcaagaaggaggactgtgtcctgaggcagaaggacaggttttatggaaatggaaaagtttgagaagagaaaaaaatacaaggttgccggcagacaaagtcaattaaaaattcagattttcagaggagcagttaaaagtgatacaaaagtccaaaatatacttctgtaaatggaattggtaaaatgaaatggaggtaaatgtccgtgtaagggcaggccatttgatggctcatca

SEQ ID NO: 179943 - DNA, 457 bp, Homo sapiens
aattgttcattaagcctcctgcaagcaatagtcactgtgctgtgccaacattcatcaagttaagggccaggaaatgtgattgccaggggcagatctcacagagacagcacaaaagtcagctcgtctcaattacaacgcggcaatggccttcttccttgaaactgcattgtcagaagggaatctgagaggcagttcagaactttttcactgggctcactctcaacaggaatacctgataggaaacaaactaggagacttattttcctgttctcaattttcacaagaatgtttggactatagtgcctgtgactgactcaagaaattgaagaagcaagaattaagaggaacagtgaatatttggtgctacatggaaggagaatattgaagtgggwacacttaacagctttttaggaagaaagttaaaatcttagctgtatctcttgctttacatttctag

SEQ ID NO: 179944 - DNA, 456 bp, Homo sapiens
tttatttggcaataagctaatcttttttttttttttttttttttgagacagagtctctctgcratgcccaggctggagtgcaatggcacaatttcggctcactgcaacctctgcttcctgggttcaagcacttctcctgcctcagcctaccgagtagctgggattacaggcatgtgccaccatgcccggctaattttgtatttttagtaaagacggggtttctccgtgttggccaggctggtttcaaactcccaacctcaggtgatctgcccgctttggcctcccaaaattgctgggattatagatgtaagccaccgtgcccggcccaatatgctgatatttaacctagaaataatactgaagtgtttcatatatactgatgtattaggtatggataaagctcctgtgaaaagagactctccaaaaactacagaggctcaaataggaaaagttgaa

SEQ ID NO: 179945 - DNA, 456 bp, Homo sapiens
tttatttggcaataagctaatcttttttttttttttttttttttgagacagagtctctctgcgatgcccaggctggagtgcaatggcacaatttcrgctcactgcaacctctgcttcctgggttcaagcacttctcctgcctcagcctaccgagtagctgggattacaggcatgtgccaccatgcccggctaattttgtatttttagtaaagacggggtttctccgtgttggccaggctggtttcaaactcccaacctcaggtgatctgcccgctttggcctcccaaaattgctgggattatagatgtaagccaccgtgcccggcccaatatgctgatatttaacctagaaataatactgaagtgtttcatatatactgatgtattaggtatggataaagctcctgtgaaaagagactctccaaaaactacagaggctcaaataggaaaagttgaa

SEQ ID NO: 179946 - DNA, 456 bp, Homo sapiens
tttatttggcaataagctaatcttttttttttttttttttttttgagacagagtctctctgcgatgcccaggctggagtgcaatggcacaatttcggctcactgcaacctctgcttcctgggttcaagcacttctcctgcctcagcctaccgagtagctgggattacaggcatgtgccaccatgcccggctaattttgtatttttagtaragacggggtttctccgtgttggccaggctggtttcaaactcccaacctcaggtgatctgcccgctttggcctcccaaaattgctgggattatagatgtaagccaccgtgcccggcccaatatgctgatatttaacctagaaataatactgaagtgtttcatatatactgatgtattaggtatggataaagctcctgtgaaaagagactctccaaaaactacagaggctcaaataggaaaagttgaa

SEQ ID NO: 179947 - DNA, 436 bp, Homo sapiens
actcactttatttggcaataagctaatcttttttttttttttttttttttgagacagagtctctctgcgatgcccaggctggagtgcaatggcacaatttcggctcactgcaacctctgcttcctgggttcaagcacttctcctgcctcagcctaccgagtagctgggattacaggcatgtgccaccatgcccggctaattttgtatttttagtaaagacggggtttctccgtgttggccaggctggtttcaaactcccaacctcaggtgatctgcccgctttggcctcccaaaattgctgggattatagatgtaagccaccgtgcccggcccaatatgctgatatttaacctaraaataatactgaagtgtttcatatatactgatgtattaggtatggataaagctcctgtgaaaagagactctccaaaaacta

SEQ ID NO: 179948 - DNA, 366 bp, Homo sapiens
aatgactttatctgtatggtggaggctgccttgccagctccatggccataattttctattaaaaagcaaaaaccttgacttggtaatttgcattcgttagttttgcttacatagcattagccagagcaaacctcaaggaaggttgatttggccatgttccctaataaaactagagttctactataaaaagaaaaaggcaagcataaatacaggagggmagttaatggcttttgccataagtgctgaccagctctactgggcagataggtttgaaccatggcataagatctaatgttatcgctaaggagaggtgtaagaaatgatgagtggagggcgggatgcattcagggacttcagtgcagacac

SEQ ID NO: 179949 - DNA, 366 bp, Homo sapiens
aatgactttatctgtatggtggaggctgccttgccagctccatggccataattttctattaaaaagcaaaaaccttgacttggtaatttgcattcgttagttttgcttacatagcattagccagagcaaacctcaaggaaggttgatttggccatgttccctaataaaactagagttctactataaaaagaaaaaggcaagcataaatacaggagggcarttaatggcttttgccataagtgctgaccagctctactgggcagataggtttgaaccatggcataagatctaatgttatcgctaaggagaggtgtaagaaatgatgagtggagggcgggatgcattcagggacttcagtgcagacac

SEQ ID NO: 179950 - DNA, 366 bp, Homo sapiens
aatgactttatctgtatggtggaggctgccttgccagctccatggccataattttctattaaaaagcaaaaaccttgacttggtaatttgcattcgttagttttgcttacatagcattagccagagcaaacctcaaggaaggttgatttggccatgttccctaataaaactagagttctactataaaaagaaaaaggcaagcataaatacaggagggcagttaatggcttttgccataagtgctgaccagctctactgggcagataggtttgaaccatggcataagatctaatgttatcrctaaggagaggtgtaagaaatgatgagtggagggcgggatgcattcagggacttcagtgcagacac

SEQ ID NO: 179951 - DNA, 590 bp, Homo sapiens
agtctaatgggaggaatccgtggaattttcttttgcatgcttgtgtgagtgtcccaataagccttgcscattctttgggagttagaatattgggacagattgggaaggtaccagggatgtattgcaaagtacaactaagtccatctaagggatctaatatgcgccaggagtgagaagagaagctgtccaaaaaaggccagttatcttgggttccatgagattctttgcgtgtctcaaaatctctggctgtgaaagctatccctccttcatagcatttatcttaaataatagcttgctttttttctaaattctctcagaatttttgatgagccatttggaacctgactgatgtatatctctgtgctatatataaagaaaggatttgtccaaaagaaaaaaaaaaaatcacacaaacaggactataaaaacgacactcaagaaaaaaaaaactgcttgaaagagcagttttcaaacaccttaagtactttaaaacatgattttatcaattttccttcatgaaatacattaaagttatgaccaatcatctaaaatgatgtgtctatatgttttctctaattgtgcacaaagat

SEQ ID NO: 179952 - DNA, 590 bp, Homo sapiens
agtctaatgggaggaatccgtggaattttcttttgcatgcttgtgtgagtgtcccaataagccttgcgcattctttgggagttagaatattgggacagattgggaaggtaccagggatgtattgcaaagtacaactaagtccatctaagggatctaatatgcrccaggagtgagaagagaagctgtccaaaaaaggccagttatcttgggttccatgagattctttgcgtgtctcaaaatctctggctgtgaaagctatccctccttcatagcatttatcttaaataatagcttgctttttttctaaattctctcagaatttttgatgagccatttggaacctgactgatgtatatctctgtgctatatataaagaaaggatttgtccaaaagaaaaaaaaaaaatcacacaaacaggactataaaaacgacactcaagaaaaaaaaaactgcttgaaagagcagttttcaaacaccttaagtactttaaaacatgattttatcaattttccttcatgaaatacattaaagttatgaccaatcatctaaaatgatgtgtctatatgttttctctaattgtgcacaaagat

SEQ ID NO: 179953 - DNA, 590 bp, Homo sapiens
agtctaatgggaggaatccgtggaattttcttttgcatgcttgtgtgagtgtcccaataagccttgcgcattctttgggagttagaatattgggacagattgggaaggtaccagggatgtattgcaaagtacaactaagtccatctaagggatctaatatgcgccaggagtgagaagagaagctgtccaaaaaaggccagttatcttgggttccatgagattctttgcgtgtctcaaaatctctggctgtgaaagctatccctccttcatagcatttatcttaaataatagcttgctttttttctaaattctctcagaatttttgatgagccatttggaacctgactgatgtatatctctgtgctatatataaagaaaggatttgtccaaaagaaaaaaaaaaaatcacacaaacaggactataaaaacgacactcaagaaaaaaaaaactgcttgaaagagcagttttcaaacaccttaartactttaaaacatgattttatcaattttccttcatgaaatacattaaagttatgaccaatcatctaaaatgatgtgtctatatgttttctctaattgtgcacaaagat

SEQ ID NO: 179954 - DNA, 567 bp, Homo sapiens
tgttcacaaaactttagtcaaagacattcaactgagatccaggagccctttctagattacacccctcatatctaccatcatcaaaatacgaaacagccaaacaacaacaaagccccaacaaacaaaatatcccaccccggcttcatgttctccatatttcaggaaacagtttttagcctttataaattggagaaacaactttggtcattaccttttaactttattgtttaaaaaattagaattatagaattcatgattcgggggttcatgartcatctgatttttagagaaaatttgcatgtttatgcattttgtctggatagagcaccaatggttttcatgatttctgaaaggtgtttacatctgaaaagaacactgatccagtccaactgtacatctgatacttgatcttttatcaatacacctgctgaaaggctttctagtctatgcatctaacctcttctgattaggaactcactactgtaattcctaaggccgcctggtagagagttcttgacactgaatgtaggtttgttttttgggattttcattcttaactgagtagaa

SEQ ID NO: 179955 - DNA, 319 bp, Homo sapiens
tcttcattaatgttagcagccatgacttaagatctcaatttcatttgagtccacattcatttattcaaaaacatttactaagaacttggccaggcatggtggctcacacctgtaatccccgcattttgggaggccaaggcaggtggattgcttaagctcaggagttcgagactagcctgggcaacatagcaagaccccayatccacaaaaaatacaaaaaaaaaatagccaggtatggtggtgcactcctgtggtcacagctacttgcgaggctgaggtgggaagatcacctgagcctgggggacagaggttgaagtga

SEQ ID NO: 179956 - DNA, 601 bp, Homo sapiens
atttgagagcttgaactttccccttcattacgctgctttgtctctcaaatccaattatttgaaccactgaagtaattactatatttttaatagtagcactcattgacrcttgaatgcaactcatcagtaatacatgaaatctatttagggagtagcaaacagaatttagaggatggatagagcagaatagaagtaaatatcagattgcattatatattaatacttttcaggatatattatatggttatacatatgggtgtactgggttattatgtaaaaatatatgttttctgtcagctgcagccaataaaatgtaagagtctttcattatagggtagtttagtgattgtgtgtagcattcaagtcaggtggcctaagctgaaatgtcaactcccctcctattagctgtgttttatatgaccagctatttaatccaattatgtctcaacactgtcatttacaaaataagatagtaatatgtctacttcttgatattgttctgaggattaaataaataggacatagaaaattgtgacccacgttattagtaagtgttagcctttcagtgggaatgtccttcttccatcatgcaatttttaaa

SEQ ID NO: 179957 - DNA, 601 bp, Homo sapiens
atttgagagcttgaactttccccttcattacgctgctttgtctctcaaatccaattatttgaaccactgaagtaattactatatttttaatagtagcactcattgacgcttgaatgcaactcatcagtaatacatgaaatctatttagggagtagcaaacagaatttagaggatggatagagcagaatagaagtaaatatcagattgcattatatattaatacttttcaggatatattatatggttatacatatgggtgtactgggttattatgtaaaaatatatgttttctgtcagctgcagccaataaaatgtaagagtctttcattatagggtagtttagtgattgtgtgtagcattcaagtcaggtggcctaagctgaaatgtcaactcccctcctattagctgtgttttatatgaccagctatttaatccaattatgtctcaacactgtcatttacaaaataagatagtaatatgtctacttctygatattgttctgaggattaaataaataggacatagaaaattgtgacccacgttattagtaagtgttagcctttcagtgggaatgtccttcttccatcatgcaatttttaaa

SEQ ID NO: 179958 - DNA, 563 bp, Homo sapiens
ccttgcttcccctttgccttcagccatgattgtaaatttcctgagtcctgctcccagtcatgcagaaccatgagtcaattaagtctatttataaattacccagtctcaggtagttcttcatagcagtgtgaaaatggactaataaatccctggaattaatacttgtgtcctttttccatttccttcatttttgacatgcttattatcagttcaattcctcattggctatttaaatatctgaagacatttaggtattacattaaattaatctttytgagtaaatgttttcagagtcttctgaatgcctccagaaaattgataccaaggagcggggcattgctataaagatatttgaaaatatggaagtgacttcggaactgggtgacaggcagcgattggaagagtctggagggctgagaaaaagacaggaagatgaggaaaattttggaacctcctagagacttgttagaatagttgtgaccaaaatgttgatagtgatatggattgcaaagtccagcctgaagaggtctcacatggaaattaggaacttcttgagaactctg

SEQ ID NO: 179959 - DNA, 402 bp, Homo sapiens
cgtaaatgattccatgtgtataaatattgaaaacatacatgtatacatgcatgcatgtatacatacatacactcagaagagtttggaaaaggaagacttgctgagtcttctggcctccatctttctcccatgctggatgctccctgccctcaaacattggactccaagttcttcggcttttggactcttgacaccagtggtttgccaggggctcttgagcctttggccacagactaaaggctgcactgtcagcttccctacttttgaggttttgggactcggactggcttccctgctcttcagcttgcagacagcctattgtgggacttcaacttccgattgtgtgagtcaatacttcttaatgagctcygcttcatatacacatctatcctgttagttctg

SEQ ID NO: 179960 - DNA, 303 bp, Homo sapiens
ttacataatgagccaaagaagtgtccaggctgctactgagatsagtgtctaacttactgttttctgagatcagtgtctaacacatatttttttccactgtaacctggagacctgaggtccgactagtgaaacctggagaatgtgggcatcaatcccactacctctcacatgctaagcgagcactccaccacttgagctacttcttcatctcacagcatcttttttcatccttagtgggcagtctagaacacacgcgacttcaaggccttcactgcgaaagcagggctccactaagagcagatc

SEQ ID NO: 179961 - DNA, 303 bp, Homo sapiens
ttacataatgagccaaagaagtgtccaggctgctactgagatgagtgtctaacytactgttttctgagatcagtgtctaacacatatttttttccactgtaacctggagacctgaggtccgactagtgaaacctggagaatgtgggcatcaatcccactacctctcacatgctaagcgagcactccaccacttgagctacttcttcatctcacagcatcttttttcatccttagtgggcagtctagaacacacgcgacttcaaggccttcactgcgaaagcagggctccactaagagcagatc

SEQ ID NO: 179962 - DNA, 303 bp, Homo sapiens
ttacataatgagccaaagaagtgtccaggctgctactgagatgagtgtctaacttactgttttctgagatcagtgtctaacacatatttttttccactgtaacctggagacctgaggtccgactagtgaaacctggagaatgtgggcatcaatcccactacctctcacatgctaagcgagcactcsaccacttgagctacttcttcatctcacagcatcttttttcatccttagtgggcagtctagaacacacgcgacttcaaggccttcactgcgaaagcagggctccactaagagcagatc

SEQ ID NO: 179963 - DNA, 303 bp, Homo sapiens
ttacataatgagccaaagaagtgtccaggctgctactgagatgagtgtctaacttactgttttctgagatcagtgtctaacacatatttttttccactgtaacctggagacctgaggtccgactagtgaaacctggagaatgtgggcatcaatcccactacctctcacatgctaagcgagcactccaccacttgagctacttcttcatctcacagcatcttttttcatccttagtgggcagtctagaacacacgcgacttcaaggccttcacygcgaaagcagggctccactaagagcagatc

SEQ ID NO: 179964 - DNA, 277 bp, Homo sapiens
cactatactgaatgccagcaggaagctgtcaycagtcctgtattgttgctgctcctatgtcttgaaccaaagacaccgagagcagtgtcttgctctcagacactgactcgggtttgggtacctaaataataaagcttggagaatgtgggcattgatcccactacctcttgcatgctaagcaagcgctctaccacttgagctaattccccatatcagggaagctttgtttatccttagtgggtggcctggaacacaggtgatttcagggccttcagcg

SEQ ID NO: 179965 - DNA, 558 bp, Homo sapiens
gcttggcacttctccttgctgccaccatgtgaagaagggcatggttgcttccccttctgccatgattctaactttcctgaggcctccctagccatcctgaactgtgagtcaattaaacctctttcctttataagttacccagtctcagatatgtctttattaacagcatgagaawagacttacacaggtccaatgcttaactctcaaattttatatccctctcctcctacatttgaactcatactaaactatttttaacttccccctaaaaatgaaatgtgtatgtctcagtttaatcacagtcctgtgaattaatggctccaatcctctcttcccttaactttcacaaagataactactacatattcttcaaaaacctatttatgacatccattgtctataaagctctccccagcctgaagcctatgttagatttccttactgtgaggtccatgcaactgtccatagtgctttccaggctgtattgccatgtttccatatggaaattccttcctggcatttcttgggaaatttataattttccaaatcgtgacaaaa

SEQ ID NO: 179966 - DNA, 558 bp, Homo sapiens
gcttggcacttctccttgctgccaccatgtgaagaagggcatggttgcttccccttctgccatgattctaactttcctgaggcctccctagccatcctgaactgtgagtcaattaaacctctttcctttataagttacccagtctcagatatgtctttattaacagcatgagaatagacttacacaggtccaatgcttaactctcaaattttatatccctctcctcctacatttgaactcatactaaactatttttaacttccccctaaaaatgaaatktgtatgtctcagtttaatcacagtcctgtgaattaatggctccaatcctctcttcccttaactttcacaaagataactactacatattcttcaaaaacctatttatgacatccattgtctataaagctctccccagcctgaagcctatgttagatttccttactgtgaggtccatgcaactgtccatagtgctttccaggctgtattgccatgtttccatatggaaattccttcctggcatttcttgggaaatttataattttccaaatcgtgacaaaa

SEQ ID NO: 179967 - DNA, 558 bp, Homo sapiens
gcttggcacttctccttgctgccaccatgtgaagaagggcatggttgcttccccttctgccatgattctaactttcctgaggcctccctagccatcctgaactgtgagtcaattaaacctctttcctttataagttacccagtctcagatatgtctttattaacagcatgagaatagacttacacaggtccaatgcttaactctcaaattttatatccctctcctcctacatttgaactcatactaaactatttttaacttccccctaaaaatgaaatgtgtatgtctcagtttaatcacagtcctgtgaattaatgrctccaatcctctcttcccttaactttcacaaagataactactacatattcttcaaaaacctatttatgacatccattgtctataaagctctccccagcctgaagcctatgttagatttccttactgtgaggtccatgcaactgtccatagtgctttccaggctgtattgccatgtttccatatggaaattccttcctggcatttcttgggaaatttataattttccaaatcgtgacaaaa

SEQ ID NO: 179968 - DNA, 558 bp, Homo sapiens
gcttggcacttctccttgctgccaccatgtgaagaagggcatggttgcttccccttctgccatgattctaactttcctgaggcctccctagccatcctgaactgtgagtcaattaaacctctttcctttataagttacccagtctcagatatgtctttattaacagcatgagaatagacttacacaggtccaatgcttaactctcaaattttatatccctctcctcctacatttgaactcatactaaactatttttaacttccccctaaaaatgaaatgtgtatgtctcagtttaatcacagtcctgtgaattaatggctccaatcctctcttcccttaactttcacaaagataactactacayattcttcaaaaacctatttatgacatccattgtctataaagctctccccagcctgaagcctatgttagatttccttactgtgaggtccatgcaactgtccatagtgctttccaggctgtattgccatgtttccatatggaaattccttcctggcatttcttgggaaatttataattttccaaatcgtgacaaaa

SEQ ID NO: 179969 - DNA, 546 bp, Homo sapiens
cagcagttcccaaccattttggcaccagggactagtttcgtggaagacaaattttccacagatggtggagggggatggttttaggataattaaagcatattacatttattgtgcactttacttctattattattacattgtagtatataattaaataattatagaactcmccataatgtaggatcagtgggagctctaagcttgtctttgtgcaactagactagactcactgggcaggatttacataaaatgtctcattaacttagatacagagtctatgagtataaaaggtacagcacagtgaggcttacaaatgtaattcaaatactcatctgggagtaatgggagacagtgacagatcatcagacattagcttcccatgaggagcatgcaatctagatgtctctcatctgcaattcacaataaggttcgcggtcctatgagaatctaatgccactgctgatctgacaggaggtggacctcaagcagtaaggcgggtgatggggagcagctgtaaatacagatggaagcttcactcacttgccc

SEQ ID NO: 179970 - DNA, 532 bp, Homo sapiens
tacatgcccaatgaagaaagaaccaaaaaccccaacatccattactatctacatttgaacctctgaatargtggaatagttcttctatttatcagacattaattcagaatctcttttgtgtctgccacccaggttcaaaactcccaattgcccttgacttctcctccctcaaatctttatacttagggtttttatagatactgtagagccttcttatacaacctctccagaatattcttttctcatttgtctgttctttcatccattctacaacatttatttagagtgtattttgaattaggcgctgatgatgaagaaagactcatgctgttgacctcaggacctgacagaataaatgaggatgaacctggatccttaatttttttaataatttatttcgctttctctccaattccaacctctttaaacttcacaactaaaatcctcttcctaaaatgttgcttcgattacataagccacccgcctggagttaatcctctcctcaatatatctgcaaatgtctaggctttcc

SEQ ID NO: 179971 - DNA, 211 bp, Homo sapiens
agatctcattaggaaagcactagttctaatctgatttcactctcccattasatgaaagagaaggaagtaccgtccctaattagcagttacctcaaatgctctgttgaatgcatcactttttaagaacacaaacctggaaataagcccaagtatcttttcactgattgatccttcaagtaacttatctttatctaatatctgtgttactaat

SEQ ID NO: 179972 - DNA, 518 bp, Homo sapiens
tacaactgctcttttctccctgtttctgcctgcagcttggtcctaaacstcagacaatcgtgaaatgtgcagggcagagccacctgggtaaacacagcctcggctttctgctcaggggactgaaaccaggatgtgtcaagtaactagaatgtgcctggacagatactgtagaaagcaaacccataaagttgttcatgagcttgtggacacacctgccagctgtgaataagtggctctaatcccaaacaacttacctacaaagagcctgagagctgaactgcgcaatggcccactttccagtcctcactgaagttgcacacactccggaaatctctgaacagtggcgtaaaggctttgcaaatagagttatctttgaaacaacaacacgtggaaggctggttggtacttggaacttgaatacaaggcaattttgtgcctgcaaaaacaaaaatagcaatattattcttaagatttcaacaaaacacagtgtctcatcacataatccaaagaagtccagg

SEQ ID NO: 179973 - DNA, 518 bp, Homo sapiens
tacaactgctcttttctccctgtttctgcctgcagcttggtcctaaacctcagacaatcgtgaaaygtgcagggcagagccacctgggtaaacacagcctcggctttctgctcaggggactgaaaccaggatgtgtcaagtaactagaatgtgcctggacagatactgtagaaagcaaacccataaagttgttcatgagcttgtggacacacctgccagctgtgaataagtggctctaatcccaaacaacttacctacaaagagcctgagagctgaactgcgcaatggcccactttccagtcctcactgaagttgcacacactccggaaatctctgaacagtggcgtaaaggctttgcaaatagagttatctttgaaacaacaacacgtggaaggctggttggtacttggaacttgaatacaaggcaattttgtgcctgcaaaaacaaaaatagcaatattattcttaagatttcaacaaaacacagtgtctcatcacataatccaaagaagtccagg

SEQ ID NO: 179974 - DNA, 518 bp, Homo sapiens
tacaactgctcttttctccctgtttctgcctgcagcttggtcctaaacctcagacaatcgtgaaatgtgcagggcagagccacctgggtaaacacagcctcggctttctgctcaggggactgaaaccaggatgtgtcaagtaactagaatgtgcctggacagatactgtagaaagcaaacccataaagttgttcatgagcttgtggacacacctgccagctgtgaataagtggctctaatcccaaacarcttacctacaaagagcctgagagctgaactgcgcaatggcccactttccagtcctcactgaagttgcacacactccggaaatctctgaacagtggcgtaaaggctttgcaaatagagttatctttgaaacaacaacacgtggaaggctggttggtacttggaacttgaatacaaggcaattttgtgcctgcaaaaacaaaaatagcaatattattcttaagatttcaacaaaacacagtgtctcatcacataatccaaagaagtccagg

SEQ ID NO: 179975 - DNA, 261 bp, Homo sapiens
attcagtcagactacatcaagtaaactccctaagtctcctagtataattcatggcacaaaaaattggggaaaaaacagggaggatatgattataagttcagtttatgttttttgttgagtgaatgtctccagtcatagagatgcaagtgtagatacacagtaagagtagtatgaatgggagacaccttggaaggctatttcttccttccttcattcagttggtcactcartgaactatcatgaattgagcaccgcctctgt

SEQ ID NO: 179976 - DNA, 334 bp, Homo sapiens
agatgactgggccacaagaggaaaaaaagcagcaagacagttacaatggtttctggtcccacttttataaacacacacacacacacacacacacacacacacacacacacacacaaaatcatttaatcatttttaagtatttaatcattttttaaaaatctgtgatgctttacctgggcakgtctaggcaggtcctcctttgctaggacgtgcccttttctgtcccggaatactctaaacttggcattttggcagcgtgaagttttcccgttgtgactttctccttgttcccttttctcctccttctttgcagacaatgagtagccactgctgt

SEQ ID NO: 179977 - DNA, 334 bp, Homo sapiens
agatgactgggccacaagaggaaaaaaagcagcaagacagttacaatggtttctggtcccacttttataaacacacacacacacacacacacacacacacacacacacacacacaaaatcatttaatcatttttaagtatttaatcattttttaaaaatctgtgatgctttacctgggcatgtctaggcaggtcctcctttgctrggacgtgcccttttctgtcccggaatactctaaacttggcattttggcagcgtgaagttttcccgttgtgactttctccttgttcccttttctcctccttctttgcagacaatgagtagccactgctgt

SEQ ID NO: 179978 - DNA, 334 bp, Homo sapiens
agatgactgggccacaagaggaaaaaaagcagcaagacagttacaatggtttctggtcccacttttataaacacacacacacacacacacacacacacacacacacacacacacaaaatcatttaatcatttttaagtatttaatcattttttaaaaatctgtgatgctttacctgggcatgtctaggcaggtcctcctttgctaggacgtgcccttttctgtcccggaatactctaaacttgrcattttggcagcgtgaagttttcccgttgtgactttctccttgttcccttttctcctccttctttgcagacaatgagtagccactgctgt

SEQ ID NO: 179979 - DNA, 334 bp, Homo sapiens
agatgactgggccacaagaggaaaaaaagcagcaagacagttacaatggtttctggtcccacttttataaacacacacacacacacacacacacacacacacacacacacacacaaaatcatttaatcatttttaagtatttaatcattttttaaaaatctgtgatgctttacctgggcatgtctaggcaggtcctcctttgctaggacgtgcccttttctgtcccggaatactctaaacttggcattttggcagcgtgaagttttcccgttgtgactttctccttgttcccttttctcctccttctttgcagasaatgagtagccactgctgt

SEQ ID NO: 179980 - DNA, 277 bp, Homo sapiens
ctttcctgctgaaggccctgaaatcacctgtgttccaggccacctgctaacaataaataatgctsccctgatgtggggaattagctcaagtggtagagcgcttgcttagcacgcaagaggtagtgggatcgatgcccacattctccaagctttattatttagacatcgtgtctccaaacactcaggtctccaaacccaagttagtgtctgagaacaggatgctgctttggttcaagacgtaggagcagcaataatagagggctggtgatggctccct

SEQ ID NO: 179981 - DNA, 390 bp, Homo sapiens
tctttgaggagctgtgaaaccaagggacatatacaactgctcttttctccctgtttctacctgcagctttgtcctaaatgtgagacaattatgaaaagtgcagsgcagagccacttgggtaaatacagccccggctttctgctcaggggacagagtttgaggcactgcagaggaaccggccaaagtatgagacccatatattgagagtaacagagtgtaaagttcaaaaaaatcaaaatatttaaagatttatcatgggtcttgatgacatgatggaatctctctactctctggacttattatgtgtggtaataaatttactttttaaaagccagttgagtgtttttaatgttgtggagctattgctaagagtttcctgagttttttcca

SEQ ID NO: 179982 - DNA, 390 bp, Homo sapiens
tctttgaggagctgtgaaaccaagggacatatacaactgctcttttctccctgtttctacctgcagctttgtcctaaatgtgagacaattatgaaaagtgcagcgcagagccacttgggtaaatacagccccggctttctgctcaggggacagagtttgaggcactgcagaggaaccrgccaaagtatgagacccatatattgagagtaacagagtgtaaagttcaaaaaaatcaaaatatttaaagatttatcatgggtcttgatgacatgatggaatctctctactctctggacttattatgtgtggtaataaatttactttttaaaagccagttgagtgtttttaatgttgtggagctattgctaagagtttcctgagttttttcca

SEQ ID NO: 179983 - DNA, 390 bp, Homo sapiens
tctttgaggagctgtgaaaccaagggacatatacaactgctcttttctccctgtttctacctgcagctttgtcctaaatgtgagacaattatgaaaagtgcagcgcagagccacttgggtaaatacagccccggctttctgctcaggggacagagtttgaggcactgcagaggaaccggccaaagtatgagacccatatattgagagtaacagagtgtaaagttcaaaaaaatcaaaatrtttaaagatttatcatgggtcttgatgacatgatggaatctctctactctctggacttattatgtgtggtaataaatttactttttaaaagccagttgagtgtttttaatgttgtggagctattgctaagagtttcctgagttttttcca

SEQ ID NO: 179984 - DNA, 390 bp, Homo sapiens
tctttgaggagctgtgaaaccaagggacatatacaactgctcttttctccctgtttctacctgcagctttgtcctaaatgtgagacaattatgaaaagtgcagcgcagagccacttgggtaaatacagccccggctttctgctcaggggacagagtttgaggcactgcagaggaaccggccaaagtatgagacccatatattgagagtaacagagtgtaaagttcaaaaaaatcaaaatatttaaagatttatcatgggtcttgatgacatgatggaatctctctactctctggactkattatgtgtggtaataaatttactttttaaaagccagttgagtgtttttaatgttgtggagctattgctaagagtttcctgagttttttcca

SEQ ID NO: 179985 - DNA, 554 bp, Homo sapiens
ttcaatttaagtggagtgtgtgtgtgtgtgtgtgtgtgtgtgtgtgtgtgtgtaaaatatacacggagggaagtagtgattgaaaagcctggatgcttggagatatgttgggagaatattataaaagctaaagactcattgaaaaaattccaggtagaaaagcagcattttagggaaaggtttttagttttaaatgtcaaagaacttgaaaatggaaaaactggatctggggagaaagagaaagaagtcataaagatattaaaggattgagatttatccacattgactgtgtcagttcctgaggtgaacagcatgagtctttctgcagcttcaatccccttcacacttcatggtgaagaaaacatcctccatgaacatcatagcatggataaagaaggaggtgagtaaaacagaagaaaaagattctgcagagtttatgcaggaaggatctacagtatttgtcaagacattgggtggagagatttgagggagaggagacaaaggcactggcaagtcttgagccyggtgtggcagacacagaagagattttgaat

SEQ ID NO: 179986 - DNA, 560 bp, Homo sapiens
cagagcaagtaagtaaagaggaggtttggaattagatatttggtgtatgaatgaatgggctaaagtgcraaagaacaggcagaataactgagctggtacagaggaaaaaaatcacacttaaaatctaaaagtatctgcttctcaatttgggctttcccacttagcagctttgacaccttagaaagaacacttaacttacctgagcttctattacttctaaaaagtgcataaagtgcaggctaagacatagtttttttggcaaaattcagtcagactacatcaagtaaactccctaagtctcctagtataattcatggcacaaaaactggggaaaaaacagggaggatatgtttataagttcagtttgggttttttgttgagtgaatgtctccagtcatagagatgcaagtgtagatacacagtaagagtagtatgaacaggagacaccttggaaggctatttcttccttcattcattcagttggtcactcaatgaactatcatgaattgagcactacctctgtttcttatcaacaaaggagactacggaaaagaagagtg

SEQ ID NO: 179987 - DNA, 355 bp, Homo sapiens
cgtgtaattaattttctgcttctttgaggagctgtgaaaccaagggacataaacaattgctcttttctccctgtttctgcctgtagcttgaatgtgaggcaactgtgaaaagtgcagggcagagccacctgggtaaatacagccctggctttctggtgagaggactgaaaccaggatgtgtcaagtaactagaatgtgcctggacagatactgtagaaagcaaacccataaagttgttcatgagcttgtggaygcacctgccagctgtgaataagtgggtctaatcccaaacaacttacctaaaaagagcctgaggactgaactaaacaatggtccactttccagtcctcactga

SEQ ID NO: 179988 - DNA, 355 bp, Homo sapiens
cgtgtaattaattttctgcttctttgaggagctgtgaaaccaagggacataaacaattgctcttttctccctgtttctgcctgtagcttgaatgtgaggcaactgtgaaaagtgcagggcagagccacctgggtaaatacagccctggctttctggtgagaggactgaaaccaggatgtgtcaagtaactagaatgtgcctggacagatactgtagaaagcaaacccataaagttgttcatgagcttgtggacgcacctgccagctgtgaataagtggstctaatcccaaacaacttacctaaaaagagcctgaggactgaactaaacaatggtccactttccagtcctcactga

SEQ ID NO: 179989 - DNA, 355 bp, Homo sapiens
cgtgtaattaattttctgcttctttgaggagctgtgaaaccaagggacataaacaattgctcttttctccctgtttctgcctgtagcttgaatgtgaggcaactgtgaaaagtgcagggcagagccacctgggtaaatacagccctggctttctggtgagaggactgaaaccaggatgtgtcaagtaactagaatgtgcctggacagatactgtagaaagcaaacccataaagttgttcatgagcttgtggacgcacctgccagctgtgaataagtgggtctaatcccaaacaacttacctaaaaagagcctgaggactgaactraacaatggtccactttccagtcctcactga

SEQ ID NO: 179990 - DNA, 605 bp, Homo sapiens
cagtgtctggcacagagcatctctccagcaaatatgtactgaatgagtagaaaggaactgacggattcagaagagacctgcaagaataatgttcagtatttggcaaatcactgaatgtggtgtttgaaggaggacaatgagtcaaagttgacttggaaatctaggcccaggaggaggttgagaattagatatgtggtatatgaatgaatggactactgtggagaaaaacaggcagagagataatgagcaggagcagagaaaagactcaccttttggaatctaarataaatgtgcttgtcagttcaggctttgccacctagcatctctggcaccttagaaacaataattatctgagcctccagtacatctagaaagtgcacattaggatacatcgttttgttagcgaaattcaactggactacgtaaacgcaagaaatctcgtagtatacttaatagcacacaagaaaaaacaaaggggtaaaaaacaaagagggtgccattataagtattttgtgtttttttttgtagcggcaatgtcttcagtcatgtagatgcaagtggagatatgaaggaagacagtagtatgatcaagagacaggtttgat

SEQ ID NO: 179991 - DNA, 608 bp, Homo sapiens
cgggatttgtaattttaacttttaaaatcaaactctatataagtaaattacattctctaatgaagtctttctctcatacttatttttgatattgcaaattctgactcttactcttccttttctccctctcctgctcctgacttcaccttgtttagttttcttcttttcttgaacacatagattctaaagccatttggtcagggttaggtgggcatccacatctggttgggtgacggggagctgtgatggcccagaattatgagagcccaggcaaaatggaaaacaggttcacatgggagagccacctagcatggagtcagagctgagagaggggaaggacttccatgaagaggatgatctagtgcaagtcatatgaasacaacagattgagagaggtatcaatattcaggccagactcagtgatattgtcagtgtctgagactgttgagtagggccttcataccaggattttctgaccatgatgtgttaagtagaatagctgtgcaagagacatgacagtgtggcaatggcaaattatttacatcagggcaattgatcaaataggtacagatattaagaataatgagagaaggtttctcatttacaaa

SEQ ID NO: 179992 - DNA, 621 bp, Homo sapiens
gtatcagtcatgccagtctgagttcaggcttctgagaggccacccagatagcagtctgctcaattggtacttctactggtattgcacaatccacctaagaggcttaagctcaaaagttcaattattctttctcaagccttgakcatctaaaaggtgctcactgttaatttagtggttttcaaaaacttactgctacacgtactctgacatcattcctagttctttgaagaatgatgttagtattttgataggaattgtattcaatctgtagattgcttctggcagtatggtcattttctcaacattgtttctacccattcatgggcataggatgtgtttccattcatttctgtcatttatgattttttttcagtggtattttgtagtttttcttttagagatctttcacctccttggttaagtatattcctaagtatttttttttcagttgttatagaagagactcagttcttgattttattctcaacttggtcattgttggtatatagcagtgctactgatttgtgtacattgattttgtatcctgagactttactgaatttgtttatctgatataggagcttttgggatgagtctttagggttttctaggtataagttc

SEQ ID NO: 179993 - DNA, 356 bp, Homo sapiens
cgggaattcaggttcccatggtggggaaagcgaggggctcacctcctttccttgacattgcaggtggaccagtctgggctctttctgccctctcgggattactacttaaacagaactgccaatgagaaagtaaggaacatcttccgaacccccatccctacccctggctgagctgggctgatccctgttgacttttccctttgccaagggtcagagcagggaaggtgagcctatcctgtcacctagtgaacaaactgcccctcctttctttcttcttttcttcctccctccctcyctttcttccccttttccttccttccttcctcttattcttctagtaggtttcatagacacct

SEQ ID NO: 179994 - DNA, 493 bp, Homo sapiens
ttatggccttagcatgtagtacaaatagttaatgaatgacagatacattattgatgacttcagctaggacttatggtgtggtttggccctgtttccccacccaaatctcatatcgaattgtcatccccacttgtcaagggaggggacctgtaatccccacatgtcaaggaagggaactgattggattatgggggcggtttcccccatactgttactcatgatagtaatcraattcacatgagatctgatggtttcataagtggtagtttttcctgcgtgctcacactcacaagaaggtgcttgctttccctttgccttccaccatgatggtaagtttcctgaggcttccccagccatgtggaactgtgagtcaactaaacctctttcctttatgaatctccaagtcttgggtagttctttatagcagtgtgagaacggactagtacaacttacaacttttctacacctttccacgtcttaaactcctaattac

SEQ ID NO: 179995 - DNA, 594 bp, Homo sapiens
attgttaagccaactctcagttaaatgttggctgttttttacacacaagacaaaaaattaatatttttttcttgctgaatgttgttgtgtgagaatttggggatctcgataatgttattccttgtaacaatttctctttgtacatgtaagtagcatgtcacctttgtcctcatttaaataatgacatgagattgtcatgggattttttccccccagatgtcattgagccagtagatctgatacctgccattggttcctcagttggttatttgtgtagatccagtggttaggctatgtttacatggtaccataygttgtttggggacaacttctctgtgctcacagactatccactgccttctttagggtttaataaaggagctaaaataacatggtaacagaaccctacacttgtacatttctaatcactttcttttagctacctgaaaaacagaaatggcagctaacaatacaccatatagccaaaaaatggttttactctaatatcttgccaaaactttttgaaggagggaagggatttttctttctcaaaattcccaaatacatctgactaaaaccaactggaaatcttat

SEQ ID NO: 179996 - DNA, 602 bp, Homo sapiens
tgaattttcaaaaggttaactttggatgtgcatttttagaatgtgtgtttgcttacaatatgtcaacctacaaaagggcgttttcataaaataccactgtttaatttctacaaaatccatgtgagtgaaaaaaagcatactcaaatcacagattggaaacatggcttgaacttcaaatagttagctgcaattaccatgagactattccttgatatttgggtttcctaaaatcaggctataacctaagcacttcaaacaagctttgctatggatttaaatgacctgaatgatatactctattattctaatattagaaaagacatgatgctctttattttttaataaaccacgtaaaatccactgagacamacacacacacacagaaaatgtgattaaactacttattttaaaagaaagcttacacagaaaaaatgggtttatctaaactcgctacacatattgcgagagctctaattagcatgcgctattgcgtttaaacattaaatattagagaaattatatgaattcattacactctagatgacatctaaataatatccatcatagaaagagtatcacacatactcttacagaggtgaaat

SEQ ID NO: 179997 - DNA, 602 bp, Homo sapiens
tgaattttcaaaaggttaactttggatgtgcatttttagaatgtgtgtttgcttacaatatgtcaacctacaaaagggcgttttcataaaataccactgtttaatttctacaaaatccatgtgagtgaaaaaaagcatactcaaatcacagattggaaacatggcttgaacttcaaatagttagctgcaattaccatgagactattccttgatatttgggtttcctaaaatcaggctataacctaagcacttcaaacaagctttgctatggatttaaatgacctgaatgatatactctattattctaatattagaaaagacatgatgctctttattttttaataaaccacgtaaaatccactgagacacacacacacacacagaaaatgtgattaaactacttattttaaaagaaagcttacacagaaaaaatgggtttatctaaactcgctacasatattgcgagagctctaattagcatgcgctattgcgtttaaacattaaatattagagaaattatatgaattcattacactctagatgacatctaaataatatccatcatagaaagagtatcacacatactcttacagaggtgaaat

SEQ ID NO: 179998 - DNA, 602 bp, Homo sapiens
tgaattttcaaaaggttaactttggatgtgcatttttagaatgtgtgtttgcttacaatatgtcaacctacaaaagggcgttttcataaaataccactgtttaatttctacaaaatccatgtgagtgaaaaaaagcatactcaaatcacagattggaaacatggcttgaacttcaaatagttagctgcaattaccatgagactattccttgatatttgggtttcctaaaatcaggctataacctaagcacttcaaacaagctttgctatggatttaaatgacctgaatgatatactctattattctaatattagaaaagacatgatgctctttattttttaataaaccacgtaaaatccactgagacacacacacacacacagaaaatgtgattaaactacttattttaaaagaaagcttacacagaaaaaatgggtttatctaaactcgctacacatattgcgagagctctaattagcatgcgctattgcrtttaaacattaaatattagagaaattatatgaattcattacactctagatgacatctaaataatatccatcatagaaagagtatcacacatactcttacagaggtgaaat

SEQ ID NO: 179999 - DNA, 394 bp, Homo sapiens
ttgcttaacttacacatcttaaagttttccaccaagttcagcaattttgtattagccatttcctaagctgtgaaatatattgacaaggaaaaatgtaaaagaaaataaaaagcattttacttacttgcaaacccctctggaaaactgaatggcccataaaattagccagcattcttattaaagcagcaccctataggaaagaataataaaaagaacagaatttcaacaaagtatcatgattgtraagttgttttactcaaatctagtctacttcattcatgctattctattttcaaaaataattaagaaacagcagtatcatgaaaacaacatccaacttagtgataacaatttcatttttttggtcttgtgaattttaaagttttgtgtaaaa

SEQ ID NO: 180000 - DNA, 520 bp, Homo sapiens
atatttaatacaaaatgctgacctaagagtgtcaattaagcttaaatgcttcagaatttaagaagaaatayacatggcaaatttttagagttcaaacttactttccaagagttagagggctgtgtgttcacaaaggacttaacctgggtagaaagatcccaaagatcttaacagaatataggcattttcagtaatgattcttagtcattatttttatccaaaagggcatactgaattcaattcactgccttaattaacaaggataagatcaacattgaggcaaaagcccattcgtaattgggtccaaggggatacaggaaagcaaacaacagacaatccaaagagacaagaagacatgacaaacattccaaaatgttacctgaccagattttctgaactcaaaacctagtaaaccaaaattacactgctcatgccacctaatctgatttaataatcattttcaataatattaggattaagtactgctcatgagccttttgattcttaaatttcttatcac

SEQ ID NO: 180001 - DNA, 520 bp, Homo sapiens
atatttaatacaaaatgctgacctaagagtgtcaattaagcttaaatgcttcagaatttaagaagaaatacacatggcaaatttttaragttcaaacttactttccaagagttagagggctgtgtgttcacaaaggacttaacctgggtagaaagatcccaaagatcttaacagaatataggcattttcagtaatgattcttagtcattatttttatccaaaagggcatactgaattcaattcactgccttaattaacaaggataagatcaacattgaggcaaaagcccattcgtaattgggtccaaggggatacaggaaagcaaacaacagacaatccaaagagacaagaagacatgacaaacattccaaaatgttacctgaccagattttctgaactcaaaacctagtaaaccaaaattacactgctcatgccacctaatctgatttaataatcattttcaataatattaggattaagtactgctcatgagccttttgattcttaaatttcttatcac

SEQ ID NO: 180002 - DNA, 520 bp, Homo sapiens
atatttaatacaaaatgctgacctaagagtgtcaattaagcttaaatgcttcagaatttaagaagaaatacacatggcaaatttttagagttcaaacttactttccaagagttagagggctgtgtgttcacaaaggacttaacctgggtagaaagatcccaaagatcttaacagaatataggcattttcagtaatgattcttagtcattatttttatccaaaagggcatactgaattcaattcactgccttaattaacaaggataagatcaacattgaggcaaaagcccattcgtaattgggtccaaggggatacaggaaagcaaacaacagacaatccaaagagacaagaagacatgacaaacattccaaaatgttacctgaccagattttctgaactcaaaacctagtaaaccaaaattacactgctcatgccacctaatctgatttaataatcattttcaataatattaggattaagtacygctcatgagccttttgattcttaaatttcttatcac

SEQ ID NO: 180003 - DNA, 458 bp, Homo sapiens
tgaattcaattcactgccttaattaacaaggataagatcaacattgaggcaaaagcccattcgtaattgggtccaaggggatacaggaaagcaaacaacagacaatccaaagagacaagaagacatgacaaacattccaaaatgttacctgaccagattttctgaactcaaaacctagtaaaccaaaattacactgctcatgccacctaatctgatttaataatcattttcaataatattaggattaagtactgctcatgagccttttgattcttaaatttcttatcactgtgccttccatgatgtttgaacactatttgttttcctttagttagcgtaagagcctgscctgtgttttataaaattatcttattttttatactgtactaattaacatacacatttgggattactgaaaagtggattcctgtgacatgaatctttttattggagccatc

SEQ ID NO: 180004 - DNA, 388 bp, Homo sapiens
ggcactttttttgttgcatcatatgcttagaaaaataactttaaggataatcatcttccttccttcacctttctgccataggaattttatatatcagtagttatagctattcagttcattgtgaatttttgcctgcagagtcctagcacagaaacttagagattggtcataagagtctttaaagaagaaaatggtatgggcacttctggcattcacagttatcatcaaaatcatcattactattgacacctcattttcaatttattccttcatakttctttaaggttgaaaaataaaatatttaatatgctccatccctcattgtggacagttgcaatattgtaggaccagattcaccagtctacatatgggtaatggcatgtctggt

SEQ ID NO: 180005 - DNA, 603 bp, Homo sapiens
gttgtctatatttattgtcattcatgctgttgcatatttcctaggagaaccaaaatcaagtcgttgatttctgtgcttttaaaagtagaatrtctttcagctttttctgagttaattttgaatcagtattaggaggcttaactgtgatttcatacaacatactgttaccttgaagacacagagatttttttttaaaagtacaaaatctggcttttgtcttaaaggcattttcccaagcaggagagtttaagcacgatttttaaggtttcacagaggtaagaaaataagacaaagccgaaggtgagaagtttaatgggaggcctcccataaagccaggaccttaaagagttacaccttagcacacagatgaactagaaataaacctatccccatcctcaggggactacaaagaaattacctgttccaaactttggcagcaagtaaaaacggaaagaaaatttctcctgaaaatttgcaactacaagcaacctttgactggcatcggatctcagatgaaaaccatcttggtacactgtgaacctcaggccaggatttaatttaaaatggctggtcctggactagaaggtatccccagacaccata

SEQ ID NO: 180006 - DNA, 573 bp, Homo sapiens
attcttgcattgcatctttgacttacagggttcttagtgcttacatacatatacattactattcatccatatacaacaatgcttatagttaaaatattcatttgatcaataaattagaatctacttctttaaccttgtttttataatctaagttcaatagctcaaatcctgattctacgtaagtagartaagtcttacttttaaagtaagtaattcaagtaattattcttttggatatatatctttacatgacttggatttttcttattttgtttttatgttttaatctccctaattacatttttttcagatttttctggaaataaaaattaaagctgtaattatgaaatcctcacataaaattgattggctaggtagctattaaaaaaaattagtacctgtgctatggctttttctttcaaacaaaacaatattgttttaatgatttgagcctagtagtaccattcttcatgttgttatgagtcaacaccagggtattgaaattataaagaaagatcattattaagcttgatataaactcaaagcctaaaatccctgtcagaaattgagtca

SEQ ID NO: 180007 - DNA, 184 bp, Homo sapiens
agaaagtacacattttagaactataaaatctcctcacaatgaggtatactctgaaaaatttcaaggaaccttgactctgtctctcagtcagttcagttacatcaactatycccaaacccaatactctctgtccaacctcttctggatcatttgcaactctcaggcctaaatcaggtttgaattc

SEQ ID NO: 180008 - DNA, 448 bp, Homo sapiens
ctctttagcaagttaggtacccagaggccattccactgactttttttgaacaaattactctacagagctgtgatttaatatcttgctctcagcttttatcaggggtcgatgctgatataccgaacaggcctgcaaagaacayttctgcatcttttatagaactactgccaaaggccttttcttttatttggttcacactcctttctacagagatcccctcagtcaattccccttgtgtaccttatgaggaagtttggtttctatagtgcactggtgtggttcgtgttagggaaccttgagatgaggtcatttatcttgttttccttttgcctttgctgctgggaagcttagaatcaaattttgtgctcaatgaaggcaactatccttaaccaaggttttctatcttgctgaatagtaccaccatctatccatctcactgaagctagaa

SEQ ID NO: 180009 - DNA, 498 bp, Homo sapiens
acacgttggtcatcttcacgttgtttggttgatttatccaaacgatgttgagagcttagagaacaataacacaagttttcctgcattgattctaatttgacgcttttaatgagcacaccattgttttcatggtttttttataccctgaacgtctcccttcgtaggattcatcacaattgtaaattctttgttgaagtttgtgtcagattctaacccctgagcagggcagtgatgacttagtcgtatcactgtatcccccattgcccagtgcrggggataggacaggtgctcattacacatccattggctatttgaatgagttaatgactaatggtatagggttctcagaaatgagtggcagaggtattatcaacttcagccaagaaaaggagagactctggaggactcaatcttccttgaactgtagcctttttttttttgataattaaaaattactcagaattgcacacaccatgaggctttcaacactttgtacca

SEQ ID NO: 180010 - DNA, 594 bp, Homo sapiens
ggagaataaaggatatttatctctcttgattctctccagtgaactcctctctaacaaactggaccctctgggcttggtgaggaatagatcagaatgcaaaaaagttggagcaaaatctatgtcatgtgcttcctcttcctctaccccagaaggccatgatttctgcaggtccttgtctatctctgccctcctgatatttagcatatgtctgtctatgtgggactgctctctcctcaagttttgcacctaatttctcttaacattggcaattgccaatgttcttcacatacaggtttcatgatacagtacagttattatattacaaagctgtactttcatttcagtttttaaaaagatttaaatatatgggttttcatgtaatcatattttgtagtctgtatctttaaaacaaaaagtcacttaaaacactgacaatttgcctccaaatgtgccttcaatatcttcattttttaagagtgctttctcttttttttctcgctctttcttttttttccmgtaactccagaaagattatgcatgggaaaagtcctagagcctgcttccaaactgcacacaaatggtaatacaaagtgc

SEQ ID NO: 180011 - DNA, 390 bp, Homo sapiens
tttttcaaattgtaagtgaaatcatatatgtctctgttaatttacaagtctagtttctgataaaattagtccagtcggtggaatgatggcatgtgtgggtgtgtgctggggaaggggggaaaagaaagaagtaacaaggctcatggtgaccccacagctcccaggaggatgcaggccaaggaaggatctaggtagaccttgccaagcaaacagtagacagttctaggagtgtggatagactctaccagaaaagccagctagaaaagggatggttctgrtcaaggaatagtccggagaaggtctgaaggcacatcagcagactaacaaggcttttcactctgtgcctctagaagacatattgtaaggtctgagtgggcccccaaaagaaaa

SEQ ID NO: 180012 - DNA, 567 bp, Homo sapiens
acataggataaaacaataagttggacaagggagtcctatacataaaaaggttacaggcacttttcaacaaatgggctaagtgtgtgtgtgtgtgtgtgtgtgtgtgtgtgtgtgtgtgtcatggcaggagtatttcacatgaaatacacaggtatatttgtacctatgattagtcttaaagtcctggcatcatttctcaaaataaataacattttttaaaaaatctggaagcagggagatttgattgggcactgataatcattaccttgtaaatgaagttgaatgtttttccgtttcaggaaatcattgggacaagtggaaaatccattggaatacacatatatatagtaaacagaacaaggtaatataaattaccctgattattcataagccaactggtgaygaggataaggtatagccgaagtttccctgcaaatggtttgtcatgtttttcttgtcaaaaaattaatgctagacccaactcttttgtgttttactgcactttttactatgctagggaaacggtcatattttatttttgatgcaactgaacaattagagaaaatg

SEQ ID NO: 180013 - DNA, 567 bp, Homo sapiens
acataggataaaacaataagttggacaagggagtcctatacataaaaaggttacaggcacttttcaacaaatgggctaagtgtgtgtgtgtgtgtgtgtgtgtgtgtgtgtgtgtgtgtcatggcaggagtatttcacatgaaatacacaggtatatttgtacctatgattagtcttaaagtcctggcatcatttctcaaaataaataacattttttaaaaaatctggaagcagggagatttgattgggcactgataatcattaccttgtaaatgaagttgaatgtttttccgtttcaggaaatcattgggacaagtggaaaatccattggaatacacatatatatagtaaacagaacaaggtaatataaattaccctgattattcataagccaactggtgacgaggataaggtatagccgaagtttccctgcaaatggtttgtcatgtttttcttgtcaaaaaattaatgctagacccaactcttttgtgttttactgcactttttactatgctagggaaackgtcatattttatttttgatgcaactgaacaattagagaaaatg

SEQ ID NO: 180014 - DNA, 464 bp, Homo sapiens
tgaagtgataggcctattctaaaaaataattgttattattaacattgtattggttagtaaaatatgtacagtgaatgttgattatcaatgtgttcaagtatttttaaccagtatttctgtaatttccattaaacgccacattaaaaaaactgttctagtttttactacaccatggctagattatggaatgatgaattaactagactttacttttctgagtatgctgcartgaaaattgtgttgcaaattcctatccttattgacaattcatcacaagatgtatcttaatctcaagagaactttcccactgtgtcttgaatgcttattcccattatcctctaagacacattcacacacacacacacacacacacacacacacacacacctgacaggcaccattctgtcacatcctcccattctgcagcagaaacaggctagctaaagacattatctttttatttt

SEQ ID NO: 180015 - DNA, 573 bp, Homo sapiens
atgcaatcacctcagatacattcgtatgtataatatacgtgtaggtctgtgtatgtgtgtgcagttagttatgttaccaaattgtcatctcatattcattgagaatagggtatactcattaattaatcaacaaaagcctttgaaattcttagacaatggtagttactatagtggctacttggattagaattacagtgggtgttttggggtgttttaacttttcttttaagttcaggggtacatatgcaggatgtgcagatgtattacatagttaaacatgtatcatgggggtttgttgtatcaattacttcatcacccaagtattaagcctagtatcaattagttattttttctcatcctccttctcctctcaccctcctccctccaatagcccccatatgtgttgttctcctctgtgttcaagtgttcttttaccttataaatgaataaataagttgttttgcttggagtcaccaaggattttattgtatatctgtacrccaattcttgttcttcgaatatgtttcaagttgatcattccagttcagtgcacccagattaacagtgaacttt

SEQ ID NO: 180016 - DNA, 557 bp, Homo sapiens
catgcacatgcatacacatatatacatgcatgcatatgaatcttagggcgtacaataaacagaatagcatttttgcaaggatttagatgaataatatgaataatcataacttttgagttcatttatcaccacaactgaagataccagagggaaattatcttttttaatacatttatattttcagagcagtttatgttcagaggaaattgagtcaaagatacagattcccctgcaccagctgccctcacacacgcatagtctcttccattatcaacatccacaccaatgacattttatatggtgaaattctacttagataataaatgagataaatatcatctcatacttatgaatattttgaccacaggtgggtcagttgactagaggacattattgtttgatgggtataggcaatatattccaaaattcccactattccagtgatttggcatttcagagctttgggtattgccatctcggtaaactctgaattgyagctgactggtaaataccactggacactctctaaacataaccaaaacaaaaaaatcaaccta

SEQ ID NO: 180017 - DNA, 595 bp, Homo sapiens
aggtcttatggaaatgtctggaaggagcaaatgcataacataccaaatcaagtccttcaggcaatacataattcatatcaaaaagcaaagctttatttttaaaatgcagagatttgttagtttgaaatggtatttttcttttcagttcagtgaacctaagaattagtcctaaaacagtttagcacctttctcatctgtttctaattacagagctcttttactataagttatagtgaattgatatttggctcatgcatatataatcgctggagtgtgtatgccttctctcttatctagcacatgctttccacaccggaatatatgaacaggtactctttaaaataataataaatacatatatgtactatgggagcagctcacttctcttttatttcatttctccatctgccaacatttattaaacataacattttgggaaataaaccaaacaataacctccagataggctttagttctccacctgttwaatcatttttttattctgggattttttgacaagttccaaataattaactaatagtcactggcacatattccttctcttcaccattaggatcacgggaacatgcaaaag

SEQ ID NO: 180018 - DNA, 564 bp, Homo sapiens
aactattaaacaattttatgtgatcatttgtaataaaggcaacattcagaaacaatttctgtcttcctatagctctgtccatgttaattaagactgaaaagacaattggtttaaaaattacctaaacaaagtggcttgatcaattagaatcaatctactaagctgacatattgttcattcagtctaacagataaaagctctgctgagaattatgaggtacttgtagattggattatataatttgtgctaaaaatttttacaaaagaaaaaaatggtttttctactaaataagaatgattgtcttcactgaaatagagaagaaagcttccatgagttggacactaattttgggagaraggagattctaaaagtgaagcatcttcccctgggcttttctctctctctcagatttcatttgcttcttattgtaacacaagcacactgaccacagaaatacgctctctccttcctctgaaagaacataaacatttctttaaattggctttcaacgaaattaagacagtgtgacattcaaagctattcttataaaactcagagattaaa

SEQ ID NO: 180019 - DNA, 604 bp, Homo sapiens
gtaatgatgaagtcaaccccatctaacagatttagttgctaagccatactcatatctttttagaattaaaattagttttcttttagaaagttccctgttttctctattttacatactgtgtgctgacagcagccaaaagaaaaggcgatagctcacattctagtgaaaccttgggttttgtggctcagagtccagttgctaatagctactctttttttcagtaagtgaacttctgtattgttcagatggtttcctgcccagctaataaactacatttgtttcagctgctttgcagatctgggtagycagtgtaatgtaaacagtgccaactgcctgagagctgaagaaaatttcgtaaacatcagtctgataagcaagaaaacatttctaccagtaaacatttctaccagtaaatatttctctttcttctacacagagtgtacacttgatggctggaacaagaagaaggagtatggaactatagtaattatggtaaagcagtcataccatctttagactatttacctctgaatttcattagaagaaaaataagtcactgtcttatttagggcaatgctattttgccactgtgttagtatcagtt

SEQ ID NO: 180020 - DNA, 528 bp, Homo sapiens
tcacatttctcatatgtattaaggcaaggatttgagcccacatggtctgattccagaatcttcattctaacctaccattatcccatgcttctatttacaataaaaatctcaggaagaatacaggaacaagcagagattaggatcttctgtgaaaccaaacaaagtagtcttaattccaaatttcgtgaagctcattaaagcgtgtttgcttgttttggtgttttggatacacaagatatttatcttaatgtatcctgtatgttttctttagctgcaaaataagtgtatagatactgagcattgtattaaatgagataatatatgtaagttagctaaaataggacatgtcatgctgctttccraagtaacatagttccaatggaattctattcaaatctcagtgaaatctaatattttatgatagatcaaaaagcaaatgatttttaatccattaaagctttgaaagtctcacagatgcagagattgcaattctggctttgctgtagggtaactactggccaaacgaag

SEQ ID NO: 180021 - DNA, 497 bp, Homo sapiens
ctatgtgtcctgtgtcctgcatacatggcctgtaattggaaaaacattatttcccctttcatccaattcactttcacatactmttttcttaatgatattttctacttataattgatacagctgagtgtaagttattaaaatataaaatgggattcggtttttaagaaaaagtcaactttagagtttacacacctttatggattcctgctttcattttatatttaatctctgaggattttaagctttttttgcagatagggcgaagtgctatttaccgaaacacttttagaaaatatcatgggtagagtttagaaaatatcatcagtagagttttcagaacatatttataggaaaatgaaaatacaattgaataaaaaagactataaaaatgaacaaagagttgtgaaaaggagatgaatcaaacttttataaagaaagaacatattaattaaaataaaacattttacttccaggtagcaagcaatggtagactattg

SEQ ID NO: 180022 - DNA, 594 bp, Homo sapiens
tatatacacaatggaatacggttcagccacaaaaaagagggaaattccatcacatgcaacaacatggaagaacctagaagacattctgttaaatgaaagaagtcaggcacagaaggacaaataccacgtaatctcactcatatgtggaagctgaaattgtcataacatacaagtagagagtggaatgatggtaatcaggggccgggtagttggagagggggaytggggagatgttggttaaacaataaaaattttcatttagataggaaaaataaattcaagagatcagctatacagcatggtgactacaattaataatatattgtattcttgaaatatgctgatagtggatatgaagtgttctcactaaaaaaaaactatgtgatataatgcagatgttaattaggtagatttagttattccacaatgtacgtatatttcaaaatatcattttgtgcagggtaaacaaataattttatctgtacatataaaatataaaaatattatttgtattaaaaagtaaatgaaataaaactaaatttcatgactgtcagacaatgttaaatgacaacagcataattaggctgatttaat

SEQ ID NO: 180023 - DNA, 622 bp, Homo sapiens
ttaaatactacttgataacatcataaaatcattacatctgcttaaaatgagaagtttaattcacttgtatcagttggtattgaaatctttatctgtgttagctatgatattctcttattatgctgtgtttttrgttagctctccatagaattcagttcacattttagaaaccgacatggattagacattgagtaaagcagaactgttttattctttgtatttgtgtgtgtgtgtgtgtgtgtgtatacatacacatatatgtctcatatatatatccccatatttgtcatgtatatatatatatctccccactggagttgtgaaaatgtgtttttgactaaaagtggaggacaagatgggactggaggacagatgccagcgtgagactagccctaaatgtaagagaggggaaatgaccgtgagagatatataggacagaaatgattgactgtcaaagaaaaggaatagaaatggaacaggggtgactgacactgcaagggaaagtagaaagacacaggaaatacaacaaaagaaggggaattctccttaattctaaggcccggactctcactacaggcttggtatttatgtctcacactgctagcaaaatttttagtaacct

SEQ ID NO: 180024 - DNA, 632 bp, Homo sapiens
attaaatactacttgataacatcataaaatcattacatctgcttaaaatgagaagtttaattcacttgtatcagttggtattgaaatctttatctgtgttagctatgatattctcttattatgctgtgtttttagttagctctccatagaattcagttcacattttagaaaccgacatggattagacattgagtaaagcagaactgttttattctttgtatttgtgtgtgtgtgtgtgtgtgtgtatacatacacatatatgtctcatatatatatccccatatttgtcatgtatatatatatatctccccactggagttgtgaaaatgtgtttttgactaaaagtggaggacaagatgggactggaggacagatgccagcgtgagactagccctaaatgtaagagaggggaaatgaccgtgagagatatataggacagaaatgattgactgtcaaagaaaaggaatagaaatggaacaggggtgactgacactgcaagggaaagtagaaagacacaggaaatacaacaaaagaaggggaattctccttaattctaaggcccggactctcactmcaggcttggtatttatgtctcacactgctagcaaaatttttagtaacctacattagag

SEQ ID NO: 180025 - DNA, 568 bp, Homo sapiens
gtattttgtgcctgtagaatttgtgtctcctttcaacaggattacctttatgttgtgtgttttagagtataaagaacacatggttgatacatgaaggaaattattccattcacttgaacttatatatattgatttaataaatatttattagtcataaataatatgcaaagaatgctatcaagtgtgataggacaatacagagaaggaagcaactagcatccaccagaagaaataygaaaaatatacttataaacaattaataatgtgattcaatgcacagtaaaaacaggagttctataggctaatgagcaaaagactaaaggagtgcagaagtacctgaagtgagcttgaataagcctgaacaatttgaaacctttatgatttcaaaactattcagttaagaaatggttcaaagccaaatgtgctcaaagtcatcttatgtagcaatatctttgtatatcagaggaagactatgtaaatggcagttctgcaaatttatatataatatatatttaatttttattgaaggataataaatgcaactctgctattttaaagcttacatgca

SEQ ID NO: 180026 - DNA, 431 bp, Homo sapiens
gtgttattcaaaacatgttagatcttgtatactagggatagaggttccttgtaatgcasaggaggagctaacattataaattatattggtttccaagttagggaggtactgaagtgtagaggaccttgagtgtcctacctctcacaattaactactttaaaatcacaaacaatttcaggaaacttactaaaaatacagtgtaagagaatacatgaatacatttttattttttgtcatacaggtgacataaacatttatgttagttcatttaactgtaaaattgaagtggatgcttagagctctgctaacaaagaatgctgatttcctcactatggatattgacgaggcaatttgcatagagacaattggaatattcattgtgttggaaatatagcatgtagagtaggatcaaaatattcagtggataatca

SEQ ID NO: 180027 - DNA, 564 bp, Homo sapiens
ttcattatgtagtgtccccagttttcagcaggtttgaatggttgccttggtctatgagggctcttgacaattgctacttacactggcacatgactaacggggactcagcttgatttccttggactctcactatttatcagagtcatttttcacttataaattttcccctatctaccgtaattcataccggcaagaaaaacataaaatgaagaagagctttgtggatgaaagaaaaaaatcactaatggagtaattatactatttcttctgtctgctwtatgtctccttttctgtttttctccgaaaatattaatttactacttctgcttttaagagaataactagtggcagatttccagatcagccaaatcacagactgatacaatcaacaatgacactgttcatgatccttcaaataaaactgtgcgacttcacattacttcaaaagtctcttcacattatttcaaaagcgtttgctttatgtacaaatcattattgttctcacacattttactgctatttttcttagttaaaattattatgagtttttttcagtagcttgta

SEQ ID NO: 180028 - DNA, 598 bp, Homo sapiens
aaattggtacacatattttggataaaaatatattttaatacatttaataacattttaataatgtttaatacacttgtgcatatcctagcaattttacttcaaaatatttacctttgagacacccttstatgcttgagacacttaagaaaaccatttttcttagcagagattgtaacaataaaaaagaataaatataaatttcccttagtagacaaatgagtaaactattttgttcatatttgcaatattttgctgcagttaactttaaaaaacccactttaccgtatcaacatgtatgtaacttaaaaatattatgttcaatctaaaaaaattacaatgtgatagaaactgtatgttgccattaacataaaatttaaacctgaagactaatagtatgtacatttttgttcatatctacatacatagtaaagataccaaaacatataggattcctacacatcaactttaggatggtatttacctagaggttaggagaaaggttatcctggcactatactattgtaattttttttaataagaagaaaatggtgtgaagcaaacactgaaaaatattaatacatttaaaatctccatgcaa

SEQ ID NO: 180029 - DNA, 608 bp, Homo sapiens
attctgaggctcttccccaaattactggagggttttttgagttaagatatttgctgacacatgggtgaaggcatatgctctaatagtgttaaaatcataatttttattcatggtttggtgatgcctggagcatatagatttcataaatcacacacacacactctcacacacaaacacttatatcatctttatatttacctatgttattttcaaatctatgtgattttatttttttttattctgagtggtagagccaagaaaatgaactatgccagagtgcagacttcagaacaactgtttctatatgaaggcaagagtagcttgcagaattgtttccacaaatgtgagcatggtaattgtgatcattttgttctatcttttgtaagtgttctaaaatgaacaaaatatcatctgttctcacactaagcgaagctkaagtctctttgggattttgaacgctgaatagaaagaaaaagagttgaaagagcaatacaatgtagctgagttatagtgttgaatgttgaaacattaaaatatgcaaaagtggtcacaggtagcggaggtgttgggggatcacaatggtaaactggggcctaaaattgtttcat

SEQ ID NO: 180030 - DNA, 439 bp, Homo sapiens
ttttaagaaacatcttctgctggtaatctatagtggtcaagtaaaatttctagaacattaaatgtcttcccaaatataagaaactcttgtttctcaatgacattgtatacttgacttaaaataactgaattttggatccacaaagtgataaatggataactgcaatcataattaggtttaattatttctcctgggaaacaattttgctatgcyattgtattcacttccattgctgtcaatggaatcttacgtatccagagtagacattcttagaactttgggtacattcagggtatcaatttaggaaatgctatcaaatcaaaaaagcaactttataactcatctcaaaaccatatattttgccaatgagagaaataaaatgctaggagtataatttctagaagccagagtctttgttttattgtgaatactaaacagc

SEQ ID NO: 180031 - DNA, 474 bp, Homo sapiens
ttttattatgtaaatgattgttaaagtcaactccaagacattttatttatttaaaagaataatgaagaaagccaaatgcaaatgtttaaagcagcgtgttatttagcatccatctactgaaagtattcacccactgtatgaatcaaaacagttttacaattagaagaaaattctacacatagccttctgataatatttagtgaaaaaatagaataaaaatgtcatcttatataatgccttttggttacagttaaaataccaraactttccaggatatatgttttacatgattataatttatataaaagtttaatctgattggaatccactcatcctagttcatgtggctttgttatattttctgacagcacatctattccaaagccccaattttaacactcatgttgcctaactacgaactgaatttcactgttaattgctaaatgttctgaaggtttggtggtagagccatgg

SEQ ID NO: 180032 - DNA, 587 bp, Homo sapiens
gttttaaattgcatctgtacagaacatgtacagatctttctttcttgtcattagtccctaaataatacagcataacaaccatttgcataccatttatattgcattaggtattctaggtaatccagagattatttgaaggatatggttggatatgcatagatttatgcaaataccacaccattttacataggggacttgagcrtctgtagattttggtatctgtgagggtactggaagcaatcccctgtggatagagagggatgattatatttgaacttggaaaacactagtaagaagtttcagtgactaagacttaactgggcattttagatacatatagaacattcaagagagaaaaatttttatattttcaaatttattattcagccaagactttttaacatgacccaaatgaaagttaggacatttaaggactgacttaacaacctaattctgcagctaaataaaactctgcaggcccagttgtacttacctcatctaggttacctggcagaaacaaaaagtaactttcaataattacagggtaataaagccacatctaattgttggaaaattcattaataaca

SEQ ID NO: 180033 - DNA, 587 bp, Homo sapiens
gttttaaattgcatctgtacagaacatgtacagatctttctttcttgtcattagtccctaaataatacagcataacaaccatttgcataccatttatattgcattaggtattctaggtaatccagagattatttgaaggatatggttggatatgcatagatttatgcaaataccacaccattttacataggggacttgagcatctgtagattttggtatctgtgagggtactggaagcaatcccctgtggatagagagggatgattatatttgaacttggaaaacactagtaagaagtttcagtgactaagacttaactgggcrttttagatacatatagaacattcaagagagaaaaatttttatattttcaaatttattattcagccaagactttttaacatgacccaaatgaaagttaggacatttaaggactgacttaacaacctaattctgcagctaaataaaactctgcaggcccagttgtacttacctcatctaggttacctggcagaaacaaaaagtaactttcaataattacagggtaataaagccacatctaattgttggaaaattcattaataaca

SEQ ID NO: 180034 - DNA, 481 bp, Homo sapiens
aggactgacttaacaacctaattctgcagctaaataaaactctgcaggcccagttgtacttacctcatctaggttacctggcagaaacaaaaagtaactttcaataattacagggtaataaagccacatctaattgttggaaaattcattaataacatcaaaaactccacagtcttaaataactgctatgagttacaatatcttaaaggcacccgtagaagtaggattttagatttaaaagatttcaggttttgtttataactattgtcatgaactggatactgaaaaaatattatcctagaccagagttctcaattataatgtktcaatagaatcacttgggaactcttaaaaatatttatggctgggtagcactgcttatggattccaatgattaaaaatggcaggttctgagcattggtattttttaaaaagctattcggatagtttctaatgtgcagccaatcttgaaaaccactgg

SEQ ID NO: 180035 - DNA, 481 bp, Homo sapiens
aggactgacttaacaacctaattctgcagctaaataaaactctgcaggcccagttgtacttacctcatctaggttacctggcagaaacaaaaagtaactttcaataattacagggtaataaagccacatctaattgttggaaaattcattaataacatcaaaaactccacagtcttaaataactgctatgagttacaatatcttaaaggcacccgtagaagtaggattttagatttaaaagatttcaggttttgtttataactattgtcatgaactggatactgaaaaaatattatcctagaccagagttctcaattataatgtgtcaatagaatcacttgggaactyttaaaaatatttatggctgggtagcactgcttatggattccaatgattaaaaatggcaggttctgagcattggtattttttaaaaagctattcggatagtttctaatgtgcagccaatcttgaaaaccactgg

SEQ ID NO: 180036 - DNA, 573 bp, Homo sapiens
cagcaagatacacagtagagtgtgaaggctgcctctgagtgggcagttctgcccacatgcttgtagctttgcttctacattgtcaggtctgatggatcagggcagtggagaattcagcagggagaaagagaatcatttggtcctctggaaagtgtttatacttgttatggtgatttccactgtgctttacccttaggttcagtctccaaagaacagataaatgatcataattatttttttcctccctttactttgagagaaataaatttactcaaagcattttcagtaatagagccagataaaaatctttggaaaatgtgaacacaaagatgmactatcccaaggcttaagtcattttgttgggagactgtatatgatttaaatgtgatgaagaaatgcccattttgctcacccaacatgtaaacattttagataaaattgttaccaaaatgccagggagctggtctcggtcctgttgcttgctgcacagaaagccagtctgctgagacaacaagtattgccaaggaagaactctttatttgggtactgcagctgaggagaacagatcagtct

SEQ ID NO: 180037 - DNA, 573 bp, Homo sapiens
cagcaagatacacagtagagtgtgaaggctgcctctgagtgggcagttctgcccacatgcttgtagctttgcttctacattgtcaggtctgatggatcagggcagtggagaattcagcagggagaaagagaatcatttggtcctctggaaagtgtttatacttgttatggtgatttccactgtgctttacccttaggttcagtctccaaagaacagataaatgatcataattatttttttcctccctttactttgagagaaataaatttactcaaagcattttcagtaatagagccagataaaaatctttggaaaatgtgaacacaaagatgcacwatcccaaggcttaagtcattttgttgggagactgtatatgatttaaatgtgatgaagaaatgcccattttgctcacccaacatgtaaacattttagataaaattgttaccaaaatgccagggagctggtctcggtcctgttgcttgctgcacagaaagccagtctgctgagacaacaagtattgccaaggaagaactctttatttgggtactgcagctgaggagaacagatcagtct

SEQ ID NO: 180038 - DNA, 484 bp, Homo sapiens
agaaaaaaattaaaaacaagtcataaaaagaaatgctaatgtgaaatcaggcttaaatgtgtatgcaactcatttaatttcagctttacatagttagrgtcagttgaatcattgaactctgtttttatttttcaagtttccagttactacctaaatttttgagatattgtggcagaaaatggtgtaaatggaagtagagtggtgaaaggactgacacttctaaaatgtaggggagacagccctacttctacctctgttaccatcatgacagagtagaggctgaaagagtaggtatggagtatgaaagagtagttacgttgtggagtagttagaggtaagagatgaattctaaacctccaaattgcttgtggctgaaatcccaaggcagtatcaccatccagtaataaccaacaacaggaagatgggacataaccagcaacttagaattagggctacttctccatctgacttcagtctgccaagg

SEQ ID NO: 180039 - DNA, 660 bp, Homo sapiens
aatcataattttcaggtcttctcctaaagagcccctccctctttacrtatagggtgatataggccctctattgccccaaaggggaaatagagcactggaaaccagcactaagattgctattgagaactgcagaattctcaccacataatgactccatccaaacctctgcactaagagatgatcaaattctagcatggcttctagtagcacagaggtgtgttcccaggataaccacagctcgttataatgcctagctgagaaagctaaataccgccaggagaatttactgtttgttctagtcaactgctgacaataggccctagacattcctttttaaaaaatgtttacaattgtgaatatgtattacttacaattcagaagattctcagagccattcctttaaaatgggcatgggcaacatgagaaaagagtacagtaatctatatggagggttattgtataacctatgaattatgcacaattcataaatttttcagtgaatcaatttttcagttatcaccaggaaagatagggcctctgtctttctgtctctgtgggaagacagaattctaactttcattagaatgttagcaaacacagcttgcctaatcatatttatactgatcaaccctttgtaaattttttacctctttgactcta

SEQ ID NO: 180040 - DNA, 548 bp, Homo sapiens
atgaagaaaaaatataaaacattaatgaaataaaagttggctttttgaagagataaacaaaattgaataacatttagctagactaagaaatagggtgaagacccaaataaacaaaatcagacatgaaaaaggagacattacaactgataccacataaattcaaaagatcattagaagctactatgagcaactataagctaataaattagaaaacctgaagaaatggataaatttcttgacacrtacaatctacaaagacagaaccaagaagaaatccaaaacctgagcagaccattaacaagcaacaaaatcaaagccacgataaaaagtctgtcagcaaggaaaagcccaagacttgttggctgcattgctaaattttaccaaacatttaaagaactaataccaattttactcaaacttccaaataatagaagaggaaggaatacttacttccaaactaattctacaaggtgaagaattaccaaaaccagacaaagacaaatcaaaacataaaaagaaagaaaaatgaaaagaaaaccacaggacaa

SEQ ID NO: 180041 - DNA, 570 bp, Homo sapiens
tatcataagggagtaattatatagatatacaaaaagttataaaaagatatttattgtctcaatgttaacgaaataaaaaagtggaaatgacccatatagaaccttactggctaggcaaaaggtaacattttccaatcacagaacattatacaacyatttataattatgttggagctatgtaattatcatgatgaaaaaatatccctgatatgttaagtttaaaaatctgtctggtatatattgtatgatgttattttgaaaaaaactaaaagcacagtgtatcttcaactgtactggtaattgaagcaattacaaagaacttctaccatctgctacatctatccacattaggggatctgtacccataactatcttatacatttttttcctgcctgttattttaggggaggcatcagtgcttctgtgcaaagccaatgctatgcaagtgcactgggttcatccacccaacctacttaagggtattagccagccagaaatttacctctgtgttaacagttcaggattttggagcatgaagaatatgacttctcaattttatgcccccaggaa

SEQ ID NO: 180042 - DNA, 570 bp, Homo sapiens
tatcataagggagtaattatatagatatacaaaaagttataaaaagatatttattgtctcaatgttaacgaaataaaaaagtggaaatgacccatatagaaccttactggctaggcaaaaggtaacattttccaatcacagaacattatacaaccatttataattatgttggagctatgtaattatcatgatgaaaaaatatccctgatatgttaagtttaaaaatctgtctggtatatattgtatgatgttattttgaaaaaaactaaaagcacagtgtatcttcaactgtactgstaattgaagcaattacaaagaacttctaccatctgctacatctatccacattaggggatctgtacccataactatcttatacatttttttcctgcctgttattttaggggaggcatcagtgcttctgtgcaaagccaatgctatgcaagtgcactgggttcatccacccaacctacttaagggtattagccagccagaaatttacctctgtgttaacagttcaggattttggagcatgaagaatatgacttctcaattttatgcccccaggaa

SEQ ID NO: 180043 - DNA, 581 bp, Homo sapiens
tccgtaatcagattaaataaaaaataataataaagctaatttatatcatgtttgctttagggtttatttggaagagaaaattaagcttaggaaatgagcagtctaacttcatatccaattaaatatatggggaaactacatggtgtttgatactacctggaaaatgaaaccagacaatgcattatcaatgagagttctggttttcatcagtatcacgcttcattcaccacaaagaataatagcatggkgccccccttgtgcgttctaatgacacatctctgtatgtgagaaatgtaattgtcatctcacaaaacagaacacattatgttagatgaggtcttatatttccacatattttagcagaagcaagagcattctcatttgcacaacaaatgtgttcagttccaaaaacacaattatttcttctagtgcaatgaggatgtgatttaaaataattaatatgaaggctgtatgttttttatttgtggaaaaaagcataattctaaattacttatgtaaatatgttcagatgcactctacacaaatatccaatgtgtttcactgaaaacaatacacttaat

SEQ ID NO: 180044 - DNA, 489 bp, Homo sapiens
tttttttcattaacattataatgaaattatgttgaacaaaacaatgtttatttgaggacctattgtactgtcctaggtctgattttagtctttgaacctttgaaccacactaggtgactgaagccttgaagtggcctgcgtttacactctaactcatgccaacatcacgtggttgactggaacagactgtgtagctcagaagcaagaatgctggacagctatgtggagcaatggtgcttggcatgagagtttaggccactggaaatgacaaggattcacaaatatcaacagacttttttgggtggtaactgtttacacacttaataaaggttacaggggcagtaagtgcctaaaaaataactaaaatccaggtcctctgactcccagtagtggtcaaacatgatgtcatcaccttcatttcrgcatttttcatgtgttacataaatttatcagtagaacagccacttaataatttccatttattttcta

SEQ ID NO: 180045 - DNA, 267 bp, Homo sapiens
ttatatagctgtcactgctattattgtaaaggtgtgccttcccatttcttaataatggtagtttatgaaaggaataaagaaatactgcactttttatctacccccctgaaagacattakgtgcttatacacatggaggaattattaaaataaaatggggctaattatatagcaacctgtaattacatattgcaattatgcacgggcagttcaggtgtgactcattatttcactaatgctcctttgttattttttctattatgggggg

SEQ ID NO: 180046 - DNA, 267 bp, Homo sapiens
ttatatagctgtcactgctattattgtaaaggtgtgccttcccatttcttaataatggtagtttatgaaaggaataaagaaatactgcactttttatctacccccctgaaagacattatgtgcttatacacatggaggaattattaaaataaaatggggctaattatatagcaacctgtaattacatattgcaattatgcasgggcagttcaggtgtgactcattatttcactaatgctcctttgttattttttctattatgggggg

SEQ ID NO: 180047 - DNA, 556 bp, Homo sapiens
gccttttttcccctttgagcatatagaaactatttaatttgaagaaaagtgttttaaaataatacactactgcagaatgagtcatcagtgaagagtgaagaaaacacaatgttgcaaatagagtaatttatcagtccagctcctcctcattgtccacacctcctgctagtatcgagtctcattccaccactaagctgctctgtggatggtgcatcctcagcccctcctgcayctcactcccctcagccccaggcccttcccagatttgcttgggctacataacaaatagtatttttatttttgtattcaaaaacaatgttagactggattttagagaagtactttactatgaataccaatttgaacaagtagaaaaggagagtttttaaggaaactgacataattgaatgcatgcatttttatctcataaataaggttcataaatggtagagaaaagtgtctactttataaataaaacaagaatatcaaaaggacattggcagtaatctaactgggttaatggtcatctatgtggtactggatccacatcctgcat

SEQ ID NO: 180048 - DNA, 525 bp, Homo sapiens
tgtagaataatatttgccagcacattttgaaacttttgattataatttcttcaaatattctttctacttctttctctttctcctgtcctttggagattktcatcagatttatgttggtgtattggatgtgtgccatacatgtctgaggctctgctcatttttttccattcatttttttttattagttttaatcagaatggataatctcagttggcatatttttaatttcactgattctcctgccatctcaaatctactgttgtgttctcctaatacattctttttattttagttactttacttttcagcctcagaatttatatttaattctttgttgtaattactatttttattgatattctatatttggtgatacacagttttcatattttaattctttgaacatgttttctgttgttgttgttgttgttctttaaatgtagaaattttttgttctcctgaggcacaatttctccatattgttttttttctttgtgtgtttcatattttccatgtgtcataatt

SEQ ID NO: 180049 - DNA, 574 bp, Homo sapiens
gattataagaacacaatatttgcagacagacctgagataaaaatcattctattttctgtagctatcaattgaataattgtgcaaatgagaaacagtgcctaacctcaaggaactcacaaaccagtagctgagtgaagagaaacatagttaactctagttttagacactccttttagcacrgaagggtgctctctgctgaacagtgggaagtaaattgaggaattctcagtctcacatatctgaggcctcttcttcaccactgccaggctagcattctcattgctgctaccaacaaccagttgtttttagtaattcagggacattcatctcttcaaggattttggtaggacgattgacaatagaaactggctgttctacaaatgtttcttgcccctccagtatgactaaaccaaatatacagctgacaataatagaggtaggaaaagttcttaaaagttagtcgtggggatctaaaaacacccagacataactgaagatataaagatatgaattgggattattaaatgcattttctacttacaatattttcaacttatgatgggtttaatgagtg

SEQ ID NO: 180050 - DNA, 479 bp, Homo sapiens
caagtctcccaaattctctatattcttgaagatcttgcctgagcaaattatatgggtctttaagaatagtgttatagattaatatattaccaccttaaaaatgttttctacagtacattacaagctccataactaattttgaactgaaaactgaggcatttagccaaatggtttgggttaaaataaaatatagtttttaaactaaaagtgttcccaggtttctgacactttgagctagattttttaaaaattttctgaagcctaaaaatattgcttattttttcaaactttawtttctgtactggatatgttttcacaactaatgagagactgtaaatttttttgattaactagaaatggcttataaaagctgtctctctatataattctggtcaacagaaatctgtctttaaaagatttattaaacttgaccaagtagttagtattttgcttgctggaaagtagttcaaaacttcttt

SEQ ID NO: 180051 - DNA, 530 bp, Homo sapiens
atggatttcatctagggagtcttgtttggaaagtatctgattcttcatgtatcaccatcacatgttcattctactgtgtccactagatcaagtctagcagaataagcattttcacataaatgagctcaacaagcaaaactgcaggtataagaacaatttatgtactgaatttgcacttcacaaggaagttgagaatgaacacgtaacgagcaaaagtatttgttgatgcttaacaccttcagcaggtttttgtctttgtttttttcctgtggtcagtgatgtgacaccaatcaaagatgcagattgttgaaaaaatatcaacacttactttaagatgtagtacttatatcaayatcatgatggacaagggttcattttctgcattctcatatcattctgtaaagtatgatgtctactttttcttttaaaaaaagtggctgttctaaactgaatgtggtcataagtatagtcatattgtaaaatgagttgactccataaacaaaaaaagaatttcaaaacttttaaatata

SEQ ID NO: 180052 - DNA, 573 bp, Homo sapiens
tgggataaatcactcttgatcatgacaaatgaacttgttaatgatcttgtgttattgagttcattttgctagtattttgctgatgatttttgcatctacattcatctggtatgtcagcttatrctttttttgttgttgttatttccttatctgcatttgatatcagggtaatgacaacctcatggaatgaattttgaagtttcctcttcttgaatttttttggaataatttgagtagaatttgtgtttgttcttctttaaatgtttgttagaattgagcagggaagccatcgggtcctgggtttttatttgaagggagactttattactgtttcaatctcgttactcattattggtctgttcatgttttctgtttcttcatagttcattcttgggaggttgtatgtgtccaggaatctatccatttcttctaggttttcctatttgtttgcatataggtatttatgataatatctaacaataatttctaatatctaatgtgtttatgataatatctaacgatctgtggtatcagttctaatgtctcgttttacaacggtgattttatttagtt

SEQ ID NO: 180053 - DNA, 600 bp, Homo sapiens
aaatttgcctgtcacagttccacagatgctcacagaagacatgagactcctggttagaaataaaggattctgttactctcaataaaagcagtggcaagagtttcggtactgttcagctgggtctctgcgtctcacgtctcacacggagacacaggaggccaggtagagcttccatgtgctgtgggatgtgccataagagaagaacttagggaatccatcacttcatactaagtagtaaacaaacctattatttttatagagaaaaatttggtttaactcagaattatgtaatgcattcctgcaatgcatttcttcagatctcaaaattgccagctgcataaacaatactaagtggcttgggcaaaagacaaatcagtcttgtgcttttgcatacttgtcaagatatataagaaagcaagagacccagagaaaacttmctctcatcagtaggtgtttaaatgtcattttatttatttaaagataggtagagagatatgttagataattttggtccatgcattatttacatttattgtatacaacaacaaaactataagaaaggaactgtgatcattgaccattttcaaaaaatgttttaaa

SEQ ID NO: 180054 - DNA, 560 bp, Homo sapiens
aaaatcatgtaaccagtagacctctggcagaaagctaatgcttctggatagaaggtctgagaagaaagaaaaaagtggtgaacatacaggtaaatctaaacaaatcatgactgtacaaacaaaattagtgcattttagtgttaaaagctcaagatagattaaaatatccaataacaataacataaatagcagtattttagcccatgtaattatcaggagaaagattgagctatcaatagacttttaacttatgatggatgttattacttttattgtagccacaaaaagaaaagcaaatagattgcacattctaaacagtcgaatatttatatttcacgacctaacagttccattattaggaatataccctagaaaatgaagtacctgggcacaggacaataaaaatagctccacatwaagtaattcaaacttttctcaatactcgttggtaaagcaataacaatgtagtctaaaataaagttctacacagtattgaaaataaaaactgcagctatacacaaaaatatagatgaattttgaataaaaacagcaagacacag

SEQ ID NO: 180055 - DNA, 474 bp, Homo sapiens
cacaggacaataaaaatagctccacattaagtaattcaaacttttctcaatactcgttggtaaagcaataacaatgtagtctaaaataaagttctacacagtattgaaaataaaaactgcagctatacacaaaaatatagatgaattttgaataaaaacagcaagacacagatgttttataccctttggtgctgttttatataaagttmtaaaaaagaccaaagcaaggtacattgttcagagatgcctagacagataacaaaactacaaggaaaaggaatgaattgattatcataaaattgtaataataaatattcctggaaaagagatatataggtttgtgtttggagcaggactcatgattgactcctgagtttctggccctgttgtatttgtcgaaatgcttaatggtaatatgagcatgaactctacaattattcattaaagcagatacttgtttgagtatatgttata

SEQ ID NO: 180056 - DNA, 520 bp, Homo sapiens
ctaacttggggtaacttgagccttaggaaaacagtatacaagaaaataatatttggttaaactccctctttggagaatgtcatttatatttcttctggcaaatagaataaagttttgatgtttagagtagrtgtgttgaagaaaatatattgtatactgaataataagctttttatagcattaaaaatagccatagccagaaagtgataatgatgctctcttttagttcatgtatgattaaaatatttcttcagttttgagttgcaagtgatagcttttgcttaaggctctttttcattaaaaatatggagctgtaatttggcaaatgatttcttcacattcactataattaaagtgtgtaaattctaaaaaaggaaagcaaaaaactttagagaaaagttatgtttcagatatgtaaaagtttattccacatatttatttcagagtgttatgtttctctaatgaattacttttcttcttttgaaggcataaaagttcacaactacagaatgtgttagat

SEQ ID NO: 180057 - DNA, 520 bp, Homo sapiens
ctaacttggggtaacttgagccttaggaaaacagtatacaagaaaataatatttggttaaactccctctttggagaatgtcatttatatttcttctggcaaatagaataaagttttgatgtttagagtagatgtgttgaagaaaatatattgtatactgaataataagctttttatagcattaaaaatagccatagccagaaagtgataatgatgctctcttttagttcatgtatgattaaaatatttcttcagttttgagttgcaagtgatagcttttgcttaaggctctttttcattaaaaatatggagctgtaatttggcaaatgatttcttcacattcactataattaaagtgtgtaaattctaaaaaargaaagcaaaaaactttagagaaaagttatgtttcagatatgtaaaagtttattccacatatttatttcagagtgttatgtttctctaatgaattacttttcttcttttgaaggcataaaagttcacaactacagaatgtgttagat

SEQ ID NO: 180058 - DNA, 585 bp, Homo sapiens
tactgcctccctctcataagtactcctgtgaatacactgggcccaggataattattattcagaatgatctccccctttcaagatgctttgatcacatttgcaaagtaccttttgacacataaggcaacacacttgcagattccaggattaggagatagacatttttcatgggttgttattcagtttaccacatygattcttgattttcctgaaaaatctagatacatgaagatgtagggcctttatcaaataatattatactttaaaactcaaaaaaacaaaataaatatgattataatttaaaactattattgcatatttattttaaaaaatctctaagtggaaaagtgatatattttttacgtaatagtcatggggtccataacttttccactcttctctgataaaatcctgattctgctgatgggagctcccccttagtttcaatgttatcctgggcaactcacttaaaggcaattaatccattagaaggcttgcagcttataaattaacttaaaaattatttgtccaaattgggatagaatagaataatattattcttatttgttggaatttgggtggaca

SEQ ID NO: 180059 - DNA, 585 bp, Homo sapiens
tactgcctccctctcataagtactcctgtgaatacactgggcccaggataattattattcagaatgatctccccctttcaagatgctttgatcacatttgcaaagtaccttttgacacataaggcaacacacttgcagattccaggattaggagatagacatttttcatgggttgttattcagtttaccacatcgattcttgattttcctgaaaaatctagatacatgaagatgtagggcctttatcaaataatattatactttaaaactcaaaaaaacaaaataaatatgattataatttaaaactattattgcakatttattttaaaaaatctctaagtggaaaagtgatatattttttacgtaatagtcatggggtccataacttttccactcttctctgataaaatcctgattctgctgatgggagctcccccttagtttcaatgttatcctgggcaactcacttaaaggcaattaatccattagaaggcttgcagcttataaattaacttaaaaattatttgtccaaattgggatagaatagaataatattattcttatttgttggaatttgggtggaca

SEQ ID NO: 180060 - DNA, 585 bp, Homo sapiens
tactgcctccctctcataagtactcctgtgaatacactgggcccaggataattattattcagaatgatctccccctttcaagatgctttgatcacatttgcaaagtaccttttgacacataaggcaacacacttgcagattccaggattaggagatagacatttttcatgggttgttattcagtttaccacatcgattcttgattttcctgaaaaatctagatacatgaagatgtagggcctttatcaaataatattatactttaaaactcaaaaaaacaaaataaatatgattataatttaaaactattattgcatatttattttaaaaaatctctaagtggaaaagtgatatattttttacgtaatagtcatggggtccataacttttccactcttctctgataaaatcctgattctgytgatgggagctcccccttagtttcaatgttatcctgggcaactcacttaaaggcaattaatccattagaaggcttgcagcttataaattaacttaaaaattatttgtccaaattgggatagaatagaataatattattcttatttgttggaatttgggtggaca

SEQ ID NO: 180061 - DNA, 585 bp, Homo sapiens
tactgcctccctctcataagtactcctgtgaatacactgggcccaggataattattattcagaatgatctccccctttcaagatgctttgatcacatttgcaaagtaccttttgacacataaggcaacacacttgcagattccaggattaggagatagacatttttcatgggttgttattcagtttaccacatcgattcttgattttcctgaaaaatctagatacatgaagatgtagggcctttatcaaataatattatactttaaaactcaaaaaaacaaaataaatatgattataatttaaaactattattgcatatttattttaaaaaatctctaagtggaaaagtgatatattttttacgtaatagtcatggggtccataacttttccactcttctctgataaaatcctgattctgctgatgggagctcccccttagtttcaatgytatcctgggcaactcacttaaaggcaattaatccattagaaggcttgcagcttataaattaacttaaaaattatttgtccaaattgggatagaatagaataatattattcttatttgttggaatttgggtggaca

SEQ ID NO: 180062 - DNA, 591 bp, Homo sapiens
aatatattttgcctttttttcccctaattctacaacatggctattctttggcttaattaaatatcttaaacaaatgtgtgcttggtttaaacaataagtcacaaagctatttgccagcattattttcaaattgcatgtagaatctctccatctttatgttaaaactcattccaatgcacaggcaggacaagattgatgtaattatttaaacagaaacaaagagggttctgttcatagttgcaaatcatattggtrcaaatccactgccctggcactgagtgatgagtgctgtggagataagaggttgtaagcaccagaaagagtcatttatggagtaattccagggaactatagcagtacttcagatgcacagcattccttaaagaaagatcattgatagtaagtcacacacacgagtaatttatgactaaaagcaaataaaatagcttacagattttctctatttccctttgaggaggaaaatgttcttttcagttaacaatcagaggaattagagtaagaacaaaaaaagtaaggagaggagaagaggtcttagtgacaacacacaggataaaattaacagtttaagaa

SEQ ID NO: 180063 - DNA, 555 bp, Homo sapiens
tgtttttattaaaaactgataaagatattagatttttcttygcttttttatattaaactccctgttatttaaatcatttttgagaagtagccttcttatcccattaacgattgtggctttccttctctggagaaattctgatttatattctcttttgtagctgccgatggacatgcctagtgcaggaataaagtaatgtctgctggcacttgcttctatttccaaatatatatttatttccatacttgtttttacaaaaattactaaatctttcttccaaatccatggagaataattaacattactgactgggacgctctaaaaaagactcttacgataatgcttcagttgctgagtacaaaactcttgaaaggaaatgtactgacaatcaccaagctgatgatgtaactggatagccacctatcttcttctacccccttaaatattctttggcagcattaccaattgggccactaaattcaactctctgttacagaagaaatataccacaaaccttgaaaaatgaattcaactgttaggacctgttatcagata

SEQ ID NO: 180064 - DNA, 594 bp, Homo sapiens
tttaggtagaagtaatttataaatcatctctaagctggcaacattgccagttcatctgatgagtttttgaagttttccatttcacccatctctggacacgattttatttagaatgaatgttaaaaagtaacttcatagtaggatgaaaacttattttgtgtaaacttaatttctagagaataaaaaataattaggaagtaattagataattataaccataatgcctcttttttttttttgagacagaatcttgctctgtcatccaggctggagtgcagtggtgtgaacatggcccactgcagctgtgatctcttgtgatctcttaggctcaagatctcttaggctcctgcctcagcctcccaagcagctgggaccacaggcgtgcaccaccacgcccagctaatttttaagttttttgtagagatggagtctcatcatgtyttccagtctggcctcgaattcctgggttcaagcaatcctcccacctcagcctcccaaagtgctggaattatgacatgagctgtcatgccctgcccatatactgcttttttttttttaacatttacagtaagaagtatatttttgtaaaggacc

SEQ ID NO: 180065 - DNA, 604 bp, Homo sapiens
cagaaagttgaatggttgttgccagaggcagagaggaagtataaaagcagagttgttcaatgggtatagtgtttcagtcatgcaagatgaaaarttccagagagctattgcacaaaattgttcatatggttaacactactgtattgtacacttaaaaatagttaagatagtaaattgtatgtttttaccaccatagaaaaaagctctgaacttgccttttggaataaaaatgtgaaattctatatgaaatgcctttactatagtaagaaacacaaaataactcctctgaattattttacctctgcctgcttttcaagtatacagtatttcctgagatattattgaaggtcaatgggaaagaataatacagagaaaaataaagtttgtcttgcttcaaaactgtggagtgaagattaattagaaaaaaaatcaaagggtcatagaagaaatacatatgttatggaatattttttcagttctctggagcccagctaaaaatttatttcttctaggacatgccaggagaacaaaaagaaaataattgaaatggaaacaatcaaatagatcctatagggactgagatttatatttaatgatgttaact

SEQ ID NO: 180066 - DNA, 529 bp, Homo sapiens
tgatcagaaacctacaaaacaaggagataatccctgaatctagaacagaattgttcaacagaggttaaaaaaaaaaaaaaaaccggttggcatttctggagcatcatgcactggagtaagtgtgaaatgaagtctaggtgggggaaggggagcttaattccactgagggcactgaacatattctatatgattcaactctggattcattttacttgttccataactctgcaaatggtcaacttgagtaaatgttggaaatgcacttagaagaatgtgtattccaccattactaagaatcatgtcatctgtgtatgctaaaccatctgtttagcttgttgttcatatcatccttctctgttttgaatgggaatctgcrtcagtatcttgttgaaagaagcacaccagaacttccaacagcggttgacattttcttatttcttcttttactttggtcactttttggttcttgttgttttgccattaaaagtaatggccatttggctagtcgaggtcttttgtgattccatac

SEQ ID NO: 180067 - DNA, 629 bp, Homo sapiens
gatgacagctgatgagcttgactaggtcattataaacatacatatttatatgtatatttacatatacataatctgtataacctgtattttctccttgcatcactgtaatatgtgccaaaaaatataaagtttgatatgcagtttaacacttatctcctattatcaaatgcaagttgaaggttttcccttagattgtgcgaagaattgtattctccytctatatgcatatgtatgataatattgttagttatccaataatgttattgtgaaaagaaattacaaataggatatttagccataattttcaaaggatgacatgtggagactacatcagaattggccaattattcaataaaagtgtagataacttggtcctacccctgtctactaaatcataatctctgagaagagtctaggcacttgtatttctaactaattcacaggtggaagttaggcacaataaagtttaagaaatacttgcagatttaggtgattaatataagtactagattattatataccaggtatcaaaagaatatttggtatcatgaaataaattttaaaataaatagaatttcattttcaatagtaatactcaacattggtaccattaaacttgacatttggaa

SEQ ID NO: 180068 - DNA, 624 bp, Homo sapiens
atataatgcatttggggaaatatatttagagttgctcaaataattgttgttgatggtgaggttagagtcatgtaaccctgaattaacatattctacatattatataaactgtascaagggcaattttgcttcaggacaagttaaaggcaatgatagtcttatgtatatattttgatatctccatagatagttggaaagaatatttatcttaacatgaatttggaagttttgaccagtgtgagtcttgacactttattttattttattattattatttttttgagacagaatctcactctgtcgccaggctggagtgcagtggctgtgatcttggctcactgcaaccttcatctcctgggttcaagcaattctcctgcctcagcctcccaagtagctgggattacaggtgcatgctaccacacccagctaatttttgtatttttagtaaaaacggggtttcaccatgttggccaggctggtctcgaactcctaagctcaagtgatcctcctgcctcggcctcccaaaatgctgggattacaggtgtgagccactgcacccggccaacactttaattcttgaacagatattttggggaggatcaaaatcatggaaaattttggtac

SEQ ID NO: 180069 - DNA, 624 bp, Homo sapiens
atataatgcatttggggaaatatatttagagttgctcaaataattgttgttgatggtgaggttagagtcatgtaaccctgaattaacatattctacatattatataaactgtaccaagggcaattttgcttcaggacaagttaaaggcaatgatagtcttatgtatatattttgatatctccatagatagttggaaagaatatttatcttaacatgaatttggaagttttgaccagtgtgagtcttgacactttattttattttattattattatttttttgagacagaatctcactctgtcgccaggctggagtgcagtggctgtgatcttggctcactgcaaccttcatctcctgggttcaagcaattctcctgcctcagcctcccaagtagctgggattacaggtgcatgctaccacacccagctaatttttgtatttttagtaaaaacggggtttcaccatgttggccaggctggtctcgaactcctaagctcargtgatcctcctgcctcggcctcccaaaatgctgggattacaggtgtgagccactgcacccggccaacactttaattcttgaacagatattttggggaggatcaaaatcatggaaaattttggtac

SEQ ID NO: 180070 - DNA, 624 bp, Homo sapiens
atataatgcatttggggaaatatatttagagttgctcaaataattgttgttgatggtgaggttagagtcatgtaaccctgaattaacatattctacatattatataaactgtaccaagggcaattttgcttcaggacaagttaaaggcaatgatagtcttatgtatatattttgatatctccatagatagttggaaagaatatttatcttaacatgaatttggaagttttgaccagtgtgagtcttgacactttattttattttattattattatttttttgagacagaatctcactctgtcgccaggctggagtgcagtggctgtgatcttggctcactgcaaccttcatctcctgggttcaagcaattctcctgcctcagcctcccaagtagctgggattacaggtgcatgctaccacacccagctaatttttgtatttttagtaaaaacggggtttcaccatgttggccaggctggtctcgaactcctaagctcaagtgatcctcctgcctcggcctcccaaaatgctgggattacaggtgtgagccactgcacccggccaacactttaattcttgaacagatattttggggaggaycaaaatcatggaaaattttggtac

SEQ ID NO: 180071 - DNA, 383 bp, Homo sapiens
ctagagctaatttcttaaaatctctctctctcatatatatgaagaaacatttttgagtaagaattctcaacagggatagcaccatttgtaacccatttatgtctgaggttgcaattttttaaatgtttgcaatcagaccttggcaatgaccttaagcagtaggttataaataactcctgtatgcttagcgttccaataatggaacgctaggcataagttaagtggtctttttaaagaaataaatctcttttattaccctacatatgtatatatattatatacatacacacacatatatacacrcacataaagagaaacatataatgtttctataatataaagtctctatagtctttatatgtacatataaaatataaaatata

SEQ ID NO: 180072 - DNA, 442 bp, Homo sapiens
acgcaattccatctcaaaaaaaagaaaaaagatattcataaatgctataaagataacaaaatgaaatgatatgttagagagtgacttatggagatgggatatttcagtgaaagtggtcagagaaggcttctccaaggaatgatatttgaacagagacctaagtgacaagaagaaaccagctakgtaaagatcacagaggcattgcaggcagaggaaatagcaaatgcaaagacactaaggtgaaaatgatcttggcattttacaagagcaaagagaatgatgaggagcagtgaatggaaggagaacaataaaatataaggttggagtggtaggaagaccagatgatggtgaataatttggattacatgtatgcatgaaaatcatttttaaggatgatagtaatacatttgataagatgaaatacatttagaagatttgcagt

SEQ ID NO: 180073 - DNA, 636 bp, Homo sapiens
ccttgactgattgaccagccttacgacgttccaccattatgaattgttcctgtcctgccccaactgatcaatcgaccttgtgacattcttcttctggacaatgaatcttatgatctccccaccatggaccctgtgaccccctcctctgctgacaatagataaccacctctaactgtaacattccactgyctacctcagtcctataaagctgcccctctcctatctaccttcgctgactctcttttcgtactcagcccacttgcacccaagtgaataaacagccctgttgctcacacaaagcctgtttaggtggtcttctatacggacacatgtgacagatagccaatgggtaaaacaaccaagaagactgcttttgtcacttatgacgagcttttacagtttcccagttagatgggagagattataatttagtgaggatacatcctgggagatgaagatgaccctatgtacatcttccagtccaattataaggcacatatggccagccatgtgacccacatgcccataatcaaccccaaggagaagtacaagcacctagccataaagactcattttgccatcccatccacgtttggctagttacaagaagggtgcaattatagtgttggggtagta

SEQ ID NO: 180074 - DNA, 636 bp, Homo sapiens
ccttgactgattgaccagccttacgacgttccaccattatgaattgttcctgtcctgccccaactgatcaatcgaccttgtgacattcttcttctggacaatgaatcttatgatctccccaccatggaccctgtgaccccctcctctgctgacaatagataaccacctctaactgtaacattccactgcctacctcagtcctataaagctgcccctctcctatctaccttcgctgactctcttttcgtactcagcccacttgcacccaagtgaataaacagccctgttgctcacacaaagcctgtttaggtggtcttctatacggacacatgtgacagatagccaatgggtaaaacaaccaagaagactgcttttgtcacttatgacgagcttttacagtttcccagttagatgggagagattataatttagtgaggatacatcctgggagatgaagatgaccctatgtacatcttccagtccaattataaggcayatatggccagccatgtgacccacatgcccataatcaaccccaaggagaagtacaagcacctagccataaagactcattttgccatcccatccacgtttggctagttacaagaagggtgcaattatagtgttggggtagta

SEQ ID NO: 180075 - DNA, 636 bp, Homo sapiens
ccttgactgattgaccagccttacgacgttccaccattatgaattgttcctgtcctgccccaactgatcaatcgaccttgtgacattcttcttctggacaatgaatcttatgatctccccaccatggaccctgtgaccccctcctctgctgacaatagataaccacctctaactgtaacattccactgcctacctcagtcctataaagctgcccctctcctatctaccttcgctgactctcttttcgtactcagcccacttgcacccaagtgaataaacagccctgttgctcacacaaagcctgtttaggtggtcttctatacggacacatgtgacagatagccaatgggtaaaacaaccaagaagactgcttttgtcacttatgacgagcttttacagtttcccagttagatgggagagattataatttagtgaggatacatcctgggagatgaagatgaccctatgtacatcttccagtccaattataaggcacatatggccagccatgtgacccacatgcccataaycaaccccaaggagaagtacaagcacctagccataaagactcattttgccatcccatccacgtttggctagttacaagaagggtgcaattatagtgttggggtagta

SEQ ID NO: 180076 - DNA, 576 bp, Homo sapiens
cagaaggataaacttccagatttcttcaaatctcagcttgaaatttttaattgytatgtttagattttctgaaaaccattctgtgaattattattgtttgataactgaaggttgatgtccttgcttaggtacacagcagcccacctttattttttaacaaatctcctttctttcttctagtcccaactcctcaaaacactgactactacttactcaaaccaggggctgataaaactagttaactttcccctcaatacctagcatgctgtaagcaactggataaaacctaattacctacctcataagtgaaacttttaaatctatttgtgcacttccagtgtatcaggcagttcatccacggaaggttaaagaaatactgagaaacactaataaaacttaagaagaaagcattctttgctttcattgagctgggaggaaactagaagtcttctagtcccacccctccatgctagtaataaggaaactaagttgcacaacaccacccagcttgttaaaggcagagctgaaacaagaacctgacatccaatccggagttcagttttcactaacatatgc

SEQ ID NO: 180077 - DNA, 576 bp, Homo sapiens
cagaaggataaacttccagatttcttcaaatctcagcttgaaatttttaattgctatgtttagattttctgaaaaccattctgtgaattattattgtttgataactgaaggttgatgtccttgcttaggtacacagcagcccacctttattttttaacaaatctcctttctttcttctagtcccaactcctcaaaacactgactactacttactcaaaccaggggctgataaaactagttaactttcccctcaatacctagcatgctgtaagcaactggataaaacctaattacctrcctcataagtgaaacttttaaatctatttgtgcacttccagtgtatcaggcagttcatccacggaaggttaaagaaatactgagaaacactaataaaacttaagaagaaagcattctttgctttcattgagctgggaggaaactagaagtcttctagtcccacccctccatgctagtaataaggaaactaagttgcacaacaccacccagcttgttaaaggcagagctgaaacaagaacctgacatccaatccggagttcagttttcactaacatatgc

SEQ ID NO: 180078 - DNA, 621 bp, Homo sapiens
acacagctgggcacattcatggggacacacgagtgcaggagatcactgagggagaaagtacaggaaaaaattaataaacagcctctgcttaaccatgggaaaagcccatatttacagagtgggaggagggtgaataacattaattgccactctgggcttcttccccaaagtactctaggactggtttttcaagagtaaagaaagggactagacaagttaaaactgcctgcggcacattttcttgttatacagatataaacacacacgtgatttgtgccttggcctcacaccctgctcactgcagactagttcctggwccctggtctccattcaaagaacacagaccacgcaggatgtcagtggaagaggaaactttgtacactgttggtgggaatgtaaattagtatagccattatggaaaacggttcctcaaagttaaaaagtacaagtttacctaggtaacaaacctgcacatgtacccctgaacttaaaataaatgttaaaaaaataaataaaaataggccaggtgaggttgctcacacctgtaatcctagcactttggaaggccgaggcaggtggatcacctgaggtcaggagtctgagaccagcctgggcaacatg

SEQ ID NO: 180079 - DNA, 655 bp, Homo sapiens
ctctgtgtgtcttcattcctttttaacatatgaaagggatattttgtggtaaaaataaatagtttcataactataaagcatcagaatttgaaggaaatttagagaaaagatgtcagcccttctgtcattttattgatgaggctgtggagggtcatagataactcagctagactataatactcctggatcttagctcattacactttccttcacaaaagaaaaaaatgcccattctaatcattgcaagccaaaactaatgttgtatttctttctgattgacaagttgcagagaaaataataggtatttaacctcctaaataaaagcataagcagtagatttctataagtaycatgcaactctctacagagaccattttattgactgatttaaattagcttcttcctaaaacttacccatctacctttttggtaatataattgcccattctaacatagacaacatttaaaacaccaacccaatttcttcggtggaaaacaattcaatgatgaatgctgatgaaaaccattagttgtgcaaaaccatactaagttgtttcagtaacaagacagggactgtttaatgaagcatgtctcaacaataaataacaacaataaagagaaatttactgctttgtgctatattggacattcatca

SEQ ID NO: 180080 - DNA, 509 bp, Homo sapiens
accgcacccagcccccaaactttgaaaaaggcaattaatttgttagctccacagtcattaagagtatggagtcagacagacacagttaatgtcctgggttcttcacttactagctgtgatccttgagtaaatgacttaatttctgtaagttttaattttctcatacacaaactgggtgtggtaacagtacctacttcataggttctgattagtaaaagagataatcyatgcaagcaaatggtacgttctcacagtactggcccatagtgtattatcaataaattttgtctcttgttttagtgacacattttgtattgctattttaactatccatgcatttgtctaaaaattttgaaactagaccctgaaaaggtactcaaaactgagggattgtgattcgaccttgagcatgttgagattaggcacgtgcaggacattggagaggagaaagctatttgacaagagggtctggttgtcaggagagacatcaaaattgtaggtaaatattg

SEQ ID NO: 180081 - DNA, 615 bp, Homo sapiens
tattcatatcaaactaccaatgtcactcttcacagaattagaaaaatctatttcaaaattcatatawatcagaaaggagcctgaatagcctaagcaatcctaagctaaaagaacaaagccagaggcatcacactatccaaatttaagccatatactacaaggctacagtaaccaaaacagcatgatactgttacagaaacagatatagagactgatggaatataatagaaaactcagaaataaagccatgcacctacaaccatctggtcttcctcaaagctgacaaaaaacaagcgatggagaaaggactgcctattcaataaatggtgttgggataattggctagtcacgtgcagaagaataaaactggacccttacttttcatcctatacaaaaataaactcaggatgtattaaagatttaaatgtaggacctcaaactctaaagatcctaggggaaaacctagaaaacactcttctcaacatcagccttggcgaagaacttttggctaagtccccaaaagcaattgcaacaaaaacacaaaatgataaatgggacctaattaaactaaagagcttctgcacagcaaaagaaactatcgacagagtaaacaga

SEQ ID NO: 180082 - DNA, 593 bp, Homo sapiens
tgagcactctatctcactcactaatttctttgttttttttcttatttataactttatcagtattttgaattattatacttatttatttacttacttgttgatcatgcctctattccactgtaatgcaacttccatgacagcatgatcttttttgtcttgtttaycattatttctctagggtcagtctaccactacttttattgtcttggcagaattaggtgtctcctgaggtgatgcaaaaagaaaagacattatcagtgatggcttctaaccaaggattcaaggcttctgatttaaattctatattatagccatcacaggggtgaaggcacaaagtaaatgacaccagaaagaggatttaacacaaaatccgaaacttgggatatttcacaggataaattgctgagcctcttcagcaaataagtgtctagcaaatcctgtattagtatctttagtgatcatacctgaatttgctctccaaaggcaccatatctatacattcttagtatcctatctgttttaagcagataataaagtcagctaaaccttcccttactgttacacactgagtaagtgcaatttggatggtttga

SEQ ID NO: 180083 - DNA, 606 bp, Homo sapiens
agcacagaatcctatttcaactctgacttaactatcactttatttcaatgtattaatacctatcttctgtttctttattattgggttggcttctcattggaattcaagttccttaaaggcatattcactattacttatctttagatccttagccttacttagtaaataaatgataaaataggacaaagagaagggargtttttttttcatagccaggtagttttggctgtctgctataactatcattagatagaacattttactttataaaagcaaaatggatcactgttaataatcagagaaaacctcagaagctgattggcgatgatcttttatacattttgagaatcatcagtaagcatttttgtacctacaaagcaaaatgtgctgtaccaagtgctgatgttataagctccctagaatgtcatggtctcctgccattcaccatctcaaaataatcatcatacttcaatattccatttctattgcttttaccccttcatttagaagttgtaaaaattatatttataatataatagaaaacattataatataaaaattatacattcaaatatgtaaaattagatatccttctggtaacaaaag

SEQ ID NO: 180084 - DNA, 606 bp, Homo sapiens
agcacagaatcctatttcaactctgacttaactatcactttatttcaatgtattaatacctatcttctgtttctttattattgggttggcttctcattggaattcaagttccttaaaggcatattcactattacttatctttagatccttagccttacttagtaaataaatgataaaataggacaaagagaagggaartttttttttcatagccaggtagttttggctgtctgctataactatcattagatagaacattttactttataaaagcaaaatggatcactgttaataatcagagaaaacctcagaagctgattggcgatgatcttttatacattttgagaatcatcagtaagcatttttgtacctacaaagcaaaatgtgctgtaccaagtgctgatgttataagctccctagaatgtcatggtctcctgccattcaccatctcaaaataatcatcatacttcaatattccatttctattgcttttaccccttcatttagaagttgtaaaaattatatttataatataatagaaaacattataatataaaaattatacattcaaatatgtaaaattagatatccttctggtaacaaaag

SEQ ID NO: 180085 - DNA, 389 bp, Homo sapiens
caagtatgatccaatgcctttgcagagtcaatgaaaaaatggcagcaacagaccctatcttaaacasaagttagcagtaaaataaacaaatcaaaacgttctgatactaaaaccaaggctgtcaacatggctgctcccatcgaccctggtattgctacgaggttgattatacacagggcaaggaaacacctctgacagatacatgttaacctcttcccaaatgctgtgacagacctggcagaactgtgtcctgggcaagtaaccacgtcttcccttggggaaaaagattgggaacacttacatatcatatctatctccccagtctgccaacagaaacctccgagatgagtactctgctcagtatggtcaaaggaagcctgcaaggctct

SEQ ID NO: 180086 - DNA, 572 bp, Homo sapiens
aggtgctatctgagcttggcttgaaggggaggagctggcacccttctcaaagagcttcaggtgtgtgagggccagtgagccaagaccagggacagatgaagtggaggacgaggtgaggacagattggggaaagccaggctgttgtgtctgttcctggcattcaaggtccctgggagaggtgcagagatcagaggggcatggccagaggaggtggccagatgcaaatggctgaggggccaagacagagctctgccctgtgccatctgccgcctcactgcttcccttgttttaaagatcagggagctgaggctcggggaggtaatgggatgtgctcatgggtctcacaccagtagctgtcagagctggggtctgcatctggggtctgcatctggtctgtctgcctccccaytgccatccggtatggcctcccttttgcgtcctgaagagggggaattcacggggacccaactccctgcagggctgtgctggggcagggagctgatgagatctatagctctagatagagagggaggacctgtgtcccatggaacaactgtcagcgggaagggaga

SEQ ID NO: 180087 - DNA, 466 bp, Homo sapiens
atgaagcccacccctggggatcttgtttctgatgcmaagttcaccttcaagtgttaccaggctccagggtctgggtctctgtcttgataaactctcccacatcccagcctcagtagatggagtcttgctacctccaccctgcctgcatcacctgttcctagacttcttagttcagggaaacttcttaatgtttcagagtacggaaaggaaccaaaaactaaaactgcaacaatgcaacagccttgcagcaggagcaagaaccctgccccaggaggtattcaagcactggcttattgagaactgaagcatctgggaaggggaggggcatccccatcactaaaggtcccttccaacctcaaagtgagtaacttcagtagtttcaacttaaacctttcagagtaaaataagttaggggtcgatgcggccagcaagttgaggatgatttcagaatgcagctggatgaaac

SEQ ID NO: 180088 - DNA, 466 bp, Homo sapiens
atgaagcccacccctggggatcttgtttctgatgcaaagttcaccttcaagtgttaccaggctccagggtctgggtctctgtcttgataaactctcccacatcccagcctcagtagatggagtcttgytacctccaccctgcctgcatcacctgttcctagacttcttagttcagggaaacttcttaatgtttcagagtacggaaaggaaccaaaaactaaaactgcaacaatgcaacagccttgcagcaggagcaagaaccctgccccaggaggtattcaagcactggcttattgagaactgaagcatctgggaaggggaggggcatccccatcactaaaggtcccttccaacctcaaagtgagtaacttcagtagtttcaacttaaacctttcagagtaaaataagttaggggtcgatgcggccagcaagttgaggatgatttcagaatgcagctggatgaaac

SEQ ID NO: 180089 - DNA, 592 bp, Homo sapiens
cagttcatatgtaagccttctctctgtaagtgcacactaacagtgaagacagaagacaaaaaaaagaaacacagtctgggcgcagtggctcacacctktaatctttgcactttgggagtcccaggagggaggtcaggagttggagaccagcctgggcaacatagagaagccccatctctactaaaaaatacaaaaattagctgggcatggtggggcatgcctgtaatcccagctacttgggaggctgagtcaggagaatcgcttgaacccagaaggcagagattgcagtgagccaagattgtgccattgcagtctagtccagcctgtgcaacagagcaagtctctatccccgccaaaaaagatgaaatataaaatataaaaataaattatttaatagaaaatgtacatggtcaataaatggagttagtaggctaattgtaagaataaaaatataaactgtttttgtcccttaagaaaagaagcaagtgaactaaatataaaactatgcttcttcatggagtctatttgagatgctgtaatagaaactccttatataagatacagacaaattcaataggttagtagtttaata

SEQ ID NO: 180090 - DNA, 525 bp, Homo sapiens
attgtctgagtcttggtcattaataaaagcaaaagctttacttaaactcttatggtacttcagagctttttacaaakaatcccacttgtgaacattactttcagtagagttgtaaaaggaagatacatatactgacttcatcatttatacagaaaatgacaagattatatttatttttaactcttgagtttttctattttctacttctacctctagttttcagtaaaacaccttatattggtcaatcatttattttaaatgtaagtagttaacatttacaaattaaaacatacacataccttcagcatagaccaagtacatggttaaaaggaagaagaacatgtacacatttttatattaaaaattaccaggttatttttctatgtaaataatatatactgagatattaaatatctatatttcagaagattaaaggcaattatattgtgttatggtacatgatgtcatagaaaatttagatagccttgtcactgaaatgaagttagacacaaattacacttagtt

SEQ ID NO: 180091 - DNA, 540 bp, Homo sapiens
acattacatcaacttctgacattgtaagtggagagctctgacagatagaaaccattgtagttggctatgtacaaaaactggactcatcagagtggagagtaagttaaaataatttctggaaagcacagaagctaaattcaatattaattaataattgatagcatttgacagcatataaagtatataaagagaaaatatctaattttcctatatagtgatcctttctcctttcaacaatgatattgtataatatttaatcaaattcaaggcaattaattgatcagtgtcctargctgtttgtatatgacattctgaagaatataacaacttctttcaagtaaaaaacttaccatctcgtggtgaagatttttttttaaagatgctacagtatttttacgcaaaggcaaaaaaagcctgttttattatgtggtgggttaggagggtgagaaagtatgcccactaccctgtgtgccatgctctttctccttcaggcttttcttatgccacaaatattcttccttcccattcctgggcccctat

SEQ ID NO: 180092 - DNA, 433 bp, Homo sapiens
cacgacagttgcattttaatattattaatgccagtcattgaaacaggtttatttttaaatatatatagaaaaatacaaagcacagaatcattatattctaattgtaaaagtgaaatattgggaatgaagtttcaattgtgtgtgtttgcaatcraaataacgcaaaatcgtaataatcactgaaatgcagggttggaagggctactacttaaaagagaggcatactgaataataagaacttacacaatgtacaattttttaatactatattggtatgttatctttattcatagcatattagcaattttaaaaaggttttgtttctagaataaaaaaattcaaaagcaaactgaagtttctatgaaaatgttagcgttagcaaattaactgaagcttaataataaatcattgtgtggacttgctgagcacttgc

SEQ ID NO: 180093 - DNA, 626 bp, Homo sapiens
agaaatggctggtacaaatctaagagagggacccagaaactagaatacctgaagtatcatctatttctgctgctcactacctttgagaacatgcatgtgttgcctaacctctcagtgcatcactgtccttgtttgtaatgtagaaacaatagcacattcacagtcatattttaaaaagttagatgaccatcttggtggctccaagtgcagaatatgtaatgtgcaattttgtgagtcacaaaatatttttaaaggactaataagctagagaatttaatatattttctttccagatcttattaaaatttaaacttctaactattctcagagtgagctaatagcaatttctccttattttttccttcatctagtttatcttaattgacctttgttaatcctgcaaaamttccctacactcagaggtggcatttagcaggaatatacctacgtacctgaaagatattctcattgtcagtgcccatgccattcctactgttaatattgtgctaatactgtgatatattgaatatcactcctgcttttattaatattattattcttgtcttactcattattgtccttttatttcttttcaaggattctcaccatccagaagtcataccagg

SEQ ID NO: 180094 - DNA, 526 bp, Homo sapiens
gcctgttgcatattttggtactacctcttcccacagttgcccataacattcatcactgatccatcaaaattagtcaaactgagccacaatagagtcttaaatttgttttgaatagagtggaaattcaattactacacaagaccaaagttagaaaatgcaagagaatacattggtcattcttgaactaaactgtaactattcatactttttctccatcagcacaaaaccattgaaaacaggaactgataaaacttaaggaaacatcctataatttctctgtgggaataatggaattcagtkggggatgaggggccagtgctctctccaagtctcttattctaattttctttcacaaatgtgaaagaattagatattgaagatcacctgatgaaaggcagtcttatttgtttttagctatggtttcagaacaaaacagcttaaacacttttgaaaatgtatataaaactgtctctaagcaaattaatccatatttgtgcccttggggaaagcaacatttcaaatgtcc

SEQ ID NO: 180095 - DNA, 448 bp, Homo sapiens
gaacaatactaatatgttttgaattcccctgaagtactgtagaaagacttgaagtattattaattatagtaatacatgagaaggagaaaatattccaaaagggcctctagaaatrtaaaaagtcctcaaagtcatggtccaaccagtcactgaaacttttttaaaggtaaaaatacctgcctttttcatacatgttatccacagagaaataaatttgttagaaatatgtgtaagtgtttaggcaaaaaatattatttattttgattcaaaaagaatgatttccaaatctggttaagctccttgttttgttaattcttatctaaggtgtgtgagaatactacttactggtgggtttttattataatgaacttaactctaaagcctttagcagctgggacttgaacttactggcaaaaggactgccgaaaggctatattttattacatta

SEQ ID NO: 180096 - DNA, 541 bp, Homo sapiens
ttcctgattagtaatgttgagcatttttttatgtttgtgggccatttatttatctccctttgagaaatgtctattcatgtygtttgctcactttttaatggggttatgtgtttttcattcttgctgatatgcttgagttccatgtagatttcgtatattattccttggtcagatatgtagttagtgaggattttcttccgttctgtaggttgtgtatttactctgttgattagttctgttttctgtgcagaagccttgttttttaacaattatccatccccattttatttttcttgttgaactcttatttatgcttcaagacccagatctaatagttctctctttctgaaacttttccaggctcatcgaagcagaggtttttacgctttctttgtgtagtcactcaactcttattgcatgcatctcagaggagtgtatttttatgtttgtcactgtatagacacaagtcatgtctattttatttttgtatgccttagaaacttatattgtttatacagaatagcaataatcacaattgctt

SEQ ID NO: 180097 - DNA, 541 bp, Homo sapiens
ttcctgattagtaatgttgagcatttttttatgtttgtgggccatttatttatctccctttgagaaatgtctattcatgtcgtttgctcactttttaatggggttatgtgtttttcattcttgctgatatgcttgagttccatgtagatttcgtatattattccttggtcagatatgtagttagtgaggattttcttccgttctgtaggttgtgtatttactctgttgattagttctgttttctgtgcagaagccttgttttttaacaattatccatccccattttatttttcttgttgaactcttatttatgcttcaagacccaratctaatagttctctctttctgaaacttttccaggctcatcgaagcagaggtttttacgctttctttgtgtagtcactcaactcttattgcatgcatctcagaggagtgtatttttatgtttgtcactgtatagacacaagtcatgtctattttatttttgtatgccttagaaacttatattgtttatacagaatagcaataatcacaattgctt

SEQ ID NO: 180098 - DNA, 541 bp, Homo sapiens
ttcctgattagtaatgttgagcatttttttatgtttgtgggccatttatttatctccctttgagaaatgtctattcatgtcgtttgctcactttttaatggggttatgtgtttttcattcttgctgatatgcttgagttccatgtagatttcgtatattattccttggtcagatatgtagttagtgaggattttcttccgttctgtaggttgtgtatttactctgttgattagttctgttttctgtgcagaagccttgttttttaacaattatccatccccattttatttttcttgttgaactcttatttatgcttcaagacccagatctaatagttctctctttctgaaacttttccaggctcatcgaagcagaggtttttacrctttctttgtgtagtcactcaactcttattgcatgcatctcagaggagtgtatttttatgtttgtcactgtatagacacaagtcatgtctattttatttttgtatgccttagaaacttatattgtttatacagaatagcaataatcacaattgctt

SEQ ID NO: 180099 - DNA, 581 bp, Homo sapiens
gttggcagtatttagttatttttaagcctctttcctttggtgtaaatggtcatttttctccatgtcttcatatggtcctgtgggacttggtgttgtgatctcttcttcttgtaagaactctagttatattgaattaggtctcaccctaattacctcattttaatttaattacctctttaaggaacctatcttcaaatacagtcacattccgaggtactggatattacaacttcaaaatatgaattttgagtacaaacaattcagatcataacatatrtaagccttcaaattaattaacaatattgcatggccaattgatatgaaaatggtttttaaaaagttttagagtcaggtggtacttgtgcaggtctgttacatgggtataatgcataatgctgaggtttgggcttctaatgaatccatcacccaaatagtaaaatagtacccaataggtagctttttaaccctttctgcccctacatcttccctatttgagtttcccagtatacgttatttccatctttatgtctatgtttacccattgtttagcttccacttataagtgagatgtgttgattttc

SEQ ID NO: 180100 - DNA, 406 bp, Homo sapiens
tcccagccactccagctccagtcatggcaaaaaggggccaaggtatagtttgggctgttacttcagagggtgcaagccccaagccttggtggcttccacatggtgttgggcctgcaggtgcacagaaggccagagttgaggtttgggagcctccacctagatttcagaggatgtatggacatgccaacatgtccaggcagaagtctgctgcaggggcagagcctcatggagaacctctactagggaagtaaagagggaaaatgtggaattagagcccctaaataaagtccccactggggcactkcctagtggagctttgaatagagggccactgtcctccagaccccagaatggtagatccatctacagcttgcaccatgcacctggctggctttgagctgcaggc

SEQ ID NO: 180101 - DNA, 664 bp, Homo sapiens
atgctggatatgagacatagagtcaaaggagattaatttggagctttaagatttaatgactacctgcctaggtcttgcatcagtcctatggctccttcattttggctaatttctcccatttagaatggtagcatttaccaaatgcctctaccaccactgtatcttgaaagtagatgacttgttttttattttatagactcataggtagaagggacttactttgtcttagatgagactttgactatggatttttgagttaatgctgaaatgaattaagactgaacgactgtcgaaaagggatcattgtattttgcaatgtgagaagaatatatgcactcaatactagagcacccatatttataaaacaaatgctactagacctaaggaaaaaaatagacagtgatacaataatagtggggaacttcaacaacccattgacataactaggcagatcactgaggtaaaaaaacaacagagaaactctgcagttaaattggtctcagctaaatggacctaataggcatctctctctctctctctctctctctctctctctmtatatatatatatatatatatatatatatatatatatatacacacacacatacatatacatacacacatatatacacatatatatgtgtgtgtctattatatatgtc

SEQ ID NO: 180102 - DNA, 664 bp, Homo sapiens
atgctggatatgagacatagagtcaaaggagattaatttggagctttaagatttaatgactacctgcctaggtcttgcatcagtcctatggctccttcattttggctaatttctcccatttagaatggtagcatttaccaaatgcctctaccaccactgtatcttgaaagtagatgacttgttttttattttatagactcataggtagaagggacttactttgtcttagatgagactttgactatggatttttgagttaatgctgaaatgaattaagactgaacgactgtcgaaaagggatcattgtattttgcaatgtgagaagaatatatgcactcaatactagagcacccatatttataaaacaaatgctactagacctaaggaaaaaaatagacagtgatacaataatagtggggaacttcaacaacccattgacataactaggcagatcactgaggtaaaaaaacaacagagaaactctgcagttaaattggtctcagctaaatggacctaataggcatctctctctctctctctctctctctctctctctctatatatatatatatatatatatatatatatatatatayacacacacacatacatatacatacacacatatatacacatatatatgtgtgtgtctattatatatgtc

SEQ ID NO: 180103 - DNA, 481 bp, Homo sapiens
catttgcatgatatatctttttccatccagttactgacacctataggtaccattgcatgttacatgggtctcttgaaggcatatgtttgggtcctgtttttgtattcaatttgccaactgatatcttttaaatggagttttatggcatctgcattcagggttaataatgatatgtgagattttgtgtctctcatartgtcattagctagtggatttgtagtctcaattgtggatttgctttataggatctgtgaactttgtacttttgtgtggttttatgatagcaagtattgtccttttgttttcagtttagacttcctttgagcatttgttttttgtaagactgatctggtggtgacaaattgccttaacatttgcttgcctgggaaaaactttatttctcttttgtttatgatgcttagtttggcaggatataatattattggctggcatttttttttcctttaagaaagctaaaaat

SEQ ID NO: 180104 - DNA, 461 bp, Homo sapiens
accctctccttttccatcaaagctcccagactgctataccagtagaggggagaaatgggagcccactgctatgccccactgaggaatacaattgttacgaaatggtaaaaggaggtaaagtggcaaggcataaacttcaaagatggtggtgggaatatcagcccttgcagatgggaaactaaaggtctaaaagggctacaaataaagtatattttatgtcaaaaaattcaaatatgtggagaatgaaagggmagccatagaagcatacagacagctgcaggagggatagtttttatttcaaccactagatttgaataacaaaaaataaactaagaataaggtaaatattaatacagaagacaagactggaagggagataatgcagagacaacatggaagtactcacgtgtttgacaaactcttctctaggtgggggaaaggagagagaaaattattccttt

SEQ ID NO: 180105 - DNA, 446 bp, Homo sapiens
tacacatgctgaggaataaaatttgatttttatcctacccagtataaaagaaccaactcaaaatagattaaagacttaaaatttaaacctgcaaatgtaaaactactagaagaaaacctaagggaaaagcttcatgacattagttagacagtgattatcttggataagagcccaaatgcacaggcaacaaaagcagatactaacaaatgggattgcaytaaactaaatagcttaagcacagcaaaagaaacatttcagagtgaagagacaagccatatattgggagaatatatttgcaaatcatacattggacaaagggctaatataaaaaaatctaagaaactcaaactactcaataacaagaaaacaaataaccatattaaaaatgggcaaaggacttgaatagatatttctcaaaagacgacatacaaagggccaaaagatat

SEQ ID NO: 180106 - DNA, 546 bp, Homo sapiens
  misc_feature (1)...(546): n = A,T,C or G
nnnnnnnnnnnnnnnnnnnnnnnnnnnnnnnngtgttgcttatctcactcctgtcctgtgacatttctyccaatcccacatgccaggatacatcattctagcatttctgtgatcttcccttgctctgaaaatatctttattaaaaaatagaatatttcctttttagcaaaaatgttattttttagattctgcagttgtcttttttactattttctgagctctaagttgtctctttttgtttctaggatggcacatctcagtatcttttgagttaagacaatgatgggtttaaggaatagccttctgttttgtagccactccatgaaatcttggggcctgacaatccctggataacaggaaatctttatacatgtagctggtttaaagggacttccaatgaatacttctttttaagtagaaggttctgaattatcagtagataagaccagtataaccgttagaatctttgggagcacacccgattacatacttggactttagtttttgacagagccctgagcaactgctcacaagggaaagcatatg

SEQ ID NO: 180107 - DNA, 548 bp, Homo sapiens
ataaaagaactgtactgtaacttggtgtgagaaagatctatgtgcagaggtcagcttgacagtagagtttactttaagctgaggagacaatcagccaatacacaccaggaaagagggaaagggggaaggaataccctgaactcactaatctttttccctctgtttttgttttttctggtgctcttcattggctaaacccaactggaaacaagagaggaaggaagggagtctcttgatatacattcccaacaggtcaaccttctgaggaaggtagagagtagctctggagagtcaaaaagaaaatgttttgygtattctgtaagaaggtcacaaatgttcaaacccaagtgattgattcacaagtcatttcttttttcagtgatatattattaccaagatagtcttaatttggagattctggtatactcagttgagagccaattggtccatatacaatgatatcaaaataatctcattaaattaaaatcaaacatttttcagaataatatgaactataactttaggcagttctattacccatgactgca

SEQ ID NO: 180108 - DNA, 576 bp, Homo sapiens
gaagcgagacaagctctcagttttctagaactgcaatacaatattatattagttacaaaaaactacaactcgtgtaagtkcaaggtatgtaccaatatgcttactgatggtcacaaaccacccgtccaaaatattaacttattagacatttggcagtattctttgcaactatgttatcctaaagaggtgtatgggtgtaactcaggtcttcataaagaagacagcacagtaatcctgtaattgtattatggacaaaacaataagttaactcttgccctaaaaatgcaaatgtcaccctggtcaatctttccttgctatttgctaaagaattatcgaatgttatacaagtatttttgaattacctggtaagattcaaagctcgtatttgatagagaatattaactccacttgaaggcattcatgctaaagtagattgggcttcttcctaggtaaaattacaaatcaggcttctgagaatttaaaacaacctcttagtgtttcatttctaatagtccaaatatatagatttacagtaatatcataggaagaagtaatattattgatatttatagtaat

SEQ ID NO: 180109 - DNA, 576 bp, Homo sapiens
gaagcgagacaagctctcagttttctagaactgcaatacaatattatattagttacaaaaaactacaactcgtgtaagtgcaaggtatgtaccaatatgcttactgatggtcacaaaccacccgtccaaaatattaacttattagacatttggcagtattctttgcaactatgttatcctaaagaggtgtatgggtgtaactcaggtcttcataaagaagacarcacagtaatcctgtaattgtattatggacaaaacaataagttaactcttgccctaaaaatgcaaatgtcaccctggtcaatctttccttgctatttgctaaagaattatcgaatgttatacaagtatttttgaattacctggtaagattcaaagctcgtatttgatagagaatattaactccacttgaaggcattcatgctaaagtagattgggcttcttcctaggtaaaattacaaatcaggcttctgagaatttaaaacaacctcttagtgtttcatttctaatagtccaaatatatagatttacagtaatatcataggaagaagtaatattattgatatttatagtaat

SEQ ID NO: 180110 - DNA, 576 bp, Homo sapiens
gaagcgagacaagctctcagttttctagaactgcaatacaatattatattagttacaaaaaactacaactcgtgtaagtgcaaggtatgtaccaatatgcttactgatggtcacaaaccacccgtccaaaatattaacttattagacatttggcagtattctttgcaactatgttatcctaaagaggtgtatgggtgtaactcaggtcttcataaagaagacagcacagtaatcctgtaattgtattatggacaaaacaataagttaactcttgccctaaaaatgcaaatgtcaccctggtcaatctttccttgctatttgctaaagaattatcgaatgttatacaagtatttttkaattacctggtaagattcaaagctcgtatttgatagagaatattaactccacttgaaggcattcatgctaaagtagattgggcttcttcctaggtaaaattacaaatcaggcttctgagaatttaaaacaacctcttagtgtttcatttctaatagtccaaatatatagatttacagtaatatcataggaagaagtaatattattgatatttatagtaat

SEQ ID NO: 180111 - DNA, 633 bp, Homo sapiens
aaggttgaacaaatttagagtcccaccagcaaagcagtgggatttcagcacacttttctcaatgtagagcatcaccattaaagaaaaagaaccgtaattaatttgttattggaaaagttgtaactcatggctttaatttggatttctttgattcctaatgaggggaacatttttcatatgcttatatgctattcatagttttatttcatgaatgaactcatcacgcttttggtacttttattttttttcggcttwctaatttgtatgagctattatagagtaataataaattacaactgatgttacttagcatttactatctaccaatattgaaggcaagcaaataacatatagatgctccttcaaatgttcataaaactctctgcattatgctttaaacccccgttttaaagacaacaatcctgagacagaaaaattaagtagatttcttatagaagtttatgtctactgcattcaaattatatctgtgatcattgctctggtcctactgtgttttggttctgtctttggtaacacctattttttgcagattgaatttcctttctttgtgctctacatatatcatcttcccatttgccttaaaaaataacacatttttttggacctccctcc

SEQ ID NO: 180112 - DNA, 633 bp, Homo sapiens
aaggttgaacaaatttagagtcccaccagcaaagcagtgggatttcagcacacttttctcaatgtagagcatcaccattaaagaaaaagaaccgtaattaatttgttattggaaaagttgtaactcatggctttaatttggatttctttgattcctaatgaggggaacatttttcatatgcttatatgctattcatagttttatttcatgaatgaactcatcacgcttttggtacttttattttttttcggctttctaatttgtatgagctattatagagtaataataaattacaactgatgttacttagcatttactatctaccaatattgaaggcaagcaaataacatatagatgctccttcaaatgttcataaaactctctgcattatgctttaaacccccgttttaaagacaacaatcctgagacagaaaaattaagtagatttcttatagaagtttatgtctactgcattcaaattatatctgtgatcattgctctggtcctactgtgttttggttctgtctttggtaacacctattwtttgcagattgaatttcctttctttgtgctctacatatatcatcttcccatttgccttaaaaaataacacatttttttggacctccctcc

SEQ ID NO: 180113 - DNA, 530 bp, Homo sapiens
tacacattcgaaaaaaaagagataatacataaaagaagaagccactttaaaaaaaagcaaagagcagagaaagacaattcaaaccagaataaatccaaatggcaaataaacacattaaaaaaactttctaccttattagtaatcagcaaaatgcaaataaagacacggagatacacttttattcccaacaaactggcaaaatcaaaatggttaatgacataaaatactggtgagaaatgggagtttacattakcttattattatatttcatgaatgtagtcaactttcgagagcaatcagcagtttttagtaaaatctttgataggtataatgtgtgactcagcatttctacccctatgtctttttgtttgtagaggcgaaaaattggaaacaacccaagtgtctattcagtacacaataggagtggttttcaaaatatttagcactaaaataggtacaggcaggcaccagccaatcagaacatatgctggtcatatagaggggcacggtcctgccacatccgggcagag

SEQ ID NO: 180114 - DNA, 530 bp, Homo sapiens
tacacattcgaaaaaaaagagataatacataaaagaagaagccactttaaaaaaaagcaaagagcagagaaagacaattcaaaccagaataaatccaaatggcaaataaacacattaaaaaaactttctaccttattagtaatcagcaaaatgcaaataaagacacggagatacacttttattcccaacaaactggcaaaatcaaaatggttaatgacataaaatactggtgagaaatgggagtttacattatcttattaktatatttcatgaatgtagtcaactttcgagagcaatcagcagtttttagtaaaatctttgataggtataatgtgtgactcagcatttctacccctatgtctttttgtttgtagaggcgaaaaattggaaacaacccaagtgtctattcagtacacaataggagtggttttcaaaatatttagcactaaaataggtacaggcaggcaccagccaatcagaacatatgctggtcatatagaggggcacggtcctgccacatccgggcagag

SEQ ID NO: 180115 - DNA, 530 bp, Homo sapiens
tacacattcgaaaaaaaagagataatacataaaagaagaagccactttaaaaaaaagcaaagagcagagaaagacaattcaaaccagaataaatccaaatggcaaataaacacattaaaaaaactttctaccttattagtaatcagcaaaatgcaaataaagacacggagatacacttttattcccaacaaactggcaaaatcaaaatggttaatgacataaaatactggtgagaaatgggagtttacattatcttattattatatttcatgaatgtagtcaactttcgagagcaatcagcagtttttagtaaaatctttgataggtataatgtrtgactcagcatttctacccctatgtctttttgtttgtagaggcgaaaaattggaaacaacccaagtgtctattcagtacacaataggagtggttttcaaaatatttagcactaaaataggtacaggcaggcaccagccaatcagaacatatgctggtcatatagaggggcacggtcctgccacatccgggcagag

SEQ ID NO: 180116 - DNA, 530 bp, Homo sapiens
tacacattcgaaaaaaaagagataatacataaaagaagaagccactttaaaaaaaagcaaagagcagagaaagacaattcaaaccagaataaatccaaatggcaaataaacacattaaaaaaactttctaccttattagtaatcagcaaaatgcaaataaagacacggagatacacttttattcccaacaaactggcaaaatcaaaatggttaatgacataaaatactggtgagaaatgggagtttacattatcttattattatatttcatgaatgtagtcaactttcgagagcaatcagcagtttttagtaaaatctttgataggtataatgtgtgactcagcatttctacccctakgtctttttgtttgtagaggcgaaaaattggaaacaacccaagtgtctattcagtacacaataggagtggttttcaaaatatttagcactaaaataggtacaggcaggcaccagccaatcagaacatatgctggtcatatagaggggcacggtcctgccacatccgggcagag

SEQ ID NO: 180117 - DNA, 426 bp, Homo sapiens
aacatatcctgtgcacccaggttaggagacasaacattagtgcacctatgtatgcaactgtgctttcgtccagttgggacccctcccagcagtaactactctcctgatttccttacagcatggattactaacactggatcttacactaaaagttagagatagttcttagagaaatcctttccttttaggtgctctccttcttgtgatatttttaatatctctttaaaaataagccaacactcccagtggtatgggaagtacctatgtaagaggcaaaagccatctgtcaagagcagtaccaccatctcttcctgagtccactgtgggttttgaccttagtcattgcctttctatcttgactagctccatgaaaactccttggaattgattgtcttaactaaaagctaagaacttgttgccaatgca

SEQ ID NO: 180118 - DNA, 234 bp, Homo sapiens
acaccgccttcgtcattctgctaatgttccctcttctctcttcttttggctgtcaaagccagctttaatgaaagaatctcaaaccaatcatttaygcctcataatagacttaagtcaaagcattatctctgaccataagtcattattcttattgtaaatactttatactcaaagcctgtttgatttatactcaaattctgtttgattttcctcactaggaacgccttccttaaa

SEQ ID NO: 180119 - DNA, 511 bp, Homo sapiens
aaaaggaagatgaatggaaggataaaagtatatttggaagagagtaaggaaataagtttatctggagttgttattttatgtagacaagttgagggaaggggaggtagtaaaagtatattgaggcccattatggaggctcttgaactctgagctgaaggttttagatacagtccagtaagcaatgaggagtcctggaaggcttctgattggcagagtggcatggtctgacagtgttttggggagaggtagtttgacatakatgtggggtatagaatggaggtaactgatgttgaaattgaggaaaccattaaggagccttttcagcaatcctaggaaaggtaaaagagtccgatttagcttgttgtcagtaggaatataaccagcactgtgaaataagaatcaacaaggcttggtcactatcttagtctattttgtgttgctatagaggaatacctgaggctgggtaatttataaagaaaaagagtttatttagctcattgttttgcagact

SEQ ID NO: 180120 - DNA, 511 bp, Homo sapiens
aaaaggaagatgaatggaaggataaaagtatatttggaagagagtaaggaaataagtttatctggagttgttattttatgtagacaagttgagggaaggggaggtagtaaaagtatattgaggcccattatggaggctcttgaactctgagctgaaggttttagatacagtccagtaagcaatgaggagtcctggaaggcttctgattggcagagtggcatggtctgacagtgttttggggagaggtagtttgacatatatgtggggtatagaatggaggtaactgatgttgaaattgaggaaaccattaaggrgccttttcagcaatcctaggaaaggtaaaagagtccgatttagcttgttgtcagtaggaatataaccagcactgtgaaataagaatcaacaaggcttggtcactatcttagtctattttgtgttgctatagaggaatacctgaggctgggtaatttataaagaaaaagagtttatttagctcattgttttgcagact

SEQ ID NO: 180121 - DNA, 520 bp, Homo sapiens
gtaaaagagtccgatttagcttgttgtcagtaggaatataaccagcactgtgaaataagaatcaacaaggcttggtcactatcttagtctattttgtgttgctatagaggaatacctgaggctgggtaatttataaagaaaaagagtttatttagctcattgttttgcagactattacaagaagcatgacaccaaactgtggttgtcttctggtgaagatctcagaagtttccactcatggcaaaaggtaaaggggagccagctcctgtaaagattacatggcaagagraagtgagagggagagaggaggtgccagctcctttttaacaaccaattcttgtggaaactaatagagtggaaactcattcaccacccccaacccccgccaaccacagggaaggcattaatctattcatgagggatccacccctatgactgaaacacctctcattatgcctcacctcctaacactgctacactgggaatgaaatttaatcatgagggttggtggggacaaacg

SEQ ID NO: 180122 - DNA, 520 bp, Homo sapiens
gtaaaagagtccgatttagcttgttgtcagtaggaatataaccagcactgtgaaataagaatcaacaaggcttggtcactatcttagtctattttgtgttgctatagaggaatacctgaggctgggtaatttataaagaaaaagagtttatttagctcattgttttgcagactattacaagaagcatgacaccaaactgtggttgtcttctggtgaagatctcagaagtttccactcatggcaaaaggtaaaggggagccagctcctgtaaagattacatggcaagagaaagtgagagggagagaggaggtgccagctcctttttaacaaccaattcttgtggaaactaatagagtggaaactcattcaccacccccaacccccgccaaccmcagggaaggcattaatctattcatgagggatccacccctatgactgaaacacctctcattatgcctcacctcctaacactgctacactgggaatgaaatttaatcatgagggttggtggggacaaacg

SEQ ID NO: 180123 - DNA, 510 bp, Homo sapiens
gcttcaccaggctgcccctcctccaggactccagtgcaaaatggactcgggtatcacaatttctcctgtatatcccttcagccccagtggttgtaatgactgcagctattgctagtccaaaggttcctcccatccctttcttcatctacctcttgccacaccccactaagccatcccttcattgtcacctctccattcactccatctgaggttgacatcttttttttttttgccaggaccttgtgtgcttctcaaatggaatgtgcataggagttgcatggggatctgattagatggaggttctgattcagtaggtttggggtggggcccaagacactgaatttccaagaagcacccaggtgatgctgaggctactggtctatggaccttacttacttttcctactcactgtatggtcagaattgctggtaaatatggcccaagaaatgtaaaagttgagtctcattataaarcactgtaagtaaaaatgtaggcttcttcttatcctga

SEQ ID NO: 180124 - DNA, 591 bp, Homo sapiens
gacttgttacacaaatgttaaatgcaagctgcaaaaatttatcttgttgttagtgccagtattatttgagtctgagcttgatgagaaacctgaaataggctcagtgacagcaaaaagtgaaggtcaaggcagagtggaaagtaggatagctaagtgttgaaggcatacaatataatcatatataacatcgtgataaacatccttattcacaaactttgtaaacctctctgcttcttttgctaaattccccaaagtagaaacaatgctgggtcaaagcataaccttctttactgctctctgtagggaaatcctgtcagggggttccccaaagactgaactaacctgccctctaccttcatgttatttttcccacagtaatgctcaattgataaatctcactcctagttttaatgtttttatcaataataaggctgaatttttaaaattktattggtcctttgtgtgtctttcaacaaattattatatcacttacactgcccatttttcttaaaaatattaagtagctctttatagcttattatctatactatatgttgtaagtacttttttccatcatgattgcttgatttc

SEQ ID NO: 180125 - DNA, 651 bp, Homo sapiens
atttttaaaattgtattggtcctttgtgtgtctttcaacaaattattatatcacttacactgcccatttttcttaaaaatattaagtagctctttatagyttattatctatactatatgttgtaagtacttttttccatcatgattgcttgatttctaatttgggatgcagtgtttctgattaattaaatgttagatttgactgcatgaaaagctattattttcttttattactgcttttccctgtgttttcatgttaaaaaatacctcgtgatactctcaatatcagaaaatgtgtcacctatatttcaaccacattactgtatggtttatttaaaaatcctttatccagaaatttattttggagtatgtgatgtgatatatacatatacaataaacatatactgtaaacatgtatttggctcgtatacatgaagtaggaaccagcatgtccagatttttatttgggctaaaatttgtataaatcagaaaggattcttttactgttttatggttcaatatggtagctagtagccacacttggttactaagtgcttgaaatgtggctgtattacaatgcacatggaggtatattgtaagtataaaatacacaggggatttcaaaacttaatttgaaaacaaagtatgtaaa

SEQ ID NO: 180126 - DNA, 481 bp, Homo sapiens
tcatttagtctagaatatgtgaagacaggcacataagattatgtaggtctccaagtagatgtagtgaaacttaagcacgaggaaagttatacccagaaatggctacccrgtgccactctactatagatttagttttggaaagtaattctggctgtcttgcatatatttgtaagccttttaggagggaggcaaaaataaaagacaatttcatcacctacaatatttgtgctcttattatactcatttaactctggactgaaaacaaaataataagcttttcatcaatataatatacatgcaggagctacaacttaattacagtacttcccaaataaagcttcatcctgacaacatgttcaacaaagttctcaataaaccttctccttcatcctgttccatcttgagcatataaccagtaatgtgacttttggagctattttgaagtagtctagcttattggttctcaactagggacaagttt

SEQ ID NO: 180127 - DNA, 444 bp, Homo sapiens
ttatgtaggtctccaagtagatgtagtgaaacttaagcacgaggaaagttatacccagaaatggctacccagtgccactctactatagatttagttttggaaagtaattctggctgtcttgcatatatttgtaagccttttaggagggaggcaaaaataaaagacaatttcatcacctacaatatttgtgctcttattatactcatttaactctggactgaaaacaaaataataagcttttcatcartataatatacatgcaggagctacaacttaattacagtacttcccaaataaagcttcatcctgacaacatgttcaacaaagttctcaataaaccttctccttcatcctgttccatcttgagcatataaccagtaatgtgacttttggagctattttgaagtagtctagcttattggttctcaactagggacaagtttg

SEQ ID NO: 180128 - DNA, 442 bp, Homo sapiens
atgtaggtctccaagtagatgtagtgaaacttaagcacgaggaaagttatacccagaaatggctacccagtgccactctactatagatttagttttggaaagtaattctggctgtcttgcatatatttgtaagccttttaggagggaggcaaaaataaaagacaatttcatcacctacaatatttgtgctcttattatactcatttaactctggactgaaaacaaaataataagcttttcatcaatataatatacatgcaggagctacaacttaattacagtacttcccaaataaagcttcatcctgacaacrtgttcaacaaagttctcaataaaccttctccttcatcctgttccatcttgagcatataaccagtaatgtgacttttggagctattttgaagtagtctagcttattggttctcaactagggacaagtttg

SEQ ID NO: 180129 - DNA, 494 bp, Homo sapiens
ccctgggcatgatgaaactcctaccaattggcagtgttattttcctgctttaattgtctatttcttaaactgatgatacagcctttaaatttatcttttctctcatctatctcatattctgtagcaaaattattcatcctgtgcaaccatctaacatatttataagttcttctcatcacttcttctcatattgtgattcttctcatcagttgggctgaagcaggaaatccacaaatttccccactacaaagaactaaactccaaatacatttggtctattctattctgacagctgttaataatttagaagcttcaagttcctgaagacaccaaatatatcttctaaagccatatggtattctcaataactttggcttcattgaaagacacatacaatgaacttttaaattytaaaattcattcttagcctttaatagtacatattaataagtgattcagcttatataaaacaaatttccttacttccactttca

SEQ ID NO: 180130 - DNA, 415 bp, Homo sapiens
agccgagaataacactgtgtttatggagaaattcatctccttggaaagtatcrttcttatctggtttgaagacaaaaaaagacataccgtaggcccctaacaaccactagttcattgttgtaatataattgttatgtaacaactgggtgctctggtgagaatttatacccaagtaactttatgaaattcatagatttgggacagaaagataacaaaaataacaaccaaagaaagcaatgactagtatcctcttaaaacttaatctttacagtatccctgtgaggaagtcatcaaagagaatatgcccagtagagccatcacagaggccgacccactcaactacattaactggtgtcatgagtttcacactctaacacacatgtgcccagccttaccaagagtggagcctgaattc

SEQ ID NO: 180131 - DNA, 591 bp, Homo sapiens
aatagcaggttgttatttatgtacattctccaaaaggcactttggtgatacttatcaaaattttaattgttcacactcaataactcagaaatctactctatatttgtgtaagtacacagaaataaatcaagaggatgtcatttggaacactgaaaatgaccttaatatccatcargaaaagaatggacagtgcactctattgtggtatatcaatacaatagaatactgtgtagcatcaaaatgaagtaaatatacatgttttcatctagaaagactttacacactacattttatgtgaaaaacaagttgcaaacgtgagtctatgttatcaatccattgtgcttgaaaaaataatgtcaatactacaagtattagccaggattctccagagaagcaaaccaatgggatctctcctctgtagatatagatatctatagatcttatatctctcatatctacatatagagatagatagatagacattaatagatagatataaagtgagatttacattaaggaattggctgagattatgaagtctgagaagtcccatgttcacccatctgcaagctggagacatagaaaagctga

SEQ ID NO: 180132 - DNA, 557 bp, Homo sapiens
ctgtactaagtataactccagcattgagacctgaattacatgtggtaacatgaagagtattctttcatactccctcaaatacaagtactatgttcattcatcaattcatttatttatccaaacaacaacattcattaattcaataacattgattgaattcaacaacatctaaccaacaaatacttattgaatatctattacatgccaggaactgttcttggtgctggggacagcaacaagcaaaaygggcaaggtgcttgctagcagagcttattgtgtgtgttctccatctccttcccttctccgtcagtccttgtgaatgaatgacatgtgcctgactcccacttgctgatcaccccttctccatgtgttctgaccttctcccatcactgtactaaattctgcctctcaagaggcgtgtatctgtttctttcaaatccaatgggcttttcttagtcataacctctctcatgctctctgaagcattttggactgctgaccacttcctctttcttgcatgcatctttttcactgcccattgtctccttacattctgc

SEQ ID NO: 180133 - DNA, 557 bp, Homo sapiens
ctgtactaagtataactccagcattgagacctgaattacatgtggtaacatgaagagtattctttcatactccctcaaatacaagtactatgttcattcatcaattcatttatttatccaaacaacaacattcattaattcaataacattgattgaattcaacaacatctaaccaacaaatacttattgaatatctattacatgccaggaactgttcttggtgctggggacagcaacaagcaaaacrggcaaggtgcttgctagcagagcttattgtgtgtgttctccatctccttcccttctccgtcagtccttgtgaatgaatgacatgtgcctgactcccacttgctgatcaccccttctccatgtgttctgaccttctcccatcactgtactaaattctgcctctcaagaggcgtgtatctgtttctttcaaatccaatgggcttttcttagtcataacctctctcatgctctctgaagcattttggactgctgaccacttcctctttcttgcatgcatctttttcactgcccattgtctccttacattctgc

SEQ ID NO: 180134 - DNA, 625 bp, Homo sapiens
atccaatatgtcctcttcttaaccctattatatctgcaaagagcctattttcaaataaagtttcactcacaggtaccggagtttatgatttgaacacatctttttgcaggacatgattcaacccactgaggaaggtagcagttactggaaccaggtgtatatatatakagagagagatctgtagacccttccctctagaagctgaaggccctgtaaaatggagctagggagtagacaccctgctttccctccctttcttctctctgctttcttatcctttctcctattggatggctgagctcactccagaagcaaaggaacctcagtctgtggtccatgcaagattaggcttgaagggcacagatcctagtggagaagggttaggactggatctggggcacagctgttggattgattgagattttctgtctttttctcatctttttttttttcattctattactccattatcctgaaaattttattatttgtgcctattcttttagtgttcacctggcctattttaacatgcgtatttaacttaaagtctaaaacaaattaggacctttactctcttactgaacaatgtaagacctttaactcctattatttcctcccaacttat

SEQ ID NO: 180135 - DNA, 540 bp, Homo sapiens
tgcactttgtattacaattcttcatatataaccttatgcggagacctgtgtagcttcctgcttattcccttatgttacctagatcatcatgatgaatggaatgcctcccaatctaaagactgcaaagtgagaaaacaggtgactttaaagaatctwtggtactattactgtcaccaactgatggcaacttttctctgttaggtattcactacagccttacactgtctgccactaaaaactaattgaagaagacatgagatatatcagtgtatttttagatgcgataaaatgaactagaattttttgtcacctgttagtcactcaaggactttggtggcaataggccactagaagcggggtctggggtgggggttggcagtgagggaacactgttgaagcccctggaagagtctggcttgtagttctggtttagacaggctgcacattaatcctgagaaaaaaacagaggccaagagggcaatcaaggaaggaaacaaaaaatagggcaggggagggcgatcaaagaaaggcccagggatc

SEQ ID NO: 180136 - DNA, 539 bp, Homo sapiens
gtccagagtggatggggcctgaaggaggacaggagcagtgcaggtactcatcccagatcctgggggccagatttgtttgggaattctgaatttttcaagttttagaagggaatgcagcacctaaagtagtgagaagtggatcccatactgcttttttkgtgttgcctccatctaaaatcaaggagaaagagagcaaatgaaatagaagaaaataatcctctgcaatttttacttttctaaagtaaaacacatgttcccactttaaagcaccattttctgtttctatctggtacattttgacactttcatctttgacaaaaatccttggtaagtcacaacagcctgggttttctcactcatgtatcctccccctcttcatcttttttgtttcctttttctactctggcagggaggcacagagcaaggaggaaaaatgacaaggaggaagaagatttggcaagggacagagggagaactgctgccatgcagagaggaagcacttgttgacagggagagagggagggcaagaatgaagattg

SEQ ID NO: 180137 - DNA, 624 bp, Homo sapiens
aacattaacttcctctgtgtttccaaatgtagaaataaagatgaacatacaacatgaggagtttctaacaaaacaattgttaaaaatcaaatcgtgtttaaggccatatacggtaaggctaaaaataatatttaatcgcttgaaatcatacccataacaattgctaattctgcacagttaattgaaatgaagaacaaaggaaatttcagaataatctgaacaaaaaagctttgaaaagttggaggacggtttgtcatattgaacagaatttttagattaactgtcatcagtaatgaagccactcaaaaattgccaagttctgtttggttctttcttcttagctattctcatgaaagtgaagctctactacaggtcttccctgccttttgccataatacatttttcaaaagcatgaaggagatggcattttctaatctgagaatttagtatgaaatamatcaacagtgtcatcaaagcaagtatgcaataattacaaattactgtagtcatttaaaatagaaaataaagattttaatttatataaagcatgcataaacaatttacttgatttcatgaagggctgtcaatatatctagtacacacataatacaaatcaattcaact

SEQ ID NO: 180138 - DNA, 570 bp, Homo sapiens
tacattctctcctgttagtagttctgaagctctaaatagccttcaagatgtattttcctatactactggccgttaattcacactgaaatcaaaaactcgagagagccagcatctttcccccaaaactctcacctccagcttttcctattcttcccactaatccagatggaaaacatggtgttattttttactccttccaccagtttctcactcacatctatacaagttgtaccaattattcctttgtgatacctctaaggccatccttcctcttacgcttcactaccattcccctaattcaggcccatgtagctgaatatgtgttattacaagagastcagaactctcctacctggtttccctccttacttctttctattctttctactaatttaagatgactcttcctaaaacgttacttttcacatgtcaatctctattcacaaacctcccattatctcccatgtatttccataataataaaggccaagctctgcgcaaacactgatatctcccatgtctccaaaacagcctcccattacttcactacaggaaccagacacaccgtga

SEQ ID NO: 180139 - DNA, 570 bp, Homo sapiens
tacattctctcctgttagtagttctgaagctctaaatagccttcaagatgtattttcctatactactggccgttaattcacactgaaatcaaaaactcgagagagccagcatctttcccccaaaactctcacctccagcttttcctattcttcccactaatccagatggaaaacatggtgttattttttactccttccaccagtttctcactcacatctatacaagttgtaccaattattcctttgtgatacctctaaggccatccttcctcttacgcttcactaccattcccctaattcaggcccatgtagctgaatatgtgttattacaagagactcagaactctcctacctggtttccctccttacttctttctattctttctactaatttaagatgactcttcctaaaacgttacttttcacatgtcaatctctattcacaaacctcccattatctcccatgtatttccataataataaaggccaarctctgcgcaaacactgatatctcccatgtctccaaaacagcctcccattacttcactacaggaaccagacacaccgtga

SEQ ID NO: 180140 - DNA, 620 bp, Homo sapiens
aattggcattgtgttttatataattttaaaagacatttggtgctttgtcaygtttgacacaaacataggacataggaaagaagagataacattgccctttcccacagatagtttgattgtctgcatggaaaacccaagagatgctataggcaacccattggaattaataaaatagccaattttctgagaataatgtcaacatacgaaactcactggtatttttaaaacttagcagtttccaaagatctcattcactatggtgaattcacaaagaaaatgaaagggggtaggagcagatctactgtgaaactaatgaagctaagttttgcggtgttttacttgcatagcctccccagggagcgggaagtggacaatttatttttcttaaggagtgcctctcaaactgtacaaacttcaaaacaacacagataggatctgtctctattaggggcatagaaaaaattccaatataacttgtataagactttcatacagaaaaatataaaatattaatgaaggacataaaagaatgaaatgaaaagctgtatcatgttcatgcttgggaagactcaatatcctaaagattacaattcttaacaaaaatatcattattaattcag

SEQ ID NO: 180141 - DNA, 620 bp, Homo sapiens
aattggcattgtgttttatataattttaaaagacatttggtgctttgtcatgtttgacacaaacataggacrtaggaaagaagagataacattgccctttcccacagatagtttgattgtctgcatggaaaacccaagagatgctataggcaacccattggaattaataaaatagccaattttctgagaataatgtcaacatacgaaactcactggtatttttaaaacttagcagtttccaaagatctcattcactatggtgaattcacaaagaaaatgaaagggggtaggagcagatctactgtgaaactaatgaagctaagttttgcggtgttttacttgcatagcctccccagggagcgggaagtggacaatttatttttcttaaggagtgcctctcaaactgtacaaacttcaaaacaacacagataggatctgtctctattaggggcatagaaaaaattccaatataacttgtataagactttcatacagaaaaatataaaatattaatgaaggacataaaagaatgaaatgaaaagctgtatcatgttcatgcttgggaagactcaatatcctaaagattacaattcttaacaaaaatatcattattaattcag

SEQ ID NO: 180142 - DNA, 522 bp, Homo sapiens
tatggtaaaataatgagatgaaaattggtataaggggaataaaggtatgtatcatattcatgaatgcattctatagtatttctgtgagaacaaaatcaatggattaaagcatagaaatcacaactaataaatgttacataattgcctgctccatgctatgagtttcttgaagacaggggttcttttttatttgcttttatgtccctaaaaactgataaggtatttggtccatagtaatgactcagcaactgttgaactaaagaatggargggagcttctactcaagacttgtctgaggtttgaactgtttgaaatgttcagattttattgaagaatacaaatctgttatttaactcaaaaccttatgataccaatctaaattataagcatcaatatgaatgtatagatgtgtgcatgtgtattctccgtgcactgaaaaggcctagaagtgatgacaaacccagaaacgatgagcacctctaatgtcccaaatatgttctcccaaaaccattttccaccaaa

SEQ ID NO: 180143 - DNA, 627 bp, Homo sapiens
cttttctgactaaaaatgtttgcttttaattgtagatagtgtatacatttaaagatgatttaatgcagttcatattttagcagttaagacttctgaatttttattaggtagacaagttagatataagtggagtaagcatgacttctctaaagaatattcattacatgttgcttttcttccattttcaaaacaggcttactaaccacaacctgtcctttggattatgaaatgaaaactcagcatattctgactgttctggcactggatgatggcacaccagcactttcttcatcccagactttgacagttactgttcttgatgtaaatgatgaagctccagtatttaagcagcacctgtatgaagcctcagtgaaagaaaaccaaaatccaggggagtttgttaccagggttgaagctctggacagagattcaggtaatttagaaatacagaaactgggtatttaatgcttaaaagaaattgaagattataattgacgtaatttataatagttatggctcagaaaaaatgaacagttgctagttatctcaaatttstaatacttctttcatttgcatccacacagaaacacatacacctgtaaagatacagatatatcacataagatt

SEQ ID NO: 180144 - DNA, 522 bp, Homo sapiens
gattgggcttgaaagcttttggttgggggaaaaaaaatgggcttcatattttaacacatacggagttaagacaaagacagtatggagatataaagtgattcttttaaaaagatcctctttatgtaatagtttaatcagatgttgtatttcatggtgtgatagtcacaatgtcttcaacatcccaatgtcataagtgctgcctaaattctggctatgtccaaaaggtacttttaagccaaaaagcaggattttccagccaaggtaccctatagaatgtttcattatgtcayatgctagtctaatctctacagtcttccagaaatgtcccaccagtccactctttcgctgtttcagcctgacttggacatgctcttgtccatgatcctgaagtctaagatgtgccacatcaccactcccaacagcatgtccaaagactcccagaattaattacattatgtcctgatggtgtctgtctctacaaggatgaggactgactcttaaggtgactttattctcaggcag

SEQ ID NO: 180145 - DNA, 591 bp, Homo sapiens
gacttgttacacaaatgttaaatgcaagctgcaaaaatttatcttgttgttagtgccagtattatttgagtctgagcttgatgagaaacctgaaataggctcagtgacagcaaaaagtgaaggtcaaggcagagtggaaagtagkatagctaagtgttgaaggcatacaatataatcatatataacatcgtgataaacatccttattcacaaactttgtaaacctctctgcttcttttgctaaattccccaaagtagaaacaatgctgggtcaaagcataaccttctttactgctctctgtagggaaatcctgtcagggggttccccaaagactgaactaacctgccctctaccttcatgttatttttcccacagtaatgctcaattgataaatctcactcctagttttaatgtttttatcaataataaggctgaatttttaaaattgtattggtcctttgtgtgtctttcaacaaattattatatcacttacactgcccatttttcttaaaaatattaagtagctctttatagcttattatctatactatatgttgtaagtacttttttccatcatgattgcttgatttc

SEQ ID NO: 180146 - DNA, 591 bp, Homo sapiens
gacttgttacacaaatgttaaatgcaagctgcaaaaatttatcttgttgttagtgccagtattatttgagtctgagcttgatgagaaacctgaaataggctcagtgacagcaaaaagtgaaggtcaaggcagagtggaaagtaggatagctaagtgttgaaggcatacaatataatcatatataacatcgtgataaacatccttattcacaaactttgtaaacctctctgcttcttttgctaaattccccaaagtagaaacaatgctgggtcaaagcrtaaccttctttactgctctctgtagggaaatcctgtcagggggttccccaaagactgaactaacctgccctctaccttcatgttatttttcccacagtaatgctcaattgataaatctcactcctagttttaatgtttttatcaataataaggctgaatttttaaaattgtattggtcctttgtgtgtctttcaacaaattattatatcacttacactgcccatttttcttaaaaatattaagtagctctttatagcttattatctatactatatgttgtaagtacttttttccatcatgattgcttgatttc

SEQ ID NO: 180147 - DNA, 496 bp, Homo sapiens
aagaaaggcatccttgttgaaatcagcctgagcaaaaagtaagacccatgaatgtctaactcatgttcatgtggagtgcaggaagcacaggggcatgtaatataagctaagagcagaaaaggacaccgcactaatctaattatactaattctaatgacaacagaaagccaacataagtcagcatgggaaagagacataaacagtaacatgggcaagcatttatcaggctaaacagattcttacatatttgtcaaaatctatttcattcacacataccatttgggctaagacttactgagtgattgttttctctatttctkttcttaacttcttttacaaattaggccaaaagtttgaagtaagtttagtctaggtctagaatacctattctgtatttgaaaagagagcccatttgtatacctgaaattgacccaatttaggatatgggctcaatttaagtaaaatattgcatcatattaaataaaaaagttcactt

SEQ ID NO: 180148 - DNA, 535 bp, Homo sapiens
ggtggggaaccaggtggggtctcctcaattccctgatttagtaacattcagtctaagcagaggcacaatccaccctgagcatttcctcctcttcgtctttccaattcaccaacaccaaaagtcacagatgggaggactggacagagcagagcaagacacccatgtgttggggggcctgcggaccatctgactgttacagctgtgggcatccgcagagctgccttggagcaaataatatagtctgtgctcagaatatgtttgctcaatgaagatctggatggctaaaagatgatgggagcctctcaagaacctaaaagtcctgggggtgggccactctacccttaacaatgcagattttgccacctctttatggaagtccatatggaaatggagaaagagcasgagagagggtgagccactaattaccggctcctccttgcacaatcaggttcaaaacaaaaggaggaagcttctcacattggggaaatggaaacaacagtgtttaattcatgaaaactaaaatctggaaagatga

SEQ ID NO: 180149 - DNA, 621 bp, Homo sapiens
tgttagtaaactgaaaatgtttcccaaagggaagatgtactgtggactgttgatacccaatgtttctgctacaaaacctgtgaaaggggtatggtgtgtggccagccaagtcaggagggccaagcaattggcagcagacaacagcagagaaaggtgggaaaggtgggggcaggagagaaagaggtgtaagagaagcatggcaaaaaaaaaaaaaaaaaaaatctatccaaaggaagagaacccamtacttagcacagtaagactaagagatatctgatagtaaacctaaaccaaaggataaggggaaaaaaaaatcccctatgaataagagaagacaaaaaaaagagaatgggagtaataaagactgaaagaaaagggcttataaggaagaggaatgtactaaataatacctcatagcatagatcagttcaaaggcagcctatctccccagccagagggcaaggtctctttctcacatatcagagtgccacattaatgtggctttatcaatctccaggccaaggtcttctactctgatttactccatagtgccctttgacagtctgacaaagcctgcgggccctggaatggtgtttaaatgcataaaatataatacataag

SEQ ID NO: 180150 - DNA, 621 bp, Homo sapiens
tgttagtaaactgaaaatgtttcccaaagggaagatgtactgtggactgttgatacccaatgtttctgctacaaaacctgtgaaaggggtatggtgtgtggccagccaagtcaggagggccaagcaattggcagcagacaacagcagagaaaggtgggaaaggtgggggcaggagagaaagaggtgtaagagaagcatggcaaaaaaaaaaaaaaaaaaaatctatccaaaggaagagaacccactacttagcacagtaagactaagagatatctgatagtaaacctaaaccaaaggataaggggaaaaaaaaatcccmtatgaataagagaagacaaaaaaaagagaatgggagtaataaagactgaaagaaaagggcttataaggaagaggaatgtactaaataatacctcatagcatagatcagttcaaaggcagcctatctccccagccagagggcaaggtctctttctcacatatcagagtgccacattaatgtggctttatcaatctccaggccaaggtcttctactctgatttactccatagtgccctttgacagtctgacaaagcctgcgggccctggaatggtgtttaaatgcataaaatataatacataag

SEQ ID NO: 180151 - DNA, 621 bp, Homo sapiens
tgttagtaaactgaaaatgtttcccaaagggaagatgtactgtggactgttgatacccaatgtttctgctacaaaacctgtgaaaggggtatggtgtgtggccagccaagtcaggagggccaagcaattggcagcagacaacagcagagaaaggtgggaaaggtgggggcaggagagaaagaggtgtaagagaagcatggcaaaaaaaaaaaaaaaaaaaatctatccaaaggaagagaacccactacttagcacagtaagactaagagatatctgatagtaaacctaaaccaaaggataaggggaaaaaaaaatcccctawgaataagagaagacaaaaaaaagagaatgggagtaataaagactgaaagaaaagggcttataaggaagaggaatgtactaaataatacctcatagcatagatcagttcaaaggcagcctatctccccagccagagggcaaggtctctttctcacatatcagagtgccacattaatgtggctttatcaatctccaggccaaggtcttctactctgatttactccatagtgccctttgacagtctgacaaagcctgcgggccctggaatggtgtttaaatgcataaaatataatacataag

SEQ ID NO: 180152 - DNA, 637 bp, Homo sapiens
tattaaatggccgactaattagaacttagtcgggctacctttggatgaatgggtggatgggtaggtggatgaataattagatggaagaaagggagagagagagaagaagagaaaggaagaagagagggraggacagataaactgtcagcaatagggaatggcagtggaggcacatgtgaaagagcgctttctgttgcaggaacatcaagtcttttggtggggcaggggcagtggtatatgcttgtaaactctacaaccagctttctaggggaaaatgcttgctttgtagtataaatagtggtgtaaatcctcctaccatggctgatttcatgatgccaacacaatatctgatcacagagttggagagaaaaaatgtggacaatcgtcagcacaggccagttcgaacacaccagagcacagggtatgccaaggaaaatggcaggtaaagcgacaggtaacagccaggtgacaaaggactgtggaggccaaagcaactccatcttggatgctaatccaccatgttgacttctgattaacttcagttcctggaaggcctctaagatttcccacttatctaatgttccttgtgtaagaacaggtacttacttactataaatcctgcccttaggtcaaacaa

SEQ ID NO: 180153 - DNA, 637 bp, Homo sapiens
tattaaatggccgactaattagaacttagtcgggctacctttggatgaatgggtggatgggtaggtggatgaataattagatggaagaaagggagagagagagaagaagagaaaggaagaagagaggggaggacagataaactgtcagcaatagggaatggcagtggaggcasatgtgaaagagcgctttctgttgcaggaacatcaagtcttttggtggggcaggggcagtggtatatgcttgtaaactctacaaccagctttctaggggaaaatgcttgctttgtagtataaatagtggtgtaaatcctcctaccatggctgatttcatgatgccaacacaatatctgatcacagagttggagagaaaaaatgtggacaatcgtcagcacaggccagttcgaacacaccagagcacagggtatgccaaggaaaatggcaggtaaagcgacaggtaacagccaggtgacaaaggactgtggaggccaaagcaactccatcttggatgctaatccaccatgttgacttctgattaacttcagttcctggaaggcctctaagatttcccacttatctaatgttccttgtgtaagaacaggtacttacttactataaatcctgcccttaggtcaaacaa

SEQ ID NO: 180154 - DNA, 559 bp, Homo sapiens
ggattggaccacataagtaagatgaggatagagctcccctgaataaactgggaattggaaaccagaatgtctgcccaggttccaaaggattccccttcgtgtggttcmtaggacatagcccatttcttttggatagtgtcacacttaacttcagtgatatgtctcttttctttaacactgctgcaactcaactaagcgggtatccccacctccagaaggtcccctttgtggatgatctggttttgaatggctcttcctaaagagtggggcagctgtgcaagtttttcctacttgcataaaaacaaaattgacttctaatgaattctccggaaaatgaatgtttctccttgagataactggggtcttggggattcagcacagtcaacctgacacaaaacgcagactgaggtagagggtaggaaaaaaagaaagaggaggagcagctcttagtgcgcgttggctctctgtgggcattttggtcacacttgggtgcctcagcagccaagcctcacctccatcttcctccacctcatccctcctgtgacaatagtgctgcctc

SEQ ID NO: 180155 - DNA, 559 bp, Homo sapiens
ggattggaccacataagtaagatgaggatagagctcccctgaataaactgggaattggaaaccagaatgtctgcccaggttccaaaggattccccttcgtgtggttcataggacatagcccatttcttttggataktgtcacacttaacttcagtgatatgtctcttttctttaacactgctgcaactcaactaagcgggtatccccacctccagaaggtcccctttgtggatgatctggttttgaatggctcttcctaaagagtggggcagctgtgcaagtttttcctacttgcataaaaacaaaattgacttctaatgaattctccggaaaatgaatgtttctccttgagataactggggtcttggggattcagcacagtcaacctgacacaaaacgcagactgaggtagagggtaggaaaaaaagaaagaggaggagcagctcttagtgcgcgttggctctctgtgggcattttggtcacacttgggtgcctcagcagccaagcctcacctccatcttcctccacctcatccctcctgtgacaatagtgctgcctc

SEQ ID NO: 180156 - DNA, 591 bp, Homo sapiens
ttaattctcatagagagcataaaggggattgctattgtaatcctcattttacaaatgaggagactgaggcrtcaagaaactaacttacccaagatagcgcagataaaaagcagtcgagctgggactcaaactctaatcgtacctctgagccatgccccattaataaaataggcggacagctggaaagtcatttatacacatacacatttaaatactgagttaaactctctccttgagactcacatacactaccactttccctagcacttgtgccatcctctttcccaaactaatttagatgctgcttctttatttttctcttatacttctggatccacctcaatcctgatccccccacccctacccaagactgtgggccctgaagaacagataacatttttattaatctttgccacaccattgtctagcgaaatgcctgacacagcaatatttagtgaataaatgaataaatgattgaggctatatctgtctattaaatctatgggaatcaatctatactgttccatttctggaaagtaggcacagtgctttttatttttttataccctcctaaatgcttagtagctgtct

SEQ ID NO: 180157 - DNA, 591 bp, Homo sapiens
ttaattctcatagagagcataaaggggattgctattgtaatcctcattttacaaatgaggagactgaggcgtcaagaaactaacttacccaagatagcgcagataaaaagcagtcgagctgggactcaaactctaatcgtacctctgagccatgccccattaataaaataggcggacagctggaaagtcatttatacacatacamatttaaatactgagttaaactctctccttgagactcacatacactaccactttccctagcacttgtgccatcctctttcccaaactaatttagatgctgcttctttatttttctcttatacttctggatccacctcaatcctgatccccccacccctacccaagactgtgggccctgaagaacagataacatttttattaatctttgccacaccattgtctagcgaaatgcctgacacagcaatatttagtgaataaatgaataaatgattgaggctatatctgtctattaaatctatgggaatcaatctatactgttccatttctggaaagtaggcacagtgctttttatttttttataccctcctaaatgcttagtagctgtct

SEQ ID NO: 180158 - DNA, 591 bp, Homo sapiens
ttaattctcatagagagcataaaggggattgctattgtaatcctcattttacaaatgaggagactgaggcgtcaagaaactaacttacccaagatagcgcagataaaaagcagtcgagctgggactcaaactctaatcgtacctctgagccatgccccattaataaaataggcggacagctggaaagtcatttatacacatacacatttaaatactgagttaaactctctccttgagactcacatacactaccactttccctagcacttgtgccatcctcttycccaaactaatttagatgctgcttctttatttttctcttatacttctggatccacctcaatcctgatccccccacccctacccaagactgtgggccctgaagaacagataacatttttattaatctttgccacaccattgtctagcgaaatgcctgacacagcaatatttagtgaataaatgaataaatgattgaggctatatctgtctattaaatctatgggaatcaatctatactgttccatttctggaaagtaggcacagtgctttttatttttttataccctcctaaatgcttagtagctgtct

SEQ ID NO: 180159 - DNA, 418 bp, Homo sapiens
tctataatgaaaagtataaaacatggatgcaagaaattgaagaggacagcaagaaatgaaaaaaaaaatccacgttcatggactggaagaatcaacattgtcaaaatgtccgtactactcaaagcaatatacagtttcattgcaatccactttaaaagaccaatggcattcttcacrtaaatagagaaaacactcctaaaatttatatggaaccacaaaagacccagaatagccaaggcttttgtactagttcattttcacactaccgataaagacatacttgagactgggaagaaaaagagatttattgacttacagttccaagtggctggggaggcctcacaatcatggcagaaggttaaaggcaaggagaagcaagtcatatcttacatggatggtggcaagcaatgacagaact

SEQ ID NO: 180160 - DNA, 601 bp, Homo sapiens
ttttttcaaactgtctgttacagcaaaaaagaaaaatcaagaagtttttttgtttgtttgtttgtttgagatgttgtctggctctgtcgcccaggctggactgcagtggcgcgatctcagctcactgcaagctccgcctcccggtttcacgccattctcctgcctcrgcctcccaagtagctgggactacaggcgctcaccacaatgcccggctaattttttgtatttttagtagagactgggtttcaccgtgttagccaggatggtctcgatctcctgacctcgtggtccccccgcctcggccccccaaagtgctgggattacaggcgtgagccaccatgcccagctgaagtattttttaaaaaataatagaattaatctaaatatttgtcataaagagattgattaaataaatatggtacatcaaaatgaatgaagctatctgcaaattctgataaaaagttgtcaaatacatatcactgagagaaaaatttgaatgtgtaatcccatctgtgtaaggcagaacagaagcatctacacacacacacacacgcaaaagctttaaaagttgtggaaaaacaagaacaaattgataatagtt

SEQ ID NO: 180161 - DNA, 601 bp, Homo sapiens
ttttttcaaactgtctgttacagcaaaaaagaaaaatcaagaagtttttttgtttgtttgtttgtttgagatgttgtctggctctgtcgcccaggctggactgcagtggcgcgatctcagctcactgcaagctccgcctcccggtttcacgccattctcctgcctcggcctcccaagtagctgggactacaggcgctcaccacaatgcccggctaattttttgtatttttagtagagactgggtttcaccgtgttagccaggatggtctcgatctcctgacctcgtggtccccccgcctcggccccccaaagtgctgggattacaggcgtgagccaccatgcccagctgaagtattttttaaaaaataatagaattaatctaaatatttgtcataaagagattgattaaataaatatggtacatcaaaatgaatgaagcwatctgcaaattctgataaaaagttgtcaaatacatatcactgagagaaaaatttgaatgtgtaatcccatctgtgtaaggcagaacagaagcatctacacacacacacacacgcaaaagctttaaaagttgtggaaaaacaagaacaaattgataatagtt

SEQ ID NO: 180162 - DNA, 555 bp, Homo sapiens
tccaattaccattcagttatagctctccatattattccagactgtgaaacatggagcaagccaaggtgcataatagagaatctatgtaatgggattcaacagcaaaatagcagaaaatagtcacaaactttctttcagactttaaataatatcactaacctatctgggccaattttacctcatctataatatgggcctaataagaattaacatgctcacctactaggtttgctaggaagaataaaactaaaaaatggaataacttcctcacatgctttcactatgtccccacccaaatctcrtcttgaattgtagttcccataatcccgacatgtcatgggaggaaccaggttgagacagttgaatcatggggtcagtttctcctatcctattcttgtgggagtgagttctcatgagatctgatggttttattaggagctcttctccccatcactcatttttcttcttcctgccatcatgtgaataaggacatgtttgcgtccccattctgccatcattgtaagtttcctcaggcctccccagccatgtggaact

SEQ ID NO: 180163 - DNA, 626 bp, Homo sapiens
taattattttaataatttgaattaaaaaacagaatgagtttggcaatgagcagcagaaatgaagggaaaaggaggtgtagccaaatttatttgaaagtagaagttattagggagtcaagaggatctgcaagagcaaatgaaaaaatcaataggaagggagagaaccaaatgcacaacaaggaaagcagatatgctctgaaaaaaagaccaggtggtccatgaaagagggagacaccaatctttggatctgcctcaatttccagctattttcttgcccaaactctgcctttatttttaccacaaaaccttctttaggctgggcatggtggctcacatctstaatcccaacagtttgggaggctgaggcaagctgactgcttgagcccaggagtttgagaccagcctgggaaacatggcaaaaccccatctctacaacaaattagccagtggtgcactcctgtagtcttggctgcttgggaggctgtggtgtgaagatcactcgagcccagactgagctaaaataagccatgattgtgccactgcactccagcctgggtgacacagccagactctgtcacaaagaaaggcgcaaaagaaattaagagagagagacacagggaaggacg

SEQ ID NO: 180164 - DNA, 615 bp, Homo sapiens
tggtatatatatataccatagaatactactcagccataaaaggaataagatcatgtcttttgcagcaacatggatgaaactggaggccattatcttaaatggaataactcagaaacagaaagtaaaacactatatgttcttacttaaaattgtgagctaaataatgtatatatatggacatagagtgtggaataatggacactggagactcaraagggtgggagggttggggagtgaggaatgagaaagcacttagtgagtacaatgtataccagtttggtgatgactacactgaaagtccagacttcatcactgtgcaatatatccatgcaacaagactgcacttgtacccctaaatctatacaaatttttaaaatctatacatgtatcatgacatcacattataccccacaaatatacacattatttgtcaataaaaatgaaataaaaaattttaaaaagaatatacgcaagtaattcctttcacagattacaaaattttggaattataatgcaaagattaatggtggctaggcccaaaagaagatggagagtgttcagaacttgttagagaaagacatccacacgtctccagtgtactcccctgggcttttt

SEQ ID NO: 180165 - DNA, 480 bp, Homo sapiens
caattttataagacaaaccccaatcaatttggccctttaggcccattctcatttgaccatcaatagctcaagatgcatatgaaaatatgacctgcatagaaatcacattgcagtgccacaaactgacatatcmacattagaatccacactacatattactgtctgtttctgcctcgtatattaactatttattttacatggaagactcctgctgtcataagatacttaaaaactaaagcttagatgccaagtgttagtctaatttattgtttaagatagaagacatttctgtcataatgtatttataattattgattatccttgacataaatgggcccatgaaaaatcaatatctaactacttgtactgatgcctaaatgaatgcttttatttgactgatgaaaaaattaactccctaaatgatgagagttatctttgtctagctatccatatataactgataatttagaaataaagcaa

SEQ ID NO: 180166 - DNA, 379 bp, Homo sapiens
tatttgggtgggctctgttgacaacaggtctgctatcatacaacaaatacaaatgtgtttgatgagaaaagatattatcaaatcctatgctcatgaataagacagcatatgattgttatgcatagccataacctatacagctagaaccattcattcatccattcatcagttattcattcagttattcaaatatttaaacagagttgtacamaatcctctatgttggatgatctgtcaactgggtgcttctgcaagaaagatgatagcaggtagtcttggtgtgaccgcaacagccagagtgatcttttcaatatgtaaatcagttcatctcacttctgtgattaaatcccagtggcttctcataattcttagaataaaa

SEQ ID NO: 180167 - DNA, 381 bp, Homo sapiens
ggagtatttgggtgggctctgttgacaacaggtctgctatcatacaacaaatacaaatgtgtttgatgagaaaagatattatcaaatcctatgctcatgaataagacagcatatgattgttatgcatagccataacctatacagctagaaccattcattcatccattcatcagttattcattcagttattcaaatatttaaacagagttgtacacaatcctctakgttggatgatctgtcaactgggtgcttctgcaagaaagatgatagcaggtagtcttggtgtgaccgcaacagccagagtgatcttttcaatatgtaaatcagttcatctcacttctgtgattaaatcccagtggcttctcataattcttagaataa

SEQ ID NO: 180168 - DNA, 585 bp, Homo sapiens
tggcttctcataattcttagaataaaatccaaaccttctggcatagtatttgagatctccatgggctccctgatggcctcaccaagccggtctctaccactgtgcctctgcctgcttagctgcagtcacactcaacttttcrcttttcttcaaagaagttgagggtagctcagggtcttggtacatggtgttccttctcctggagctctgtacctttcactgtcttcaaagattgtttcctcacttcagtcagttctctgttcaagtgttacctccctggggaggcttctactaaccttcctatttaaaatagcaccatccactgcaacatgttccatgcttttattctgctttgttgttattccgcttggtagttattacttctcctgacattacatcatttatttgggtgtcacctgtcctccctgccctcctccaccagaatgtggagctttatgagggcagaaaccttgtctgttgtgttctctgctgtaggctcaacatcaagaacagtccctggcatgtaggaggctcataagcaaactatctgttaaatgagcacataaatgatgagaaggagtgatg

SEQ ID NO: 180169 - DNA, 585 bp, Homo sapiens
tggcttctcataattcttagaataaaatccaaaccttctggcatagtatttgagatctccatgggctccctgatggcctcaccaagccggtctctaccactgtgcctctgcctgcttagctgcagtcacactcaacttttcacttttcttcaaagaagttgagggtagctcagggtcttggtacatggtgttccttctcctggagctctgtacctttcactgtcttcaaagattgtttcctcacttcagtcagttctctgttcaagtgttacctccctggggaggcttctactaaccttcctatttaaaatagcaccatccactgcaacatgttccatgcttttattctgctttgttgttattccgcttggtagttattacttctcctgacattacatcatttatttgggtgtcacctgtcctccctgccctcctccaccagaatgtggagctttatgagggcagaaaccttgtctgttgtgttctctgctgtaggctcaacatcaagaacagtccctggcatgtaggaggctcataagcaaactatctgttaaatgagcamataaatgatgagaaggagtgatg

SEQ ID NO: 180170 - DNA, 475 bp, Homo sapiens
  misc_feature (1)...(475): n = A,T,C or G
nnnnnnnnnnnnngaactctttcatagaacagagggactccagcaacacaaaactgtagggtagatgcttagatttcgagcaagtggccatctgaaacgaatccactatcagagtcaggggagccacatggggggagggtatgaaagtctcaggagagagagacctgaatcctctcatcctattaattcyacctcctgagcagctgccacccagttatgctcacctgggggtggagtggaatggaaggcagagaagagaaatcaagccacttactaaatcctctttccctttgagcctgaaacaaagggaaggggagaacagttaaatattaaatgaaattcagggtttttgttaatctcttaaactatacatttaaatgatcatgattaatttttattttggtttaaattaactgagtttgtgacttaaaataatattaggacaatctattatctaggagtaagtacaacattg

SEQ ID NO: 180171 - DNA, 545 bp, Homo sapiens
tttggctttatcagtggtactcaactaggaatcattttaccttccagaggacatttggccctatgaggttgaagaggtgaagcagacattccattgacatctagtaggtagaggccacggtgctgctaaatacctgtattagtctgttctcacactgctaataaagacatacctgagactgggtaatttataaaggaaagacgtttaatggactcacagttttacatggctggggaggcctcataatcatggcagaaggcaaaggagaagtgaagcaaaggcacatcttacatggcagcaggcaagagagcatgtgcaggggaactcccctttataaaaccatcatatctcataagacttattcactatcacgagaacagcatakaaaaacccacccctttgattcaattactccccactgggtccctcccacaacacatggagattattacacttcaaggtgagacacacacaaactgtgtcagtaccctgcaatgcacaggacacctccaaattatctggcccaaaatgtgcatatagctgag

SEQ ID NO: 180172 - DNA, 545 bp, Homo sapiens
tttggctttatcagtggtactcaactaggaatcattttaccttccagaggacatttggccctatgaggttgaagaggtgaagcagacattccattgacatctagtaggtagaggccacggtgctgctaaatacctgtattagtctgttctcacactgctaataaagacatacctgagactgggtaatttataaaggaaagacgtttaatggactcacagttttacatggctggggaggcctcataatcatggcagaaggcaaaggagaagtgaagcaaaggcacatcttacatggcagcaggcaagagagcatgtgcaggggaactcccctttataaaaccatcatatctcataagacttattcactatcacgagaacagcatataaaaacccacccctttgattcaattactccccactgggtccctcccacaacacatggagattattacacttcaaggtgagacacacacaaactgtrtcagtaccctgcaatgcacaggacacctccaaattatctggcccaaaatgtgcatatagctgag

SEQ ID NO: 180173 - DNA, 364 bp, Homo sapiens
gtctaactgcagaaccggctcttaactgttacactgtcttgatgctttgctgcccctactataattttattgggcaatggtgggagtgcaggtacaaagtggctgaatccacagcacttyccatgaaatggaagaaaagtcagagggtttttcaaccagctaaggtaatgtttcgctttctgaaaaccctacacaacactgtatatatgtggaataacacctgcatgatcaactggggctgctctgtccctgagactgggagggaaagacagctggggcctgcgaaacacagcccaaccctttatgggatcctctcccgttctcacagactctgctgacttggcacctgttcctgccagcatat

SEQ ID NO: 180174 - DNA, 633 bp, Homo sapiens
tccaggtgacctaaaaggcaccaggtttccactatctgtctatgactcttgccccgctgatctgattctgaaaaacaggattcttctatccctcctccctgtttaccctggctgactttttgttggtttgtctccaaggggaggacatcctggtactacagctacagagaaaagacatgaggtgttcttggaaactagaactttgtcccacaaaaacgcttaaaggtatatgaaatcctcaagtgactgcagaaagtcccctttgttgaaggggccaggtaggcgaggaagtggcaaatattatcggaagtgacaaagaactatttttcctctttctgagccccaagtacagaaatatattgttttgcctcagctttacatcagcataaactttaatgaaaagtcaagaatccaggagaaatccaagaatttatgccactgtattcaaaagaatgtttcctgtgataggaaaaattccctgttattttcacaaatacctgggagtgmagaaggatgaagcaactcaatctaacagaagactgctaaaatcattagaaatcatttaatcttatttagaatcatccagaggtttgcatagttaatttttgttgatttgaaggcttacaaatattc

SEQ ID NO: 180175 - DNA, 624 bp, Homo sapiens
aatgttgttatcagcataaaataataggttataagatagtatttgcaagcttcatcataacctcaaaccaaaaattatacaatggagacacaaaaaataaaaagcaagaaactaaatcgtatcaccagagaaaagtcaccttcwctaaaggaagataggaaggaaagaaagaaggaagataagcccagaaaacacccaaaaaacaaataacaaaatggctggaatatgtccttacttatcactaataacattaaatataaatggactaaactgtttaatcaaaagacatagactggctgaatggatggaaaaacaagacccattgatctattgcctaaaaggaacactctaaacctatgcagacacatataggctgaaaataaagatatggaaaaagacatttcatgccaatggaaaccaaaaaagagcagaagctgccatacttatatcagaaaaagcagatttcagaaccaaatctataagaaaagacaaaggaggtaactatataatgataaaggggtcaattcagcaagataatataataattttaaatatataagaacccaacactggagcacccagatatataaagtacacattaccagaggtaaagagagagatatg

SEQ ID NO: 180176 - DNA, 624 bp, Homo sapiens
aatgttgttatcagcataaaataataggttataagatagtatttgcaagcttcatcataacctcaaaccaaaaattatacaatggagacacaaaaaataaaaagcaagaaactaaatcgtatcaccagagaaaagtcaccttctctaaaggaagataggaaggaaagaaagaaggaagataagmccagaaaacacccaaaaaacaaataacaaaatggctggaatatgtccttacttatcactaataacattaaatataaatggactaaactgtttaatcaaaagacatagactggctgaatggatggaaaaacaagacccattgatctattgcctaaaaggaacactctaaacctatgcagacacatataggctgaaaataaagatatggaaaaagacatttcatgccaatggaaaccaaaaaagagcagaagctgccatacttatatcagaaaaagcagatttcagaaccaaatctataagaaaagacaaaggaggtaactatataatgataaaggggtcaattcagcaagataatataataattttaaatatataagaacccaacactggagcacccagatatataaagtacacattaccagaggtaaagagagagatatg

SEQ ID NO: 180177 - DNA, 624 bp, Homo sapiens
aatgttgttatcagcataaaataataggttataagatagtatttgcaagcttcatcataacctcaaaccaaaaattatacaatggagacacaaaaaataaaaagcaagaaactaaatcgtatcaccagagaaaagtcaccttctctaaaggaagataggaaggaaagaaagaaggaagataagcccagaaaacamccaaaaaacaaataacaaaatggctggaatatgtccttacttatcactaataacattaaatataaatggactaaactgtttaatcaaaagacatagactggctgaatggatggaaaaacaagacccattgatctattgcctaaaaggaacactctaaacctatgcagacacatataggctgaaaataaagatatggaaaaagacatttcatgccaatggaaaccaaaaaagagcagaagctgccatacttatatcagaaaaagcagatttcagaaccaaatctataagaaaagacaaaggaggtaactatataatgataaaggggtcaattcagcaagataatataataattttaaatatataagaacccaacactggagcacccagatatataaagtacacattaccagaggtaaagagagagatatg

SEQ ID NO: 180178 - DNA, 624 bp, Homo sapiens
aatgttgttatcagcataaaataataggttataagatagtatttgcaagcttcatcataacctcaaaccaaaaattatacaatggagacacaaaaaataaaaagcaagaaactaaatcgtatcaccagagaaaagtcaccttctctaaaggaagataggaaggaaagaaagaaggaagataagcccagaaaacacccaaaaaacaaataacaaaatggctggaatatgtccttacttatcactaataacattaaatataaatggactaaactgtttaatcaaaagacatagactggctgaatggatggaaaaacaagacccattgatctattgcctaaaaggaacacwctaaacctatgcagacacatataggctgaaaataaagatatggaaaaagacatttcatgccaatggaaaccaaaaaagagcagaagctgccatacttatatcagaaaaagcagatttcagaaccaaatctataagaaaagacaaaggaggtaactatataatgataaaggggtcaattcagcaagataatataataattttaaatatataagaacccaacactggagcacccagatatataaagtacacattaccagaggtaaagagagagatatg

SEQ ID NO: 180179 - DNA, 397 bp, Homo sapiens
gtttctgtgacttcaaaaggaagttagcattttccttgcagaggtgctgaggattgaatgagagaatacctggaaagcattaggcatgtagcacacttagcagatggtggttggctccctctgcttttccrccagtctgtggcctacagtttaaatggtgggaagaaggacatgagatttgaggctggggaaggaggtatggggttctaggcaagggaggaagcctcttaggcctggagcaagggaccagggtcctgggcaggtgacagagccccacggtgccctcgctaccctattaatgggcccagaatctggaagccagccaccatgtgccctcatgcccagggtcttcctgcaggtggagctgaagagccaagagtctcagagtctgcagcag

SEQ ID NO: 180180 - DNA, 531 bp, Homo sapiens
aaggccaagaactggaaacagccttttccctattttctgtgtattggggatgggagtaataacattttggggagctttttaaatctcacagaagaggaaagtggcctgctctggcaggtgtgtgcaggatagagtgtgtttcatttgttctggtgccaagaatgagcgctgyactatggtagttcccttaggatttgtatgtgctctgggctcatgaagatattgcatcatgagctgcagcagttgtaccctttcttgatgacctaaaaagggattatttctgaggaatgaaaggctcccatcattgactgtggatgtggaaaaccttttctagcttagagcatttatatctacaatacattttaaagtcagagttcatgttacctgttttaatcacgagtatatgtcccagtacacaaaagggcactggttggcattcttcttaaggtatttagtgaagatcataagaaatcctttaagagtttaaatgtccctggaagaggcatacaggctctagtcaagaatgaattt

SEQ ID NO: 180181 - DNA, 364 bp, Homo sapiens
gaattcactatgctgcccaggctggtcttgaactcctgacttaaagtgatcctcccaccttggcttgccaaagtgttgggattacaggtgtgaactactgctcctggccgagggctcattttgtttgctagtggtgatattggtatctktttatatttgaggctttggtgctagtgctgaagtattacactcaccatccgaggtttgcaggacttttgttttaatattgaatagatggaactgtttacttctgcatctttgcaggcatacaaaatgtgcctaccaggactctgctttatatctattgaaagcaagaagtaatacagtaaaactttgcctggctagaggctttggaagaatggag

SEQ ID NO: 180182 - DNA, 364 bp, Homo sapiens
gaattcactatgctgcccaggctggtcttgaactcctgacttaaagtgatcctcccaccttggcttgccaaagtgttgggattacaggtgtgaactactgctcctggccgagggctcattttgtttgctagtggtgatattggtatctgtttatatttgaggctttggtgctagtgctgaagtattacactcaccatccgaggtttgcaggacttttgttttaatattgaatasatggaactgtttacttctgcatctttgcaggcatacaaaatgtgcctaccaggactctgctttatatctattgaaagcaagaagtaatacagtaaaactttgcctggctagaggctttggaagaatggag

SEQ ID NO: 180183 - DNA, 431 bp, Homo sapiens
tccgtgccttctcactctgtttcccgtccccttaggagcacctagaagctgccagccagcggaaccaacagctagagacccagctaagcctcgtggctctccctggagaaggtacaggagaccactcagaggaagaggagagagccccaggaggaaggggggactgttagcagcatakgattgaggggttggaagagacctttagaacagctggtcgttatgccaaccgggtgtccgcactaagttcagcatcaatatggtgacctcctgggagcagggggccaccaggttgcctaaggatgaatgaactggaccagatcagaaagggagcaggtcaggactcccgcaccgaccggtagtgggactgtgcctgggcaatatagcaagatcttggttcttaaaaggaaaaataaagaacagcagctcactcc

SEQ ID NO: 180184 - DNA, 508 bp, Homo sapiens
actctagaaagttgagagattccctggtccagtctgggggaggaaaaaatatgcagtgtagcatagatggttgtacttgtccactcagacacatgctcatacttattagatggatgtatcagatgcttcaaaagtcctgatgtgtaatagcacaaaagctgcttgtaaaaaggaagttgcaaaatgataaaaatttctgcagcagttcaggctcctgatgacaaagctggttctgataagtagttcttttgacatgcacagcagctttcactgtaagtcctgtgttccagcggtttcatttagaccataggaagttgaaagyaaagtttaaatgttctctgctgacaaaatgtggtatatatccatcaatggacttctactcagtaatgaaaggaacaaactaccaaaacctgttatatgtcatggaccaacctcaaaaaccttagctaagtaaaaagccagacatgtgaccacatattgtataattctattgatttgaaatgtccaa

SEQ ID NO: 180185 - DNA, 508 bp, Homo sapiens
actctagaaagttgagagattccctggtccagtctgggggaggaaaaaatatgcagtgtagcatagatggttgtacttgtccactcagacacatgctcatacttattagatggatgtatcagatgcttcaaaagtcctgatgtgtaatagcacaaaagctgcttgtaaaaaggaagttgcaaaatgataaaaatttctgcagcagttcaggctcctgatgacaaagctggttctgataagtagttcttttgacatgcacagcagctttcactgtaagtcctgtgttccagcggtttcatttagaccataggaagttgaaagcaaagtttaaatgttctctgctgacaaaatgtggtatatatccatcaatggacttctactcagtaatgaaaggaacaaactaccaaaacctgttatatgtcatggaccaacctcaaaaacmttagctaagtaaaaagccagacatgtgaccacatattgtataattctattgatttgaaatgtccaa

SEQ ID NO: 180186 - DNA, 596 bp, Homo sapiens
cctccaattaaaggagttaggaagagatgcttgaacttatgttttaaaaagtcaatgcaggttgggcacagtggctcgcacctgtacacacagcaccttgggaggctgaagtgggtgaacggctggagcctagaagtctgagaccaccctgggcaacatggcaaaaccccgtctgtacacaaaatacaataattagccaggcacggtggtgcctgtggtcccagctactcgggaggctgaggtgggaggtcgaggctgcagtgagctgagatccaccactccactgcagcctgggcgacagagtgacaccctgtcttaaaaaaaaaaaaawgtcactgttttggggttttctgggtgaaacctctgtttccataaaaaaagaaaaaggtcgagacagtgtgtattactgattcaaaatcataacctgatgcttagagtaaatcattgtatctattgtttcaaaaaccaacgtcaggattattaaaagttaattttattgggtttttctttaagcttggctgattcactcaggtctgtcacttccaagcccatgttttactactttgtaaccctatttggaaggaaaactgcggctc

SEQ ID NO: 180187 - DNA, 596 bp, Homo sapiens
cctccaattaaaggagttaggaagagatgcttgaacttatgttttaaaaagtcaatgcaggttgggcacagtggctcgcacctgtacacacagcaccttgggaggctgaagtgggtgaacggctggagcctagaagtctgagaccaccctgggcaacatggcaaaaccccgtctgtacacaaaatacaataattagccaggcacggtggtgcctgtggtcccagctactcgggaggctgaggtgggaggtcgaggctgcagtgagctgagatccaccactccactgcagcctgggcgacagagtgacaccctgtcttaaaaaaaaaaaaatgtcactgttttggrgttttctgggtgaaacctctgtttccataaaaaaagaaaaaggtcgagacagtgtgtattactgattcaaaatcataacctgatgcttagagtaaatcattgtatctattgtttcaaaaaccaacgtcaggattattaaaagttaattttattgggtttttctttaagcttggctgattcactcaggtctgtcacttccaagcccatgttttactactttgtaaccctatttggaaggaaaactgcggctc

SEQ ID NO: 180188 - DNA, 465 bp, Homo sapiens
atcagttttgtgagggaaaaaataccacatgaagaagagcaactgaagcaggcgtgaggaggaaacttggcttaagattggggggcttggggttattaggctttcatcttctmaaatgtcctaagctccactgataagaagacgcttagtatcaatccagctaaaaaggaacaatagaccccacaagacactgagttagagacaaaaatagcagggtaataaatgaaatatggaaaactacacaaccagaaaaataaacagctaccagtacccaaaacgtggttaaatctcacaggattatattgaatgaaagaagccagccacaaacgtgcacatactgaatgatcccatttatatgaagttccagaacaggcgaaactaattcatggtgacagaggtcaggatcctggttaactttgaggggacagcaactgagaaagggcaagagggagccctctgtgttga

SEQ ID NO: 180189 - DNA, 465 bp, Homo sapiens
atcagttttgtgagggaaaaaataccacatgaagaagagcaactgaagcaggcgtgaggaggaaacttggcttaagattggggggcttggggttattaggctttcatcttctcaaatgtcctaagctccaytgataagaagacgcttagtatcaatccagctaaaaaggaacaatagaccccacaagacactgagttagagacaaaaatagcagggtaataaatgaaatatggaaaactacacaaccagaaaaataaacagctaccagtacccaaaacgtggttaaatctcacaggattatattgaatgaaagaagccagccacaaacgtgcacatactgaatgatcccatttatatgaagttccagaacaggcgaaactaattcatggtgacagaggtcaggatcctggttaactttgaggggacagcaactgagaaagggcaagagggagccctctgtgttga

SEQ ID NO: 180190 - DNA, 465 bp, Homo sapiens
atcagttttgtgagggaaaaaataccacatgaagaagagcaactgaagcaggcgtgaggaggaaacttggcttaagattggggggcttggggttattaggctttcatcttctcaaatgtcctaagctccactgataagaagacgcttagtatcaatccagctaaaaaggaacaatagaccccacaagacactgagttagagacaaaaatagcagggtaataaatgaaatatggaaaactacacaaccagaaaaataaacagctaccagtacccaaaacgtggttaaatctcacaggattatattgaatgaaagaagccagccacaaacgtgcacatactgaatgrtcccatttatatgaagttccagaacaggcgaaactaattcatggtgacagaggtcaggatcctggttaactttgaggggacagcaactgagaaagggcaagagggagccctctgtgttga

SEQ ID NO: 180191 - DNA, 577 bp, Homo sapiens
cacttcacttcagggaggaagaggaaagcaggatattagagtggaaaaaagagaaaaaagagctgaatatgattctgggatgataaagtactcctgaaaactgcctcacgggctactcaggggcactaaggctcacctgcattcgccataatccatcctttctggtcatgcagggttttcaaggagggagcctgacttttaggaatgaggttagtaatccaatctgttgcagtctaggcaatgactgtatgtaaaactggcaactggcactattaaaagtggaaccagacagcatattagaagaggaaagaggaaaacgtggacatgtgggagctgcaggaggagagagttactgaagtgtgtgacatgtaggtcttctgtctgccaagtggagttcattaagtggcaagagtctatcrctttcagctcacaaatagctcacaaacagaaagatggcaatgacagtgcagttgtcactgttagaaatgacaagtctttgcaacactattcctccaattttaaaaaagtatcaaatcagacattgagataaatataattaaaatatgtgatatgaaaa

SEQ ID NO: 180192 - DNA, 600 bp, Homo sapiens
tggggctggaaggtaggtgtgaggtgggctagactcaaactcatctcaggagtcatgacaaattgaaaccatagggtggggtacccgggtgaatctaaatgcagcagccagacagcaagcatggctccaatagaatgaggttgtcatggaaacacacacagatccaaaggccagaacctggaatctaaaccaggtcagagtgagacagtgtctgaagccacagctggagctaaaggggtgcacacacagggcctgggcaggcagatttcctttgagtgcctggctgttgctctggckggctttgcagtggcccgctcactgtgcatggggagctctgcctctggagtgccttcaaggctctctcattcttctgacaagtaaagagcccttctacgacctccctttaccgagtttgctggccccttctcgaaatattcacaagaacgttctgagggaatggtttatctttaaacagtttaattataaatatgttttttcttatatgggactaaaacctgatcctgaatcaacagagtgtttcctctttctcctgggtatcagcccttaaacgtttcgtcacagagactggctggagaagac

SEQ ID NO: 180193 - DNA, 565 bp, Homo sapiens
accatttatttagtgtttttatattgctgtgcaacagggcaattttcaacacatccagataatcgaagaactatgactctcaagaactgtgaaaggattttaccctacttgcaagctaataagttagcctgccacagtttcatagatgctggcagaagacatgagactactgggtcagagacaaaggactttattactcacagcacagcaagaagcatgagattcatatttgtcagttccctttccaccctcaagtccttcaagggccatgcagaggggcccaggtgggtttatgtcacatctgatggaatacaagcattggaatccccaatcttttatcataagagttaacaaaccagcctgaactttgcggtggagggaggcattatctttattatactgggcaataaatctgctcgccgctacagagggaaacactatatctttcaaggctgttcactacacaaatattcttaaagagataatctggaataaaggctctctgtgctctgcccacagatgtgcaaaaacaagagacccacagaraggtggctcccaacagtga

SEQ ID NO: 180194 - DNA, 624 bp, Homo sapiens
tttttgcttctaaaagcttttaaaaagaaggaaaaaaaaaatcactccttgaagctgctttgtagctttgtaggcaagctggctggcaccagtaaagacaactgaagatgaggctcatatcagaggtagtatgagggatggaaaggaggtttcagacagattcactgacgtatgtctccaagacacccctcatcctctaggtctcyccagccaaagctgaggaagggttttgcgattgctgtagcgattcaggcaaaaacaaacatgaccatttatgcatgagctctgcaaagcagacctaaagtaatacagtcaaaagtatgtcaaaacttcataaaaatatagaaaatataaaattggttgcttggcagccttgttacctggaaacatcaatttgttttttctcccaggtaacatgacaaatttaggtttttcacttagagtcagaaaatgacaaattaaggatgatttccttgggcaagttctgctgtggcagaacccctcaattacaggaataaaccaggggtggctatgagaagcaggagtacaggaatcagcattccatgaacaaggactgtaacctccaggaagggcttctactggtggaaagccaacaaggacttg

SEQ ID NO: 180195 - DNA, 609 bp, Homo sapiens
ctttgctgcttagaaacttattctgccagataccctaaatcatctctcttaagttcaaagttccacagatctctagggctagagcaaaatgttgccagtcctttgctaaagaatagcaagggtgacctttactccagttcccagtaagttcctctttcccatctgagaccacctcagcctagacttcattgttaatatcactatgagcattttggtcaaaaccattcaacaagtctctaggaaattccaaactttcccacatcttcctaccttcttctgaaccctccaaactgttccaacctctgcccattactaagttcaaagttgcttccatatttatagcagtgccccactcccagtaccaattttctgtatttgtctgtttccaccctgctataaataactacccaacactgggtggtttattaaaaaaaaaaaaaaaaaaaraggtttaactgactcaaagttccacatggctgggaggcctcaggaaacttacaatcatggcagaaggaggagaagtaagtaccttcttgcaaggcagcaggagagagagagagagtgagggaggggggatgccaaaaacttttaaagcatcagatctcatga

SEQ ID NO: 180196 - DNA, 573 bp, Homo sapiens
tggctgatcggaacacagccttaaggctcctccccaccaaaggaaaaggggtttctttctccccctctctctcttttttcccctaaagacatttgattttcctaaaaactatgggcatgaaaataatttcctcctcctttttctttttccagagttttcacatctctaaatgtcccaggcaactcccatcagcaagccagccgagttccatgtaacacatttatttccatgttcctgaagcaacgctgagctgagaccagctctgcaaaggggcctataaagagctcactgcctacactctcattttccccagcttcctttctctctcgtccatgacttcaacatttccagagcgctgatgtctcaaaccttgggataaacaggtaggtgtggggaaccccctgcctccatcagaaagccccttcaaagagggagggctctggcagaraggtgtagcagacagcagggcaaggggggcagaggtgggttgtggctggaggcttgggcatgacaggaggagatggaagaggtagaaacaggtagagaaaggactggggttggcatggcacccag

SEQ ID NO: 180197 - DNA, 599 bp, Homo sapiens
ataaatatgtacattatgtgtccatttaaaacaatacaagcaaacaaatgtgaatttctaaactgagactamtgtaaggcctttctcctaatagcaagattgtaataaaacttcaactagtcataaaaaaaaatccttttctgtttctgctgcaagcaaggaaatgagaggatgcatttgagtaaccttgaggcagaagaccctaaacaggagtggaggtgtgatattgtttggctctgtccccacccgaatctcacatggaattttcagccccatgtgttggaggcgggtcctgctgggaggtgattgtatcacggggctggtttctaatggtttagccccacctcccaggtgctgtttctcacaaggtctcattgtttaaaagtgtgtagcacctcccccttcgctctgtctctcctgctgtcttgtgaagaagggacttgcttcctctttgccttccaccatgattgtaagtttcctgaggcctcccagccatgcttcctctgaagcctgcggaactgtgagtcaattaaacctctttttttcataaactacccagtctcaggtagttctttatagcaatgtgagaacagacaaat

SEQ ID NO: 180198 - DNA, 611 bp, Homo sapiens
gtgtgggagctgatgggtaccttggaggccgtgatgggcttgagacacgtctgtccaccatgagtgaagttgcaggagacctcratggtgtcagaggagcagccaaggtttggatccacccagtaggtacctgcaggcagcgtgggatggaggtgatgtatgtatctgggggatgagcccattccttggttctgtagatggaccctgcatcttgtgacctgccgagccccaggtgagcatgaagtcaggttgggtgagcagaaaagggattcctccaaccgagatggaaggaaaccttctgggcagagctcacaactggcagagcccccagaggaggggtcacatggctaagtacttgcctatgttgctactgggatgtatccattttacagagaagacaactgacattgagagaggctgggtcacttgcacaagggtttgggggatcacctagttgaatggattcttcgaggcctagggctcctcctagggcctgccgggggagggtaggagtcaggtctcccaccccatcagccagcgctgctgcttacatctagcttccccactgggcttctcaggaagccaaaacctttgcagctcaagagtggaac

SEQ ID NO: 180199 - DNA, 611 bp, Homo sapiens
gtgtgggagctgatgggtaccttggaggccgtgatgggcttgagacacgtctgtccaccatgagtgaagttgcaggagacctcgatggtgtcagaggagcagccaaggtttggatccacccagtaggtacctgcaggcagcgtgggatggaggtgatgtatgtatctgggggatgagcccattccttggttctgtagatggaccctgcatcttgtgacctgccgagccccaggtgagcatgaagtcaggktgggtgagcagaaaagggattcctccaaccgagatggaaggaaaccttctgggcagagctcacaactggcagagcccccagaggaggggtcacatggctaagtacttgcctatgttgctactgggatgtatccattttacagagaagacaactgacattgagagaggctgggtcacttgcacaagggtttgggggatcacctagttgaatggattcttcgaggcctagggctcctcctagggcctgccgggggagggtaggagtcaggtctcccaccccatcagccagcgctgctgcttacatctagcttccccactgggcttctcaggaagccaaaacctttgcagctcaagagtggaac

SEQ ID NO: 180200 - DNA, 535 bp, Homo sapiens
gaagacaactagcacagcagagaaatcacggctatccgtggggtcactggtctggatgcctgggtggaggcagccccaatagtaggggaatgtctatcacagggaggtgaacattgcaattttgcccactaccagtattgtcagagggcacacatcattataaatgtktgggaaggcctctaccattgttgcctgtgtcttgggaactcctccaatcattactatctgtagttcattcagagttgatgaaagactcaaagtaaaacaaacaatactctttaagaacggttaaggcacaatttgtaggccaaagctcccaagtgcctggcacctgaaaacggagcatcaaaaagcaagagattaaattgtgacctcatccaatgtgtggcgtgtcagtgacctcactgggcacccacacagacagctttcggtttacctccctgattctgataaatggaactgccagggaaatggcaggctcttgcaaatgtgatagcattctggctggagggatttggttttagtgctcatataa

SEQ ID NO: 180201 - DNA, 535 bp, Homo sapiens
gaagacaactagcacagcagagaaatcacggctatccgtggggtcactggtctggatgcctgggtggaggcagccccaatagtaggggaatgtctatcacagggaggtgaacattgcaattttgcccactaccagtattgtcagagggcacacatcattataaatgtgtgggaaggcctctaccattgttgcctgtktcttgggaactcctccaatcattactatctgtagttcattcagagttgatgaaagactcaaagtaaaacaaacaatactctttaagaacggttaaggcacaatttgtaggccaaagctcccaagtgcctggcacctgaaaacggagcatcaaaaagcaagagattaaattgtgacctcatccaatgtgtggcgtgtcagtgacctcactgggcacccacacagacagctttcggtttacctccctgattctgataaatggaactgccagggaaatggcaggctcttgcaaatgtgatagcattctggctggagggatttggttttagtgctcatataa

SEQ ID NO: 180202 - DNA, 610 bp, Homo sapiens
tcttgggaactcctccaatcattactatctgtagttcattcagagttgatgaaagactcaaagtaaaacaaacaatactctttaagaacggttaaggcacaatttgtaggccaaagctcccaagtgcctggcacctgaaaacggagcatcaaaaagcaagagattaaattgtgacctcatccaatgtktggcgtgtcagtgacctcactgggcacccacacagacagctttcggtttacctccctgattctgataaatggaactgccagggaaatggcaggctcttgcaaatgtgatagcattctggctggagggatttggttttagtgctcatataaatgtgaggaaagccttttacctcaagcttaaaaaacaaaggagcaattctggttgcctaaaagcgagaaatgctaccctgcttgcctcagactatgaaatagcaccactggcaaatttggcagctgttctgaggagagatgtgtggccagctctttaggctatcagtgtaatggtaactgcatattgatgtctgagaaaatcaaagaccccaggagcactttcagtttggaggagacacatatacacccacgctcatcttggataatttttg

SEQ ID NO: 180203 - DNA, 542 bp, Homo sapiens
gacctcatccaatgtgtggcgtgtcagtgacctcactgggcacccacacagacagctttcggtttacctccctgattctgataaatggaactgccagggaaatggcaggctcttgcaaatgtgatagcattctggctggagggatttggttttagtgctcatataaatgtgaggaaagccttttacctcaagcttaaaaaacaaaggagcaattctggttgcctaaaagcgagaaatgctaccctgcttgcctcagactatgaaatagcaccactggcaaatttggcagctgttctgaggagagatgtgtggccagctcttyaggctatcagtgtaatggtaactgcatattgatgtctgagaaaatcaaagaccccaggagcactttcagtttggaggagacacatatacacccacgctcatcttggataatttttgaaaggatgcccttgggtcttggggagacattctggctatatattctagaggagaatcatattcatgagagggcactctcaaggatctgatgacctgtgggtagg

SEQ ID NO: 180204 - DNA, 618 bp, Homo sapiens
tggagctgggcacgcagcaggggctgggcacacggtggcccaaaggagacccgggccttcactgatgggctttgtggccccggacacacctaggactcctcacctgtaagacaggcaccattgtgccatcccatgttctcacccagaggctctttttctcttccagagggaggccgagaacatgttgctcacctgctgttccttagggacaccaagaccttgatgtttggttcctacctggacgatgagaagaactgggggctgtctttctatggtaggcatgcttagcagccccaaactcatgcccctctcaggcctcaccccccattcacccacccctgggctggcccctagaaccccagccctccctggcctcccgccgggccccaccatgtccccagtcagtctccttgctccccctgcagctgacaagccagaaacgaccaaggagcaactgggagagttctacgaagctctcgactgcttgtgcattcccaggtcagatgtcatgtacaccgaytggaaaaaggtaaacgcaagggattggacagtgcccaccttgtccatggcccaacttgggcagccccagaggcccagagcaggagagctgccaggcaa

SEQ ID NO: 180205 - DNA, 449 bp, Homo sapiens
ggctaatttgagtgcactgaatggatctccttgtctctctcccacggactacatgctgcttacaggyagctctgtcttcctcacatctgtatccccagagcttagccaatacatgtttactagatgaatttcttttccacttttcattaaccaaagatatatataaccactgagaaaaaatgttataataacagatataattcaaacaataacctttgctattctatttttcttatacttgaaagaagtctgaaaatagcgattacttaatcttttacattctgctaagggtgtggaattgctgcagctgagacaattccctctctaggtggtgaggcccacaagagcggggggcccttttgcatcctctgtgcctggctgacacagtagcttcctaatgaatgttcattaaatgaattacgaactcaactataaaaatatgaatacca

SEQ ID NO: 180206 - DNA, 458 bp, Homo sapiens
atacttgcaaatatgtcagtagtacccaaagcactctacagatttaatgcaatccttttcaaaatcccaatgatctttttttgcagaaatagaaaaatccatcctaaaattcatatggaatttcaaaggaccctgaataaccagaacaatcttgtaaagaagaacaacaaaacttactacaaagatacagtaatcaaaacagtgccgtactggcataaagacaggcttayggaccaaggaagagaccagaaaggacagaaataaagcctcacatatacagggaaatgattttttacaagggtgccaagaccattcaatggggaaaggagagtcttttcaacaaatgatgctgagaaaactggctgtccactaacaaaagaatgaaactggacccttacctaacgccatgtatggaaattaactcgaaatgggtcaaagacccaaatgtcagagctaaa

SEQ ID NO: 180207 - DNA, 622 bp, Homo sapiens
acatctgtatgcctttcaaagagacatggaggtcgtggaagcctgtgtgtgatctaacctttgactgttgtattcttgtgttgtttctgctgttcctgcacttgatcctttgctataataatccataggcatgagtataactttatgttgagttatgagtactttcagcaaagtaycaaactagctaaggctcatgagcccccctgaaacagatattgtaatttttcatctcagcaagtttgatttggttcttcttaccatctcccatttctctcattatgtttatgtttccatgcaaacacttgaacatagttttaatagtggctttaacatccttgttagttccatcatatctgtcacttctgtgtctgtttctactcactgatttttcttctggctatgggtcacattttcctccttcttagcatgtgcattaatttttttaaccaaatattggacattatggttgtcatattgttgaatgttttgctgttttcctttgaagagcgttatgctttcccttgcaggccattacttttggatcatcgtggttccatcaagcctagggtttttcaattttatctaggacagatagctttcactccagataaaccctaatact

SEQ ID NO: 180208 - DNA, 635 bp, Homo sapiens
tcttgttgctccacattctcaccaacgtttagtattgtcagtctaaatgtagccacttttatgggtgtgttgttgtattttactgtatttttaatttgaatttctctatacttaatgatgttaagcatctttttatrttgctatttttgctaaatgcacacttttattggcaaacatgaaacatctgctcaaatcttttacccattttttattgggttccttgtcttcttattgttgactggtaaggattctctacataatccaaatacaagccctttgttggatctatattttataaatattttgctcctagtctgtggcttgcctttttctttcataaaagctctcaatgactttttcaaaatgttgatgaagtacatttatcattattttattctatagttcataatttctgtatgttatctaataaatctttgtctacaccaagatcatgaaggttttctcctatgttttcttctagaagttacaaacatactttgaaaacattgggaacttggttccagaccaccacaataaagtaagtatcacaataaagggagtcacatgaattttttggtttccaagtgcatataaaagttatgtttatactatcctgtagtctgttaagtatataa

SEQ ID NO: 180209 - DNA, 384 bp, Homo sapiens
tcctgcctggtaagaatgtctgtctaactgggtgccctgggccacttccacagtctgtgctaaccctgtggtggaggcctcgggcacacagcgccagctcagcctctggagggctggagactaaggccagccaatccacacaactgagacccaacaaaactccagacagtgagtctcaggtgggcttccctggggggcaatggtctctgggtgctgtcacatgctgggagaagttggcactgttcacacctccatgagaggacacttgaagcrtcacactaggaactctcatgggccctgccttgcctgggccccttttccctcagctggctttaatctgtgtccttttgctgcaataagccttagccgtgagtacaacagcta

SEQ ID NO: 180210 - DNA, 383 bp, Homo sapiens
agtgagcttgaagacaggttgaaagaaacttcccaaagtgaaatgcaaagagaaaaaagaaatgaggaaataaaaagagatcatccaagaatgaggaagaatttcaaaggctgtaacatawgtgtaattgaactaccagaagaaaaaggagaatggagcagaagaaatatttgaagtaataatgcctgagaattctacaaaattaatgacagctaccaaactagagatctaggaagcttggggaacaccaagcaggataaatatcccaacaacaaaaaactacacctaggcatgtcatattcaaactgtagaatttaaaaagaaaatctgaaaaaagccagagggaaaaatcaccttatctatggaggaataggaataaaaat

SEQ ID NO: 180211 - DNA, 383 bp, Homo sapiens
agtgagcttgaagacaggttgaaagaaacttcccaaagtgaaatgcaaagagaaaaaagaaatgaggaaataaaaagagatcatccaagaatgaggaagaatttcaaaggctgtaacatatgtgtaattgaactaccrgaagaaaaaggagaatggagcagaagaaatatttgaagtaataatgcctgagaattctacaaaattaatgacagctaccaaactagagatctaggaagcttggggaacaccaagcaggataaatatcccaacaacaaaaaactacacctaggcatgtcatattcaaactgtagaatttaaaaagaaaatctgaaaaaagccagagggaaaaatcaccttatctatggaggaataggaataaaaat

SEQ ID NO: 180212 - DNA, 383 bp, Homo sapiens
agtgagcttgaagacaggttgaaagaaacttcccaaagtgaaatgcaaagagaaaaaagaaatgaggaaataaaaagagatcatccaagaatgaggaagaatttcaaaggctgtaacatatgtgtaattgaactaccagaagamaaaggagaatggagcagaagaaatatttgaagtaataatgcctgagaattctacaaaattaatgacagctaccaaactagagatctaggaagcttggggaacaccaagcaggataaatatcccaacaacaaaaaactacacctaggcatgtcatattcaaactgtagaatttaaaaagaaaatctgaaaaaagccagagggaaaaatcaccttatctatggaggaataggaataaaaat

SEQ ID NO: 180213 - DNA, 464 bp, Homo sapiens
gggcgcggcgcataggagcaggagcgcggcgcccagacaggcggccgccagcacgcgccgccggcagcagcgcctccccatgctgtgccgggcgcgcggcgggaggacagtccgctggatacggctgggggcggagttgcactggcccaggacccggccccggcagcgcagcgcctaccaagacgcgcggcgcggcgcagggcaggggagcacggcagctggaccccagccccaccagcccctgcgagtcgctggggactgaggaggcgggacacggtggggccgcaagcccgstcctcttttcgtgcccccaccctcacccaatggaatggggccgaagtccagggcgctagggcggagactgattggggaagcccctcgcctctgggccccgcccctagggtttgcccaggggtgccattatccacccaaggccaagaggcattgtcgcggtggcgtgcccc

SEQ ID NO: 180214 - DNA, 464 bp, Homo sapiens
gggcgcggcgcataggagcaggagcgcggcgcccagacaggcggccgccagcacgcgccgccggcagcagcgcctccccatgctgtgccgggcgcgcggcgggaggacagtccgctggatacggctgggggcggagttgcactggcccaggacccggccccggcagcgcagcgcctaccaagacgcgcggcgcggcgcagggcaggggagcacggcagctggaccccagccccaccagcccctgcgagtcgctggggactgaggaggcgggacacggtggggccgcaagcccgctcctcttttcgtgcccccaccctcacccaatggaatggggccgaagtccagggcgctagggcggagactgattggggaagcccctcgccyctgggccccgcccctagggtttgcccaggggtgccattatccacccaaggccaagaggcattgtcgcggtggcgtgcccc

SEQ ID NO: 180215 - DNA, 588 bp, Homo sapiens
tcatctctctaacctccacagcagccagcataggrtttcacattgagtaagtgctcaaaattacgtatgtaattacatagacaggactgaactatataacatgaaatgtacacctccacttcaaagaacaggagttttcaagtagctgatgaattctaccattttaaataaacagaagcatatttcatgctaacactgttgatgaaggagcaagcctttcttttggatcattccagtggattttgcattgccctgtgcttagctaatctaattctgagaatacagtgtcactgttggatgttgaaatggagccatttggggaagctgaacggaaaacctcccagtaggaattattgaggcacctgttgaattacccataataaatgataccggccaactcacagcataatctcctcacacaccctgtaccctgaccattctctccctgcttgaacttgttggatgactttcaagagtgtttggaaattaaatatatccagtagcctccaaaaagtatcaagggacaactttaaaagtgacattgaaccatagataatgatatttctttataaaggtctttaaaagaac

SEQ ID NO: 180216 - DNA, 661 bp, Homo sapiens
aaagtttggaaatacagacaagtacaaatttacctataatttcaccctccagagatgacatctgctgwttttttagtatatttcattttaaccttcttttatctatgcctttatttacctaatttggaatagtctgcttgcaacgttttataccccattttcccataccgttacaaattttgaaaacttaatttaaatgtctatataatattctatcatattgatgaaccatcctttatttgccaatttccttattagacatttaggttgtggtcaattttttcactattataaacattactgtaatgaggattttttatagttatgtctacatgtcaccatgcttatgtatctgattatttttctttgatgtattggaagaatttaaattactatccaaagggtataaaatgtctaaaattattgccaaattgctgtcagaaaggtttatcctttctagtcttgtcagcagagaatgctggatttgtcatacctacactaacattaattgtatttttcaatatttacaaattcaactagagtgtatggagctctggttttacttttacagatgtctttgatcattagtgaacttaaacattttaatatatttactggcaactttttattcctttttctctgaattatctgtttacgtttt

SEQ ID NO: 180217 - DNA, 661 bp, Homo sapiens
aaagtttggaaatacagacaagtacaaatttacctataatttcaccctccagagatgacatctgctgattttttagtatatttcattttaaccttcttttatctatgcctttatttacctaatttggaatagtctgcttgcaamgttttataccccattttcccataccgttacaaattttgaaaacttaatttaaatgtctatataatattctatcatattgatgaaccatcctttatttgccaatttccttattagacatttaggttgtggtcaattttttcactattataaacattactgtaatgaggattttttatagttatgtctacatgtcaccatgcttatgtatctgattatttttctttgatgtattggaagaatttaaattactatccaaagggtataaaatgtctaaaattattgccaaattgctgtcagaaaggtttatcctttctagtcttgtcagcagagaatgctggatttgtcatacctacactaacattaattgtatttttcaatatttacaaattcaactagagtgtatggagctctggttttacttttacagatgtctttgatcattagtgaacttaaacattttaatatatttactggcaactttttattcctttttctctgaattatctgtttacgtttt

SEQ ID NO: 180218 - DNA, 661 bp, Homo sapiens
aaagtttggaaatacagacaagtacaaatttacctataatttcaccctccagagatgacatctgctgattttttagtatatttcattttaaccttcttttatctatgcctttatttacctaatttggaatagtctgcttgcaacgttttataccccattttcccayaccgttacaaattttgaaaacttaatttaaatgtctatataatattctatcatattgatgaaccatcctttatttgccaatttccttattagacatttaggttgtggtcaattttttcactattataaacattactgtaatgaggattttttatagttatgtctacatgtcaccatgcttatgtatctgattatttttctttgatgtattggaagaatttaaattactatccaaagggtataaaatgtctaaaattattgccaaattgctgtcagaaaggtttatcctttctagtcttgtcagcagagaatgctggatttgtcatacctacactaacattaattgtatttttcaatatttacaaattcaactagagtgtatggagctctggttttacttttacagatgtctttgatcattagtgaacttaaacattttaatatatttactggcaactttttattcctttttctctgaattatctgtttacgtttt

SEQ ID NO: 180219 - DNA, 661 bp, Homo sapiens
aaagtttggaaatacagacaagtacaaatttacctataatttcaccctccagagatgacatctgctgattttttagtatatttcattttaaccttcttttatctatgcctttatttacctaatttggaatagtctgcttgcaacgttttataccccattttcccataccgttacaaattttgaaaacttaatttaaatgtctatataatattctatcatattgatgaaccatcctttatttgccaatttccttattagacatttaggttgtggtcaattttttcactattataaacattactgtaatgaggattttttatagttatgtctacatgtcaccatgcttatgtatctgattatttttctttgatgtattggaagaatttaaattactatccaaagggtataaaatgtctaaaattattgccaaattgctgtcagaaaggtttatcctttctagtcttgtcagcagagaatgcyggatttgtcatacctacactaacattaattgtatttttcaatatttacaaattcaactagagtgtatggagctctggttttacttttacagatgtctttgatcattagtgaacttaaacattttaatatatttactggcaactttttattcctttttctctgaattatctgtttacgtttt

SEQ ID NO: 180220 - DNA, 263 bp, Homo sapiens
tagcttccctgcctcttttgggtagcgttccttacccaaacctctttatctgttcttctaggccctccaggatccttcctgcccttttggcccccttgcttgcctgtcttccctgtgcttcctgtgtgtgggacactgagtatcttgcagttctcaaagtgttccaggatgtctcgtcayagctttgtgcacgcatggattctagagccagactacctgggtttaaaattcatacccaccacttaagtagctgtgagactgag

SEQ ID NO: 180221 - DNA, 215 bp, Homo sapiens
agtttgagggtcatgcagttgaggacttcgggaggagctgatgttgttcgygttgagggtctttcagctggagactcagggaggagctgacaatcttgactgaggttcatggagctggagactcaggcaggagctgatgttctagctagtggatcttccagctgcagaccaagagaggagctgatgttctaattttaggttcttgcagctgcaga

SEQ ID NO: 180222 - DNA, 215 bp, Homo sapiens
agtttgagggtcatgcagttgaggacttcgggaggagctgatgttgttcgtgttgagggtctttcagctggagactcagggaggagctgacaatcttgactgaggttcatgsagctggagactcaggcaggagctgatgttctagctagtggatcttccagctgcagaccaagagaggagctgatgttctaattttaggttcttgcagctgcaga

SEQ ID NO: 180223 - DNA, 391 bp, Homo sapiens
ctaatagtccctgatatgcggaaataatggcataagctgtctttctctctgtctcctctccctctctgcctcggctgccaggcagggaagggccccctgtccagtggacacgtgacccacgtgaccttacctatcattgsaggtgactcacattctttaccctgccccttctgccttgtatccaataaataacagcgcagccagacattcggggcactactgttctccgcgcattggtggtagtggtcccccaggcccagctgccctttctcttatctctttgtcttgtgtctttatttctacaacactctctcgtcgccgcacacagggagagacccaccgaccctgtggggctggtccctgcagggttataggcatgagccaccatgcc

SEQ ID NO: 180224 - DNA, 394 bp, Homo sapiens
ctaatagtccctgatatgcggaaataatggcataagctgtctttctctctgtctcctctccctctctgcctcggctgccaggcagggaagggccccctgtccagtggacacgtgacccacgtgaccttacctatcattggaggtgactcrcattctttaccctgccccttctgccttgtatccaataaataacagcgcagccagacattcggggcactactgttctccgcgcattggtggtagtggtcccccaggcccagctgccctttctcttatctctttgtcttgtgtctttatttctacaacactctctcgtcgccgcacacagggagagacccaccgaccctgtggggctggtccctgcagggttataggcatgagccaccatgcccgg

SEQ ID NO: 180225 - DNA, 395 bp, Homo sapiens
ctaatagtccctgatatgcggaaataatggcataagctgtctttctctctgtctcctctccctctctgcctcggctgccaggcagggaagggccccctgtccagtggacacgtgacccacgtgaccttacctatcattggaggtgactcacattctttaccctgccccttctgccttgtatccaataaataacagcgcagccagacattcggggcactacygttctccgcgcattggtggtagtggtcccccaggcccagctgccctttctcttatctctttgtcttgtgtctttatttctacaacactctctcgtcgccgcacacagggagagacccaccgaccctgtggggctggtccctgcagggttataggcatgagccaccatgcccggc

SEQ ID NO: 180226 - DNA, 394 bp, Homo sapiens
ctaatagtccctgatatgcggaaataatggcataagctgtctttctctctgtctcctctccctctctgcctcggctgccaggcagggaagggccccctgtccagtggacacgtgacccacgtgaccttacctatcattggaggtgactcacattctttaccctgccccttctgccttgtatccaataaataacagcgcagccagacattcggggcactactgttctccgygcattggtggtagtggtcccccaggcccagctgccctttctcttatctctttgtcttgtgtctttatttctacaacactctctcgtcgccgcacacagggagagacccaccgaccctgtggggctggtccctgcagggttataggcatgagccaccatgcccgg

SEQ ID NO: 180227 - DNA, 414 bp, Homo sapiens
attagtaaaaatactaatagtccctgatatgcggaaataatggcataagctgtctttctctctgtctcctctccctctctgcctcggctgccaggcagggaagggccccctgtccagtggacacgtgacccacgtgaccttacctatcattggaggtgactcacattctttaccctgccccttctgccttgtatccaataaataacagcgcagccagacattcggggcactactgttctccgcgcattggtggtagtggycccccaggcccagctgccctttctcttatctctttgtcttgtgtctttatttctacaacactctctcgtcgccgcacacagggagagacccaccgaccctgtggggctggtccctgcagggttataggcatgagccaccatgcccggcctgctt

SEQ ID NO: 180228 - DNA, 405 bp, Homo sapiens
gtaaattagtaaaaatactaatagtccctgatatgcggaaataatggcataagctgtctttctctctgtctcctctccctctctgcctcggctgccaggcagggaagggccccctgtccagtggacacgtgacccacgtgaccttacctatcattggaggtgactcacattctttaccctgccccttctgccttgtatccaataaataacagcgcagccagacattcggggcactactgttctccgcgcattggtggtagtggtcccccrggcccagctgccctttctcttatctctttgtcttgtgtctttatttctacaacactctctcgtcgccgcacacagggagagacccaccgaccctgtggggctggtccctgcagggttataggcatgagccaccat

SEQ ID NO: 180229 - DNA, 394 bp, Homo sapiens
ctaatagtccctgatatgcggaaataatggcataagctgtctttctctctgtctcctctccctctctgcctcggctgccaggcagggaagggccccctgtccagtggacacgtgacccacgtgaccttacctatcattggaggtgactcacattctttaccctgccccttctgccttgtatccaataaataacagcgcagccagacattcggggcactactgttctccgcgcattggtggtagtggtcccccaggcccagctgccctttctcttatctctttgtcttrtgtctttatttctacaacactctctcgtcgccgcacacagggagagacccaccgaccctgtggggctggtccctgcagggttataggcatgagccaccatgcccgg

SEQ ID NO: 180230 - DNA, 395 bp, Homo sapiens
ctaatagtccctgatatgcggaaataatggcataagctgtctttctctctgtctcctctccctctctgcctcggctgccaggcagggaagggccccctgtccagtggacacgtgacccacgtgaccttacctatcattggaggtgactcacattctttaccctgccccttctgccttgtatccaataaataacagcgcagccagacattcggggcactactgttctccgcgcattggtggtagtggtcccccaggcccagctgccctttctcttatctctttgtcttgtgtctttatttctacaacactctctcrtcgccgcacacagggagagacccaccgaccctgtggggctggtccctgcagggttataggcatgagccaccatgcccggc

SEQ ID NO: 180231 - DNA, 239 bp, Homo sapiens
aatatgtatgtgtgtttgtatgtttttcagggagtgttgacatttagggatgtggccwtagaattctctctggaggagtggcaatgcctggacaccgcacagcagaattatataggaatgtgatgttagagaactacagaaacctggtcttcgtgggtgaggataacttcaatatacaattccctaatataccctataaattttatttctcttttttgtagaatggtttttggtaattt

SEQ ID NO: 180232 - DNA, 552 bp, Homo sapiens
gcagttcttataccaaatttaaatatcccataagctttatattatggaatataaaacatagcaatcatattaacmcaaaattggagactatcttaaatgatgcccctaacttttggcttagccaaatgatttcctttggccaatgaaatgtcggtagaagtgacatgccacttctaaaaagaggtcaggagttcaagaccagcctggccaagatggtgaaaccgcatctttacttaaaaaaaaaaaaaaaaaaattagccaggcttggtggcaggcgcctgtaatcccagctacttgggaggctaaggcagagaactgcttgaacccggaggcagacgttgcagtgagccaagatcacgccactgcactccagcctgggcaacagagcaagactccatctcaaaaaaaaaaaaaaaattagtgtgtgtgatgcaacttggaaacacggtgtctatggtgtacatgtaaaaaggctaacaggtaagacacagactttaaaaaggaatagaaaacatcagtcaaaatttctgcacttccacatggattgaattc

SEQ ID NO: 180233 - DNA, 502 bp, Homo sapiens
gcacttgcaatgcttcctatgggttgaggcaggaacagttttcttgtaagcgtacccaagatggtgcagaagctggctgtctgcctcaatctcactttttccagagtagaaaccataagtctgagaagaattttccatgtgtaatccctggcagattgggagaggggcgtcacggagagagacgtcactttctcttactctctgctcggagttttgcacttctttgtggccctggggatcatctcagcctcatatttgagttctaggayattgctggtgataatctggatgctggatatttagttttttgatgggaagagtggagccagaatgcttctactccattacttttgtgacattactcctcctgagtagaggtctactacagtgaaccacttcaaataagcaggaacattagataataaagtattgggatttgcaattacaggaaaccttggtattataattgtattaattaactgtaaatcttgaacaaatctcc

SEQ ID NO: 180234 - DNA, 563 bp, Homo sapiens
gaattccagtgcttcgtttcaaccactgtttgcttttatatatttcatcaatgactgctgattaaaatgtattctctccttacaggyattttgcccatcagcaagtagatgaagggaaaatgtgtagggagcgcttaacgattttctggagatggagggggaaatggtgggtggaaggcatgagccaggggcaagtggcatgccataaacacagcttgagggactggaacccttccttccccagcatgaggagcccagctttcacgcagtctcagtctgagtgcagagactgctccttctttcccatcctctcagccctacccaccctagaactagctacccacatgccaggggcctgggccaatttggacatctgggggccattctggttgtcacaaaaactgggaagtagcgctggcatttctcagacttccctaggtcactctgtcaatagcctttgctaggtgacacaaatgccaagtgatttccctaaatgaggggctctggtaaacagaattggaaaacatagcttaggtctaaggccacagcagggccttttacct

SEQ ID NO: 180235 - DNA, 545 bp, Homo sapiens
cttcgtttcaaccactgtttgcttttatatatttcatcaatgactgctgattaaaatgtattctctccttacaggcattttgcccatcagcaagtagatgaagggaaaatgtgtagggagcgcttaacgattttctggagatggagggggaaatggtgggtggaaggcatgagccaggggcaagtggcatgccataaacacagcttgagggactggaamccttccttccccagcatgaggagcccagctttcacgcagtctcagtctgagtgcagagactgctccttctttcccatcctctcagccctacccaccctagaactagctacccacatgccaggggcctgggccaatttggacatctgggggccattctggttgtcacaaaaactgggaagtagcgctggcatttctcagacttccctaggtcactctgtcaatagcctttgctaggtgacacaaatgccaagtgatttccctaaatgaggggctctggtaaacagaattggaaaacatagcttaggtctaaggccacagcagggcct

SEQ ID NO: 180236 - DNA, 558 bp, Homo sapiens
ttgcttttatatatttcatcaatgactgctgattaaaatgtattctctccttacaggcattttgcccatcagcaagtagatgaagggaaaatgtgtagggagcgcttaacgattttctggagatggagggggaaatggtgggtggaaggcatgagccaggggcaagtggcatgccataaacacagcttgagggactggaacccttccttccccagcatgaggagcccagctttcacgcagtctcagtctgagtgcagagactgctccttctttcccatcctctcagccctacccaccctagaactagctacccacatgccaggggcctgggccaatttggacatctgggggycattctggttgtcacaaaaactgggaagtagcgctggcatttctcagacttccctaggtcactctgtcaatagcctttgctaggtgacacaaatgccaagtgatttccctaaatgaggggctctggtaaacagaattggaaaacatagcttaggtctaaggccacagcagggccttttacctgaatctgctatgtcctggaattca

SEQ ID NO: 180237 - DNA, 589 bp, Homo sapiens
gtttttatttttgataacattttcatacacaaataaccctagatttaaagagatttaagagaatagttagaaatatatttttctattctcttacattttgtaagtattttaaaaaactatttttctgttattctatatttatttagttcttttttttttttttttttttttgctatgtgtcattggggttttaccagtctaraattctagaattggtttgtaaaatagctacttagtttggaaattctttatagacaatatacatttggactatttgctaataagtaatatattttgctaataattgacatatagtatatatactggttcatttctaaccagtatgagtgtgtttgtatatatttatatatagctatgtctccctctgttgcatgcaatcataaatttattttggcttttcagaatctatgttatttgatttatttattcacttattaatctttaatttctttggcaactaattcaaaatttccagagccttttctttatgctgtagtcttaattgcaaatgttgacctggtttaccacaatgcttctgaccttatacccaccttaagtttcaggcatt

SEQ ID NO: 180238 - DNA, 409 bp, Homo sapiens
tgtaacttccataattcccacatgtcctgggaggaacacagtgagaggtaaataaatcagagtggtgggtttttcttgtgctgtcctcctgagcgtgaataagtatcacaaggtctgatggttttacaaagggcagttctcctggacatgctctcttccctgccatcatgtaagacgtgcctttgctcctcctttgctttttgctatgattgtgaggcctccccagccatgtggaactgtgagtccattaaacctctttttccttataaattacccagtcttgggtatttctttataacagtatgaaaatggactaatacagcgcccataaagggagttttcctagtgtcagttttgtggtctcatccttatragcagcccatcctgaatcctctctcagtgtgtactg

SEQ ID NO: 180239 - DNA, 439 bp, Homo sapiens
tacctgaaaaaaatacaacaacaacaattaatataatcctaatatcatgagccaaatggtagctccaaccagtcaacgattatgttagagtgtgccccatcacaccttaaatccttaaatccagatcattcaggtgaagtctttaggtagacactttaagtatgcaggagacctattttcttttactggaaaaagaagtaatttaggcagcttcgctttacatcacccattgtctgcaccaagcctgagagaagttgtttagagtattgctggggtctgagtgktcctgcctctcctaaatttatctgttgaaacctaattaccaatatgatgccattagaaggtgaggccattgagaggtaattagctcatgaggctggagccctcaagaatgagatgagtgctcttaaaggggctccagaaagccacgttgccccct

SEQ ID NO: 180240 - DNA, 456 bp, Homo sapiens
cctacttagtgggttcaaatcaataaattcagcctgacccaactctatgttccttccaccattatcccataaccttaatatccattctgatgcctgttctccaggtttctgtttacataaattaacagttcttttcaagtgtagcatgcaacctcacctcaagggacctgccaggactttagttagataactagaagcaaacaggggttttgggggtggttcctggggagaatcaacattattttgcctggtaactgccccagggaaggccctcactgttgcctcaggcagcacagggttatctcctcagacaaaggtgtaaaggctgatggcagcatgggtctaggaggggatgttgccactacaggggacggtgaagctgttccttcaggcaaataaggttcatcagagtttacaaactcagtgrccccagtttcatcagggtcttcccatact

SEQ ID NO: 180241 - DNA, 581 bp, Homo sapiens
aaaattatagtttattttttgggggaagggagagttaaactttaacccaacttattggtgataaagaaaagtaattatttatttgagaactaggccatggatcctgccaaattatttgtctattattgttacattactgatgcctatagaattttccaaatttattcctattttttctttctctctgatatagcccttatctcaacaatactttttgaaaataatttcagttggatgatggaaggaattgtatagaaatgaacagattgtgtaagaattaatgggaaagtcaaggtagacttattaggcagttatgattaataaggatgccttcattattttagaaagaattgaataaaatatcaaaattaaacccagacccagtgtatatatatcttaaaacaggttctaagaaatggataccttgacaatactctcacatctgtattcacttctatttaaaacagttctgtttamatttttaagatttttaaatacaagatagtagaaaatattgaacattttccctagattaatatactcaaagacaggtatgcttcatggccaatagtcaaattatg

SEQ ID NO: 180242 - DNA, 569 bp, Homo sapiens
gaattctctctctctgccagatattcttcaagtttaaatactgatcttctcctgctttttcactcagagttgggcaggaacttaaaacatcagctctcccagttttcgggcatttggactagaactggaaatatactattggctctcttggctccccagcttgccaacttcaaatcttggacttggcttccataattatgtgagccaattacttacagtaaatctgtatcttttttttttctgtctctcttcacacacacgtgtgtgtgtatatacatatttatgccataaactatatccatatcatattggttctgtttctgtggagaacccagactaaaataaagagygatattatactgctttcattttctagcagttattttattttagaaagccagaaacatatgaggtaaatgacttgttttctgttcacaccgtatattggcttctggtttacatggttttttaaaaaatttaagttatagaaggccaaatatctatttcaacatagaaataacaatgtactgagttctatgaatgcaagatctttatatttgcaaataagt

SEQ ID NO: 180243 - DNA, 304 bp, Homo sapiens
agcaaagaggaaaacagaaatccatgctaggacagatgttgaatggaactagagtggtagcagtggatgaagtcagatatagtcagtttctggttatgttgtgagggcagagccaatggatttgctggtattttgaatgtgcggtgtaaaggaaaggaagaaattaaagatcatgctaaagattatgacytgagcaactctaagtatggaattgcctttatcagaaaaaggaaaaataggggatagagcaagtttggagggtaaaattggccgtacagttttggacatggtagctttagacaac

SEQ ID NO: 180244 - DNA, 440 bp, Homo sapiens
gttggatggtcaagaggatttgacataatcttgagatgtggtctctgtctcattatwcagtcttcctcttgacctcggatataggagggagaaggccaacaggagcatgatctcaattcattttgttgaggaatggagcttacaccacatgtggaggcgccaccttaacacttttgattagactggcagctctggggaagctgagcatcccactgtgctggccgcgtttaactcctggcgacagctgtaaaaggcctcggggtgtgtggtcagaataaacagtgaccacctatgctgcattcagccaagtgtagcccaccgattagacgatgggacagcatgcactgtttgcatgcaccctgaggttcctctttggagaacactcatgccgaggaaagaaggagtcaggtaaaatcagctaggtgccatagcaaagcagg

SEQ ID NO: 180245 - DNA, 618 bp, Homo sapiens
attgtaagcttatttgtcgttatgatgcttgagaatatagaaccaycatatcagccattacagtaattacaaaagaaggtcacatcacaaccacggcatttgttacccgttgtataaaccactgcaaggtgaatgtgagtttttccacagagtttgcctgcaagaaaaaccatgtatttcttccttatcagcaagctactgtctaaacaatttaatgttttcacattaccatcaataataaaacagctaatgtttattgtacctttatacaataatccattattacctcatttaatcattacaacaaccacatgaagcatcccctttttacaaacaggaaaacagaggtaaaaagagatagagtaacttgaccaaaccaatccccgttaataagtgttgaagtttaatttcagattttcctagctagtcacctcaagaaattaatcacatttgatacggttgtttacaattcaaaatttgaatgccatcagttccaactttattttaatggccaactttatctttcccccagctagttaagctgatttttcacatatgtaaatgacttctattaaaattcagtttgtactcttttctcagacttctatatttaatatc

SEQ ID NO: 180246 - DNA, 601 bp, Homo sapiens
tgtggctaatatggaatcatttctgcttgatgaaaggggtgggttagctgtgtagtgatggctttgatatgactcacttctggggmcctactgtcctcttccaattattagaatcgttcaggaggaatgcttggtactaggctgtataatgagtccacaccaagataatgtattcacaagcattactggtggtggcttgggtagtccaggttttttcttctatcatactttgcacctctgatttcattttcttcctatttgtgcttgttttgcttatccaaactcatggcctccttccctaatctaaatcagtgtcttatgcacatctgtgtcttctgaggaagggtaactcagatttagagttttagcgagagatctatttggtggggtatagtagctaactgccctccaactccaccccagctgctagatgccaatccatttctaacctacctgaggctgtgatgcagctaaagcctccctaggcagaggagtaggagcttcataccagtcttgagagatcccaagctactgaaaatcttaaggggagccacctcaatccctggagcttagttggcttcatattgcctcaaattccagg

SEQ ID NO: 180247 - DNA, 404 bp, Homo sapiens
tctcagatgcatttgtttggacttagaaatatatgcagtcctttgtgtctacattttctacgtacattgttgccttttgtgtctttgttctctatgtactttttggcatgtactctccacgscataatttgtaaatgccctggtcttgcggtcctatagggcagtagatatgcttcatttatcagatcaaacaatcttagtaatggtgattttaggaataaaataccaaacaaagaatccctccattttagtgacttcaatgcctcaaatagatttgaagttctggaacaggcctaagtgcttctcagtcttctccaagttctctggagggaagagggatcaagtcagctgaatatagtcagaaaatatatgttgacagttttctccggagatgcactatatgg

SEQ ID NO: 180248 - DNA, 573 bp, Homo sapiens
gccttgaatatagaggatatagaatggcagaagaatgagcacagaacctttggaaacatcagaaagaaaatttgcaaagccaaataatggataatgaagattacttaggaagaagaagaagagctgagaaagtgacatgatgaaaaccaaagaaaaaatgtcaataaaaaggaatggtcaacagtgtaaaatacacaggagagaacatgtaatataaatccaaaaagtacctgccgcatttgacaactgggtcactggtaatctctgtaagagakgctttcatgtagtactatagtatgaagccacattgcagagaattgaggagcagcagagagacgaaaaagtcaagacagctgatgggaaaaatactttgaagatgtctggctgaaaaggaagaaggtgtcatgttaggagagggatttttaagaagaaatagaaaggcacttatataccaagagaaacaattagtgaagaggaaaaaaaagatatagaatgaaatgagaatcatttgtggacaagctcttagagaaaaaagaagtgtattagccagcttgggctactaacaaaaatcca

SEQ ID NO: 180249 - DNA, 591 bp, Homo sapiens
agttgcagtgacacatgttaggctgtgctctgaatcaccattccttctgataactgtttgttctccttggaccaacttcttggcctccactctcatttccttctgttctttctggtaattctatccctgaaaagtccttagaccttcaagttaacagccctgtcaggctggccccacgttactctgggcaaacaggctcacctctgacttctaggacaactgctctttgggctacagctggrattcttgctatgctaatggaggacagtcagaaaccatgacacttctgctctgatttggcttctagcttctttgtcaaaaaaaaaaagagcttctggaattggtgggataaatctcactcagagggaattaaaacccaaggtaagtgaagagatcatgagatattacctagctgttcagaatcagttatggaccctggctccgatgcatcacaaacttcttttgtgaaaatctgcagataaaatgaccatgatcagtaaccagcgaggaacctcagagaaccacaggagaggtgctagggatagccagtcccacttctaaccagggaaaagaaaaataacctacaaatga

SEQ ID NO: 180250 - DNA, 647 bp, Homo sapiens
acaggatttctctcaaagacaaggctattataaaccaagtagctcctttgctgcaacaagtgaatgattctaaatatattcaacttctagcttttaagataagattttaaaagtaaaagtgttattttattatgcatcactcaattttgatggtaattattgtttaccttactgcttagagtttcagatgttaatctaatgaaaagaatttactggtaactaggtttttaactttgcaatgatgaaaagcctgtattaatttaacctacagatttcatttgttctgaacaggaaaaacaatataaatcacttttaaaatcattaaatcctgacttaaattaataaagtcataattagggcattatgctgtgtttgttatggaagtggcagggmgagctgctttaattactgtctgtaataaaaggagcagagagcgtactgcgccccaatcagtgctgtcagccacgactgagccgggctgcaagctcatcaagtgagcgggcagcaggctcccggggaaaggaccatcatgtcggcagaggccactcgctgacagcagcggggaaaacagagttgcacaatccaagatattagacccaattactcaaaattttaatgacactttaatacatgataatgttattgat

SEQ ID NO: 180251 - DNA, 583 bp, Homo sapiens
tttgatatataatttataaaaatgacgaggtaagaaaatagctataaacagaggcacagcttcatctttaaaattagtacttttaaaaccaatgtatgtctcaattgataagatttgtaatgcagaaagtcacagtattgtctcatttatcctataaactgtagaaagtgggtcttgattttaccttcaatccatttcattgaggctagcattaacctagtattgacctagaataggatttaaaaaagtaaacggcaaatttggttaactcttacatataagcacagactcgaagaaatatatttgaatcttccagcaaatattacttcaaataaatggtttttaatactaaagataacttcttccttatgtatataaattttgatatacaaatttatgataatttctcatattttattttagtaatcactatacattataaagcacacaagactttctcacctcttattttggtaataatatatattaaaaatatatttgtggaaatacktgaacacataatgaacaaatatttaatgagcatcttatttcatgctcggtattaagcaggcaccagcaaacc

SEQ ID NO: 180252 - DNA, 623 bp, Homo sapiens
tggtaatttttttgtcattatttttaaaaataagctttctattcctttatctttctttgctccttttgagaatcccacartggatatgttggtcaattgatggtgtttcataagttccataggctttcttcactgtttttcattctttttcactttgttcctcgactgaataatttcaaatgacatgaatttagttagctgattctttcttctgcttggtcaattctgctgttgaaactgttgtattttttagttgagtcatcgtattcttcagcttcagagtttctgtttggttctttattattattatttttttgttaaagaaaatttttcgtgtattgttttcttgatttctgtagttgcttatctgtgctctcttatagctcactgaactttttttgttatactttttttttacaattcaaactttattctttaaatcaaaaaagtaaaggaaaattacaacattaaatcctagaataaaatatttgatgattatacatacaaaatagcataattaaaaaattcttagtaaaagggaaaaattctgcaaatatactaatcaacaaaaacattagaagtatttcaataaagttaaaagagggagtggactggcctctcac

SEQ ID NO: 180253 - DNA, 394 bp, Homo sapiens
taacattcattttctttgtgatatttagtacatgtaagttttacacagcttgatactacataaaaatagcatttcaataagcatatattttaaacaacaaagttctgcagaattttatttatctaaagaatttagaaataattacatttgaaaaataataactgacttgttttaatgatcatcatagttaaatataacaggttttaaaattacatcaaggagagtagaaaaaattcattttaaaygattaactgttttgataaactttcaactatttaagagcatgttttatttataaacataaaaaacttttaatattagttcatgtttatagatacatgtcatgagacaaaaatatgaaatacaatgtaagtaatcttccaaacatgtaaag

SEQ ID NO: 180254 - DNA, 394 bp, Homo sapiens
taacattcattttctttgtgatatttagtacatgtaagttttacacagcttgatactacataaaaatagcatttcaataagcatatattttaaacaacaaagttctgcagaattttatttatctaaagaatttagaaataattacatttgaaaaataataactgacttgttttaatgatcatcatagttaaatataacaggttttaaaattacatcaaggagagtagaaaaaattcattttaaatgattaactrttttgataaactttcaactatttaagagcatgttttatttataaacataaaaaacttttaatattagttcatgtttatagatacatgtcatgagacaaaaatatgaaatacaatgtaagtaatcttccaaacatgtaaag

SEQ ID NO: 180255 - DNA, 578 bp, Homo sapiens
ttgctgttttgcagccttcgctggtgcacaactccaggtgtgggaggaactgaggcaacaataagctggartggatccccagcaaacaacagcagccctatggaaaagtggcctgactgttaaaaggggggaaaacaacaacatcaacaaaaagagacctcattaaaaccccattcaaaggttagcaacctcaaatatcgaaagtaggtaagcccacaaagatgagaaagaatcaaagcaaaacccctgaaaactaagaaagccagagtgcctcttctcctccaagtgaccacagcacctctccagcaagggcacagaactgggttgaggctgagatggttgaattggcaggagtaggattcagaaggtgggtataacaaatttcactgagccaaaggagaatgttctaacccattgcaaagaagctaagaatcatgataaaacaatacaggagctgataagcagaatagccagtttagagaggaacataactgacctgatggagctgaaaaacacacatgaaaacctcacaatgcaatcacaagtatcaatagtagaatagaccaagtggaggaaaa

SEQ ID NO: 180256 - DNA, 510 bp, Homo sapiens
aaccattcacaatagcaagtcaaggaatcaacctaagtgtccatcaacaatggattggataaagaaatgtggtacataaacatcatggaatactacgcagcaataaaaaagaatcaaatcatgtcctctgtggcaacatggatgaaggtggaggccatcatcctaagtgaattaatgcagaaacagaaaatcaaagactgcatgttctcatttgtgaaagctgracaatgggtacacatggacgtaaagatggaaacaataaacactgggaactccaatagaggggagagggagaagggggcaagagttgaaaaactgcctgctgggcactgtgtttacttaatttgggtgatgagttcactagaagcccaaaccccagcatcacccaatatattcatgtaacaaacctgcacatgtacaccctggatctaaaatttaaaaaagaacaatattcaattatgtatgaagggccttagactaaagggcaaaatttccatgaacagggggata

SEQ ID NO: 180257 - DNA, 551 bp, Homo sapiens
tactgggacaatggctgctatgatctgrttttaaaaaattaggctaattatgcagaaaagcattctcacatgggtgaatccagagccctttcccagaggtgacattttttagaaatgtccttaataaagacagacatggaactgaagagtcaacagggataaaaagaggagggaggatcacaataaagactcctttggcacttgctgggtacagagtagtctcagagtaaataatgaaatcaataaatgaatgtaaaaaaatctatcaaataatacaagccaattgggtgctacttgtttcatggaaaacatactcatagcctaacactttttcttggattactttcccacttagtgaaggagctctttctttacacccaccctcatccaggagcagtagctgccaacaagcagatacatgtttgtgcaggatggaagtagtgataagttgttgacttgaataacaaaaaagaaaataaacagaatactattcagctactagctgactaaagcatataatagcaagcctgtcctctttagaggtgtctagc

SEQ ID NO: 180258 - DNA, 408 bp, Homo sapiens
gtgaattcatctggggctggaattttgtcaggtgattgtaagaaaaggattttgggattttgacaagacagtgattgaaactgcagaccatgaaatctcagcttgactaggagggaggtcaagcaagaggaggccagtgagcaagagaaagtagatgggtcaagggactggctattttgataaagtggrcacttacttgtagaaaaagtacatgaatagtcaacttttaaaataaggagttatgattgaatcacaagtttatttaattagagatttttgaaggttctgaggttctggcaaacctctggacatgacaaggtataagatgtgaaaatggaactgaatgactcagctggagagatgtttgaataacagaggtcatagaatagagaggctgtgtgctaagca

SEQ ID NO: 180259 - DNA, 501 bp, Homo sapiens
tgaagcatgaccagaaaggtgtccttggcagtggccaaggaaaataggcatttgaggcagggaggaattaggtggctcttagggctgtgaagaaggtggagccagttaggacagtgtgctctgagtcttttgtgctcaattgtgtgctggcagggaggactagtwgctatgctctgcaaatgcacatttcttttttgcaagcacggatctcatacaggcttaaagcctgtacctgtcaagggatgctttcaggaaactgatctttgttttattcaatctcaaacaaaatactcagcaaagtgttaagattgttttgcactggttgctataagtcagtctccagaacaatcaggtaagagatgattaatccaaacctctcatttattagatgagaaaactgaggccctaagaatggtccagaccatatcaatattttttcatagagctgggtctgcagctcagatctcctctctcttgccctctctccactctaaatatcca
